United States Patent Application Publication US 2006/0134663 A1 - sequence listing, part 60

SEQ ID NO: 148158 - DNA, 844 bp, Homo Sapiens
  misc_feature (526)..(526): n is a, c, g, or t
  misc_feature (594)..(594): n is a, c, g, or t
gagtgcaggtaatttattaggcacttgctcccaggcaaaaacggtcaggggtgggaggatgaaagggaagaaaccaaaagttgcagaagcattgtcctcgcagctaacatggccgcgtgcaaacgtgccaaccagcaagatgttggcatcgccctctcagctaacatggctacctgtggaagtgccagccagcaggatgtcggcatggccctcgcagctaacatggacacgtgcgaacgtgccaagccagcaggatgtcagcatcctccttggagctgacatggccacgtgcgaacgtgccagccagcagtagtcggcatggtgctgagcaccctccgggaaccgtccctacctgaaataatgggtgtgatgtacggagcacacgcagccaccctgcagcatgagatgactgttgagtacaggacacgcagaacgaagtccgtgtgtccctggaaaacattcaccgagtggatggaggggtccctgaaatcccagaggcggaaagtcgtgtcacgggaggaggtcnccacgagccgctgggtggggtgtgtgcagcagtgcgtcaactcctggtcgtgccactagtgtcagcancaggctggggtgtcggcagctgcaccgcgtatctccagatatgagcagtctgatctccagaagcagtgagagccaactgctctgagggatgaaatttgatagaatttactgagcccacgtggcctgcgtacttgactaggcacttccctgtctctatgctccacagcaaagccgtgtgatcggctgatgcagtcccgagcaccactggctgtgtcttggccacgctcctcgtgccgcctcgtgccgaatt

SEQ ID NO: 148159 - DNA, 534 bp, Homo Sapiens
  misc_feature (17)..(17): n is a, c, g, or t
  misc_feature (27)..(27): n is a, c, g, or t
  misc_feature (446)..(456): n is a, c, g, or t
tgaagcagggccccagnaacgcccagnaattgaactgatggtggcttgtatttgctactcttgccataagattgtacctactgaccttctgtgatacatcagtgttttcaaagttctggtccatgcatgcagccccacttggatattttatgttgactcttgtatattttgttctttctagaaaaagagacccaggtgtttcagggcattgggctattccatttcagagcctaatggaagtgctagtgttttcataattggaacagacaactgccatgctacatatggtgctgtgaccactgagcagcttgttcacaatgagaaaatacattgaagttgtgaccatttgagccttgaagaaactgctgttgaagttttgtttggctccagctccatcctggaatggatggagtcatttggaattattctgaattccagtagtggcnnnnnnnnnnnttgtgtaacttgtatatagatggttttctgtttgattaacagcattgttcaataaaagatgcattgttttaaatcaag

SEQ ID NO: 148160 - DNA, 529 bp, Homo Sapiens
tctcgccagggaaaatctgaggccacacaggagagaatatacagcctgcagagagtgcgtggcaatccttactcccagccgactgtgcgccaagatgcttctaaacccatcacctgctgtcttcactcaaatgatttcagaacaggatttgcgaccaggtttatggggagattgaatcaacgattggtctcaaagacagtccattctttatatacatgtttagcatttttaccaacctcacatcatgtgtatatttgtgtatttgcacatggttgtgctgtcgaggacctggtgctgagaagagtctgttcacagccaaaattcttcccactgtcattcctaacctgggatttctagacacatcctgctgtgatgtaaacagaaatcacgaattcgctcactggatcaagttgttccactggtgtctaatacgctattgttgccggaggtgggttctgtgacgtgaagccatttcccatcattcaacagccagttacaattttctgtttaattaaattcatatttaaac

SEQ ID NO: 148161 - DNA, 610 bp, Homo Sapiens
  misc_feature (567)..(567): n is a, c, g, or t
  misc_feature (574)..(574): n is a, c, g, or t
gaatttggcttatacttttatttcaacatggaataactgtttattttatggagaaagacacctccaatatttctcagtagtctgtgatctctgaggacaggtgcccatttggtttcagcatcttctccaatcccacaacactttcagcagatccttggagaaatcaacaccctcatttaccccttgcagatttgcaatgaactcctgacaggtcatcttctttccaatattgtggccatgtagatcggtattaagaagcattattgcacaggtaaggcaatggactccatcttgtgaagcaatggtatctgggttacaataaaaatatctattggagaagtgtattaaaactctctctcgttcttgagtttctcccacaagagagaatgctttaaagaaatacctgagtgactgatccagcgtcattcctgtaaaatcaaaaaacttcagatattcttctgcaactagtttgctaaattcgttgttcttgccaaggtgttttgcaacatctgatcttttgaatctgtccagctgataaaggcgtttggccaaccttttggctgcttncacattngctgctggtaccattactgagattttctgggtctcc

SEQ ID NO: 148162 - DNA, 869 bp, Homo Sapiens
  misc_feature (36)..(36): n is a, c, g, or t
  misc_feature (40)..(40): n is a, c, g, or t
  misc_feature (473)..(487): n is a, c, g, or t
agtctgggcatgatggtgaagaatataaaggcaaanagcnccattcaaaagacaataactttaaagattaaaggaacatcagcctacacaggtgagaaagtgcgagtgcaataactccagccactctgaaagcaagagtgtcttcatacctccaaatgatcacactagctccccagccatggttctcaaccagactgaaatgactgaaataacatagaattcagaatctcaatgtcaaggaagctcattgagatacagaaggttgaaactcaatccacagaaaacagtaaaatggttcaagagttgagagaggacatattcattttaagagagaaccaaactgaacttctgaaatgaaaaattagcacaggaacttcataatgtaattggaagcattaatatcagaatagaccaagctaaggaaagaatctcagaactcaaagaccattcttttgaatcaatacaagcagatnnnnnnnnnnnnnnntaattttaagaaaatgaacaaaacctctaagaaatatggaattatgtaaaagagaccaaactcattggattcttgaaagagattgagagagagcaagtaactttggaaacatatttaaggatattgtccacgaaaattttcccaacatctctagagacgtcaacgcacaagttcaggaaattcagagaacccctgtaagatattatgcaagatgaccatccccaagccacattgtcatcagattccccaaagtcaatgtgaaagaaaaaatcttaaaggcagctagagagaaggggcaggtcatgtacaagggctaacagtggacctcttagcagaaaccttacaggccagaaaaggttgggggcctatattaagcatcatt

SEQ ID NO: 148163 - DNA, 868 bp, Homo Sapiens
  misc_feature (596)..(608): n is a, c, g, or t
gccaagcgcagatgtaaaaaagcactggtcggggatgttttctgtcccagggcagctcccacatgtgtggtggaccagacccaataatgcctactgtgtgacctgtaatcggatttgcccagagcctgcttcctctgagcaatatctctgtgggaatgatggagtcacctactccagtgcctgccacctgagaaaggctacctgcctgctgggcagatctattggattagcctatgagggaaagtgtatcaaagcaaagtcctgtgaagatatccagtgcactggtgggaaaaaatgtttatgggatttcaaggttgggagaggccggtgttccctctgtgatgagctgtgccctgacagtaagtcggatgagcctgtctgtgccagtgacaatgccacttatgccagcgagtgtgccatgaaggaagctgcctgctcctcaggtgtgctactggaagtaaagcactccggatcttgcaactgaatctgcccgtaaaacctgagccattgattcttcagaactttctgcagtttttgacttcatagattatgctttaaaaaaatttttttaacttattgcataacagcagatgccnnnnnnnnnnnnngcatctcactgcaagtcacataaaaatgcaacgctgtaatatggctgtatcagagggctttgaaaacatacactgagctgcttctgcgctgttgttgtccgtatttaaacaacagctcccctgtattcccccatctagccatttcggaagacaccgaggaagaggaggaagatgaagaccaggactacagctttcctatatcttctattctagagtggtaaactctctataagtgttcagtgttgacatagcctttgtgc

SEQ ID NO: 148164 - DNA, 487 bp, Homo Sapiens
cagagcctgcttcctctgagcaatatctctgtgggaatgatggagtcacctactccagtgcctgccacctgagaaaggctacctgcctgctgggcagatctattggattagcctatgagggaaagtgtatcacaaagtcctgtgaagatatccagtgcactggtgggaaaaaatgtttatgggatttcaaggttgggagaggccggtgttccctctgtgatgagctgtgccctgacagtaagtcggatgagcctgtctgtgccagtgacaatgccacttatgccagcgagtgtgccatgaaggaagctgcctgctcctcaggtgtgctactggaagtaaagcactccggatcttgcaactccatttcggaagacaccgaggaagaggaggaagatgaagaccaggacttacagctttcctatatcttcctattcttagagttggtaaactctctataagtgttcagtgttgacatagcctttgtgca

SEQ ID NO: 148165 - DNA, 461 bp, Homo Sapiens
ttttaatgtaatattttataaactgaatgagccattttcacacatgcacttgctcctttaaaatacatactgtcctgagttttaacaaatgttgtctggtagttattctgtaataatattccaggccaatcttggagaagcagatttggttatccctagtatgatttcaaagatgtgtagtctgtttaaaaaactggttgaaatttgtgccacattgattacatttccaagttttctctcaagtagggataatttggtaaaggctgaagacacactactgcttccaggtcctttcatgttcagcatacttacaggatttttctcctttatacgttcaatcaaactgcaaaggcgtggacattggttttgtctcactttaagttctgggtccatgtgcacaatttgcaaatttgttacataggaaaatgtgtgccatggtggtttgctgcatttaccaaccc

SEQ ID NO: 148166 - DNA, 366 bp, Homo Sapiens
ttttttgtggaacagttaacgtttactgacccttgtgccagtagccatgctaagtgctttgcatatattatcaactcatttaatcttcatagacaaccgatggtgtggttattattttacccattttataaaggaagaaagtaaggcacagagagatgaagtaacttgccccaaggtggcacagcttctaagtgtcagagtcaacatttgaacctagtcagtcatatttcaggggcagtggacctgatggctacactgagcgacagatgcttcatctcatagagacagctgcagtggagggggacgcagtgcaccctgctgaaggatggacctatgggcaggggtccctgttgctcaggtccaaat

SEQ ID NO: 148167 - DNA, 442 bp, Homo Sapiens
ttttttctggttagctcaaacatttatgtatgagggtaggatgaatcactccagaacctcaatatatgtggtgaggaattattctaagggaaatctcttttgaatcttgacgagcactaatattcaatgcctgttgaggagacttcttttaattaaactttttgttgcataaaggtcattccatccagatggtatttccatttctcagaaggccctggagcatgcctatgacattcatgtcagtgcctgtctggctaaggcactgacctcttccatttctgaggtcatctcactcacagccaactgttcagagactcatctgggcttctggggatgggtgaatgcctgtagaccccagggattccacccagtgctgggctctgagtaaccaggtggcttgggtcaggccagccagccccagcccagcactgagcctctggct

SEQ ID NO: 148168 - DNA, 410 bp, Homo Sapiens
ttttttcagtctaaaactgttctcatttatttacttattaaatacagaaaaatccctttagaatcagggataagaggaaaggtctttgtgtttctcaaagttcatccaagtgtactatttgtttcttccccatggaattgtcatatcagctttaggaaagatgatgaaagaaaagaaatgggcccagagggacctaaggaaaccaggccaaacttgctgttcacgtggacccttacagggagaatggaaggcaaaagcagagaactgggtccaattttctttctcagtgctatctgtgcagtggtcagatgtggcactcacaaccaaaaggcttttgaaacagcactggtgagtcctgacctaccttcttcaaatttctagtctcataggaagaaggcttgtgaaatctg

SEQ ID NO: 148169 - DNA, 950 bp, Homo Sapiens
  misc_feature (508)..(508): n is a, c, g, or t
  misc_feature (540)..(540): n is a, c, g, or t
  misc_feature (571)..(571): n is a, c, g, or t
  misc_feature (588)..(588): n is a, c, g, or t
  misc_feature (594)..(594): n is a, c, g, or t
  misc_feature (725)..(725): n is a, c, g, or t
  misc_feature (775)..(775): n is a, c, g, or t
  misc_feature (787)..(787): n is a, c, g, or t
ttttgaatgtccactattttattttgtgtcacaaaaaaacaacttggggaaatattttatctagttaaaatgattttcaatggtaatggatatttcagtttgaagatgcttttataaatactaattagttaatactctcagattttataagattgtattacaataaacatcaaccaccttttgttttgtttttaaccactgattcatcatcttataatgtcagagttgtgcttcttaaacagggctgccagatggctgcaatatgacagtcacctaaaactccacaagaatgtcatctacagactaaaattatagagaaattgggaaagcagatgacaggttattaggaagtcttgtttttacaaatgtgttaatctggaagctttgctaagtttacattgtagccccaattcctggaaggaatacctgacttattgcctgtgcatatggaggagtggtagccaataatgataacttggatttgtgaagcacagagactgtagcatcncctgctttgaaagatttttaaaaatattttgntgccatttgaatttagatatgattggcttanatgcctaggtcaatgcnctgtgnaaatccaaagccttactcaagatttctgtagactgttcatgtaaagagatctccttcacctcctggaccctgatgtatacaatttctgtgctattaaatcctttcagccacctgtccctggggtttcctcnctggctcctgatcagctatacatgccactatatttcagcttcctcagttngctggtgacaanctctcttagttttcctttatctgagaatgtccttcatgaattgtttccagtggatatccaaggattctgggttaagagttccccttcttcagcacttgaaaatgtttgctacttccatgtggcttcatgactcctgataagaagtccattgtcgttcaaattg

SEQ ID NO: 148170 - DNA, 545 bp, Homo Sapiens
tttccatgaatcaatctttattggtgtttgcagcaattgaattattggcataaggcacaatgggcttcaaagcaaatgacagaaagaaaatacgattgtacaggtggaaaggctcttcagggaggtgtcccagagcaactgtgaccctcacaaagaccctgcagctaggacccagcccaactaagacaggctttgaggacctgagagtgaccaagccatacctcagggaatctgaaggggtcccacagttctttcaaagccaagcatttctagcttccttgggagctcttccagcctttgagtctttgtcatcaatagcagcttgatgaccatggggaccctgtccctctaagccagcctgctctccctcacctgtgcctgttcagtggaagcctcccctaccaggggcagattaaggcccctgcagagggaggcaaaggggagagaagagcaagagttgataagcagactggccaagcccagtgacccccatgaggatatgcaaccccccccacagcggtgggtcttcccaccaatatttagga

SEQ ID NO: 148171 - DNA, 476 bp, Homo Sapiens
ttttgccacagccgctcttgtttaatggtggcacagcctgcggtctggttcctccatcagggcgctgtgggtatggccctgaggtgaggggcaggcctggggtggggtggggtggggcctgaggcagaagcatgggggctgaccctctgcctgacatggagagaggacattcagaaccctccagccacagatggccagaaactttggtttgtgtttgttttcaagtttctgtcctcaaggaagctgcccagaaagggagacgaggggactgcttcctgagggagcagaggggccagagctgggaggagcaatgccagccgaagacaacgcccagacaaagctcaccagctccagggccacccgtgggaatgcagctgggagaagggtgctggaacaggctccttccaccccatgggagccccagagtctgccccaggaccttcccaaaccctcaggaaggagaagcacgaggaagg

SEQ ID NO: 148172 - DNA, 491 bp, Homo Sapiens
ttttcgtttgcgacaggagtttactgagggctcctgtcccctgtgagtgctgttcagatggagatttaaaatggttagacctcgacctgggccctgggacaggacacacagcacccctgacagaggccctgggaagtctgcagagcctcagataccggcctcctgggtgcaggaatgctgggggcgctggtgggttgcagttggaaccaacaggttgacatgagcatcacagacaggaaaaccgagtacacaccaggtctctagcaggagggccctgccccgggacgctggcgctggccttgggtgcagatcgagcgccaggatggggcctgacactcaattcttctcctttgaggctcagggagatgtcagttggcttgaaaaaccgcccgacttaatatatctgtgaaactttccgggacacattattccaagtgtccagtaattaatgctcaacaacacacagtgtcttccagaaagccgaatccact

SEQ ID NO: 148173 - DNA, 293 bp, Homo Sapiens
tttttcgaattgctaatatatagtttatttacatgggtatagctattcattttatctacaaaaatgatgattactatatgccatatgcaggatactttgaatgaggtgaacaaaattcccatcttctggagcttacaccctatctgcctctgcattccagatgttcatgattatctcttgttcactattgttgctttttctgatccctttgtccttgtgtttatacccttttttaggtatttactgtcaatttgatggggagaaagcataaggtgtccgccatgtgtatgtct

SEQ ID NO: 148174 - DNA, 1143 bp, Homo Sapiens
  misc_feature (623)..(623): n is a, c, g, or t
ttttacaagtggcgattttctgtttattgctcaaaaacaagaattcagaagcaaaggtggagagactgtgggttggggagatggcaggaagggggcaaggccttgtcccagctctcccctttgtccttcttctgaccctcctggccggagtcaggcctagggccagggcatctgggaggggggcaccttcgtggccaagggaacagtagagctatcgggggcagtccttgaggggtgccctgggcaggaggggctgcaagatttgcagggaggcagagttcccctcccagaatccaaaagccggtagggcggggggcaggcccctcgtttggcaactgagaagaggcggctttgggcggcaggatgctggtttatttactgtaggatctccagggccatcaaagccccctcgtgggatagggagactatttacacagccagggaggagggcagccaggaggcagagaccgggtcccgtatttccctctgcccgaatgaggaggggaggggcgtcctgggtcctgcagctgtagtcttggggttcagatggaaacttcatactcccgcgtatccccagcttcatacagcgggttgctgaagtccgactccacggtgatggggcntgtaggagtgggagcccgagaagccgaaaagggactttccctgaagcttggtgtagtagatgtaaacgccactgccgaggacaatgaccaagcctagaggcagcaggatggccagggccaggttccccccttccagctgccgtgatggatctgtggtctgggtcactttgcagagtgggggctggctggtccactgggaggggtggccgggcacacaggtgatggtgacctcgccgataagctcaaagccctcatagcagaagaagcgcagagactcgcccgcctggtagtggtgcttgtacagcgtctggtagccattctcgggaacccccgggttcaggcacggctcgtacttcaaggcgcatttggggaccctatcgctccacttgggtgtgcctgtgtcccggctgtagcaggtgagcatggctgccccctcgaggctgtaccctggcaggcagcggtactggacgtgggagccaacggggaagccggcgtccgaggcggtgcggtgcccgttggc

SEQ ID NO: 148175 - DNA, 884 bp, Homo Sapiens
taagaatttggccaggggaaggccagaggtttccccctcccccagaatcccaaaaagcccggtaggggccgggggggcaggccccctcgttttggcaaacggagaagagggcggcttggggcgggcaggatgctggtttatttactgtaggatctccagggccatcaaagccccctcgtgggatagggagactatttacacagccagggaggagggcagccaggaggcagagaccgggtcccgtatttccctctgcccgaatgaggaggggaggggcgtcctgggtcctgcagctgtagtcttggggttcagatggaaacttcatactcccgcgtatccccagcttcatacagcgggttgctgaagtccgactccacggtgatggggctgtaggagtgggagcccgagaagccgaaaagggactttccctgaagcttggtgtagtagatgtaaacgccactgccgaggacaatgaccaagcctagaggcagcaggatggccagggccaggttccccccttccagctgccgtgatggatctgtggtctgggtcacttccagttttcggttgtccaggagctcctcataggcaactttgcagagtgggggctggctggtccactgggaggggtggccgggcacacaggtgatggtgacctcgccgataagctcaaagccctcatagcagaagaagcgcagagactcgcccgcctggtagtggtgcttgtacagcgtctggtagccattctcgggaacccccgggttcaggcacggctcgtacttcaaggcgcatttggggaccctatcgctccacttgggtgtgcctgtgtcccggctgtagcaggtgagcctcgtgccgaatacgccacccaggcctcgctacct

SEQ ID NO: 148176 - DNA, 731 bp, Homo Sapiens
ggcagtttatttgcatctaggaataattcaacagatgcattctctaagatgtcactgggatattgcactgttttattctgccctgttttcggggaggttgaaagccttcttcttctttttcgtttgagatgactttttcgctaacgcgccttgtttaggatttgcctgaatcaaatctgtagatacttctgatttctctcgattattataatctcgcagagtaagaagacaagtctgttgattcaattcaatgtttccagtaatactagatatctctgtagaagaaggattagcaataaaagcaaaatcttccatctttattttgcatttagtgaccacctcttccactttgagatagtcagcagcctgatgaatttctttaacattccactgtcaagatttaaagttcctgtgtatataaactccaacagtttctgaaatccatcagccttcacctgactctgatcaagaaagacattgttctcagaagtgcttctgtagatcgcaccaaaatactcactaaaggaggccagcacattcctatgagctttaaactggaattccccatcactatggtacagtcacagagaaaacctgcttcccgctgtttgttcagtctctctaaaaggtgctcacagtcggtgcgaatactgcattttgatatcagaatggaattttacccttgatcgatagcaacccaggggggacacagtttcttcactctgtctccg

SEQ ID NO: 148177 - DNA, 927 bp, Homo Sapiens
aaaggaacagggccttccattgctcttttctaggtgggcagcctataggaaaggggatttacaacagtggaaaggagcagtaaaagtgctgtggttaacgcgaatcacatgcccccagaacagcctgtgattcccaagtctaccctgagtttacagaatcaaaatttccagggtgcaagacttaatcacttgcactgcttttaagctcagcaagtatatcagtccattttgtatatcagtccattttgatactgctatgaagaactgcccgcaactaggtaatttatgaaggaaagaggtttaatggactcacagttcaacatggctggggaggcctcaagaaaagcagtcacggcagaaaaggaagcaagacaccttcctcacaaggaacaggaaaggaaagcgcccagtgaagggggaagagcctcttatacaatcatcagatctcgcgagaactcactcactagaaacttgccaggaaaccacctccatgattcaattacttccacctggtctctcccttgacctgtgggaattatgaggaaggcaattcaagatgaaatattgggtggagacacagccaaacatcaccttggggcacaggctcaaaaacagtccacaggataccatcactgagctggaatacaacatggggcatctgaaaagaagaaccaaaatagatgcctggtcttcaactaaattacctgttcatctttttccaggaaaccttggaacaccaaggaatcagcagtcaaacgagctcagtctctcagaacacatgtgggggaattgagtatttcaacttttaggtagacagtttctacaagctaaatagtggaacgaaaggagccaaataaagaagttataaaacacgtgcatatttagcccctactttttattaaactaagactttttattcaccttaaa

SEQ ID NO: 148178 - DNA, 833 bp, Homo Sapiens
ttttgaagtaataattgaaaatttagtatcaaataatacatgtgatgagaatttggactggatttactgaacttacactattattacaaaacctctcagagatgaaacctctccagtggagaggttttccaaatgaatattagaaaattttatgtgaagagtttcaaatgacaacatgaacacaagaatcatgtatactcctccagcccctgattaatatatgcatttccccatgcccctgcaacagagggccctcaccactacaacaatgctctgtagcttaaacatcagttgacactgcatggggcatggaccaagagtatgcttagaggaaaaaggcactgaattaatgagaagaaagaattatataagacacactagtaaaaaattttatacaacagcatctgaccttttctgtgtcatatttgttaaaattcacttaaagcaactcaactactaaaaatttctgctttcaggtttgagtctatgaaaggaattataaattcccattcatttagatcctggaataggccctctatagggaacagaacatctgaaaatttctttcaaactctctctgaggaacaaaaaccaaaattatatttctttggagaatcaaaagagtatctattggtttacttcattctctaaactgccttgcagtctttaaaattaccaacatgtcatcagataatagtgcagatatgaatgtcctctagaaaaacaatattccaattcaaataaaattcctcatttacatttgttttatcaaggaaacaaaacatcctatcagtgggcagtaaatttttagagagaatgagctactattaata

SEQ ID NO: 148179 - DNA, 415 bp, Homo Sapiens
tttggctgtgcaggttaaaaagttatttatttatttatttgcttttggaaaaactcgagtcagcttgatgaggtcactttttcctgctactccttcttatttggggagtaaagggacttccatgatctggatggatgattgtgatgaggaggttaccgggattgccctgagagaatggactgtgagctttcagggatggaagctgcatcttcatctctataatcccttgtttggcacagtgtcagcctgagaagatgcttggcgacaaatatgaattatggcacacactgttaatttcttacccatgagcagttcctttgcttgctaacagaaaatcctgattttgcttggataaacaaagtgtccagtgtcaggtgatgactcaaggttggtttaagccaggctggggcctttt

SEQ ID NO: 148180 - DNA, 693 bp, Homo Sapiens
  misc_feature (102)..(112): n is a, c, g, or t
cagaaatacatgttctttttgatataggatctgtgacatcatccttgaaaaaacccaggaaaagcccacaagtacctatgaaatagctttgaagcacttttnnnnnnnnnnntctggcagaaggcctaaaaaactccgaggtagctggtgatattttctattttaaatactagggaattaaggcacagaggtgactaaggtttacacagcagaaagctgcagcgcctagagtcaatgcaggtcgtcgttagccctggactatttctgccactaccagggttttcaacaaagaacagtacgtgtgacaaaaatccatctgtttgtttctctttttgaattacttaacctttgaatattcaaccttttgccctcttttgctttatgttttcacaccatcttatcctcaaagaaggggaaatacttatcttcttctgtaagcctttgtatctaagaacacaaatgaagtatttagggacaattgctttgatttttacaagaaaactcagtggctattttgggtgacggtatgctttgctagcaaatagaaatagagaaaatctggcatctcaaggtgaaataagagtaaacagtttccagaattttctccctctctccttccttaataattgcaaattgccactgcttataaccataatagaaactagacatgtctcccggccttcctcaatgaaa

SEQ ID NO: 148181 - DNA, 469 bp, Homo Sapiens
tatgtaaataagaactttattctctagacaaacatttgttgtgtctgctgtgtccaagatacaaaaatgaaaaaacaggcctgtgcccctcaggagcttaagttctaatggcagagaactgtggacacatgtacaggagagggagttactgctcacgatcctgcaagaccagcttgctgtgaggagagccaagctgagggcatgtacaggccatgtgcatgctgttcctgtggcataagcaaggccatcaggagagggggggtcagaaggggacagggtgttactggtgttttaatttgctccgcctcttgctgatggatggtgttgagtttagtgatgcagacacagcctgtggccagagttttgctgatggttcagccatgtgctagagagcccagaatacagaatcacgattgaaaattgtcagtttcccagatacactgagaacaggcgagcatgagcaacgctg

SEQ ID NO: 148182 - DNA, 393 bp, Homo Sapiens
tttaggttagagaaaaatatttatttgttttaggtagtcatctagttgggaataattttctcacaggtattttcattattagtagttatattggctcctaaaatccttttacctttttgttaacttttcttctaacattgctcccagatctttccaacagtaaatgagattttgtttattgccatgtttcattgtaagagctttgaaagccttccctgtcctccaagcagaattagtccctgatttcccatcatgcttcatttggacttatttgtacgatttttgggtctttctttggaaaagagttgtcccagtgcctgggaacatgcccgtggggtgactccaattttttgctcctgctgtgcctgtttatgaatgacctcggaagtgcca

SEQ ID NO: 148183 - DNA, 424 bp, Homo Sapiens
ttttgtctcaaccactaactaatttgcctttattatcttttcctgaacatcagatcaattgtggaagaacataaaatgcaaaacatgaacttgcagaaaacaagagccaatcccatttctcttctgcagctgcactggaaatgtgcgtcaggtcagtgtgtcacagcagagatacacgtggacggggaagcacagcagcttgcaggaaaggcctggctggcagagagcactcaaagatgaacacaatgaacagtgagggtctcacgcgaggtggctggggctgagtggcttttggcgactgatgtcccacatctgagtggagagcagaggagagactcctccagcttcatcagcactggcataggcttgattcccatccataccctttccagcacagacgtgcacagactctcgtggctgccac

SEQ ID NO: 148184 - DNA, 451 bp, Homo Sapiens
tttcttggtcccgatctttttattaactttaaattacatatgcaagtatccaaattgcagtgagaattctctctggatcataaaggtatggaagaaacagccagcaagcaccttattactccttgttgaactcaccccctctttgacctcatttctttgactttcttttgtctccagccattctcaaatgtgctaggcttgcttcgcctcagagcatttgcacatgccattctctctgcttcaaatattttcccccttgaattctgcatggggaatttgctcttcatattctttggcttttccctcaaatacaaccttctcacttaccaaccttccctgaccaaattatttaaaactgaattcacaacagtcttattggtcccctttgcttcctttattttcttcctagcactttccactttgacatgccatatattttgtttactgtctg

SEQ ID NO: 148185 - DNA, 611 bp, Homo Sapiens
  misc_feature (578)..(578): n is a, c, g, or t
ggtccatcttattttagaggaaccaatcttcaagttctgagattcattcctcagattggttttttctgctgttaatacttgtgattgcattgtgaaattcttgtattgtgttatttggcgctttcagatcagttagtttctttttttattataccagctactttgtccttcagctcctataacactttattgttattcttattttccttggattgggttctgccattgtcctgagtcttgatgattttttttcctatccatattctcaattatatttatgtaattccagacagttcatccaggttaagaactcttgttggagaactggtgtggttgtctgaaggacatatgacacagaggccatttgagttactggagttcttgcattggtttcttctcatttccacctatggtttttcctttaattgcagtgtagattgagtacagtccgtagacctattttcggatgttttcaccaggctgaggctttgtgcagggtctttatttgaagctgacttctcatttctggtttcagaggggagtatattagtaaggtatttttgatgctgaagctttgngaatggatccagtaggtggcacttgggcttact

SEQ ID NO: 148186 - DNA, 765 bp, Homo Sapiens
gcggccgcttctgaatgatcgcgttgctcgagctgccgttggaagcttagaagcgggtgctaccgtgctagatacaaagcgatctatttaaaagccctctgtcacgcacgcacacttactgacgaatcctctggctctctcctaccaccgcccggtggcggattccggaattggttcaaaaggccttgatcccgaacacccaggacagagacagagtacttttcctacctctttcgcctgcatccttagaaaactcccgtggatgagaagatccccaggcctttacaagctgttgttttacaaaaggagaaactgaggcaggaagaggcggtggatgtgcaccagagcacgtggtgcgtcggtgcatagctgaggtaaacttctggtctcctgacagcctctccatttgccttaccgggttggaacctgaagcaagtctcactttaacgccgttaatttccaggcatggatctttagccaatgatgagcatcctcctcctttcctggttcagcgcctgctccctccagtccccacccccaccccactcccacacggaaaacttgctaatgctggctgattctcattgctgggtttactagttcaggcctggaaactgggtaacctcaataactatgaccatttcagtatgtgtgagtcaatctaatgtgccctccctcagcataatcctgtcacgaggaacgacgcaggggggcaaaacctagacttttctttcccatcagcatcttggctgcacctagtgctca

SEQ ID NO: 148187 - DNA, 780 bp, Homo Sapiens
  misc_feature (491)..(491): n is a, c, g, or t
  misc_feature (509)..(509): n is a, c, g, or t
gaatatcaagattttattaccagaataaaggggaatagacaccagagaggaggaaatgacagatttccctatacaattacttttttaaagtagttttagggatttatgatacataaaatacaataaaaccatcctttcatttcacagacaagacaaggcctcataattcagccattgtacttttgaggtcccaggattacagatgctgtgatagattcatgtgtagagttctacaggtttcataggagaattttctctaaatagagcaaggttattaaataatgcagtaattactttgtctcatttttcttagccacattgctaatattttcataaggatgatatagttctgatttgggaaggagaaaagtccaataaatcccaactttccagcccaattacatttcctttagcagcttttctgtgcctaaaaggaatccattatcttttgcctcattaagcacgtctacatataacacaagagcattttntggtaagtgtacctaaanctccgcaggatgtccatcaagacccgaggttctgcctgtagagggatgcataatggttcattttagctttcctggagtgacaggcactttattgtcgtcattactcattgaaagactgaacactcaaaatattgccatttctgcagcttaagcaataccaaagggaagttggattcttcttattaaaaacaatgtaacgccttcataatagtctttgacttaaataggtgtctgtatcctatggcataacacaattgatgttttaaggtct

SEQ ID NO: 148188 - DNA, 606 bp, Homo Sapiens
  misc_feature (224)..(239): n is a, c, g, or t
ggaaagaagcttcctatttctttccaagggagctctctctccctctgatggaggcactgtaaagaggtgaagtgtggacctgatgaagccatttctgctgccaagagagaagcgaacctaaaaagccattcaacacacaagaaggtcaggagactttaccataacaaagattaaaatgttcgttgataaggttgcagatcccctagttcaccttacttattagnnnnnnnnnnnnnnnncttagtttttgtgtaaaaaatcaaagaatattcatatcttttcagaaaagcaatcaaaatattcctccaactataaatctctgggagcctgaattttctttatatacttaaataaaaacaacatattgctaataattgaatgcagaaacatatataagacccagctacatcacaataaaccagaaactgaagagatttgtaaaaatgtaaaacagttaccctcatctaagttttgttgtaatttgcttctgtagtaaaatatcgtcttcatagatatacctacattataaatattttgttcattttaacatgtattttaatattcttattttaaataacataaataaatatatttttaattctcaaa

SEQ ID NO: 148189 - DNA, 906 bp, Homo Sapiens
cccacttcttcagcacttcctcctgcccttcctttggctccttctccttctcaggatcgactattgggtctccatcactcttctcggactccttctcactgtcgccttctttccctttctccctcatccttcttgggagcctcgctggttttctcttttgcttcctcctctatagcaccccctccttctcggggttccttgggctccttcttctcatctgtggcctggccttccacccgagcctcgtcattcccgctctcctcaatccgctcaggctcatcagaggtggttcctgcaatgccactgctttccagaccgaaggcagggtccgccttgcctgttactttggctgcttcttccacttttcgaacatgggcctccaccaaggccgtgggtacctcttccttcattttggagaactcctctagggctgactttgcagcagcagaggcgactcggggatcgacgacagaggccaggaaggcaacagtgctcataacagggttgcccgactgactgaaggggatgggttggtaggccagggggcctagggaggcctctgagtcctccaggtatgggtcttcaatgggaagacgaagaaaatgcaagatgcactcgtcctgtgtgcggcttcccacatgctcggacactttgttccagtcatctttgtacatttccagtgcctccaggagaagcagggtttcctgttctgtccactcacgagtggcactggctgcagccttgctcttggagggaacattcttttttgtgtacatgtctgtgcgcagcccaaagttttgcatgtctgttggtttctctttgcctttgtcaggaaagttgagcatttgttgggaagcagaggtctgctgaggtgtcttgggctgcagaggcaccagccctgatggt

SEQ ID NO: 148190 - DNA, 754 bp, Homo Sapiens
gcgtctccatggctttcatcttcctgttcatccaggtcggtcatggtgccgcctttgactgggctcgactctgagtctgttcttgtgtgttgactgttttgggaagtgtcacctcttctacattgggtactggtgagggctcgtccatgtcctttgtcaggtcttcttgctcctcttctctgtggccacgctttgacttagtgtaaggtgttgagggactgggaaggaaagagagtgaaagagaacccagtcatccttggacaaggagtccctggaagttgaagttcaagggaagggaagtgacagagaattccaagggtagagctgagtacaaacagaaaccagtaatcacacagtaatgggaagtggcaaaggcttttcacttgataaagctctctttaaatgtactagtggggccagaaccagaactaacaactgagcagctaaagctctcctcatcttccctctcaggacacctgcagtattatggcacacccaggtcagggccaggtggttataggaagggatttgtctttccttccttcaacatgatgtggagagaatggtgaacacgggggcaggctaggggctggcacaccctttcttagcatttttcttctttgcttctggggttggtgaaggagagggggagcgcttcctcttcttatagtttccccccttcttgtcccgtcgatccctcgtgccgaattcgccacccaggcctcgctaccttagaaccgttagagttactgcc

SEQ ID NO: 148191 - DNA, 1957 bp, Homo Sapiens
  misc_feature (14)..(14): n is a, c, g, or t
tcaatggggaagancgaagaaaaatgcaagatgccactcgtcctgtgtgcggcttcccacatgctcggacactttgtcccagtcatctttgtacatttccagtgcctccaggagaagcagggtttcctgttctgtccactcacgagtggcactggctgcagccttgctcttggagggaacattcttttttgtgtacatgtctgtgcgcagcccaaagttttgcatgtctgttggtttctctttgcctttgtcaggaaagttgagcatttgttgggaagcagaggtctgctgaggtgtcttgggctgcagaggcaccagccctgatggtgtgtcagccaagacatggaagtgagaggtaggcggaggccccattggggttggtcgactctcagcatccacctggtagttaataagaccccactgttctaggaaggcatggaccctcatgatggcacagacatcacccgctaggtttcggcggcaggcggtagaggtaagatactcttgggggttcagtcggtaagtgtcaatcataaagtttcgataggccaggtagatctctggagtcttggacttgttcttgccgttgaagaactcggggagagccctccgctcaatggcatgaacactattgtagtcaaaccaggcagcgtagctgggaatgatgatgtggtgggtctgttcagtcacattgtcctcatgcaggtctggattcttggtctgctctcccttgttccccgtactgttctcatcctcatccttgcccgtcgtctccatgctttcatcttcctgttcatccaggtcggtcatggtgccgcctttgactggggccgactctgagtctttctttgtgttgactgttttgggaagtgtcacctcttctacattggggactggtgagggctcgtccatgtccttcgtcaggtcttcttgctcctcttctctgtggccacgctttgacttagtgtaaggtgttgagggacctttcttagcatttttcttctttgcttctggggttggtgaaggagagggggagcgcttcctcttcttatagtttccccccttcttgtcccgtcgatctgaatctgggctgttcacctcatctgtcagtgtcttggctgaaatcttctttcggcgggagacagggtttttgtcatcatttacttcatagtcttcctcattcatccattcattgaaggtgtcggtgtccaggatccactttgcatgaaccttcctaggtttctcaggagttggagcatcttccacagatgcctcaatttcactcgctgggatccacgtgtcgtaactgtcaggatagtagccccagtgcagaagaacctgcttatccctcttcatgactggtcgtacccattcctcttcttctagattccccgggacaggatacacaacatgggaggcattgttcttatcctcagtgactgttccctggtgtctcttgataatgtcctttaatttccctagtagtttgggctcaatttctgggcacagaaaaatgttaggtcgagacaggcaattattctgcaccaaggacttctcaatggtcataaacatttccacattgcggtccatgcgtgatggattctggaaatcgtaacgccgccatccctggtcactcttgaatttgtaggcagctgcaagaatgtggcacaaggagcctcccgctttgaaatctaggaaacatttgatcggcagtttagtgagcggtgcattgctgacatgtttgccaaaaacttcttcctgaaattgtagcaactgtacaaccaggctagacagggacttgttggtgggtggttcagcttgtatatacttcttgtagttcttgccgagccacagaccgcacagttgtcgaactgggtcacggtgtccgcggcctcgtagtacttcacgttggggccgccagtccttcattccgcaccgccatcttctccggctcccc

SEQ ID NO: 148192 - DNA, 538 bp, Homo Sapiens
gaagaaaaaaatttattagacccaggtccattttattaataatatgatctataatctcttgacattacaagtagtttttacagttaaatttcacactgaagacaaacactgtttggcttagggagcagaaagctgagtaacttacatcctttatatcagacactatattttaacagtttaagaaaaccttttacactttctggatttaagcatcaatatgtaagttgtttcctttacaggaaactgaaattagtaagaattaagtgaatatactgacagatggctcatttgggaacatgaagcctagagcaaagccaagcttctataactcataaagtcaaaggtaaaacattctggattcttcaaacctaaatgggcacttgttattttccacttttcttcaaccatgagctaagccctaactaaaatcaaagttgataaagattaagtggtaaacaaaaaaattattaaagctgtccttaactcctgtctgagtgttttttaagatatagatatgctttccacagcattccatttt

SEQ ID NO: 148193 - DNA, 514 bp, Homo Sapiens
acgtacttaggtttttgaagggaaacagctatcaatcttcaacagggctttttaaagcctctgcaccagcaaataaacctttcaggttaactaagcacacttgtgtctttgaaaatctagtttgagaaatcctaacagcagtttgggacaagtgatggagccaccgccctccaccctacaccaatttcactgtcagtacatgcagtgctaacagtaagatcagctgtgtcttttattaggaagcatgttttattgggggcaaggaggggttcagttaggtgctaagaatgtgtcctgcataccgctgtcactctcagtactcaaaaagtaaacatatcaaagccagaagcgtaaactggcatgacaagactaggaagagaaagtaggggacaaagacaaaacagaaattggctggagaaaataaatttagacaaacaatttacaactttcacttagaccctaaggcaacacattccagccgacccaacgcgctcagccggggcgaccgtgaaac

SEQ ID NO: 148194 - DNA, 487 bp, Homo Sapiens
aggcacgagggacagatgaaagaacttcaaaccaagcaacttcagtcaaatactgtgggaatcactgaatctaatgaaaacgagtcagagattccagttgactcatcatcagtagcaagtttatggactatgataggaagcattttttcctttcaatctgagaagaaacaagagacatcttggggtttaactgaaatcaatgcattcaaaaatatgcagtcaaaggttgttcctctagacaatattttcagagtatgcaaatctcaacctcctagtatatataacgcgtcagcaacctctgtttttcataaacactgtgccattcatgtatttccatgggaccaggaatattttgatgtagagcccagctttactgtgacatatggaaagctagttaagctactttctccaaagcaacagcaaagtaaaacaaaacaaaatgtgttatcacctgaaaaagagaagcagatgtcagagccactagatc

SEQ ID NO: 148195 - DNA, 490 bp, Homo Sapiens
  misc_feature (42)..(42): n is a, c, g, or t
acagaaaaactccatttagagccaaccaaactagcataaganattccttaagcactcaaagcattatctctgttttaagtaagaaactaaatccagagcttttaacaggtacttagaaataagtattgggtaatcactaagaggacattgactgcaccaaaccaaagctatagaaagaaatgattgactttttaaaatatattcacattaactgtcctaggatacttctcttgaggctttggaaaacttcttccttgaaatttgcatatccactccagttctgtcaccaaagattttaatcttcagatcgcaatttcctctctcccagaaaaaagtactacaacaggctcaagggatatgctttggtggtcaagggattacactatggttttccttctgttcacaatggtatttacaggagaccttgtcatcagaggacgtactgaactatctttatgactttggatttgatcagaggtttaaaaaatag

SEQ ID NO: 148196 - DNA, 703 bp, Homo Sapiens
tttctggtccacggacgccacgcgcgttttatttgtggatatacacacaaataggaagaaggaaaggagccccccagggtggattgagtccagccgcccacctccaagcccccaccgcggaggggggcgtcactgttgggtcttctctgaagaggcctggagggaggtggggtccccacgtgccctcgccgtacctggcgagcgctctgggctggtgccaccgggtgatctcctaccggggccagccgtcggccaagggcagccggcgcagggcgggcccaggccgcagaggctctgccagggaccgggcgaggagcaagggataggggaaggtcttaggaaagtcgccggggcccccgggggccggagagaggcgctcaaacttgatgctgactgggggggtcggcggggaggcgccgcgggtttggggaccctcctcgcccaggcttcggcccccactgggctgggaggacacggcgggggggcccatcacccctcgagggctgccagggggccagggtggggggctgcaacaagccagggggcggtggagggtctcccaggccatattctggggggggctccgggaggaagggaagctccccaatgggggtccggaagtgcaatggagcagggttctgcagccactgtagaagcttcttggaggtgttagcccccctcggggcccacccaggcccccagc

SEQ ID NO: 148197 - DNA, 958 bp, Homo Sapiens
ctggggcttcgctctctgcaactcagttttcctgtttagaaaataggatggctgcatggtaacaaatttctccaactgcttttcatgtggtttcctcatccctgtgaccaggaagtctgcatatgtgccaggtgatgggtacagagtcatgcagcaggcccatgggccccagggcttctcactcttaacccaagtgggtgccagagaaaaatctcatctcaacgagaggaggcacagacaccaggctgccagggccgtgcaccacaggtcagatcatccaggatctcctgcgagctgttctcaagcctctgtgacacacaaccagaacagcagccactccctcaagagagtttacaattaagccaatcagacctttaaacaaaatgtcctcttttccacagtgtgtccgtcctgtttaccttcagtttggagagctgttctgacctttcttaatgaaatgggtcactccccttcttcagcaaataataaactcagtgtctgctttagacagctttggcgccgtttgtgttctgctgtggcatgaacctctctttagtcatcgctgtggccagtggatagccactcctttctgaaggctgtccctgaattcctccttcctgtctgtttattggtgatggggcagggggtggtcaggggtcccaagccttcccaggcgaaggccaaagccctgctttctttaccaagttcctcagaggtctccactcgcaaatcattggcctcatcgggttggcactcgtccacttgcatttctagctgggacattctcttctctgaaaatagtctgtggatagaatgaacggacaaaggaatttgtttctgttaaggtgttgcttatggtagggcaatggttctgactcttattgttcagtcagattccttcatttcccaaactgctctggatttcgccttatcttcgaaatcagaacctagtttgact

SEQ ID NO: 148198 - DNA, 705 bp, Homo Sapiens
cgagttagtgaccacccccactgccagacctccctcccctagccacccccacagttataaaaaccttcattctcatatggaaccccctttcctgaaatccgtagagtgactgactgctttcttgagtgaatctggactgggccacatgatgatcgctgtacagagcagctgagctcctctgtctcagcctccctgagttcacagcaggctctgggcatcatctccgtgtcatcctaaggccacgggcggggttcccaccaaacaggagagcagctctcccgagatgaagccttctgatagccctagaaccaagaggaaccgtgtggggttgggtggggtgtttactgtgcactcctgatgttccctcccagttgaaggacacccacctgggacactgtggcccctggccctccctccctcccctcggtggcagagagaacttcctggtgggtgacagcccatggtccacccttgccaggtggattcaggcaaaatacgccaggctgtgtgctgaaggcatcccatctcttcctcgtcccctctcggctggatcggggtggggcagcgggtggtgagtgtgtctgtcctgccagttcagcctccaactggtctgctgtggggcaggagcccacctggctctcctgcagagctgcatggcctgccttgcctcacccgtgacaacaccgactttggttctccatctgc

SEQ ID NO: 148199 - DNA, 587 bp, Homo Sapiens
ttttacatttgctttaatactttatgatgataggcgacattgatgaacgtatctatggaccaatgatcctgaaatgtaacatctcatgacctgcaggtgtttccacacttccttccccttgctcaggaggtgtaattactcttgcagtttgcctgtgaattgtacatgtttgctaactgaatcttgccgctttcacatactctgctatatgccagcacgatttcctccacagccatgggtagctgtctttgtcctgaagttgtgactcaggacatctagaaaatactcctttcctcaattcacttcctcgtccttccattgccttcatttcaaatgtctttaaagtgattcaattttctgaaagttgtgccatctagtcgtatgtcagatgaagtggaactgagtcctgattgtcttaaaaggtcatataaatgttttggcaattcttacttttgtgatcaactgtaattgtttttggttttagaaatattcagcctaatgagtttgcatgggagttcatgaaatagtgatagacttggaaatcactcgctttatagacatgtaattgcacccaaataggaatgatt

SEQ ID NO: 148200 - DNA, 285 bp, Homo Sapiens
  misc_feature (275)..(275): n is a, c, g, or t
ttttttcaagaacgtgagatttatttggagattattgagaggttgaagacacagcaatgacaaagctaaaaaacggaaccaccttatatgttcctcagtagctagtggagctttgatagttgtgttcaagcatgtgcatggtatttggcatcatgagggaaaagaatatgctcaatgaattaggaaagcttgtatttgggaggaaattaataggagaaaaatttgatccagtggctctggtaatgaagtataagattgtgtccaagggaatgccnctggttcgtc

SEQ ID NO: 148201 - DNA, 976 bp, Homo Sapiens
ggcacgggcagtaactataacggttctaaggtagcgaggctgggtggcgaattcggcacgagggtcgacggctggagagaagccgggagcgagcccaggcggcagtcttgattcccttttggccagcagtttttaggtctgtcagtactgcactgcaagaatggcagattttgggatctctgctggccagtttgtggcagtggtctgggataagtcatccccagtggaggctctgaaaggtctggtggataagcttcaagcgttaaccggcaatgagggccgcgtgtctgtggaaaacatcaagcagctgttgcaatctgcccacaaagaatccagctttgacattattttgtcaggtttagtcccaggaagcaccactctgcacagtgctgagattttggctgaaatcgcccggatccttcggcctggtggatgtctttttctgaaggagccagtagagacagctgtagataacaatagcaaagtgaagacagcatctaagctgtgttcagccctgactctttctggtcttgtggaagtgaaagagctgcagcgggagcccctaacccctgaggaagtacagtctgttcgagaacaccttggtcatgaaagtgacaacctgctgtttgttcagatcacaggcaaaaaaccaaactttgaagtgggttcttctaggcagcttaagctttccatcaccaagaagtcttctccttcagtgaaacctgctgtggaccctgctgctgccaagctgtggaccctctcagccaacgatatggaggacgacagcatggatctcattgactcagatgagctgctggatccagaagatttgaagaagccagatccagcttccctgcgggctgcttcttgtggggaaggggaaaaagcagaaggcctcgtaaaaactgcacctggtggccttgcccgaagaactgcgaaaaagagaagtcaaggggaacaggatgagcctcccaac

SEQ ID NO: 148202 - DNA, 1010 bp, Homo Sapiens
ggcccccgcggcaaggtgttgagaccgcgacaccggccccacgacctgggggaaccaccgccacgagccggggacaaaccagaggggggagacccctggcggagggagaacaggattgctggagaacaagagggcccaagccagaaccccaagcatcagaagatgctatcacctcagaagcaccttgtgccccaggtttgaaggcctgcatcccaaggtagggcagctggcacagcggaagcatcgcccagtagcccatgctgtcgtcctccatatcgttgcctgagagggtccacagcttggcagcagcagggtccaccagcaggtttcactgaaggagaagacttcttggtgatggaaagcttaagctgcctagaagaacccagcttcaaagtttggttttttgcctgtgatctgaacaaacagcaggttgtcactttcatgaccaaggtgttctcgaacagactgtacttcctcaggggttaggggctcccgctgcagctctttcacttccacaagaccagaaagagtcagggctgaacacagcttagatgctgtcttcactttgctattgttatctacagctgtctctactggctccttcagaaaaagacatccaccaggccgaaggatccgggcgatttcagccaaaatctcagcactgtgcagagtggtgcttcctgggactaaacctgacaaaataatgtcaaagctggattctttgtgggcagattgcaacagctgcttgatgttttccacagacacgcggccctcattgccggttaacgcttgaagcttatccaccagacctttcagagcctccactggggatgacttatcccagaccactgccacaaactggccagcagagatcccaaaatctgccattcttgcagtgcagtactgacagacctaaaaactgctggccaaaagggaatcaagactgccgcctgggctcgctcccggcttctcctcgtgccgaattcaccaccacgcctcgtactagccta

SEQ ID NO: 148203 - DNA, 442 bp, Homo Sapiens
tttttttgaatgggagaccagttttattattagtcaaattagtctccctggaaactcagtgactagggtttttaaaggatagtttggtcagtagggggccaggaagagggaagtgctgatcaattgggtcacacgtgaagacacagggagctgaagctgtcctcctgcactgaatgggttcctgggtgggggtcccaggaccagttggtgggtctgggtgaagtcgtcagtcttcagcaatgcaaaaacttgtaagatggttatggttttcttcttttgaatcctttttttccacaggtgcttcttgataccgtgcaacagaaaataaattaggagaagcactttttgaagttaagacaaaatctccatgggcagttctacagaagttgctttgcttatgggataaaatgtaggaagtgtatgtttcttcctgagttaggtc

SEQ ID NO: 148204 - DNA, 1028 bp, Homo Sapiens
  misc_feature (18)..(18): n is a, c, g, or t
ctggcggcgggtgcaggngaaagttaaaggtgatgacgatcatcacacctgtgtcgttacctcagccatcggtctagcatatcagtcactgggcccaacatatccatttttaaaccctttcccccaaatacactgcgtcctggttcctgtttagctgttctgaaatacggtgtgtaagtaagtcagaacccagctaccagtgattattgcgagggcaatgggacctcataaataaggttttctgtgatgtgacgccagtttacataagagaatatcactccgatggtcggtttctgactgtcacgctaagggcaactgtaaactggaataataatgcactcgcaaccaggtaaacttagatacactagtttgtttaaaattatagatttactgtacatgacttgtaatatactataatttgtatttgtaaagagatggtctatattttgtaattactgtattgtatttgaactgcagcaatatccatgggtcctaataattgtagttccccactaaaatctagaaattattagtatttttactcgggctatccagaagtagaagaaatagagccaattctcatttattcagcgaaaatcctctggggttaaaattttaagtttgaaagaacttgacactacagaaatttttctaaaatattttgagtcactataaacctatcatctttccacaagatataccagatgactatttgcagtcttttctttgggcaagagttccatgattttgatactgtacctttggatccaccatgggttgcaactgtctttggttttgtttgtttgacttgaaccaccctctggtaagtaagtgaattacagagcaggtccagctggctgctctgccccttgggtatccatagttacggttttctctgtggcccacccagggtgttttttgcatcgctggtgcagaaatgcacaggtggatgagatatagctgctcttgtcctctggggactggtggtgctgcttaagaaataaggggtgctggggacagaggagcaa

SEQ ID NO: 148205 - DNA, 489 bp, Homo Sapiens
  misc_feature (471)..(471): n is a, c, g, or t
tttaaaaaaatctattttttaatattttaaaaaacattgaagactctactaaaacatgtctatttatatggttactattcttagacgtgaaaaagaataaatttgaaactgtatattcatatttgtatatattaatatgtatacacacagatacattctacataagagaaagcaaccatatatactgttttatgtgtggttgaagctcccaggtgaaggtggtctgaggaggatcagagatccagtacagaacaacatgcctctagtcaaatacttgaagggagaagctctcaggtatatcagagacattgttctgtatggccttgttattcagcatctttaatgatgctatgtggcctccacccccgatcttttggcctagataactccttccagttcttcctgttggctccacttcatggacatatctcctgacctgggcctggtggcatgtgtgtaatctcagctacncaggaggtgagacaggag

SEQ ID NO: 148206 - DNA, 351 bp, Homo Sapiens
cagccagcgcttcacttctttgttgccttcaaggtaatgatataaagcaacaattcaataccaagttggtaaaataatttgtatttcaaacagaaagactgcctaaaaatattaccttttgctcctagcacccagacaaacaatgaataaagggaaataaggaaaccctggcagctgagaaggcctcctagtcaatagatccagtttctcccaagttcatactgcagatgaacttgtagttcatttaagtatctagatctctttccttcatgtagagaccttaatcaaagactcttctcaggattttatttcacagcctaagaaatgtttatttaatttaataaaatactc

SEQ ID NO: 148207 - DNA, 704 bp, Homo Sapiens
tagggtgggttctgctcactggtccagacgtccgggtttgggctcttgtcggcaaacatgtgttcgctgtgcttggactcatcatccacgctgtcaaacccgtcacatattaaggaagaggtgaagctctcgatgatcttgggggttgatagtggcctgaaaaggggcaggaagatgttctccagcatcttcccaaagtttggcagcagcttctttgacctaaatatgtcataaatccggggcacctggatgatccagcgcatgttgggagagtagaccttgtgctggatgaaccagtaggccaggttgggccactcctcaggactgcggccgtagatggagagccgtggctctgagtactggtacttgctctcctccagctcccgggcaacctccttgaccatccgagcaaagtactctcctcccagatagttttcagttttcaaatacaggtcacgcagctcactggcccccacagggttgtatttggagttgaacttgtcaaagcggtggaatgtctgccggcccgcgtggacatccagtgagtccacagtgaggtcgtaggggtccatgtgcaggccgtcaaacacctgccgcagggtgatcttccggccccgcttctctgccacagtcctgtcaggctccgtctggtatgtgtgcttgatgaagcgcagcagatgcttttggttcatgcaggcggccgc

SEQ ID NO: 148208 - DNA, 424 bp, Homo Sapiens
gcggccgcctgcatgaaccaaaagcatctgctgcgcttcatcaagcacacataccagacggagcctgacaggactgtggcagagaagcggggccggaagatcaccctgcggcaggtgtttgacggcctgcacatggacccctacgacctcactgtggactcactggatgtccacgcggtgagtgagcttctgctccagtgccgccagcagacagcagccctggctggggactcagccccctggaaagccaccatgattgtgcttgccgggaggtgctacggaagcagctttctcttctatctgactgagaggtcatgcggcctcagagaataacaggtctggggcagccatgggacagggaaagagggtgtgtggcttggggcctgacaggtctaagcactaatcccactcctgccacttagga

SEQ ID NO: 148209 - DNA, 580 bp, Homo Sapiens
  misc_feature (363)..(363): n is a, c, g, or t
caagatcattgctttaatcgacatcaaatgattaataagttaataattcaaattaatacatttgaattaatatcaataattaaatcatgtctattaacagacattcaaacacaagctttaataggagatatcaaggcacagggtggagggagggggttgctccagggaattctgaatgtcccagttcatgcagaagttcaaggtgtcttgtacaacccactggggaaacaggatctgggaccggtgcgggcacattctcctggcccagcacaggggcggtgccacccacattcggcccgggtcttgcctaatacatgttttggtaaacactcggtcagagcactctctgttttttccagtccncgaagctccccgcaggaatccacacccccgccccacccctctcgggacacggattcaatgtccctggtgggtcatctggccttttcggcctgtgatgtgattcgagcggtgctatctttaacctcgggcaggggtgttctcccccgtcgacgttgctcagataacagtcctgcaattccattggggtggcggcacccggggtctggcaaagccatag

SEQ ID NO: 148210 - DNA, 473 bp, Homo Sapiens
tttatgatgaatgactttttatttgcacttatgttaagaatcacctttatttatttttttgaaacacacaggaaatgctgtggtggtaacttgctgggtgatgactgggatggtatttactatcctagggatggtggggtccagtggaccagaatcctcagcacctgaccatgttcactgctgtcctttctctccctaagattcgtttctcagactccatcatcaactctgtttctatcgtggcgtgaacggtttttcgctgctttagcatctaactttgatttctgcgaattttcgttgatagtttgtttttcttgtccatctctggtgctggctttgctgttccactttgaggagttccggcagcttcaccctcagctactccaacagtccatccttttggctcaaactcttgcagtttctttcggttcttctgttcctggcgtctgagatttgtcagcagagcctgtttt

SEQ ID NO: 148211 - DNA, 454 bp, Homo Sapiens
gaatgtattagaaagtactttattaacaagttattataaaacaatattcattttatataccacaaataaactttttggtgcagataggaggaatatttgagtttttcccacctatttctaaaactgctagaatttctttttataagatcagtaccttcaattctagaatttaaacaaaactttttgctctaagaatgcatacataaaatacttcccctacaactgtactctatccttgacaaatccttattaagaggttcagtagtaactgtaggtatttaatgtcagaacaatctttcttcatttctcaggtttggaaatataacttcaagtatggaaaataacttttcccttaagaatacgagaattcacttagagacatctcctcaaatcagccaatcccactgcttcggctccttacatcaggactccatgtcaacctcagccccttccc

SEQ ID NO: 148212 - DNA, 1113 bp, Homo Sapiens
  misc_feature (574)..(574): n is a, c, g, or t
  misc_feature (678)..(678): n is a, c, g, or t
  misc_feature (738)..(738): n is a, c, g, or t
  misc_feature (961)..(961): n is a, c, g, or t
tttgctaattgccggttattttattatatagagcaaaacttggcaaaattctctaaatatttgtcagtctgtctcaaacaaacaaaaaacttgacaaagtaccaagataagagattctcaaaaagaaaacaacctgtagaacactctacagtatgaaatactccaacatgtatacatcacacacaatatacaattatatactggatatataaaaaaagaacaacactgctgacagtgaacattactattcttaaatatgggacaggaaaaaaatctgaaataagggtaataatgtttattgtatctgccatgtgaatatattacactggttacttcatatatttgctcccatttttctgcatttccagtttaaagatgagcaaactaaaattcagagaatgttaggtcctgtgttaacaatccatacagcaaatgagtggtgaggccagaaagcagattctagagctcctgctcttcctcctgcaggtgctccctgaggaataaggagagcaaactaaggccatcttttgatccataactgaaacatctatttgcactcaggcactattttgtnttttcttcttcatcttcaccaggaactaaaaccaggcttttaagcagtggttctcaaacttgacatgggcagtagaatccactcaagggctcggtgaaaacacnagactgcaggatctcaccctcagagtccaatttaatgaatcggggatggggccagagaanttgcattttacaagttgcaagtgatgctgaggctgctggtccaggtcccatgagaactactactgtgtcagtatttgcaccatggtggtaactggtactcatcagcgtcatcctagaagttaatatgctaactcggctagtggaaaagggtgacctcaggtttagacacagcctgctggttagtaaaatctgcgtaactaggcatgctgtcagatttttctgnaattgtagacacagaaggttctagacattcagcgcctctgttccgagaggctcagggatcaagtctgaccagaccttaatgatgaggccagtaactggtaccagactgtggaacgaggtccttacgatcaagtcgctcgggtcatcgtcact

SEQ ID NO: 148213 - DNA, 355 bp, Homo Sapiens
tttttttgttttctttgctgactttattcgtagtcatcaagtatttattgcactcactagttatctcattagactatgatgctaatgaagttaggttctgtgatccagctctgtagagtaatgcccaggtagtcacgcagcatccctaccacatttctgtcagctgttctgcaatattggctactggtcacgggtgagaggatatgctccatgatctaaatccatatctctgtttaaaaagcacctcagttaactgagtgttctgagtcagaggagtgcttacgcttcatgagagagatagacgtggacctcttgagataactgaggaaacaataaatgacactcttcatctcct

SEQ ID NO: 148214 - DNA, 616 bp, Homo Sapiens
caaaatattagaagctataagatgaaatggaggtcatcactgcagtgaatgaaatgccagcagcatcagaaaaggtcaattctcagaatctgcactatgtaaatgaatattttgtatctcagaaatacacatgcagtatatttactttaaagtaaaaggatgtgttcatcgtcattgggaggtatcctctaacattgcattattctctttaacattcacagttatgctatccatatttatgagctgaaaagacagattactggcttgcatgagtccttgtttcttacatttgtcttctaagttttgtttggtgatgacattattgtgcaaggagctacagatggttttattttgatggggccaaggcctagccctgtgtcctcttccataggatgctaacatttctttctgcttttgttcttcctgagtcactgatgtacacaatacatcataatggattattcttcatcttgctcttgtcaaccaaagattaggtcattttgtcaccaaggaaaacttaaactgtgaaaaagaaatcctctatttcctagtggtgcctgataaatgttagtcataatgaattcgttaatagtctcccactttggaataatatgta

SEQ ID NO: 148215 - DNA, 666 bp, Homo Sapiens
  misc_feature (243)..(243): n is a, c, g, or t
  misc_feature (363)..(363): n is a, c, g, or t
  misc_feature (370)..(370): n is a, c, g, or t
  misc_feature (380)..(380): n is a, c, g, or t
  misc_feature (382)..(382): n is a, c, g, or t
  misc_feature (425)..(425): n is a, c, g, or t
  misc_feature (428)..(428): n is a, c, g, or t
  misc_feature (450)..(450): n is a, c, g, or t
  misc_feature (483)..(483): n is a, c, g, or t
  misc_feature (505)..(505): n is a, c, g, or t
  misc_feature (547)..(547): n is a, c, g, or t
  misc_feature (554)..(554): n is a, c, g, or t
  misc_feature (566)..(566): n is a, c, g, or t
attgtcatcaacttggaaattctttattttagaagagacatcagaaaaaagcagcttcaaacattgtcaaaaggccttattatttaacgttatcaacaaatgcagcagtaactccaggatgtcaattcacaggtttatgaagtgaaaatggatgggttacaaaagttgttttgagagaacgatcctgtagttgtagaatcaataccaagggtggcatcagtgtaaggttgaagtggcagtttntgggatgatgtccttgcaaaagtaatttttttataagatggtggtgtcttcttcccaagattgtggttaagcagagtatatttatgatagttcttgttatcaggaatatgggcttaaganccctccntcatggtcantnctagtttcatttgtcagagttttaatacaagtgagtctctacncancacagtggagggttatgagcancgggagagaaggaagtcccatcagcctctcccncgtggctgcaggagccacagtntgagccccacctgagctgcagggaaagggcttgagcagtggnctttttncagcaagaaccncatctccactttacagggatcaggaacagcaaaaggaaaatcaacaactaaaacaactaacaagaaatagaatgtgctaggagcaaaagcagccccgatc

SEQ ID NO: 148216 - DNA, 553 bp, Homo Sapiens
ttaaaatgactaatatttattacacaagtgcttagttacacttatctgaaaattataataggacaattggtgcatgtcacattcatattactatccatataagaacaaatacatttagtcaactatatcaggataacacacaaggtttttgtttgttttaggcttctcagttgaaagaaaacatcgagtaaggaaaatgaatttccagtgattaagtattaacaatataaataataaaaattacttctaaatgtcttacattttgacaactttgaattatacttacatactaatatttccaaaaatcatttaagttacaagggtcactgtcagggtgaaaatatattttgaaaagctttttaaagatatgttattattatgctttaacatcatttcatttattcttggcacacacggcatcttggaaagtaaaaatacatcttgccaattttctgctattgtgcagttacaagagaaagagaagtgtggggcagacagacctgtgttcagttactagctttgtccaaaattgtgttgaggctggtcaattacc

SEQ ID NO: 148217 - DNA, 405 bp, Homo Sapiens
agtttatttctttcaagagacactggcgttcagactatctgaatcaatccggtaactacgcccactgaacacctactacatgccaggtattgaactaagccgcccttcatatgccatctcatgtaattatctcaacaaccctaccaagttagcagcaaggtttccagttctgccttcgaagggaacctcctctcaccggagatccctatgacagaccctgcgaaatattttgctgcatcagaatgctacaggccgtcaactccctaacatgcgcaaaagcgggcagccgattatccagggtagtggattatccaggagagtggattatccagagtagcaggtctggcgcgatgcccgcccggctcagcccatctccctagcaacgaaacccttccgcgccgcccc

SEQ ID NO: 148218 - DNA, 919 bp, Homo Sapiens
ttttttaattataagtaaaaatgtaaacatttattcatgtacttatataactagtcaccaaaaacagcaaaagacttttctttacctagtacttctttttgcaaatcatagcatctggtttgcaagtttacttcctgttgtctagatgtccgaatctgctgagatctcaatatggctgcatctgacaacaatttcagatttttcatttcccttttcaaggcatactttatttctctgggatactgtcaaacttttattcagtatgtctatttctgtcaaggctgtttcacttatagatttaatttgtagaaaaactgctccctttcaatgaagtccagttttggtaattatcatatacttcatttttaatactggttagttcccttttagtaaaagtaagtaatgaaagagtcttattccagaaatatttgtactctgacaatctttgactgaagatgtatgattgtctatatttaatttttagctcatcttgcaaatgactcagttgtttctttactttctgaaattcattttgttgactttttaactgcatgcctacatcgtaaattctttctgttttggatttgttgtcaattttgtactgttcaagttcttggctaagagaatgcagcttttcttgaagtctcttttcacgatctacacttccttgataaaatttcatctctttttccattgctttcactttttcttccatagccttaaattcatgaagaattagatagctgactccacagtacttacaaactttttcttcaggcaacatcttttggatttcttcaggcaacgcatgcatgggaatgtgatgatccataacttcccaaaatatggtgagagagctttgaagccaaaggaaatctcgacttcgactaggacgggtgtgaaacggctttcccggtct

SEQ ID NO: 148219 - DNA, 490 bp, Homo Sapiens
ttttctttttggccagagataggtcctgttttgttagtaagactgccatttccctatgtttcacaatgccgtcctatgcacaaacatcctcaaagagttgaggcagctgattttaactgatgttacagagagctgtgatagcaagaatcaagtttgaaaagtaaggtggtctggagaaaggaacagctagggtggtgatcaaagtagagaagaaaaggcaaacataaaaccagccttcttaacagaggtatgcctttataaaacacatacacgctttttaattttatgatcaaattcaccaaaaaggtcctaagaaatgttttagtagtttatatagattcttcataaaagagccctctggatggcaaccaaacaatttttaagagaaactataaaatcaagcccaccaaaataatatattatttttggttaagtgtcttcacttcacaggaagcatcccagaactgcattccatgcatttttactagtg

SEQ ID NO: 148220 - DNA, 615 bp, Homo Sapiens
aggtactgcaccaatagctgaataggggcagttttatttttgaaaagaataacctttcaaatgtcatttgatagcatttattatgtaattgtcaggaccaatttattatgcatttaattagttgtaatctatgacttagtccaaaggtgattcagtatatgtacctaaaacttttccttcctcttcaccaaactactggagtaaccttactcttactgcatgactgaaataaggctttctatgagttttgcttgtagaacaatctttctttatatcctgcctcggccttgcctccttttttactgccgtgccttgcttgaatcttctaaccccagtcctcctcctcagtttgacttgaacttagatgcaaatacctgctaaggggagagtgaaaaaataattatttacaacatatactgtataaatgcctttatcttaagtataggatgatcatattgcagactaaaccgaaggtgatggaagggacccttaagtagaagaggcatgtgttgaacgcagatgaaaatgtaatgcttgggaacaaatgtgctgatctcataattgaatctattttcagccttttctaagtttctgattaaatatgtgatttttaaa

SEQ ID NO: 148221 - DNA, 347 bp, Homo Sapiens
ttagttttatggtacgtttgtcattccagcttgttaggcatgagtgtgttgttactgacagagcccctggaggacaggcagacactgtggttctccatggtctctcagtaccaggcacagagcaagcacccaatacatattataggaataaatgatctcaaatcttcacagtgcctcttatagatggcttttatgatatatatctgcagagaaactgaattcagggattttaagtgccttttttgcaaggcccttaaagtttgggaaagtaggtgcatggaattagaactcagattatcctgacttctaagatcacactcttcattgtagcacactgccttcttgcc

SEQ ID NO: 148222 - DNA, 856 bp, Homo Sapiens
ttaaaaatacccacatttcccccgtgtaatcattctgaaatcagtggctgagggcaagaggttctagcccagactcctcctgggctgactgtggccctaggcatgtcccctccccaccccaccgacttccggctttgtttcctcatctgtaaaaataaagagtgggagacttgtccccgagttccctttgggcactagccctgacttgtctaggggagtcaggagtcggtagagaggacatgaagcacagttgtaatggaaacactcacagaaccagggtggggcggccaggattggcaaaactgtcctgggattctgaagctctttcccctaggatcccttttagaattgaagacgccagttgatatcgtggctgtgtgttagcccaaatgcttatgtccctgcgtgttttctcctgcctttccacaccttccttcccttcgtgaaagtaataaggagtcagaactacaacaaagtaaaattggggtgttcagcttagggatgtaatcaacagtctcactccctttagaaatgagcctcgtttccatagtgaagttgggccgagtgggatcctccattgtcatagagttctttgtgtacaggtttgggttgaaggacaacaaaataaacagaaccagacccaccacccagcatttggacgccacgccggggctggacaaagtggacttgctgtccgtgtacctgagtgtcagggtggttttgccctgtgccctgccaaatcagagtgaatgaacattcctgtctctgtttagcagacttggccctttggaaactcaagaaatgcatcctgaaaaagctggcactgtgctttcctcttaggaccacaataggcaaa

SEQ ID NO: 148223 - DNA, 570 bp, Homo Sapiens
tttttggctattacatttctccataatttttatttgctaataaaacggaggcagagcttttttctaaaaataaataaataaacaacaacaacaacaacctcccccaccccgcaccttctgtgcaaattcctataaagtcttttatcctgtcgctgagtctgagggcaccccccctcccgtactcgtcagctccatctcgcggaggaaaacgctaccggcaccctcagctccgcccaagggccgcgatctctacaggggagatgaaaagccggcgacactacacaggcgtggaccctccaacgagtgttcctttcctgtgggttaagagtaggagcgtctgggcaaaagctgggagctttcagttgccaggacccttgggaaagcacgtatttagatttcattgataaattcaactgaatcccgagaaaaattatactccattcactggcatatttagaacggaattcccattgacccgaggctcccggttgaacccttcaagggagccaagcgaggacgttctcagaacagcagtgcaccgtgtacattgtgggagccccgcgcgatccc

SEQ ID NO: 148224 - DNA, 891 bp, Homo Sapiens
  misc_feature (98)..(98): n is a, c, g, or t
  misc_feature (138)..(138): n is a, c, g, or t
  misc_feature (276)..(276): n is a, c, g, or t
  misc_feature (285)..(285): n is a, c, g, or t
  misc_feature (316)..(316): n is a, c, g, or t
  misc_feature (343)..(343): n is a, c, g, or t
  misc_feature (804)..(830): n is a, c, g, or t
aatcaggtcagtggccaccttgatgctatgcttgtttaccctcaatactcagtttcaataactagtgatcatggcctcctaaagccatcccattcagnttttccagagattctcagtttatgagacgggaaattattncacgagaagcctcattgtcagagtatcttcattcaatggcaacaatatgctgtgtatctcaccaggtagctgtcaggggccaccgagagtgtcgttaaaaatgggcatcgttgtaataaaggaggaaagtgcgacttntgaaatgtntggaaggtttatttctcatgcacattccagngaaaagcagagagtaaattagagacgngataggaaggccgtgggagaactcgatcctagcctgtgtcagctggatgtgtttacgtggagaggcgtggccactttttaggtcacctgaagcagtttagcctttggatagaggaacctgcctgaatttatggcattagtggtggcatttttttgtgtacaagatgtgggtgatggaggggctgtttctttttccgtgtgggtggttaataatcgtcagtctcggagggcgatgctcgtaggatatttcaggtgagtcagggttggatggtcatcggctttcagagggagaccacgggaatgttcagggaaacaatgtcagcttctctgaggaccagaattcatgttcacgggcagtgatgagttggcttatggagtgagtccagtctggaattccgccgtgcattctagcctgtatcatctcatttggacaaatgctggcacgttgaaattaaaatgttnnnnnnnnnnnnnnnnnnnnnnnnnnngaacgcgtatgcggccgcaagcttattccctttagttgagggttaattttagcattagcac

SEQ ID NO: 148225 - DNA, 444 bp, Homo Sapiens
ttttttttaggggggaaatcatttattttcataccatttcagtaaaaacttaggaaaaagcaattgttccactgagaggtttgagaggagggtgttggggagtaaggaggaggagttatcttgctgtcaaaccagggtgtccttagtcattgggactgcacagatttcatagacttgggaggtcctcatcttgagttcccgggccacctggcagatggaaaaagcccaacagcagtgcaccgccagccagtcttcacacagtgtgccctgtattttatgtctctccctggtgccaattctcagtgcaaaggtggacccaggtaacaacggccaacaaagacactctccataatgcaaattctcctatctctgcagacactgaagagaccggtgctccagcccccgccagtctggacaattgctgtgattgtcgtcctgccactg

SEQ ID NO: 148226 - DNA, 850 bp, Homo Sapiens
  misc_feature (561)..(561): n is a, c, g, or t
ctcaccatcagcacatggctcctgattaccacggggttggcgaggacaccatagaccaaggcccgtgcatctgactttcctgggtcaactcatttgctccttaatgagggaaactggattcttccagagccacgctcgtgcttatactcaaggaaacaattctgtagctttcaaagcatggcccgctcttccccacacagcctgctggggagtgtggttctcagatggccacagtatgctgcatgatctacagatacctcaagaaaaaggatttgagaacagggctcctctgtgagcagcagtcctgggacagcaaagcccaatttcagatcccgcataaaacacaattgttctctgcaaataatgcagctaactgtgaaccaacccctacccacaactgggccagtatgtttagagagctgagagaggctttcattgaaaaagaattactgtatttgacctgataatttaccttctaggaatcagtcctagagaaatatgtagaaattcagataaggacttatctgaatctctatagaagacatgcagtgccttaaaatngggggtggggggagtccatttaagtgcatacagctttttaaagaatattttgtggcaggagaaagtgcatgtggtataaagtagaaaaggcacgatatgatattatacatgcttgatatggaatttcatattctgctcatgttaaagggcagagagaaaagacggcgaggaaatacagcagaatattaacagtagttgtctctgggagataggatttcaaacgtttctactttcttcccaaatttcccacaacaagcatatactaattttataatcaacaatatttagg

SEQ ID NO: 148227 - DNA, 424 bp, Homo Sapiens
atgagccaccgcacctggccttgtgaagtcttttctaatccaccctgtcccactggcagaatgtttcgccccttagccagtgatatgcctttacaagagcatatgttgcactagatgtttactcggctgctttccacaggccctttcaaaggccatagattagacccacctttcctgtagccctggccaattagatcacagagacctatgtagatatggtaggaaaaatgatccagaatgtagctgtgacctggaggatgcctgcatgttccttcaatatcatactaaggctttgtctgtcatgaagattattaattctctagaagtgtgctatcaacagatggctattgaacacttgaaatgtggctagtgcctcatgtcaaaatgacaatattttgaatgtgttaaataaattattaaaatg

SEQ ID NO: 148228 - DNA, 2083 bp, Homo Sapiens
  misc_feature (52)..(248): n is a, c, g, or t
  misc_feature (826)..(826): n is a, c, g, or t
  misc_feature (941)..(941): n is a, c, g, or t
gcccgggtttttttgggaacacgtttggccccttttcctttccttttggggnnnnnnnnnnnnnnnnnnnnnnnnnnnnnnnnnnnnnnnnnnnnnnnnnnnnnnnnnnnnnnnnnnnnnnnnnnnnnnnnnnnnnnnnnnnnnnnnnnnnnnnnnnnnnnnnnnnnnnnnnnnnnnnnnnnnnnnnnnnnnnnnnnnnnnnnnnnnnnnnnnnnnnnnnnnnnnnnnnnnnnnnnnnnnnnnnnnnnccgttttaggaaaaatagtttaatggtaggtttgtaacctcttttctagatgaggtccccttctcggtggaacccccacaccagtgctcttcccatgcctgctgggaggtagcagcccctctctggagggcacccacccattcccaatgcccctgccctcctgggaggccagtgccgtgtctaggccttggtggggccatcgctgtaagtttttataaaaagtgggcagaattctctactggcctctttcctggatgtgtgggaccagcccacagcaccttcctaccccttaattaaatagcccattaaataatctcttggtgctggcagagagggggtgccacagcaacgagccccctgccctggccgggctcccacggctccagcgcccccaccctgactggatctcggctccataagagcagccaggggcatggcctcatctcagacctggccaggcccagaactccctccccaagagggggtgagtccaagtgggtcatactggcaccagccaccccccacaagccacgcatgggggtcacccagacagcagagtaggcaaccgacaggctacnagctcttgcccaggtcagaaggacgtgaggttcttgatagctcccatctccagcatccgcttaatgggccagggcctcttgggagacattatggcctgaccccggcatggacttngagcgtgatctgctcatagtagtgaatggtctgcttcttgttgtaggcggtctgggtagccaaagccggcaatgtgcaccaagtcacagaggtggagggccagcgtgatggccaacaggcccgtggtgggcttctgcttaatcttccgtggctgttgcattggcaggctcagcagtttgtcagctgcaatctccatgaagaaggggttgagaatccgaatctgtttaggattgacatcccagatgatgggaggctgtttccaagaaccctttcgtaccggcttcttgtcactcaggatggtctcaaatccagtggaagtccattgcccttgaaagctaccaggacgaggagtgtgtctgggttgttttctactttggggtcgaagtgggcagattcagggtagaagagacgcatggtggtcttggagcccacgtcaccctcatagccagccactggggcattgttcaatctgatgaccacatcgtacttgttgatggcatctcccagtgagctgttccgcagccggtgcccgttccccacgaccacacagcggcggcacctgaggctctggatgttcttggggatggaggagctggtgatggctagcacccggaggagcagatcctcactccccttggtcccatagggcagctcgtaagcagatggcgtcttgacccagaaataatcctcaagccgcaggaagatgggctgatcccgggagtagttgccaaagagcttagaggccttgctctctgcctcaccctggaggcacggctccttcttctctgggatgggaaaataaaaaagctcgatgtacctgtcttcccgggagatggaataccacaccatgacgaccaggaccagagccaacatggccaggagcttccagcgggacttgctgaccatgtttctcagcaggcagcaggattcctggggagagctgtcatcccggctgcctcgggccaccctcacgggtggagcggggcggggcagcacggttccgcgcgcagctccgatccgctaggcgcaccgaccggcggcgcagcgctggcgcgacggctcgactcggccgggtccctgtcccgggcgcgggtccggcctgggagcgggcgagatcccgggaattccggaccggtaccagc

SEQ ID NO: 148229 - DNA, 546 bp, Homo Sapiens
  misc_feature (411)..(428): n is a, c, g, or t
aattattttaaaatgtgattctcttctttgtggctttccatcacagcctagaaaaaattgaaagatctgtaaggccctaatgacctgtccttcactacgtgtctgaccctatagcctactgttctccccttgtgcggtgtactgcagccacgttggccttcttggtattctttgaatacaagggagcttctacttcaaggcatttacattggctgttgccttagcttagaacgctctttctccagatagccgcagagcccgctctctcacctgactcatgtctctgctcaaatgttaatgatcaagaggcagtccccggcctccctcttaaaattacaacctgtcactctccaatcctttcctcacgattttctcaaaagcacttaccgctaaccaacattatatctaaannnnnnnnnnnnnnnnnnattggaatgtaagtttcatgtaagcaggaactgtatatcactgctataccctcagcatttaaaacaatggctgtacatcatacatactcaataaatatttgttggataaactaaaaaa

SEQ ID NO: 148230 - DNA, 260 bp, Homo Sapiens
acataagttatatttttattaaaaatcttttccagacaaaaaacagactttgattttgttttatgtgttgacagatctctttcatgtctggcttcacacagataagaaaatctggcctcccgcatgcgcagcaagtcctcactgctgtcagtgcgttcttgggaatcaggacttttaagtgaaacaacgtatagcaaaaccaattttaccagaggctaaaaaataaggattaagttcctaaagcatacttctggccaagg

SEQ ID NO: 148231 - DNA, 660 bp, Homo Sapiens
tttttagttttcacagctttattgaacagcaccctcaaaacagaaaccgtaggccaatctctgtggtgacagaaagaaatgtgagctttaaacaacacaactgtggttcacagagaacattccaaaatgactgaaaatgggaaaaaagggaaataatcatattttgggttaatgggtaccatgcaccctggaggaaccagaacagctcaaagtattataggaatattttagggtagaagaagtcatgttatccatctagacgcatccaccaaaagcaccgtccgagctcctggtaataaaaggacttcctgaggagggaacagagtgggagaacagggtgtcgttcatgctggttacaggtctgggaggccaagtatcaacgatgtgagccaagttgagtggcttctcaggctgatctgggaacatggggtgcaaaggttcacggctggaagcacagctcagggacttgcttaatgcattagtcagcttcttagcaggtgatttccatgacgtgtactctttcatttggtgctggttgctatgagaaccaccggcatgtcccctccaaaagcagtcctgacagagctggtattgtgacacttgtggcatcggtagccaaatccatcatactctcactgtgcagtaggaacactcaaccgg

SEQ ID NO: 148232 - DNA, 492 bp, Homo Sapiens
agagtactgagctgtctcgaagaattcagattattgaatgtaggcacccttttctgatttccttcatcaattcaattcaggagatgtgatgcaatgtgatgtgtcaatgtatgtatgatcgaagtgtcagtctctataagtactccgctccatgatcctggggtgaagtgctacaaaacacatttttggtggagcagaaatagtgctgcctttcctgtgcttcccacggctgttgtagatagaaagcaatgaattcagaattctcaagtcggccaggccatcttctcagtgagctttgcctcaggcaccctagatattaccacatgagagctatatttcatctgttcttaaatttttgcagctaaaggaccacatttgagggtcgaaatccctgccacaaaaccaaccttaccaccttttactactcataagaaaaatccatcagaatttactggaatttattgcaagaatgaccttccatttcatgagttg

SEQ ID NO: 148233 - DNA, 505 bp, Homo Sapiens
gtttctcctttatttaaagtttgctgtgtttgtaaccagtgtgtgttgagaaggaccaacaccaaaccaccctggggaagggggacagggaaacatttaacacagacgatgatcaggatttgccccaaaccaccccaagagagaggactgagtggaacaagataaagtgatccccagaacctctcttagtgtgagggtgggtagaatgagaactgacacctgggagctgtggggagcagagcggctttggggaagagtggagtgactagacacctaatgccctggcagctggagactcaaactcctgtacagctaccttctgggaaatagtttttgacacctatttttcagattcttgtccggaatttctgctgctcttttcaaaaaagggcattaacgattctctggaaataaagcacctgttagcctgacatactgccagaagcatggccggcatcacccattaacgagctccgccagccacgcagtcagtattgcgattcga

SEQ ID NO: 148234 - DNA, 312 bp, Homo Sapiens
gaggctgaatagtactccatggtatgtatataccacatattgtctaccccttcatccactgatgggcatttagttgtttccacatcttggttttactctttgaggaacctgcatactcttttccacagcagctgctccattttacattctcataaacagtgcacaaaagttccagtttctctacatcctcaccaatacttgctgtcttttgattttttggtaatagccatcctgacaatgtgcgttctgttcattttaagtctctagcaactaatgggatatttgaacaaggtgtctgaaacttttagtcta

SEQ ID NO: 148235 - DNA, 610 bp, Homo Sapiens
tttttggtatgtatctataataagcacctttattcatttataagactagttgtttttctaatttaacaggtggcagaagagaaaccagtgaaaagagatgtcttgttatatgcctgagcaaataatggatgggtggtggaattgtattttcagtgtggcatctggatacgtctccatagttctcagaagccttgtctgggtcttctttgttcttgacttttaggaaatacgatgacccattcagcatttttgttgatggcctctaactggaggcctttttctcttcttttaggagcacgcaagaatggcaagataggttttgaatcaggttttcgaggatggtgagcactgagtccttccataagaattggtatgtcatgcagcctaggcaaacggtggctcaggaaaatgttaaaatatatcagctttctgaggtaagcatgtccacgagcagtgtcagtcctggatctgcaggcccttgattggtgatgaaaacttgcccttccagcgtctcactggaatctcaccaacaccctggaaagcaagttgggatccttggccccgccatctgttatacctgcccaagctcctcttcactgatgaatcccaa

SEQ ID NO: 148236 - DNA, 338 bp, Homo Sapiens
tttctttctgtgtaaggggaacttttattagcaaaaaaagattttcataagctgcttagaaacagagtccatgggttccataggttcaaagcccgagttgttatcagttcattgacggagatgctgttactgagcaggtatcctttggagaatgtcttgtttgaattattgcagtcctaaagaatgtttaatgacaaaccttatcagagcaggagaagcatgaagcgtgtgaagcagtttttagtaagtccttggaagcagttcttacctccgacatgcatgcatgtgcctccttcccggccctattttgtctgggtccaacaaaagtgactattctg

SEQ ID NO: 148237 - DNA, 692 bp, Homo Sapiens
tttcaaccggcagttcagttttaattacgccaaatgaatgagctctagagctccgctagccggacatcacagccatagtcgcgatgctgcggtggacacttagcattttagcaggccagatctcatgtgttcttaccaccataaaacataacatcaaattctggaattaacatccccaaacaggcacgatgggatttgattatattgcaacgtatgctaagaaggggttattcatctggtgacagtggcatacatcctgccacggtctcctctggcagctgcccagagcacacagcagtccaggagatgcgctttgaatgctgtacccagcacttcatgggaaatgtgactttttaaaatggagggtgaatacgcgaagtcacaagtgtccctggaaatcagggatgtgtggctgttcacatgtcactactggggagcgtactgtgtctggggagggcctttgtttgagacaagacgtggactgaggacaagagagccaagccaagtcctgcaaaagaggaacaacagggcagggaccgggtgaccaggtggcgatggaacgtagagcccggactttgctgggcagtgggcaaagggcaggagtcaggctctggaagcctgggattccgagctcctccagggtctttagcccctggggtgaaggggacagggcacagagccgtgcgaagccc

SEQ ID NO: 148238 - DNA, 1125 bp, Homo Sapiens
cttgtctggtcgcgctcactgcagtgctggctatggtccctgccggccatgccaggttcattcatgggggtagctctcgcagcgcactgggacattcatggtatgcccacccgggatgcatgctctccgttcatcaggtcttcgaggggtaatgtgcaatgaatcaacgttgccgtccgtggctctctggtgtagctgatcgtagccgtgtgaccccaccatgtacgtagaatggtggtgaccacattaagggaggaatgcttatatagagctcatggttttcactgtcggctcatccaggctgtcgtagttgggcagcacctgggactggcaggcgaaggacatgccgaagatggggatgcagcggaagacgccctcccagcggacgtagctgacccgcacgcagccagctgcccactgaagaggccgtgcttgagagaggagagcacgatcacgaacatggacacggtgtagaagaggagggccatggcggctgaaggactggatggaggccatcagtgttccgctgcaggctgagcgggagcacgatgcacagcgacacggcgaacagcaggaacatgcggaaggtgccgcccacctgaaacccgaacagccgggcaaagaagttggaccccaagtcgccgatcacgacgtagaaggcgatgcaggtgcccagcatcagcccgatcatgctggtctccaccagcatcttgcctgccttcccgtaggcgtggaatgccaggccggcgtaggtcctccgcttgctcaggctggccgacttcaccaagaacatgcacgactggtgcgtcatccatgagcagaagaccaagagcagcgcccccaggacgatgccgcactgtttgaagcagaagggcatggtgaggacactgacccctacgatgctgttcacgatgttcgtgatcagcccccagttggaggcggcggccgcggtcatagtgagaggtctaggggcccggggcgagaggcctcgggggtcgccgggctgcggccggctttggaagcccagcccgaggccacggtcacaggtcccaacgtccgggacgccggtggggaggggatgggcagccctcgtgccgaattcggcgcgccgtcgacttcatactc

SEQ ID NO: 148239 - DNA, 452 bp, Homo Sapiens
tcccctctatggtccgtcaagggtctttattggaagagagatccagcctccttggctctgtcagcgccctaggtcatgaggatttcgatgtcaagctccagccggctggctctgacctcatagtggccccggatcaggcctcgggtttggctggcatgccagcgccagtgagactggatgatgcaggccgcttggcgtgcctggaggaaccgcctgcgggcctgccacattcgaacctgtgcctgcaccttcaccaccgcccactcctggcaggtatagagtcttagtgccaggcgccgtctttgctccaacatcttggcctgcattgacctccaccagcactggatgacccaggctctgagtgctgcctgcagtaacgtgcggcgcaccatgtttccacgccaccatgactgaatctttatggctgtcttctctaactgtcaggtaagtcc

SEQ ID NO: 148240 - DNA, 607 bp, Homo Sapiens
ttttttaaatgaatttgtgttttattagttacctatagttttcttcttcagtgacatatccacagctttagtttagcaccagcagggcattaaaatctgtttaatgaatgcacggttatattttgtctcggaatgtatagtcttctttatttataccagattttgatttcatctccatttttcctatgcttattctttccgtgttctaatagactgaggtcctcttctctgggactttcctaaaggctgctttagatttgtggtagtaggaatgggactgacagagtggatgaagtcaagtgctgtgtgtgcagagagggagactttgatgacaatggctatcagccctgcttatgactctctgctctgttttgcttcttgtaggctttcagttttttaaatttccagagctgcactgttcaatattgtagccgctagctacatgcggctattgagcacttgaaatgtggccggtctaaattgaaagatgcaaatatatattgaccaccagatatatttcagtcactttgtgggtcccaggatatgatgccggacaagacagatgtcttcataaaccttttagcctgaaggattgctcgagtccaag

SEQ ID NO: 148241 - DNA, 341 bp, Homo Sapiens
tttaagtatacttgttttattatttttttcaaactgttagtaaatcttgaagaaatttaaacatccttttgatatattgatgagcagcctgctcttggatgctcttgggagataattctccgtgggtattttgcatttcttcatgtccactaaggaataaacagccttaggtccggacaatctttttaagaatgtttgtatagcaaacaatcttggaagacagcaagagtgtcttatatcagggcaagaggaagctgtgttttctgatcaggataatgaagataatggctttgtataaggcaaaaagagcactagcaacctctttataagagattcttcag

SEQ ID NO: 148242 - DNA, 202 bp, Homo Sapiens
taatctgagacagagtctcactttgtgactcagactggagtacagtagtgtgatcatagctcactgcagcatcgacccctcgggctacaagcagtccttccacctcagcctccggagtagctgggactgcaggtgcataccacgaagcctggctaatttttgtattttttccatagagacagggtctcactatgttgcccag

SEQ ID NO: 148243 - DNA, 450 bp, Homo Sapiens
tttgtttgttgttggaaagaccacagcgtctactacaacttctacacgatagtacacgggatgttctcttcaccagtgaacaaacattcctcttctctgaatgtacccatgagaaaagagtgccaaaaaagtgacacaggcatactgctgagataaggcaaatgtgcagcagtcacaggaatagcagtgctcactgggtgctggtacagtttcaggtattgggctgggagttgtccagtcgtcaccttctttaatcttcacgacaactctaacatcgagtgctgtagttcccaatttactggggcaaaaagacaggttacgtcactggctgaaacgggctgacctcagtgtcaaatccaggttttgctggtcacagaaacaaagcttttaaaaatctctccaaatactacctctaggattcctggaggccagacaccctaaagaccagca

SEQ ID NO: 148244 - DNA, 652 bp, Homo Sapiens
ctttgttcagacggagacggagaggaaggctcacttacctgggtcacagccagaccacgtactcggcaagatgctaagatgctgactaagcgcctacctgtgccaggccctgggcgacctaagtggtttaccccagttctctctctcaatcctctcaaccaccctgggagatcagggaggatacattcccatttcacagatgagaaaactgaggcttgagagtcgagcccacagagaagcagaatcaagcctaagtctgtctgaatcccgaacccagcctcttcgctgtaaagctctcctgcctgagcagtgggggaagccaaggaaggagggcggccccttgcccccatctcccctcccggccccagccctagcctctcccactcaccatagggcagaggcagacccgtgccagcgtcatggtgaaggttgccatggtgacggggtggaagtccaggatcttggggtagatgtccagcggggacagtgtcccagatgtgatgatgacagactggaaacgctcaaatacgggtttgatggccagcgaggcgtccatgcagctgaagtgcaggatggggttggcaatggtcggggttctgtcgtcaaagggctcgatgatgatggtgaagcctttggcgtaggtgctgacaag

SEQ ID NO: 148245 - DNA, 470 bp, Homo Sapiens
acctctcagtcctaattttccccttctgtataatgggagttctggatcacaatatgtctgggctctcattacccaaacatctgagattccatttttgccatgtgtcatcgagtcgctccccaacagatgtttgtgatgtttttgtggctgtcaccatggtgggattctttcagaatgagactcctggaaattcactgagtcagcagccttcacaccatctacccttaaatatccaaccccagcaatttatacaacgctgtcatatttttaaaaaaacaaaagtaagccatcctcaaataaggaaccccttggtagatattaaccttaaaaagggttttcattctcaaacaagatgctttgttctccaacaagatgttcatctcatcacttgcacttttgttttaatgtatggattcagattagactgagaaaaatggatggtattttcttaaaattgtgccaccttagag

SEQ ID NO: 148246 - DNA, 450 bp, Homo Sapiens
ttttcatgtggaattttgttgtactttaaaaattggagatattttagcatatttcccacaattcgtgggtaggaagcagccagtagagagtgagaggatgaagaggatggtcaatagaggaggaggaggagagcttctgaagccagtgtctgggctcccagtgggagtgggagacaagagagtagaaagagtgcagtaaaggtcagtgtgcagatctggcgctgcagggggacggcctatcctcacttaagactggagtggtaggagaattttgtgaagatattgagactgtagaagtgtttgttccccattgaacgggactgggaggcagtatagtggttaaatgctccgatcttggtgccagactaatttggattcaagcctggcatttagctctctgagaatctgttttctcttctgcaaaatggaggattgataatcaggtatttc

SEQ ID NO: 148247 - DNA, 702 bp, Homo Sapiens
  misc_feature (15)..(15): n is a, c, g, or t
tgcaagggacagganctgaaccagcgactccaggtccagcagcagtgccaggaaggccgtgaggagcccgaacgccagggtgcccgccacaggcacatgtgtccgggggtgcacatgggcaaacacctggaagaagagcccatcggcggccatggcatagacaatgcgtggcagggagaagaggaggctgagcaggacggtgttcatggcgcagatggagccagctgccacgatgaagccagcccacctgtagccccgctggtagaaggcatctgcaagcgctgagtcggggtccaggctgtgccagggcaccatgagggttagcacggtggagacaaggatgtaggcaccagctgcaatggcaagcgagatggcgatggccagaggcacagaccgccgtgggttctgggcctcctcactggaggcggcaatgacgtcgaagcccacgaaagcatagaagcaggaggcagtgcgggccatgacgccggagaagccgaagggtgcaaagccgccttcgtcagcgctccagttgtgaggctgggccaggatgaagcccaggatgacaatgaagagaatgacaagcaggctgatggccgagaaggtgtgattgagccaggaggacacgcgggctccacaggagacaaaggcagagggcaggaggatgatgccagcagccaggaagtccgggtaatggcccaggag

SEQ ID NO: 148248 - DNA, 372 bp, Homo Sapiens
tgactgggtaacaattaactttattatcagtagtaactgtcagtttcaaccagcagcagttatcgctcccaccctttgagggtgggggccccgtggctaatgctgtctttaagaatacacatctgtgtacttcctgtttcttagctgagagaggaggcctcaacaatataaagcgcagggagctggggagcggcaagccagtgggaatgggcacctggccataagtcagagaaggggaaggagagttactttattctcttctggtgccagtaagaactttatcaaggtactagtgccatcagctcctgcccaagggcacccagggccccaggtcagcatgacggatttaagacacattacgttctgggaaga

SEQ ID NO: 148249 - DNA, 876 bp, Homo Sapiens
aattacttagcggcgactgagcctatcgagcagttttccatggacacagcctagcagaaagacgcagccttcgtgcttcgctgactgctgaccactgacccaccgccttgatgacagcaccctcgtgtgccttcccagttcagttccggcagccctcagtcagcggcctctcgcagataaccaaaagcctgtatatcagcaatggtgtggccgccaacaacaagctcatgctgtctagcaaccagatcaccatggtcatcaatgtctcagtggaggtagtgaacaccttgtatgaggatatccagtacatgcaggtacctgtggctgactcccctaactcacgtctctgtgacttctttgaccctattgctgaccatatccacagcgtggagatgaagcagggccgtactttgctgcactgtgctgctggtgtgagccgctcagctgccctgtgcctcgcctacctcatgaagtaccacgccatgtccctgctggacgcccacacgtggaccaagtcatgccggcccatcatccgacccaacagcggcttttgggagcagctcatccactatgagttccaattgtttggcaagaacactgtgcacatggtcagttccccagtgggaatgatccctgacatctatgagaaggaagtccgtttgatgattccactgtgagccatcccacgagcccctgcattggagtcagaggtacagatctattgttgatcttacaccaagatccaaacttgaacattctacttttgttgatacagaaaaaaacagatgatgccttttatgagcacaaaaaagagttgctgtagcttttaactttataatccattttttttcagattaaactaattgtgagatggtg

SEQ ID NO: 148250 - DNA, 364 bp, Homo Sapiens
gtcccaacagagacagacaaatcagagatcagcagcccttgaaaagtgtgcggtgcaacaatgagcaatggggcctgcgacatccccaactcttgctccccaagaaagctgtatccccagtcagtccccctcagcactggccgaagacatccggtgcctctagccaccatcaccactgtccaaggcactgtcttttttggggaggtatctgatttggtcagtcacaaattcttttttagccttccctggagaaaaacaagtccccaagaaaaaattcactctatgtagaggaaaagtattttctctcatgttagtacatgcagaacatttaatattccccaatatatatggttttttattcaaa

SEQ ID NO: 148251 - DNA, 749 bp, Homo Sapiens
ctcccacacaaaatgtattttattccagccaattatatctcccgcaaggagccattcgccttttgcttccctaaaaaaaatttctgatacggctggttccccacacccacaaaacatctcatcaaattcggatccagaagcataataaaaaggaacatcagcttctcccgccacagctcgggcaagaagtgtctttccagtccctgggggtccaactaaaagaattccttttggaagtttacctccaagaatagtaaatttttgtggatttttcaagaattcaacaacttcctgtaattcttgtttagcttcctccacccctttaacatgttcaaaggtgacatttttcatctggacaggatctactgcagaatcaagccctgttgttgtccggaagcggacagataaaaatgggttttttagaagtccataaatgccgaatagcagcagaacgaagagaatcagacgggttcgccttagggaatcattggttttttgtgtgagtgcttgagctttcagaaaaccttccgcaaaaccagttttaaatgcatcttggtgagcttcaggtatatttttggttttcatgagtttgtccaaactctcaacatctgatcctctgtcccgcaaaagaaaccccttcacgaatgatggcgctatattctgtgtttcagctaatctctcggaggtagactggagacgtcgtgtccttgatttcaaagttttaaaaccccgagactgtatgaaaaccc

SEQ ID NO: 148252 - DNA, 501 bp, Homo Sapiens
ttttttttaaaggaatttattgaggtacaaattacatatcattaaaaccatttcaagtgtacaattcagtgagttttagtaaatatgctgagttgtgcaaccattaccataatccattttttagaacatcatcccagcaagatccgttattccagtttacagttaatctcccgtccaacctctaatcccaggcacccactactcagtcgactttgtgtctctagagttgtctttttctgtacattttatgttatatgtgatctttctgtgtttttttcattaatgtgttttaagttcatccatgttgtaacatactagtactttattcctttttatcataaataatattacattatgtggatgcttcgttcattcactagttgaagaacatttgaggtttttccagtttttgcctgttaggaataatgctgctttgaacattggtatgcaagtgttttgaacgttagtgtacaagtctttgtgtggacatgttttcatttt

SEQ ID NO: 148253 - DNA, 436 bp, Homo Sapiens
tttaaagagtgggttgtgttcatttttaaaagggcttcacataaaaggaatgtggggctagtatgacatttctttcagtacattatgtggctggcctcttttacttaatcaattctgcaacaacttactaagaagacaggagaaaatgagccccgagtgttacaaggagcaaaagaattgccaaacctttctaatagtgaaccccagcatcgcttgtcaaaccttgtccccataagaacaccccagaagccacagcctaatgtaatgggctggagcagcagctattttacggagagaagcacccctgggctatgtaactggccacttcatattaacagctaagtgacctatagatacactacactctacagcctcaccccacaggtaaaaggcattttcctcccatttgtggaccatcacatacaattactagcca

SEQ ID NO: 148254 - DNA, 578 bp, Homo Sapiens
  misc_feature (104)..(128): n is a, c, g, or t
tttaatgtgaccaaagtttattttatcagaaatgaaaacagcatagttcccaaatgagaacattagttatctggttctactatactgtggtcagttctcatttnnnnnnnnnnnnnnnnnnnnnnnnncagtgcttgtgaaccgctgggctcaaagaacacaaaagttttatatgttgaaactattacctaccaacgtacaacttgaagatgtttgtttctatcacttttaatcaaatgcatataatggattacctagtaacattataactaattaagactctaatcccaagtaaacataacaaaatacaaatagtaacacctatccaaagatatcagtgcacactcatgacagaagatactgcatataccttcctttgacttgtttccaaggatgagggccattgctcttcattgcttttttaacaacttttgccagaatacaaagaaaaatagtataactactgctggatttatatagttcctgatcttgtttatcgcaacagcaagtcttcaccatttcaagcatagacaagggtgacttcatggtattagcaaggcctttaaaaggaagccaag

SEQ ID NO: 148255 - DNA, 1015 bp, Homo Sapiens
  misc_feature (924)..(975): n is a, c, g, or t
caagactctccttgtgaagatgagtgggaaagcagatttacttcatcccgatttccgatttgccacctaagaagccatatgtcaaacgacaaaaggttatcccagcaaactggcaagaaacgaaagccggagtggatccaaccgaagagaaaggggtgctccaccactcccctcccatcccgaggtgatctttgcctgctcttctctacccaagctcaagagctgcttctgttgctatctaagaactgcataccctcctccctgcttcttcccttgtgcctcatgtatgggcaggaggaaaggtgggagggggagtgggaatatgcgtgtgtgggtgggaatcggtaagaaatgcacctagcttttcatattgtgtttattctccaggctattgcttgcttcagctgcagcctgcctgtgctggctgctggggtcgataggcttttgtcgtaataggcagagatgacttgcatcccagctttccaccaaccaaattcaaacattcactgcttatttgttacagactgtaattattaaagtccctgagagctgttttctcccgttcctttttcgcatgcttggcctcctctctgtttctatgaaccacagaccacctaagcaagctgctgagtaagggctcactggaaacttgcagtcacaggatgtccaatctttggcagtccgagcttggctctaggacagagctgtccaatagaaatataatgtgagccccatatacaatttttacatttctaatatattttaaacaagtgaagttaatatgcatccaaaatatttcaacctgtaatcaaccataaaattttaatggagatattttatattatttttttggtactgaatcttcaaaaatcccgggtgtattttacaacttaccggacatctccattcagattagtcacattnnnnnnnnnnnnnnnnnnnnnnnnnnnnnnnnnnnnnnnnnnnnnnnnnnnngagtctggaagatggaagctagtgcagaaacctcttgttt

SEQ ID NO: 148256 - DNA, 441 bp, Homo Sapiens
ccaaattattttatttactaggattttgctaaaattaaatacagtacgtgggatagaaaccagagcgtggggcttcagcttctgagagaataaactacagtgaaacgtggcttcacttgagccgtgaaatgacatgttgttagagcgacaaatgagagatgaagaatgaccagcattccgtgtgggttctagacttttgatttccttccccaccacgtcccatgcaactttctttagctgccggggtgaagagacagtggcaatcagcatgtcctggagaggacacaggatggggagggacaggcagtggggctcaggtgcccttccttcaccccctctttgagggggtaccctaagttggcatggccattctcacatgtgcaaaagcagctggatccatccctgaaatgattttccgctcatgcaatttctatactcttg

SEQ ID NO: 148257 - DNA, 444 bp, Homo Sapiens
tttaacagttttagtaaacagtctgttttaatgaaaccttattgagacaaatgtcaataccgtaagatttaatggtaattgtgtaaatgagacattgcatgttaacagtccctgtatgtaactgttcctatggttgcaccaaagagctatcacactaggaaacaaagttaattaaagtccttccatcctccagagtcctagaggcatcattcttcaagcaggaaattactgctgctgctggatggggccatttggttacagcacgcgatggatggtttgatgtaagttcttcagttgagcagagatccatggaggagggtggcatgttataggttaaactggaaacttacagagctacgtggaatcaaaagctctgtgatttatgtgtttggtgaatgaacaatacctgtattggtttaaaacagtccttatttttatggttta

SEQ ID NO: 148258 - DNA, 163 bp, Homo Sapiens
cagatagagaggaaaaggggtccttgggaagttttcattttttaaagcatctctggaaaagtttcttgtaaagcccctgcttttagagccaggctggcaacctttgatatgcaaatgtaagccattagaaaccaggtccacccaggccaggtgtggtggctca

SEQ ID NO: 148259 - DNA, 406 bp, Homo Sapiens
tttttctatctgaatgtttatattttcaattctctatttccaacaattcccttcattatcttttgctgggcccaaggatattgaagccatccattgctttacttgtcttccaagttcatcagtgcctgcactgcaaactcttgtaacttcttacgttcctctaggttatactgaagcttttctagcaactcaaaatatcggaagagtgagtctctgggccaaacacggtcatcctgatccatttccattagcccgggcagattttcgtgcacaagagtctcccagtccaaacgacctgcagggaggaatgcttcagaaaagcacgtctagatttgtaaaagttgggtaagagctggtaaatcctatggtgtgggtggaaaggtggggtggaaagaggtaacaggaa

SEQ ID NO: 148260 - DNA, 1112 bp, Homo Sapiens
  misc_feature (89)..(89): n is a, c, g, or t
  misc_feature (184)..(184): n is a, c, g, or t
  misc_feature (188)..(188): n is a, c, g, or t
cccggacagtaagtgggccagtgtctggtgtgcccatcgatgactggtttcatccagctggttactgctggtacactgactgatagaangagagcccagcaatgccaccgtcgaagctggtgctggtacctatccgactttcgatgtagacactctctcaaaaggaagtggacagctcctcctnctgngaggcctccatttagcagggacagcttcttcatttcctcctgtcggatctgcttgctgtctagccagattacctcattggagagcaagggcttcagatccaggtgttggatgaagttggcccttggaggctattgaagatcagcgccaggggccgggggagaatccttccatccttgatggtcccttgaatcgtgtgggttttccctgagttagtgactccatatgtatagatgagccagttctgccctttgagtacatcctttaccatttccttcacagttaggttgaagaaggatgcctgtcccacttctggcccaaagatctgggaaaaggtgaacctgtgtgtggcttggccaattccccgttcattgctcttcagggcaaaagagtccttgggtgcttgtagaacaagggtctccacattctcaatacggacacaaccctgatcttcctgtcgttccaactctgaaggtaacaagggcctaaccctcaagtatactttcaccttctccatactgtcctcagatggaacctgctgcttgtcctctagggaggtagagacgacagagcagtctgatagcaggttcttgcgtaccacagaccccaaatctgcagctgtggactcaaacatgggagaaactacgacatcgtcatcggacagcaagcccgctggcggagaaaggatcccttgcgacatgacggcaggggcagcctaggtccgaagacgtgccacttgctcctcctgggatactggcttactcacacctagtcgccgaagctggactttcgcagccgcagagcacaactccgcccacgaggtgcagctttgttacagatacaatattttaaattacgcgctgcgttcgttcggccaatcagatagggaagcctgcagctaccaatccgcgtaaggaaagggggcg

SEQ ID NO: 148261 - DNA, 280 bp, Homo Sapiens
tttttagaagatagaagcattagtatttaattatggcatatacattccctgatatgtgggcaggactattgcccattattgacaaatgagaaaccaagatggttgattcttgttgttggttgatctgtttttcatccttctgcttcagatcctgtttaggctcaaaagtccaggctttctgtactgaatccagatcatccaatactgaatgttgcacatggaatatccttccttccctaaaacccaaacattcagctgaatgccttaggacacgtatctg

SEQ ID NO: 148262 - DNA, 348 bp, Homo Sapiens
aaataatattcagaactgcatttattgagaaaaggaacagaataaaaggtccagttttatgattcaaatatttaatggaatcacattaagctttaatagagagatgagactatctctactactagaaccagatagttttgtacacacacaggagacttttcacttcagaaatatttacttcccagggttttcttggctcaattcctgagttagatatattatttctctcagtaaggtttgctctggccagagacgttcatttctggtttgatccactctggattgacccataatagaattattacaagacagtattttcaagtgtttggagagtatctgctgaacccc

SEQ ID NO: 148263 - DNA, 414 bp, Homo Sapiens
ttttggtagaaagaaatagatttattctcatgtacaaagcggtcagcccacgggaccatatacgacagttgcacagagtcctagaaaaacgcatctctctaaaggcaactcagaaaggtaaggcaggtggaccccctcccccaccccacaacgcacagagaatgaaacggagaaaaagagagaagccagtggccgggctgacccaagagtcccggccctatggggtctcccaagccccagggcacaggtggatatggccttgaagagagagccctgccagggctgaggccaggtctctcactggctgcaggaatgggtaaggggctcaggccaaggggaacactcagggggcctctgagacactcagggttgggctctcttgtgccttaggttgcagaaacattccatagcctc

SEQ ID NO: 148264 - DNA, 486 bp, Homo Sapiens
tttttttcagtattttaattgctgtaattggacatttgaaatagcagtaagattctacagagtggcaatgactgagttggaatgtaggtgtttccattaatgtcctacatatatttaaattcggagtagccatttttcctggtaaattgtgaaagcaggacatggttctccaaggttcacaggtaaaccatcccaccagagcactaatgagcagactgctacattttactttattttgcttgtaaggaaaacaaattgactaagctgtccccgaatttctagttataacagatgtatttctaaaacaagcagtaaattaacaaaattatggcagacagtgccatattcccggaattccagaagccctggattaatgatgagacccgagttaagtcccagcactgccacttactggcagccatcttaaagtctatttccttatttgtaaaagggacctcttaatccgggattgcctacaccatggca

SEQ ID NO: 148265 - DNA, 379 bp, Homo Sapiens
tttgttttatgagttttattcctccttgagttgagaacacagtttcttaaatttgaccatgaacattccattgagagactgatgataaattcacacgtagcctccctttaactgacggacttaaacttgatccatggatttgcaccacgaacttcaaaagatgaatcactgctgtagatgtgatggcctaattcttccaaatgtggctcaggatcagtggtagcaaactgggcagcatcatcaatttctttcctcacctcagccccaatttcctttaattcttccacagtggcgagcttgctgtttaccattctatcttggagaattattataggatccctcttacttcttacttcctgaatttcttctcgtgtacgat

SEQ ID NO: 148266 - DNA, 582 bp, Homo Sapiens
  misc_feature (76)..(96): n is a, c, g, or t
caggatggtcccaggcaagctgatgtctagagtaataaccctgcacatatgaatcttttgaaggattgggcatgannnnnnnnnnnnnnnnnnnnngcactggggttggctggggctaggagtttgtgatgaatccttccagtatttttctgaaaaccagtgaactattttgtaggtttctgtgtcgttagaaacatgcaaacctatccactaaaaccactccagttgatctattaagtcattcgttaggtcttacctggactctcttcactgtcactatcatgatctgtccacatcactggccctttctcctatcacctagctctcctgtgagcccagcactgatataaagtggtttctagtcttcttggactctcaatttaacttgcttcccatgggaatcttctaactgtttccccaaaccaccttgtagacattcatttctttgtttaggattctaagaataggaaagagagacataagctagattccattcctgtttcagtaagattatctttccaacacaagaaaggaatacatctaaaaaattctttcagcattttttcccgctttattgagaaa

SEQ ID NO: 148267 - DNA, 496 bp, Homo Sapiens
tttttttgaataacattttgtgtacttttattagacctaagtggaactttatctgaatctgaattttccaaggggccagtgtagagtgacacaggtgtccgaggccacctttccatcttcagacacccccccgtctctctgcacagggagttgggcttccagtaggtgttgctcttctgtcttgacgtctcctggaaagatttttatctctattttcctgtggtggtgttttccacgagctaattctttctatctttaaactcattggctttggaggagctggattgttagatgacgatctttgtcccaggagagtggcactctgattcttgtggccagcgtatttgtgtattgtctcttcatcagctgacagaggtgaaatttttccaaaagcaggttccaatgcccgagtgtgcgattcttgccccgcgtttggggacgctgcagatttcttcgcgggtttccaccgctgcagctgaggagctctcagtttttc

SEQ ID NO: 148268 - DNA, 694 bp, Homo Sapiens
ccctctacatttaactattaaaaaagttttttattaataaatgggctcctctgtggttcatatacaatcataagtgaactttaaattccattttatacaaacatctcaaaaaatattgggagtgaagtatggtaggaaatattgctcacattgctaattaacatgcgtatatgaaaggaggaaaatgttttgttagtgcatatacctccagagcagaaaacccacccaaaacaaaagatctaaaataaaacatacagtagctgattacaaaaaaaggtaatgtccacaaaattaagtttttcatgctattctactttccagtactatgcttcaggtaatcaatttgcatggctagatgttggatacttgaggtatataagaagggaaacctgcatgttgaggaaaatctgtcatcttaagggttgtttctttttgtttgtttatcctggtactttaacatttttaaaagatattttatttacatcaaaattcactgaactacaatgacattccaattataatagatgacaaacaacgcctctatcactaggcacttttaaaagggagttcaggctttacagaacccttctgatgcaatcccatgtatgatatgacatcatcccaccaccctcgtcccactaaaattaccctctggggaaatattaccttatatagcctgattaatttactatgg

SEQ ID NO: 148269 - DNA, 832 bp, Homo Sapiens
ttttttggatcagtgcagtttagtggtctaatgcgtctcaaaggattacagcccttttcacggacaaagtggttggctctgagaagagcctttggatttaaggtttgtactcaaaacaattcacgccctctccccacgaatgcggcgggcaagctggatgtctttaggcatgatggtcacgcgtttggcatgaatagcgcacaggttggtgtcctcgaaaagccccaccaagtaggcctcgcaggcctcctgcagcgccatcaccgcggaactctggaagcgcaggtcggtcttgaagtcctgagctatttctcgcaccaggcgctgaaacggcagcttccggattagaagctcggtagacttctggtagcgacggatctcgcgcagagccacggtgccagggcggtagcgatggggcttcttcacgccgcccgtggccggagcgctcttgcgagctgccttagtggccagctgtttgcgcggtgctttaccgcctgtggatttacgagccgtctgcttagtacgcgccatagttcatctgcaaagtaaatgagttaggaagattggtttgcccctctatataggaacagaatcactctgattggattgtggacgatccctgttagtgatcggttgctaaattccggaagtggccgtagagattcacgattggtttattttttcagtgcaagattctgattggtaaatttggatagagaactggctctttcaaacaagtcgttttccgttacaggtttctttgatgtttcaccgtagaccatgacccaaataacaggacttcttaacttggttttcgcttccacactcaaca

SEQ ID NO: 148270 - DNA, 540 bp, Homo Sapiens
tttctgagcatttgtttatttgtaagatggaagtcaaagtaagtgggaagtctgtaggtcagctctattttccatgcctgcccttgacttctcctcagctgttctctgcctgtgcaggtgaggcaggggaggtggttggtccagagagaactaaaagaagttgttttcttggactataggtccagctgcaaggcagggtgcctttcctatgtgttcctcttttcactaaaagactcaaaatgctttagcagctagatctggaactaactcttctggatggggtaggaacttccctgcccttcccttagggaagctcatgtttccaagtcagacagcagggggcattgggtgcctttcggacagaaggaagctgcctaagctagaaggcctgcctgctgtagtttatttcttttgccttgttcagtgaatttacccagagggtggctgagattgaggctttgggagccccaagaagctgcttggttttaatgtgctgccttatagctgagcctgttgtgctcagggcaagtagtaggatgt

SEQ ID NO: 148271 - DNA, 594 bp, Homo Sapiens
ttttgcaatacctagtatttttattaattaacttgataattgttgatgtttgatgatttttctccatgtaaatattcaatgcgaaatgtttatctagtatttgaatttaaatgagttccacagatagtgtgcgagtttttccttacatcttccttgcacagtagaagaaggaaggaaccgtttagatcagttatagtttcattttgcctagccaaagatccggaatcattaatccactcccacactctgacattccagtcattacctagttctttcaaaaaacatgtagtcaatgaggaaacaggcaccaatcatcacggctttcattttaacatcaaggtctctagggaattggattccaaagttgtcagcatcagtaaatgcctctcttaaaaacccagaccagtgctttgagatcctgccaaccacaatttgttcatcaagagatgtaatctcaaaatcaacacccgcaatacagctgcacacgatacatggaccactaatttttagtacatcctctctcttctgatgtttaattgtagaacttgttagacatggggtgccagtctgagtaacatacctactggttacacc

SEQ ID NO: 148272 - DNA, 1246 bp, Homo Sapiens
  misc_feature (60)..(61): n is a, c, g, or t
  misc_feature (196)..(204): n is a, c, g, or t
  misc_feature (472)..(481): n is a, c, g, or t
  misc_feature (944)..(957): n is a, c, g, or t
  misc_feature (979)..(989): n is a, c, g, or t
  misc_feature (1058)..(1058): n is a, c, g, or t
atagaggaatattttttaagtcacgcccgtgcttctccgtctttatttgtatgtagaggnncaggaatactcccggatgcgcccacaatgctcccatgacaaggagctgacaagttccattttccgtcgcgggcatcttggaatcatgactcccacaatgccttgggcacttggtcgacagtggggccgcctctgnnnnnnnnntgtgagaggttggtactaagaagtgcctttcctgacgtctctgctgcttggaaccgcttctagagcagtctctgcttttgccttgcttgctgccagctagactgtgacgacagcacatccaccctccacctctagcccagacacccccatttctacttataatcaagagaaaagctctaagtatctggcattgccctaggctgctttagtgttaaaagaaaagtttgctgaaaaagtaagatatcttctgccaggaaatcaaggaggnnnnnnnnnntcattttctcgattttgctctaaactgctgcatctgtctatgccaaactaatcaataccgattgcaccaccaaactccattgcaaattcagctgtgaggagattccctttcagacaactttgctgaaagcagcttggaaattcggtgtcgaagggtctgccacgttttcatgcttgcattttgggctccaaattggcactgggaaggggttactgagagcacaaggctgataccaggccctacttttaaacggttcatctacttacaatcctagtatttctctaaaaaccaaaacctcctttgaattaacagtttcatggctgtgaattttctagtggggagatctttttccctttgatattgaacaacacaaatttttcccatggaactttttaaagcaagggcaatgggggaaaaaagatttttggaggggggaaatttttccatccatcaagtttcagcnnnnnnnnnnnnnngggctgttggctcctttttttnnnnnnnnnnnttaggacacaatcccgaacaaccccccgacacccagtattagcgagcactgatccctccccctaatcanacccctccccaccggcgagcagtaacgcgttacccccagtcgaatgtcttgtcatccttgcaggaggataccacacctgttaataactcactaccttgcgttcttcagacagcctgcataaggtgtccgggagcacggctcctctggcgcttaacgattgtgtcccgggcgtatagcctaccgccccc

SEQ ID NO: 148273 - DNA, 383 bp, Homo Sapiens
ttttttttgctgataaatgaatttattttataagtaaaaggctgatttttattagatattgtatattttgggggattttaagtcagggggcaaattcagagtgataaaactcttttttgagaaatttagtggacttcgtaagttgagacttcctaaggacaggtggacagacaccagcttggatttaatatttcattccggggcacttttcattttagttgtaaatttttatagttaaaaagcaaaaagactctcaatgagattttgtatgtggcttttatctgttttcttaatttcattctggttgaaaatggaaatttgttttgtctcaggcttgtggcaccccaaaaatcaggacttccctcttgcgcagagcacgacgt

SEQ ID NO: 148274 - DNA, 656 bp, Homo Sapiens
ttggctctagcccaatggggttctaaaaagtcttaaaatcatgttgattgtggtgccagatccatgaagaaagggcagctgtgaaaggcaggccttttacattctttggcatggcaggtctaagatacaaacaggcctctcacctgctaacactgcctgcctctcacagcataacgtcaaagcataaattgccccaaagtcgcggtttctgtgttctatattacaaacactctcttatcactagagaaaagaagagagagaactaagaggccagcagggcaaaaaatttctttctgccacctatcatctcaccatttctaatacactcaccatgtacactctgccttttgacatctaggtataatcctcacccagtttgggaagtctgtcttcaaggaattgtggaagacaagcactgcttcagcataggaaggcgggattccagtcttgactattgctgattttatcctgatatttcgctctggtaaatgactttcccttgagtaacttggaatgggattgcgtttgaaaccataatgattaagtttgaattgtagagtggccttcctgaatgcttgtggaattcctctgagaagaaactctacggtcacttttttgcacgtccttgagaaaaataaattatctaactgcttaaa

SEQ ID NO: 148275 - DNA, 367 bp, Homo Sapiens
tttttaatttataaaattttcttttatttgacaattttcttcctttccttgtagttgctgcattccaaactcaaaataaataaagtaggaacttttggtagcttgtacctgcttctacagaggtcctgggtacatctcttccacctctaaacccatttaaaaatgatagatgactgtcagctttgtgaaagcagcacatggcagtggcttgatagcgcagaatgaaagcaatctacaagtgcaagtctgtttcttttggcaacggaaggagttgctaatggattcatcattttctgttaagcatgaatgtcaaacaaaaaaacatttagggctctattcaactgaatttccggctcgacgcttgcca

SEQ ID NO: 148276 - DNA, 534 bp, Homo Sapiens
  misc_feature (494)..(494): n is a, c, g, or t
tttaacagccacatatttatttcaaacactgttatttggtttatgttttcttgtggttctgacaatgatactgcagcttcttcaaagccaggagagctctgtggaagcaggttagacaagaggattccagccgagaggacccctaatggcttcctctgggttcccgctctatgattcacaaaggtgtctttagctgactttaaactccagttgtcatacaggttgcagattgacttggccaaattaatacgtggggtttactccttaggcaataatccattcagctgtgggagaggaggcttccagttctaagcccagcttcctggtcccaggctgccagctttccccagtggtcgggtggctggctcttaccttgaggtctcaaatccgatgctcagagctttctccatctgggcccattgtggggcaggtgctattgaaagcccttgcagagtcagcgggcctcgtccgagagatgctgagcgaccattttnctcacgtgaatacacctgcaaagccggaggtatattcaaa

SEQ ID NO: 148277 - DNA, 753 bp, Homo Sapiens
tttgagcagatccattcttgtttatttaattactcaacagatattttctgagcatctgttttgtgcttaacacagcaccactacctaaggaaacctggagaaagtcgaagatatggtccctggcattcagatgcttagtttctgttggggagaaaagactacacaggcaaggtatgatctctgttgcagtgtgtaggatgaacggtcaaagatgccagtccacaggtgctcagcagcagacttgaaaatactttctagagaaagcaggctaggcccagaaatcgtctctgggacttcagtttcccatcagtcaaacgagctgttcagttatagaatgatttctctccactgcagacttccaaggatggagaaaaggatctggcttggcagagggctccgtgcagaggggaccatgtgagcatgattccgaagtagtcctccctggcctctggctcccgcatccgggcccgggcggcctccggaacgaaaggacctggtggctcctccagacccgacggctcaatccccgagggttctccgcgggctccggcttctcgcccaccggtgcccaccgtcaggcgaagcaaagctgttagctcgtcctggtaccgggcgcccacggcgcagtccccgtagccggtcacagagtgtcgtccgggttgcgccccccgtctctccaagggccccgccgctcccactccggccccggctagagctccagggctgcccagggccgggggatacgattggcgg

SEQ ID NO: 148278 - DNA, 589 bp, Homo Sapiens
atatttctaagaatgcctttatctttatgattctgggttacagttggtcaaggagctattcgagtgaaacagcttcagtgagcagtaaaccagatcacatacagaagcaccagagagtgcctgggaaaggcctgtccactctccagggcctgagcccctctggctggcagccctcccctcaccgtcacttcctgagtggggcaggaatgttattgcacagaaggctgatgctcatgcagggctgtgctacgctgctggcacagaaatacaaagctgagttccccagctccagagagctcaggtttagttcagagtgcaagtcagggaactgttgtgcggagaatcgttcaagaatgtttccttttgctctctcttctccattataatactgaatgaggaactggaggccctggtccaggctctgttggtaccagtacacagagaggtctccagacctaggggagcatctcagcgtcactcgctgtccagttgctgtgatcaggtgctttggggtttgtgtgactccagaatccactgggcctgctcccaggagacaaaaggccacacagcagaggagcctgaagcccat

SEQ ID NO: 148279 - DNA, 432 bp, Homo Sapiens
  misc_feature (326)..(392): n is a, c, g, or t
ttttcggtttgcatagtggtctttaatgttacagagcttgtcttggggaagataaaatgggacattgtgatcttcaatttatttctccttatccacataaccaaaatgtgaacctgcagggacaggtgagaggcactgatgtagagtggacagaactggaagttaggaaacctaggtttgttgcactggacaccatctcgtttgtctccctgagcaagtcttgtccactgtctgggcccatttcctcaaccaaacaacaagggcagttctcagtgatatctaggtcccttttgcacccttgttctcctccctcataagctctgctnnnnnnnnnnnnnnnnnnnnnnnnnnnnnnnnnnnnnnnnnnnnnnnnnnnnnnnnnnnnnnnnnnnttacaggcatgagcaccatgcctggcccctgagatcttta

SEQ ID NO: 148280 - DNA, 199 bp, Homo Sapiens
gaacataaaataaagaaacactttataaaaatgcccagctgtcatgtatgtcttacagtactaaaacaaaaattctgcattaaatctgtgcaaaattgaagcatctgacaaaggatcatgatcctgctaaagatcacttccaaatgaaaatttctgcgtttctgctaccacatttaacaagagtggcatgaatttaaag

SEQ ID NO: 148281 - DNA, 550 bp, Homo Sapiens
tgtttgataaaggtcaatttttatttaaaaagtaagctttcagaatcaattcagtggtgctacaacaatcatggaattattaaattgtttttcaaaaagcttgtaaggaaaaataatatagaacatcattttgaatatgaagtccatatttgccactgaaatgacaataaaacaaatgcttggcttcagaagaaaagcttttacattccacaatataatttgatacttctaattatcatgtacatatagaaatatatggtagagaacatcttattaaaatagtgatcattccttaatattcaataaaatatttattaatacatagcgaattttaagagtaagagataagtatcaatgcagaataatctgtctacatcaaaggtgagtgaattaacggactattttgaggtaattttactcattgaattgactttccatggcacctgctctgttgagcaattatgtgtgaaaagccatgaactcagtgttgtagcagatataaacatgaagaagacacagcctctctccttgaaagtttatagtgtgttgg

SEQ ID NO: 148282 - DNA, 954 bp, Homo Sapiens
ctcaatcagtctacagaattaagacttcaaaaggctgacctgaatcaccttggggcactgggttctgacaacccaggaaacaaaaacattttagatgcagagaacacaagaggtgaagccaaggaactaacaagaaacgtgaagatgggggatcctctccaggcctacagactcatcagtgttgtcagccatatcgggagctccccaaattcaggccattacatcagcgatgtgtatgactttcagaagcaggcctggttcacatacaacgatctatgtgtatcagaaatctcagagaccaaaatgcaggaggcgaggcttcactctgggtatatcttcttttacatgcacaatgggatttttgaggagctgttaagaaaagcagagaactctcggctacctagcacacaggcaggggtgatccctcagggggaataagaaggtgactctttgtacagacctgcttgacagactcactcggcctcacttcatccttgcaaagagaatcctgtacttcatccttgcaaagagaatcctgtacttcactcagaatgaaggaacaagtatctcaggatgaaatctcaatgaaaaacacttattttgggggaatatctattttaactgcttcagacacctagatcccagaactcaggcgcatatgcatattttccctgcaagattagaatggtgctcttcacgttttgacagtggttttcaaaatgttgttcttcaaccagcaacagcaacagctaggaactgattagaaatgcaaattcttgggtcactctctagaccaactgatgcagaaacaggaggtgtgagccagcaatcagatggagattctagtgctcatgaaagtttgaagaacactggtaatgtgtggagtatcttggtgtattttgctactgttgatatggattgcttatgttatataaacgattttcattaaaaaaa

SEQ ID NO: 148283 - DNA, 440 bp, Homo Sapiens
taatcaggaagaatatttattttggctttttgtccacaactcttgtcaacacagagcttgcactgttatcacagtcctgcctacatgtaaacgggggctttttaagtttttcaaagcaagctttccggaaggaagctataggccacgttttagcgacagacagctggaaagacagagctggcaagatggtagggctgaataagataggatgccagggagcgtcagtgttatcctgactccatgggtaagtagaggcaaaactgagcacgtgatattggagaaggcaggacaaaaccaaagcaaatggggacatacagaggcttttcagaaacatcacatggcagaggtaggtgcttttcttagtcaaggggaaacgtgaatttaggtttcagggatggtttacttgaagggaatcccgcaagtacatattttgaaatata

SEQ ID NO: 148284 - DNA, 529 bp, Homo Sapiens
gcaatggcaattaggatttattaaacattctctacttatatactgtcatagaagattatattattaatagttattcttttgaagtcacaccttaagaatggaagaggaagggaatagttcataatagagcctgaagtgttggattctcaaaacccagaggatgaccttctcatgcatttgctcttctctactaagtgaggcctggtaaccccaactgctgaatcaatcctatcatgtagttcctaccaaaaacacctgctcctttgaaaataaagatcaattacatgccaatttctttaatttcaaaattcactctcatttctactgtatttcttaaggtagaagtttgactctcttaaaatttccccctcacttctcacttgtgagaatgaccttcttgttattccacaatttctaattattatccagatttatgttactaccttttttttacacagctaaagagattcttatgttttgggaaagtgggtagaggtatgaaaatgaatagatatcaacttaagacaga

SEQ ID NO: 148285 - DNA, 951 bp, Homo Sapiens
  misc_feature (846)..(846): n is a, c, g, or t
cgacccgtgcgagggccaggtcctgcgcctgccccgccaggcgaagcgaggcgacccgcgtgcggccatggcttcgctgctgggagcctacccttggcccgagggtctcgagtgcccggccctggacgccgagctgtcggatggacaatcgccgccggccgtcccccggcccccgggggacaagggctccgagagccgtatccggcggcccatgaacgccttcatggtttgggccaaggacgagaggaaacggctggcagtgcagaacccggacctgcacaacgccgagctcagcaagatgctgggaaagtcgtggaaggcgctgacgctgtcccagaagaggccgtacgtggacgaggcggagcggctgcgcctgcagcacatgcaggactaccccaactacaagtaccggccgcgcaggaagaagcaggccaagcggctgtgcaagcgcgtggacccgggcttccttctgagctccctctcccgggaccagaacgccctgccggagaagagaagcggcagccggggggcgctgggggagaaggaggacaggggtgagtactcccccggcactgccctgcccagcctccggggctgctaccacgaggggccggctggtggtggcggcggcggcaccccgagcagtgtggacacgtacccgtacgggctgcccacacctcctgaaatgtctcccctggacgtgctggagccggagcagaccttcttcttcctccccctgccaggaggagcatggccatccccgccggattccccaacttggcagggcacccgtactcaccggaggtccgccccaagccctctccactgtagccaccccctgggctncccgcccttggccagtcccccggcgtctccatgatgtcccctgtacccggctgtcccccatctcctgcctattactccccggccacctaccccccacccctctcc

SEQ ID NO: 148286 - DNA, 810 bp, Homo Sapiens
tttggatatggattgatgtgggatctgagagagagggagaggaatcaagcatcactccaaggtttttatactaagaattcagaaggattgggttgccattaattacaaaggggaagactaagaggagcaagtttggggctgaagatcaggagggttcatgtcagttttggacttgttgacattgagaaatgaagaggaacaataagagttctggggaaagatctgcatataatagatgctatttaaaacctgaggccagattggatctccatgagagtgcatttaggaagaaaaggaaccctcacactggatcctgggacaccccaatatgaggtcagggagatgacaaggaacttcatgggtggaatgtcaggaaattttcattaagtcagagatttgctacttttcaatcccacatcttgccagctcccagaagtggtattgtgaaagaatgagattttatattgtgtttaatgtctaatcagttaaagtcatttacctattttatttgcaaaataatttttggcaaagaggaacatttttacatatcttcctagcaataagaatgtgttcaatgtttacaattgtttggttacttatgaccccagatgtgagattatagtaagtgattatcacaacgttgttgagacaaatcagcctcctaagacaaagacactttacattaattgaacaaaacacaatcttctgaaatagtctaacaaatgtaatgtctcaaatttaacactgcggtctgaaggttttatgtcacagtccttgcaattattaaaacaaacctttcgatattacaaa

SEQ ID NO: 148287 - DNA, 444 bp, Homo Sapiens
ttttgttaccttgatttcactttaattaattaataaatgatcaccatggctggcggctgcatgctggagggtacagctctggattgctccgacaatgacaggctgcaaacaccaaatcctcagacacaacttcacactttcctatcaggcccagagctcacagcagggattaacagacagacaccaggggagtagggaacctgtccttcagccgtcagattggagttcaaccctaagggacccaacctctgaaaggcaaatgctccacactggcacccgggacaggagtgttcaggggcctgcaggaggctggcactgctgagttccacgcccttcccacacatctgtttttctgcagcatctgggattgccaagcctccccttttcggcagccccacagctggccagggcagaggggttctgtagtggtggccccaccctggc

SEQ ID NO: 148288 - DNA, 672 bp, Homo Sapiens
tttattattcaccgttttttattaaaggggatgattggcagggagaatgtggagaagaggcccaggagtggggttgggagatgcctaattcttggcaggatctggaagaagaggcagctggtgggatcttcttcagggtagagaggttacagaatacgagactgagcctttgagggcagccacctcctccctgaggcctctggggtggcagttagttctcaaagcttgtttcatttatggtccagcaccataagtgctgttgctgacattattggcttggcagtgaaatcaagcctgcgcccttgggggcggtagcgcggggtcttgcccggatggtcgatgtgatggtgtcaatggcagaaggaggctggagacgtgggcactctaatctgatccccaacattcactggttatgtggccctgggtgcatcactgaacctcctctggcctctgttgccttatctatggaacaccagccaccatgttggaaggaagcccaggtgacatggagaagcatctgtgagtgctctggcaggcacgccagcttgaatctcagccatcagccagcatcaaccaccagatgcgtgagagagagccttcacatgacttcaggcctcagcctgcaagctgtcccagcttatgctgagtgagcacagacaacctatccctgct

SEQ ID NO: 148289 - DNA, 517 bp, Homo Sapiens
tttaaaacttgagtggaaacagtttatttctcttcaaacaaaagcaaaggcacaatgttgtttcttgtcattttggaataactaccctgcctcttgtgttttgtaaactcattcactcattgtttaatgtgccatgaagtacttttttcttgagagtcaaaatctgtttgttcccagtgtccaaaaatgtgcaatagtgtaaaagtggtttttaaaaacatagccgggtgtggtgacatgtccctttagtcccaacggctcgggaggctaagtcaggaggaccctttgagcccaggctgtaatgcaccatgattgtgtttgtgactagctactgcactccagcctaagcaacataatgaggcctcatccctgtgggctttgtccatgtgtgagagtggcaatcccagttgtcggatactgtgcctgtgagcagtgaccaggtaggagagtcacatcacctaggttctgggccaggaatatgtaacaatgccccctaggtattgagtccagggaaaga

SEQ ID NO: 148290 - DNA, 549 bp, Homo Sapiens
  misc_feature (192)..(200): n is a, c, g, or t
ttttccaaagtatgatttttctggaatttgaccctgaaagaataggacagagttatcattttttaaaattattttttccttccatccacagatatagactcattttttttaaaacctccatccttacaaaaccttggggagtagagccactagccccaatgccttccatcctctggattatccatgattagnnnnnnnnngtcacctccaattagggtatgtcatagatttttaaaaaatgaaactaaagtttaaaataacatgacagtttgaagagttaatgctaagtaaatacctatataaaatattgacccaccccctccacctttgttgaagctggagggaggaacagtaaaaacaatcatgtgttgtcaataaaatgaaaggttctgtcagaaatgagtgggaaatgggcacaaaattatggaactgccctggatggctctgctctcctggaaatgactgccagatacaggaagcagagagtagaggtccactgggaacagatctcagaagtagagaggagcactgctagagagaaagggacct

SEQ ID NO: 148291 - DNA, 782 bp, Homo Sapiens
tttttgaggtgtgcctgaaattgagtttattattgaacgaatgaaagttctctctcaactcaggttctttgcagaggctggtcccttagcctgggatgcaactccctaatgtgccatctggctcactcctactcatcctttggatctcaggtcaggtgccccctcctccaggaagccctccctgactcccaggctgagtcgggcttcctcctttgtgctcccacagccctctggggtcccccatcccagtgctgccccctctgtcatcattatattgggatggatctgactccaccactggactctgagtcctgtgggggcagagcctggcctgtcttgtccattgctgcgtttccagcatgcagataggcagggtgcaacccctctctctctggctggtgctctcaggagctgctaggggcatccctgggaacatgccagtctgcattggtgcatgtgtgcaggtggcagtggctctctttcttggtccacaatcatcctgggctgcaataatctccattttctcgggcctggagcccctgaagcagtgcctgggtttgatgcatctctggagccctagctgctgcagcagaatgaatgaggttcctgaatggagtcagtgggtttcggggtttctgtatatgttgtcagtgtgtaactgtgtctcttaaagtctgcacatctgtgtcccggaatgtgtgtgtttgcgaggctttggtaagtgtgtgtttgtctgagtcttgctttccttcagtgactctgttgttttgtttcgtttagag

SEQ ID NO: 148292 - DNA, 460 bp, Homo Sapiens
  misc_feature (94)..(103): n is a, c, g, or t
cgttttaaagcttaattgtattttactttacatatacacttcagttaacatagagcacttagaatctatttggtatttttgatttctcaaagtnnnnnnnnnnttagatttttaggtttgatatggttgtgtcataatcatctcgtaattgacaattttaacttttggcaataaaaggaaattgggatatctttggaactgtaaaacctggtttaatctttttctttctagactcttgatagattggataattaaacagtatccagagaaactaaagaaatgggcattttaattgcatattttatcttgagttactttttaatgaacactgctcattacaactttacaaaccaaaagtgtttactaattccagtaactaccatttctttttcagctagatgagtgatcggaaaatttttgttgcctttcaaaatctaaataaactacagactttatcctt

SEQ ID NO: 148293 - DNA, 480 bp, Homo Sapiens
accactgcactccagcttgggtgatggagtgagactcaaataaaaaaggtactagttctgcatttcagagttggcttgttgaaccaggctatatgcttccaagatttaaatgtttttctgtattatactctgaattgtgttttaaaaatatctcttacagaaatctctacctcaggcgctaagtgttatgacatgggtagcatattgatattgaaaacttagctaggacttccagccttttaagataatttaaatgtaaaattaaatggttaaccagcaatctaatgtcatgtggtgtgcagtttggatattgcatgaacagctaaggaatcacctgttctagtgccaaagatcactcattgctaattttgttctgtacagcttatgtaatattttcatggtggagccggtctctgtgtgctcagggccttgtctttaggaagattttgtccattccaaatacagttttgaagattcaaa

SEQ ID NO: 148294 - DNA, 512 bp, Homo Sapiens
cagggaaaactatccatttttattcttagattcgatgaagaatggacagccatgtagaaacgtggtaggaccaaagaggtctgatctaacggtaagagactgagggggaaaccaagcaagccctgtctgttaggattcttcttggtctctctgtgtggccttccttcttcccagacgcagggcagtaccactctggaatgagggtcttataacctctgatgttgtggttacaatccatttcagagcttctgtgctcaatttatacttccctggagagctcagtgggctcagtaatgctgaattatactggctctgcttccagattttctgctggcattcagcaagattcctcggtctccaagttgttccctaggagccctccttgtctctccattgctgagttatctccagttcttcccaagccagcaattagaggaggccttggccatatgaatatgcccattgtccagctgggtttttcaaaaaaagaggcaagctttattccttttctg

SEQ ID NO: 148295 - DNA, 905 bp, Homo Sapiens
aaaaaaaagggaagagttcatctctcctttgtccagtcaaggttctctggaatgagatgggtctgtaggggagacatgagaggacccctcaggtttgattcactttaaagattaacaacccatttcctgagggggataaaaggcaaaacctttctgaccacctaaaatgaaagatcttaatctaattctgtacactcctggcagctgtggttacatatgcccacctcgtcagcgatcacacagtccaatctaaagagttttctgttctcttttcagaaagcaaaggttcctcgggcaacctgagttctgtgtgtggggccgcggctgtttctgttgagcgcttgggtgccttaatggcccggcattgattagaactattgacctcttggtttcaagtaactgacaaggtttccaatggatccagataattaaggcttctcaaatggcaactaataatttgcatttgcagtgcggccagccttaggcgctcggggaacccacacaggtgagaaatgaaagaaaaagctcttcctggtggtcatctgatctttcctaatggagtcttagaaaaatcatttcgccctcccgccctatcttgctgaagttattaagtgacctaggggagctattttcatttattggaaagcacttgggaccagctcacagcattaaggagtgtggggtggttctcaagtctatctcctgcttctcatccctctgtcactcacaaggaccaccccagagggtctattctaagaggtctttgtgcttccagcccctccctcctcgaatccctctttcacattgtcaccagtaagatcttcctaagcccaagtttggaccattgtccttctgctttcacacctccattgtatccagaattaaagtccaaattcctgtgtaaa

SEQ ID NO: 148296 - DNA, 382 bp, Homo Sapiens
ttttttttaacaggttgacccatttattgccactagagattaaaatattaaatcacaaacagagcaaagcctggtgtattgtaaatctttaataaatgtgaactcttattatttgtttagacgctagtattgttgagatgcagtggtgacaaagatcaagtcctcttgaatctgatattctaacggggaagacagatagtaagcaggtaagtgaatcaatgtaaatggagtttagagcaatggaaggcagcgtgagccacctgaggctggggcagcagtagctcttgctgtgtcattaactaccccaaaccccagcggctcacaacactgagacattcatttagctcatggctctgtgggttggcatctgggctgggctcag

SEQ ID NO: 148297 - DNA, 307 bp, Homo Sapiens
cggaagcttcctgatgtcagcattcctgcccccagggcttaggtgggacctctcctggaagggtcagccaggaacggtggaggaaaaccagcgtctaccagaatgccagacagcttcttaggagtggaagcaatggtcccagtttgcagtgtcttgtatggacgtgatccataccaacttggtttccagaaggcaccacccaaattagaggcccttctcactgtgaccctgccggcagtaagcctcagaaactgctctcaacacacagtcagcatgtatgtgattatggtcctgctttatgccctta

SEQ ID NO: 148298 - DNA, 337 bp, Homo Sapiens
tttttgggccaaatatatttacttttaataagaaagtagagagtgtcttccagaaattattaagatatagaacaggaacggacacaaagtgtagaaatgacaaaattacactatgaacatatgacggtgtatgtagtttcgaggaatataaatcctgggggagttagaggcaatatgagtgtagcatgtgactcaaccaaatcccatcatcattattaggaagggcagttgtcttgaagtcagcttcctttatcttctacatcgacgtaaaagcagacacagtctggatgtgtacagagattggaagtgctcttgtaacaagtagccgagtctcagc

SEQ ID NO: 148299 - DNA, 465 bp, Homo Sapiens
tttggttattgactctcattttattatctaccagtttatgagaatcacctgagctgcttttaaaacaagaatgatgcccagttcccactgcagatcaatttaaagccccatccaaagggatgggcctgggcattgggacattttttgatgtcttcaaaagcttcccaaatgattttgacgttcaaacagattgagaagtgctgttttgaaaggcaagtagccagggtaaaatggttctagggttggattttggtctatttggaaatctctctatggccttactgtacatagattcatttcagcacccaggttattttattctgctggaataacgtagtctgaggaaatcagtatctaagtaaaacatcagcctcatatttagattcaaatgagtctggactgttactttaaacttcaactttgtcttgtggaggcagagccagcaagttgtccaaaagcagcagc

SEQ ID NO: 148300 - DNA, 574 bp, Homo Sapiens
ggtagctcttgacctgtgcctgggctagtggcctctgggcatggcgcaccacctcggccagatccgacagcatgaactcaaaggccagcacaaagcctccaccgtgtgggaacacagccttcagttgtaccacatactgattgtcctccatctcctgcagagccttaatctcccgcagggcctggttagggaagccgtcttccgaccgccttagggccaccttcttgagggcaactatctcgccagtctccacgtgcttggccttgaagacgatgccgtgggcgccctccccgatgcggcccaggatgcagtactggtccatcccgctgcagtcgtgggcctgtgcccctgtgcccctgaacttccaaactccacttctccttcaccccacgctgatctgagctccgcacgctgttgcctagcaacagcgcggcagctgaccactggggcggttcctgtaggccacgtcaccaggagaacggaagctgcgtcgagtcaggggtgacagctccgggccccactgcgccattttcctagccctccgctgtcacgcagcagcaagcttaatcccgca

SEQ ID NO: 148301 - DNA, 483 bp, Homo Sapiens
tttggatgcattgttctttgggcaggtaatgctaatgtcctgtacctgcttaggaataagccgtggtcccagccaaacgcctgagtgtacagtaaacataaatagaaggccttattattgctatttgcaatgctgcgatatctttcatttcaggatttcaaagcacacgaggcatttaagccccacagcatcctcaccaggctaagagcatccagatttgtaagccgagaaaaatgagaatgctccttaggcagtgagaagagtacagtggacttcctgttaccttaccggaaatgctagtctgtattatataattcacgagcctccgtgaatgaagatttaagtgctttaggacccaaacacctcgttgagagtgtgtgcaacttctctaccaccgaagttgccaccacgaccccagttaaccaccacgtgcaaataagacaccaaaagacgctaactaggaccacctttactttttcatga

SEQ ID NO: 148302 - DNA, 587 bp, Homo Sapiens
ccctcgaaacccagtccctcgaacccagtattgaaataaaatggagtactgccagcaaagggatggaaatgtgggatggtaacttatcaacatattttgacatgaatctgttataggaaataattttaaaaactgttttagaaaattctgggaagaggagaatagtgttttcttcatttgatgcagatatttgcacaatggttcggcaaaagcagaacaaatatccgatactatttttaactcaaggaaaatctgagatttatcctgaactcatggacctcagatctcggacaacccccattgcaatgagctttgcacagtttgaaaatctactggggataaatgtacatactgaagacttgctcagaaacccatcctatattcaagaggcaaaagctaagggactagtcatattctgctggggtgatgataccaatgatcctgaaaacagaaggaaattgaaggaacttggagttaatggtctaatttatgataggtatttgtttttcatgaaaaattttcatggaatttagaagtatagatttcatcttacgaaattataaataaaattaaacttagttaagtta

SEQ ID NO: 148303 - DNA, 348 bp, Homo Sapiens
gcccctctctttgccttcccctctttcttccttctactgcttcagcagacatcatgtgaccttgaggatggatgtcacatgctggaggaaacagaaggccgaaaccctgatgacttcacagagctgccaaaacagttcctgactgtttattccgggtctttaacaaagtgatgaaaagaaatccttgcagtatgaaaacaacttttctattccatggagccaaacctcattataacagataacgtgaccctcagcgatatcccaagtattttcctgttctcatctatactatggcaaaggggcaaatacctctcagtaaagaaagaaataacaacttctaaaaaagaa

SEQ ID NO: 148304 - DNA, 650 bp, Homo Sapiens
gctttttagtctccacaccatgggcagaactgctgtctttactacttcatctcacccaagtcccgttcccaggcagccaggggcctgggtttgaataattgcagggccagcctgccatgatctttctcacttactcctctcccattcagcaatcaaccagactaaggagttttgatccctagtgattacagccctgaagaaaattaaatctgaattaattttacatggccttcgtgatctttctgctgttcttactttttcgaatgtagttggggggtgggagggacaggttatggtatttaaagagaataaacattttgcacatacatgtattgtacaacagtaagatcctctgttaaaaccagctgtcctgttctccatctccatttcttcccatgctgtaaccccaggctccaccagctgttccccagtgatgttacctagcttccctctaccgttgtctactgaccatttccactacatgcctttcctaccttcccttcacaaccaatcaagtgaatacttgattattatctcttccttactgtgctttatcttttttgtttggattggttctaattaatgaaaataaaagtttctaaatttacatttttatagggtattgtaaataaaaacaaattgtatactta

SEQ ID NO: 148305 - DNA, 377 bp, Homo Sapiens
tttgatgcaaatttcttttaactttactgaatatttaataatactaaataaaagttgggtagaagaattatcgtcgatggctctttgatgagcattctgggcctccgagggtcttgatgaagctcatgtagtgtcatgtgctctctcgggagagcgttgactattttcactcctaacgttggcatcctacgagccaggtaggcataactttgagacaaattctagacttacatgagttatgattattatttaactgagatggacaggaagaacaagcctaagaaaatctttcccaattctcagctgcgtcctacgattccctctcgctcccaactctcaaggtctcccagtccggcttcctccatttccggtagtga

SEQ ID NO: 148306 - DNA, 523 bp, Homo Sapiens
  misc_feature (200)..(200): n is a, c, g, or t
ttttggtgtggaacagcgtatctttattagctccacgtgactgggcaagaggcagcaagctggacggtctgaagaaaccaagctgctgtgtgatgtcagttcttgcaaattgacctgaagtgaggctgcaagtcttcttttctggggtgttgcccatcacagttctcttcttactgtggggacccagcccaggggctgancctggactttcagagaccctccagggacaaatgctggagctgcttccttcacagagcggggagtgagctggaagttggggtcaggcggtgtcagttggagaaggtggctcccacagcaggcattgtgcttgacaggtttcctttcaaagagtaataaaacctggatccattcactttggttttgaatggccaaaacaatccagggattgttaagtgctgtgacttaagaaagcatccattctgaaatgcaagatttcagacggctccactacttgtactggattcctccacttcagtccagatccctctcccaagtcctgccg

SEQ ID NO: 148307 - DNA, 453 bp, Homo Sapiens
aaggaaatatggctcttctttccccatggaatgtgtaaattgcaagcaaacttatcttttcctcaggagatccaaagtattatttaatgctttcctatcctttaggtctaaactaacagtgcttgttcaagttcctgtttaaagcgatgagatggaaagttgatgaaagtggaagtccattgcaaatatatgcattctataaatgggaaatatttttaattaaaataaaaaatgatttttaaattttattcaagaactgtagtgaaaaaccttaattggttcatatatcctgtaataacacattgcaacaaaatgaagagttggagaacaagaatttttatgcgagtctagtaacataaaaataacttataagtcccgggttgttgaggctcttcttctgctttgaggttataaacctctgaagtagtgtacaaacattaagaaaacttgaaa

SEQ ID NO: 148308 - DNA, 536 bp, Homo Sapiens
cccatgtttattaaccagattacctggctggggtaaacgatgtaaattattggcttctacctttacgtcagcgttttctccatctctcattttgtcatttaacacactgtgctacaatcatgtggcagcttgatcatctccactacactatgctttatttctcgacaaagctcagcacaaatggcttctgatttaacggatggacgcagagttctgcactgacttctgtttcggaaccacagtaaggctgtgcagcaggagccacgaaacccgactccacctagtgctttaagacgctactgacccgtccctttggcgaggggacaacttcgaagtatgacctggccaggaggagccacaaagcgcgattagcctcgctgcatttcaggtacaggccggcgccagccgtgcctcaccaggtccaccggctccgagcagcagcaagcccggtcggaaagcgaaagtggcctcgccatgtccagaccggccagctcccccgcctacctgacgccgccccgcagccgcacctgggtccg

SEQ ID NO: 148309 - DNA, 865 bp, Homo Sapiens
tggctagcccggtggtagtatgcgcgttgccgaaggcccggcccccggaggtcagtttcccacgcctcctctccagccgtgactagtgcttgaggattcggaggagaggagcttgaggaacgggaagactttggtcacaagtctagatttcgtgtacggtcaatataataggggaactccctccgtgcctttcgcgctggtggactaatgctcccattgttacagatagggataactgcagcttcacatcgattctattggcgggtctaggtcaccaaggggtgggtctccaatccatggtctttgggttgggatccaggccttgttccccatacagctggcggctcctgaatgcggtatagagtaaagattaggagcaaggggttgagtccttgctccccctccctacttactcagtgcttacttcatgatcttggagaagtcatggaacatttagcctctgaggtttgatttccttgccttctggtgctgtgcgttgttggagtgagtcatcagctgctgtttttgtcggttttttattgtgctatacccgatggcgccgcagccgacggccagaccgtagcgccagagcgcggagcgcaggtcgaaggggccacgatttgggacctccgcatccagaggctgcaccggaaccgggggccgggacacggctgccacagccatggaagcccagaagacgccctggcccgcgcagaacagcccgaggatggtgaagaagcggccccgatcatgctcaaagagcagcacatcccgttgcagcgtcgcgccttgcaggggccggcaggtgagcaggggccgcagcacggctagcagccccgtgggccatcgcctccaaggcgccgcc

SEQ ID NO: 148310 - DNA, 450 bp, Homo Sapiens
ttttaagcaagagataggagtttattactcatatcagtcttcctgaaagcttggaagctagggttttcatggataatttggccgggagggctaagcaatgggtagtgcttattggttgaagataaaatcataggggtgtggaaaactgtcctcgtgagctgagtcagcctttgggtggggaccacaggactgggttgagtactgagtcatgggtccaaatggagttagttgtaagaatgcaatagtctgaaaaacatctcaaaaggccccctttgggtatctatatgagcaattggggaagtcacaaatcttgtgaagtctggattcatgaatcctgaatgattagggattataagaaagcaagctatggaacaatggcaggttattatttaactaagcctacatcttagcagatttcagacccctcctataatcccaatctcgtggtct

SEQ ID NO: 148311 - DNA, 595 bp, Homo Sapiens
  misc_feature (76)..(127): n is a, c, g, or t
  misc_feature (416)..(432): n is a, c, g, or t
gaagtgtagaattagaaagtgtttacattttattattggcctgctggatttaagtatttgcatgtttgatatgtcnnnnnnnnnnnnnnnnnnnnnnnnnnnnnnnnnnnnnnnnnnnnnnnnnnnngtaatgaaacaagggtaatgtgcataggtggattcaggggaacagagagcagattgcagcccgcgccttccggtcagctcctgctgtggagccgctctgcgcccggcggtccacaccagactctgccctgattaccggccgcctctggtcatgtgcataatcgtcacaggctcattttaaataggcttcacgtctccctccctcccccacagataaaataaccctttccagcccacaatctgaaaagtgcccttcatgatagaactattctaagcagcttttatacttnnnnnnnnnnnnnnnnntcaaaatgacaacacactatacaaacataagacgcacaaaataaaaagctacgaggaacatcctgtcattagcatgtgacgctgacccaccgcagcccgcactgttttgcgaacagttcgcaaggactgcggccaaggttcgtcttcagacctggacagaggt

SEQ ID NO: 148312 - DNA, 414 bp, Homo Sapiens
gagtgcgtgcgccggtggctcagtaggttggagcgctggctgaaggccttgccgcactgggcgcacgcatgaggcttctcgcccgtgtgcacgcgccggtgctccgccaggtaggagcccatgacgaaagcctggccgcactcggcgcactcgaagggccgctcaccagtgtgcgtgcgctggtgctgcaggagctgcgagctctcgcggaaagcctttccgcactcggcgcaggggaagggcttctcgctgctgtgcgtgcgccggtgctgccgcagccccgccacacgcacgaaggccttgccgcagtcgggacaggcgtgtggccgtgcgcccgcgtggatcttcaggtgctcggccaggttggagctctggctgaaggccttgccacagtcccggcaggcgtgcggccgc

SEQ ID NO: 148313 - DNA, 572 bp, Homo Sapiens
ttttgcagtcaacacatatttactgggcgcattctatgcacgagttattgaagacagctgttgtaagcatttcaggccaatgcacctcccttaacaccgagtccgggatttggggcggggtgccggaaaacgccaggtcccgccagcagagggcacggtcccggcctcgctgcagcctcgggacccaccgaggcttccaggctcccacgctcgctcccgagcgcgtccccgccctcgcgtcacgtgacgtggccgcggaacctgagctgcggggcctaagccgagctaaattcgttgcaggtggccgcggcgggtgcaaccacaaaggctaatccgaaggagtcggggaggctcgtggagtcgatgcttcctcttccaagtcaggtcggctcccgttaccttctcagcattcgccgttccggtcttcctgagcgcgtgcatgaggtctttcgcgtggggaagctccggtgaccatgtaggggacaagagtgaggaagctcctggtgcttgggacgaggtcagcgctgtcggcgcgctgctccagcgcccaccacaccctggtgcgggccgac

SEQ ID NO: 148314 - DNA, 960 bp, Homo Sapiens
  misc_feature (71)..(79): n is a, c, g, or t
  misc_feature (890)..(890): n is a, c, g, or t
aatttaagaaataggtatctcttaattcattctcaggtaacactatttcttatagccaaacttttaataannnnnnnnnaatggaaagaataggacaatatagcccctggaagattcctggaatgcaagtatcctgtgctcatcaaatacagactcatgggccctcacaggctacgagaatagctgacatcctcttcttagagtggaaggatctagtaatgatggacgcctaaatgcaaagaaggctattccacctccacctggagaccaggggaatcactaccaagcccccaaaattctgattcataaaattttagcctgaaaaattttaaaggaaggcataaccagacattcagtggtctacaacagcccaaatggcatccaagattaaaacttacatgttgtgattctcaacccaacctttcttcctcaacactacgaaatctcccttcagcctccttaatatattttcgggcacctgatgatgtttggttgtggcacttacagaaactcaaaacaagcaggatattttatacaaatctgatcgtacaatataaaagttattattaataataaagtctcaccatatgcacacatcttaaataacgggattcctcattaaatactcatcaagaatctcataatttaaaagctggaaggtaaattacaaacaacgcttaccctaccaccaccatggcaccacttcggccattcttgacagaattattctttaaattatgcaagttttaaatcataaaatttttagaaactcatccctaacttgcagtaaaatgcaaccaattcatatcgacatcccttagctaacagctaaagaaaataaaggattgttaaaccaaagttattaaactaataaataattattagtttcnctaaattctgcttctattaagcctaagtttatttccctaacatatatcaggaccttaagcaacttcaaac

SEQ ID NO: 148315 - DNA, 527 bp, Homo Sapiens
ggggggggaaaggcaggttttattatttatttatttacaagaatgcactgaagggaacagaggccggtggtgtcttaggagttctgaggcgcttgttaacatgtagctggccagctgcccatgtgactagaagttggaggggatgaaaaacgatttccagctgaacttggctgtttgctaaataacttcacacggggaagatgaattgggcaagaatgggtcagccctgaaacaagttccatacttttaaatactggacacactgcagctcaacctctgggaaatgaaccggagcagctcgatggctgctgtgctcacacggcagcgccattattacagcctggctctctgagttcttaggctaagggacgactgggccatggcgcctatttggagagtaaggctccgtgtgtggctcgtgatccttctgtgggagcacttgctgtaatggaaaatatcttccacttttagtgcagcgagctgcagagcagtgctactcaatttgtgcagcctggactgagttgctc

SEQ ID NO: 148316 - DNA, 844 bp, Homo Sapiens
  misc_feature (20)..(20): n is a, c, g, or t
caaacgatgtgctcccaagnagcgaatgctcagtgtcctgtggaatgctactcctgtgaccactttctagctgagatcatcaggcaaatgttatctctgtaacatcagaggagcaacttcaaatgatgagaaatcaagcaaaacattaaaaatacagggggaaaaaacaaatacatctaaactgccttctctccatggtgatctagctttgtgtgttcattttcttgatattgctgtgatacaaataggatgtgatgaaatgaaagtacatccatcacagcaatcttgtgtccagcctgaatctcagacccagatgtggctccaaccaacaagtgaccatgagcacggggcccaggtgtattctgggaagctgctcaccctcactgccatttctttcatccccgtaggcacagcatcaccttacatcgaagacagattcaacgaatctgcctctcatcctaggtggccactaggcaactcctctgggaccatttcttcctgctctatgctcccatgaccttcattcatactccctcttcccctgctggaaacctacttcttttacctcctcaaaggtaaaaggaccagctggtgaacaaaagaatacatttgctctatctaaagagaagcattagagcaagggaggaaaaactgatgcaagacaaatgacttgggctcatcataaaatactgagcagtcagcagaacattaagaagagacttctactccccaccacacacataaccatctgcacacctgaatgccgagactaagcctcaccagacgccagcagcataaatgagaggagtcacttacccctctgaggctcaggcttctcgactgg

SEQ ID NO: 148317 - DNA, 474 bp, Homo Sapiens
tccaaggggctttattggaccatgcagtcaaccctaactcctttagtcgtatctgaaaataggacattccagtcaaagccttggtaatataaccaatgttttcaattgtgccctattacaagaacagattctcattgaacttatgcaaacccactaacagtttctgaattctgggattagggaggaagaaaaagataaatatttcaccgttgaggccattctaacctccctgcctttcttccctgaagcaggccataaaacccaggaaggccactcccagaccctctccctgcagaccctcacgtggtgtcccgccccctaaccagaggaaagggatgtcagagtcaagtcgggccttgatcacacccttccatcctccgctcactcctgctccgctgtgaaatagaccatttctttggtctttgttttgaaggggcccacatcacatggaactcgcattaaatgtttgtatgc

SEQ ID NO: 148318 - DNA, 1789 bp, Homo Sapiens
  misc_feature (726)..(726): n is a, c, g, or t
  misc_feature (1156)..(1201): n is a, c, g, or t
  misc_feature (1278)..(1286): n is a, c, g, or t
taagcccctccgtttgctgttcattgtccccgtgccgcgccgcttccccacccaccaagtcggaccagagtgaagaagaccctgcccaacattcctgggcaggtatccccacagcctggaatcctcaccaaatccaacacgtccatccacacagagctgtctgggaaaccaagcctggctcaccctccaactttaaggcctcggtcagtacgaccacgagaggggagcacccaaagcacgcagagggcccacctgggtgcactgcagagggacagagggcttgagtgggaggtgggccagtgctgttcactgccgcctgcctcaggaccagggtctgcttcagaccagcccggtctatgcccaccccccgcaggtgcagcccagcttctgcacatctgatggagtgacgctgactaaaggacctggacagcgccggcagatactcccaacactgtgcttctctttgggagccaaagagaagccacggcagatactcccaacactgtccttctctttgggagccaaagagaagccacggccaggcagccaggccagagccatttcctcctcacaccagggcaggggttacagaaacctcttcccaagacatttacaagcacctctgagccatgactatcaacgggaaaaaagggcaaagtcagtgccctggaggaccaggggcatccttcacctgggcactgtccctacggggcacagccctctccnccaggcgagctccctgccctctggcaccatcatctactagttcagagccaggacagaggcagggcaggggcagcgcggaccaccaaatcagagtccctgccagcacctccagcgacatcacgcccagcagcaggcgacaagaagccactgcaggggcagacactcaggagagcctccggcctccaggccaccggacgggctgaagaggtcaaaccacccctggcccaccagggccacgctccctgggaaccacagaatgggcagaaaaagtttcccagagccaggaagcatttcccacacagaaacactcatgtggacacacatcctctgtctgcagggatgcagctggcaagctgtctcactcacaccccaagctgaactcgcctagagcgtccggagacagaagggcaggcgtccccagcccacagtnnnnnnnnnnnnnnnnnnnnnnnnnnnnnnnnnnnnnnnnnnnnnnacaggccctgtgacacccagggaggggctccccgcctgggaaacagcacccgctgccttggctcacgcaggaggaannnnnnnnnctcttcacgtcaaattacaatcaacaagactggaaacatccatgctactttcaaaccaggaaagagcacgatttttgttcaacaaaagctgcatcaacaaacaggggcccttgcaggctgctgtgctgggccccagccacgtttctgagaactggctgggggccaggaggcggagccacacggtgcggccacagaaggacacacggagaggagcccccgggacaatccaagcacgaggccaggcaagcagtgcccaggaggccagacgccgctggattccctggcccacagcacaggcgggcgagacgtgagtggccgtgacacatgtgccccaggtgactctgagctggagaaagtgttgtttcaaaggtagctgtgttgttatgttcgagaccccagagctctggtggacggtgtcacggaggctttctgtagctgacagaggaagtagcaccatgagaagggggcgggctgcagcatctgcccagggcctcagtggcagg

SEQ ID NO: 148319 - DNA, 466 bp, Homo Sapiens
tttgacttacacgggatagtttattttcctctctctaaatagtacttatgtcagcagtccatagctggagatgtggctgctcctctccaagaggtccatcttctctccctgtcacctccccacagggtcatcttggtggttgtgactaaagcctgggtgcccactctccagcctgtgggaagtgggaaagaagtcctgggaagcagctgcatcttcaaggaggtggtccaaagtcacactcatcacttgccaacccctctagttcctccaaacttgatcacatggccatttctagctgcaaaagacgctttagttgggttgctatgtgttcagttaaagcccagcgttctgaaaggatcatgctttatggataattcttcagaccctcactttattctgttctgtaataattcttaaattctggttgtttgatgttgtagccacacatttaatttccggcacgagg

SEQ ID NO: 148320 - DNA, 525 bp, Homo Sapiens
tttttgatggttagtaaactagttatttactaaaaattagtaaaattgttttatggtacatatataatcaatgaaattactgtcgtttccatacaaagaaactgaaaatcagaaagtttaaatgattggcctttgccaaaaagagatcaaaagattcaaatacaaggagaaggagtgccggacggggagacgcacgagtccctgagcttggtgtagcaggtgttctcacaggtgctcctccgtgttgtctccgcggcagcctggcagggcagatgtggccactctgagctgcagtcgagtctcggggacccacgtccggggccgacagcgtccagggaccctcgtgctgggctttgaggtgggaagttcatcccaggactcccaactcttagccctgcgtttctcacgtcctcatcctgatcataccttgccgatgttaattctgcgattattcttagtatcccctttgcctgtggtcttgaaatgaacagttttccaaaataagggcacgtggtgagaaatcct

SEQ ID NO: 148321 - DNA, 821 bp, Homo Sapiens
agggtagtttagttttatgctctaaggaaaaagagctgttcagacatccatagtcttaactttaaagcagctggaaatgtaaacccatgcagcaggtgtagggcattacacgctgaggccctggagtcagactcttctgcatgtggctcctgctcagacgtccactagctgtgcagctctggatacatctctctacaccccattttattgtggattactgggataaaaatgtctcttcttctgggaaatcctattctttatatcctctgcagctttggagtattccctgaatttctcagtgcacctcatcactttttcctttgaattgttttggtctccagtgtcttgtgttgtagaaagggaatggagttttacagacccgagtttattgcttggctgtgacacttgttatgctatgttgcataaattccagatactataacctttacattttacaggtggggaaacaaactcagaaaaaaagaacttatctaagatcacatggcttgtagccagtaaggctgtcaggatttgaatgtgggttttctacccaagcgcttattgatccaggttaacttttctgagccttagttccttcatctttgaaatggaaatagttgtgtaagtgtaatgattcaatgagcaagacagcctgaagtgttgggatcaaaatttgtctatatgtaattccttcctttctctcctcattaattagggttttgtcatatgctgttacagatcttctcatgtttataagtggaattttcacgtagatcctgaattttctgtatgtggtggctctagctcatgcagactctacg

SEQ ID NO: 148322 - DNA, 464 bp, Homo Sapiens
gtttaacttattgcaaaagaaaacagtatattgaaagttaattgcagaatagacaatacaccttgagcgagttcagaagggactgcttgtcaggttgggacggtgttgattactgcaggaaaaactccctttatgggagtctcacacaactcttcataatgggtgggaagaggcatcactagtaagcatgttctgggtggtcctctgggtgcacatgcgcatttgctatacatgcttgctcctaggactcatgtctcattagcatcttaaatctccacccaggggtatggtttttactattaaaatgagcaaagtgtcagtttgctgaccctttgcacatgttctcaaaagggaaagtccctactggagatagctttgcttgaatgagctcagtgaccaggcgaatgccgaggcttcctgtgttggccgtgctgtcaccaaggtcacagcatcctgagaacatg

SEQ ID NO: 148323 - DNA, 458 bp, Homo Sapiens
cagtttcagctaataattttgagatatgtgttgattttctgattgaatcaccaagaatttcaacaagtttagaaataatttaagatgaatgaaaaatatgtcagggggagctaagcatttgctaagctcttgatgtttatatgaaaaataaagggttgtttttatattgcaactactaaagagaaaaatagcagttgaagcaaacaccaggaaaatttggctctactgaaagcccagtccttttcccctttgtctcgctgacaaagtaagactagggttatgttcatgaatagattaataaaagatgtttctttaccacacaatctgagatgagatggggtgggggagatcatgacagtgccctccaagcaatagatccagctgataatcaagcagaaaatcagacaccagaatccatttgatgatgtacggcattaaacatttccttataacaaaaa

SEQ ID NO: 148324 - DNA, 368 bp, Homo Sapiens
gcttctcaaagtaatttttattatgggttcctcctcaccagctgattgcttcctcctgtggcactaccacacacctcatagccccattaaaatgatcaatgctttgtctgtctccacagccctgactttggattcaactaatgtaaggtcttactatgcattagccactctcctaggccctggagttatgggacagtggaaaatattctggtgggatggatggtaaatgttcagaaatcaagcatgacctttaacttcagtgcactctagataaaagcttttcttctttgatgtggaatggtgacccatctgaaaggtaagttaaagctccttcactagacaggaaggactttttagcctccctcaca

SEQ ID NO: 148325 - DNA, 830 bp, Homo Sapiens
tctcaaacaggaggtccacattgtagccggtcttggcgctggtctcaaagcacatttgctcagcggccggcacatcctgctcatccagcatcttgtacttgaggatctttttataaagggccaccgcatcctccagctgcacctgcttaggtgcccttggggagacacggtccccagcgtccatattgggactgcactcttccttctccttgcccgccaaggccccctcctcagtgaggtccactttgttccccacgatggcgaagaggcagtctttgctggctgtgtctgtcaggcccaggaaccggtcctccagctccaccaggctctgccggtgattcacatcataggtgaggatgatggcggccgccccccggcagtacatggatcccaggccgtggaactgctcccgccctgcggtgtcccagatggagatgttgtaggagcgccactgcttcaggtagaaggcgccgcccaccgtgctgaccgtgtccgggaagcgccgctccatataccgctgcagcagcgacgtcttccccacgttcatgtcccccaggagcacgatcttgctgtcgggcttcctcatcttcccgtaagaacccccagcgcccccgcgccctctccccgaggctggccggctcgtgcgccctgggcgcagctggaggagcggaccccggactcgccgggacccggattctcgtgaacgctccgggaccttcgcctccggacgcccgggagctcaagagaggaagcgcgtgtgcgcgcccgggaaggcctcgtgccgaattcgccacccggcctcgctaccttaggaccgttatagttacttg

SEQ ID NO: 148326 - DNA, 630 bp, Homo Sapiens
tttggcttataaacaacaaatatttatttcttacagttctaggggctgggaagtccaagatcaaagtgtcatcagatttgatgtctaatgagggctgccttattagttcacagatggccatcttctcactgtgtcttcacgtggcagaaggggaaaggagctctctgaagtctctttttttaagggcaccaatcccattcatgaaggttccacactcatgacctaatcacatcctaaaagccccactctaaatacaatcacattggggattagttttcaacatatgaatgggcagtggggtggagggtagggggcacatgaagcagttatccagtctatagcaggagtctttacagtcatccaggctatggatggtggtggtctgttctcttgtcactgctgaggatgtcatcctggggtttattctctgaccctccctgggccaggcgcctatggctgacaaacccttttctgaaggacattatctttctttgaagattttatgtctttatttaggtgtaccgttgcatcttgtctcgggatgttctgccccttcaagggaatgtgtcattcggggttgagtcaggagagagaaaccacaccagttatttgaacagacataagtcaata

SEQ ID NO: 148327 - DNA, 139 bp, Homo Sapiens
ttaagttcacaaagcaactttattttcaacacacttgcaactgtgagacaaagttgggtcatcatgtgctggggacactggatttttgccctaaatgacaggtaataaatctaaacttaggaacattttcttacagttt

SEQ ID NO: 148328 - DNA, 831 bp, Homo Sapiens
ctctcccgggtagaatgtaacttccatgtcatgggtaaaggcagcacctgcgaggctgaaccgttctcagagccaggtttttctaaagcaaagagccagcctatacaggcctccacttgctgtgagggggaggagggcctgggctgctggctgtgggatgtggctgatggccgtgtaggctctgccatcattgcccacgatatacgcatgcaggtccacatcagtgaagtgcacgggtgtatggcccacgtggaggtggccactcactttcccattcactcggtacaggactcggcctctgccgtggctcgtgtcgatgtccgccagaaaaggggcgatggccgggaagtcggtggggaaatcatagtccacatactgcgtttccctggggaagtcctgagtggagatgatgccgttggtgcccacgtagaggttgctgaatcgggcttcgtagaagtgcaggggattcgccagcttcaccacggctgagctttcgtcgtcgccttcctgcaggagctggtccccccacgactccccgtgtgggaagagctcgtctgggtgcagcgccgcggcccgcaacattagcaactgcagcagcagtagcactggtaacgacgacagcactggccgcccggccactcggtccccctccatgctcgctcggccgtgcgcttacccgctgcacagacgcgtcccgccccgcctccagcccactctcgccccgccagcctcgaacctggatctccgcgggccctgggcggggcgggactccaggcccacccagcaagctaattggctgaggccctcggctggggaccaatcaccggctct

SEQ ID NO: 148329 - DNA, 751 bp, Homo Sapiens
ttgtgattacatcaagatctgttcatttgagtttcgtttttattgagtggtcgttttcttacacacacacatatcctatgttcatcaataggatctgctgttgttaatggtctataatccaaacttcctctaaagtctctgatcatacacataatttcataatttgggtttgtagcatcaacgtcctgggctcttttttctctaagttcttgctgttgcaatctccttttctctcgtttttcttgcagtttttctacttctttcacacaattagattttctacgtgaagggggtccaaattccttttttgcagcttgaactggagatatatctgaaacactaccattctgttgtgcagaggaagactgttcaggaaattgactgggccgtgcacgtgctgaaccaaccactctattatctcttgaaggagggtcattcttaatagaagctacagtccgtcgattctttacaattttgtttactttggctgaggatgctggaggtggaggtgtttctggactgggttcaatttcttcatcaggaacaaaggtccagggttaagtgaaaagatgctctccaggtcaatctctttgccttttgtatctccattttctatccattcaacagttacactttcattatcttcatttaaagatgttaccattgcttgatgtattcggccatcgctgcgcttgatctccacgtaaatcccgatctggatcttgccgaagttggccgttgccatcacctc

SEQ ID NO: 148330 - DNA, 498 bp, Homo Sapiens; identical to SEQ ID NO: 60327

SEQ ID NO: 148331 - DNA, 341 bp, Homo Sapiens
tttttgtgtttgctagttgtttattatgtctcttctaccaggctgggaacttcaggaaagccaggaccaagtcaatcttgatctaggctctgtcttcagcatctagaaccaggcttggcaccaactgagtaggtaatccgtaaataaattgctgttgacttaattgccttggactgaagtgatacattcttctgcccaattccgactggtgacatcacatctactaggaaggttgagaaatgtagtctttccatagtccctggggcttggtgacgcgatgactgagatgctggagtccccggtcagaaggacgatgccgagcgcgccgtattttctcctgc

SEQ ID NO: 148332 - DNA, 998 bp, Homo Sapiens
tgggaaggttcttggaagctgctgccctcctcctcagtcctgcctcccttctcactggggcaagagctgctcccactgtcttctgtacctgcatggatgtattttatgctgtgctgcaatggctggttgatacctttgtctcccgcacagggtcataagctcctgagcacacagaacagctcctgagacagctccagtttgtagactgaagcctgacagaacctgggacgtggtagacgtgctactgaatgtcagtaattgctactgaataaacaaatagtagcctgtaacacagcactgacgtccttctcaatagacaagctgctctacaaatcaaacagctgattgatctgtggctcagtctaactctctggggtatgctggcttgggccttgttctgcgcttcctcaccaggacagctgtgggcttgtggttcatttacaccaccctctgagggtgacagggaagaaggaggccggctctgggatcagcactcgcctcttgctcggtcctgattcctccctggtgccactcttgcgttctgagtcttgctctgctagcgagctttgtatctacagattcctgtgtctggcctaattccaggggctgatattttcccagaaaagaaaatacagctggggtcgaggcaaatgtgtgctccatgattctggggctgacctgtgtttctcctgtggcctcctggctagcagactccaaatcacgccctctagatgctcccgaagtaccgagcagcaggagccggtgcgtctgctgcaggtcgcgcttctggtcgcgcagcatgcggtcgatgccccggctcactttcctcgcctccttgaccgcctcgcgctccttggtcgcctcgcgctcctcggcactcagctgctcggtggtctgccgcttctctcttcggcttgtctgctttgggccgagcgcatgccgggctcccttcgccggcccgagggagcagggtcccgggccgtgtctcttgcggccgc

SEQ ID NO: 148333 - DNA, 466 bp, Homo Sapiens
tttctggagtgacttttctttttattccagcttctccgttaatgacagtactttcagaagttgtcctaaatctcagagacacacctagcattttgcagtatatatttagtacttttatgactattaagaacgccacattttccaggaattccaacattttggttggcttatgctccttgggttccctgggaagcctcagctggagatgatcatctctggggttgtctttttcttctatgcaatttctttgatgggaaatatggtccttatcctgctgccattactggataaacatctccaaacccccatatatttctttcttagaaatctggctatcttggatctttgttacaccacaaatatagtcccacagatgttggtcaatgccgccatctcccatgttaagccagagagatctgctgtgagtctcatgtctcctggtaacagacatggcctcactcagctt

SEQ ID NO: 148334 - DNA, 864 bp, Homo Sapiens
cctgatgcagtgcctgactgtagttctgcagctccactgaagaagaggcactgaggactagaggcagccaggggattgcaactcaaagaggttttctagaaccagttacttccaaattatgttcaattaggcaacagaactaaagaatatgcctctgatctacttatttctcagcctgaatgctgacttcatagactttcaaaacaaagtaataggtgaggagcaaaggaagtagttctgctgacggttcaggacctgctgtgtgggtagggtggttcactagtcatcctgaaagagcatgagaaggagaaatactgtctgtggctgacttcggccttacacatgatcaccctctccctgaaggctgttggacgacttgctaaatgcagcaaatcctgttgaaacctgcaaagttgttataaaaacagatggaccaggacttccacaataactgtttggatgggcagttaaattatttagccatttctacaatgtgactgtaacccagttacaggaagaggtttgtgtactctccagtgactcttagcaggaagctgcctatgcaagtacaaaatgggtggaatgatggtctttagctgatagcagaaatggacagtcggccttcaccaacccaccctaccttgtgtctcatacacagcaagttttaaagatttccaggaaacatatcttaccaacttccttagtaactaattccggaagaaatgaagaaatccacctgcaagctagaaatgaaatccgcttgatggcacagaatattcaagtgagtttctaactcagttaacaatatgataaaaccaaatatatgcacatgcaaaattattaaagatttgtttatgtgagaaa

SEQ ID NO: 148335 - DNA, 539 bp, Homo Sapiens
ttttaactaaatactgtaggatttattaattaaaaactcatttaatctataccattttgcatacatattaaatctgtaaccttaataaatgtccattacttcttaaaatatagagaaattgaggatatttcaacaatgaaatatataatggaggaagagtgtaattttttttcggataaaactctttggtctatataatttttctgagattaaaataacacgagaattcactccaataaaaaagtaaacattacttttctcaaaaaatttaattgccaaactatttacaggaggtgaacatcagcgatacagaagtcaaatggaggcatcgtcacaggacggttatggcggaaacggtgcacagtttcttacagtcagctgagagtgaaaaaaagtcatgggaaaaaagaacacaaataaagcaatccttaactgccttaaaggaatgaccaacattctggtaagttattaagaggaagtaagaaattgtcgtggtgatgaatagcatattgcacattcagattaggtatcctgcatgc

SEQ ID NO: 148336 - DNA, 571 bp, Homo Sapiens
tttctattttcctagatttttaattttgcctaatgaggcatctgtctgaggaagagaagagctctacttcagcctggtaagaacagacttcttttaagccagtatcctcaatggcatgttggacagctttctttctttctgagaaccaagtatctctggaagttcctggttattcagcctctgggtctcagggaagacaagagaatctggttcttccaccgaacatcataattgctatatgtcccttaactgaaaactgaatctgctttagctgatgtctttaaaaggtgcctgcttccatatgtattagccaggagagggacccatttaaccacagtccaagtctcatgtcttcctcttctcctttagctcacacagttcctgccaggcctactctcagctagtcttcagcattactgtttttctgattatccatgatcagaaaaatcattcagcatactgaaaatgaagaacagtccatgactccaccccccattctgagtccttctagggtatgaaccatgtcttcatcaaatttgtatcccagtccctagttcagtgccaatactaa

SEQ ID NO: 148337 - DNA, 363 bp, Homo Sapiens
ttttaaagggccattaaaaaggtcttttgaagattacagcttccaatgaggttaacagagaaaatttcctccttcaggccgcagccagtcccgttctaaaatccagaacgtgtccctttccagtcccgttctaaaatccagtcccaacaacaaagtggccatgtgacatggccagtttgttctcctcccaagggctcagcacaaagctgggttttggcagcttcattgtctccgggcgtcaaagcaggttttattttgcagagcaccctgaagacatttggaagtgaggggtaccttgctgacccctgatcctggggcccctttgccgttcccaggtcccctgacaagcccaccaggccccct

SEQ ID NO: 148338 - DNA, 304 bp, Homo Sapiens
ttttaagttaatttcttttattcactttcagaatatcagagttgacagagtccttaataatcagttagtccaactgttcacttcatagactgagagatggggaggaacttgcctgagggccagtaggaaatcagtggcggagccggtggttggacaaaattactgctgagttctgtttttgttctgtctatgactcttctacttagaatatctaaatagaaaactcccttcgcccaacatacacttttctaaatctgatgctttaagggcagctactgcagtgtagagaaaacagttacttttg

SEQ ID NO: 148339 - DNA, 516 bp, Homo Sapiens
  misc_feature (375)..(375): n is a, c, g, or t
  misc_feature (457)..(457): n is a, c, g, or t
ttttcagtgtataaggcactttatttattgcttgggccataagtgaagaataagaggaaagaggttaatttgggccggctgcctgaaagcacttaggaaaaggcaaagcaaccatggaatcctgaaatagaaaaccctgactgctgtggctggagctctgagcccactgaggggcctgcaaatcactgagacttgctgaactgccagaggcaaattctctgctgggctgggcttccagatctaaatttagggcacttgttggcagatggtgggacaatctgggaggggtagagaaccctgaatcctcagtcctggacagcactttctgctgtaatctccctagtgaccaaatgcaaagatgcccaacaccatacnctgcatttcctgagttcatggaaaaggtgtatgaacataagttctgagagcaggactctagctcatctgctgacattccccnctgcctagcaaagcacccagcagaaagaaggtgctcaatgataaattcgctgaagagag

SEQ ID NO: 148340 - DNA, 696 bp, Homo Sapiens
tttttgcctttcaagtgtcacatttgttttgtgttaataaggtatatacctccaggggatctggcagaaattttaaggtggttaattttgctgcaataaatacttaagaatcctttttaaagcaaagaagtcaaggcccccgccagggaaaacacaatctgctctgagggcctttgacaaactgacatgggcactagggctaggtcatggatcattggcccttgattctgtctcccactgagcatcccaaaggggttgagacctctgctggagccactaggcttcagcgggacctggaaatgttctcgcaaatgaaactggaatgcatgatgtcctggattcagcgggtcacagctgactgccatcaggaggtgtgacggagaaggttccatttctgtgaccctgtggtgatacaggtcgggacccaggcgaagtagctcagccatctgaattggcacctttctgcttttctcgctgagtgacgggtgccttgcagttggcttcagatgtttgtgaatgtgctgtgtttcctttgtcatcagaagaacgccaggcagattttagtccctcagctaataatactatttgaaaaattgatggagaaatttaactggaaggtttcagcaagacaaaagctgccctcgtgcccctcgtgccgaattctgggcctcgagggccaaattccctataggagtc

SEQ ID NO: 148341 - DNA, 718 bp, Homo Sapiens
tttgaaaatgtaacattgcatatttatttcaggaaatcgtcagaggtcacctttaggtcaatttaccacaccagaggaacaaagttgttcaactccagctctgctgaactgagccgcttatccacagtacagtatagaacttgaaggtttttttcccatcaggtcttcagttccaaatactgttatcatccttaataccgtctatgtcttctctggtgtgaatgatgtgatcgaccatgtagggttgaaggaggtggactccgcgttggtggacaaggtgacagtcgtttccatgcaggccaccttctatgatccattgcatctgtttgtgtaaactgagggctcaaggtttcttgattttcggtgaactgaggtaaaatgttaaggttataatggtgagaagcaaattcacttgcagatggattaccattttgagactggggagcacgtagtggaggagaattcatatcaggtggcacctttacaataatatatccagatgatggatcgtaggtcgtggttagagctggcacttggctacgaaccgagttaggagtaactacatcctgaggaggatatggcatttgatggtttactggtgatgatggagatggaggtggcgcataatgctgtttctgaggtataatatgatgaggggacgataccgctggttgactttgacactcaggataatagtcgggaggtgttggcttcttag

SEQ ID NO: 148342 - DNA, 486 bp, Homo Sapiens
  misc_feature (360)..(360): n is a, c, g, or t
gagcagacggccccgtggatggagacaaagagctcttctgaccatatccttcttaacacccgctggcatctcctttcgcgcctccctccctaacctactgacccaccttttgattttagcgcacctgtgattgataggccttcccaagagtctcacgctggcatcaccctccccgaggacggagatgaggagtagtcagcgtgatgcctaaacgcgtcttcttaatccagttcttattctgaatgtttcgtgtgggcttaataccatgtctattaatatatagcctcgatgatgagagagttacaaagaacaaaactccagacacaaacctccaaatttttcagcagaagcactctgcgncgctgagctgaggtcggctctgcgatccatacgtggccgcacccacacacgcacgtgctgtgacgatggctgaacggaaagtgtacactgttcctgaatattgaaataaaacaataaacttttaaa

SEQ ID NO: 148343 - DNA, 579 bp, Homo Sapiens
tttgttttctataaatatttattccaaaataccacataacatatatctttcttctgtttcctggtcttctcctttctcttcaacatagctaatttaaaaggacattttgatccctaattaacatttcgccctgatatccagacaatatctatcctgtgaatccctatgcgttcccaagttactcttcgacgcagccgttcccagtggcctcgatttccattccacattcacactttagagtcctctgtcttctactaagcactccagaaagctttgggagggagaggtaaagttgctgatactgtagaccttgctggcacatttcctagggtgctgaagccaccacccttgggctcttctacgctgggtaagctgaggtgtgtcactgcaggacagctctccaggtggccttggaagatgtcctgggaatgcaacactctgagataagggtgagcaggctggaattctcaggctctgttcccaccctcccctagaaacgggacgtccttcaattctggagctccttgcatcatgttcccccgtggtgtaaaacccagggtgggctgcttttcagggtcc

SEQ ID NO: 148344 - DNA, 900 bp, Homo Sapiens
atgaagtggtgccatcatagctcactgtaaccttgaattcctgggtgcaagcaatcacgagcaaggatttaggatgtaaaattaatcatccggatgtagcaaaaggggatctagcagaattctaaatgcttccttcaaacccagaaccagagagcctttcaataatcccagccactcccctttttcctcgtgggaaacatcaaatttcatacattcattggggctgccacgccagcatcatcaccaacatgcgttattcataaacctccaaggattcaaagagatgagatccggttttggaaatatcatctcaggaaacagactttgctagcaaacagcaaacacaactggatttctaacatctgtgcttgtttcatggagattaacactcagaaaatggggacaacaacaacacgagaccacagaattttagacctgaaaccttaggcctatttaaaacaaacaaacaacaactaaaaaccctctactttttgggtagacccagagagaccaggcgctgagctatcatagacctcatgagaagcaaatggaagcctagactctgtggctctctactccagtccattcaatgctcttaccaattaacaacattcctaaattaatttcctatataaactctgcaagatctcccccaaatctctttccaggtgcctggcaaaaatcttccaaacgggaacactaggaagtttacacctctagcctcatctctcccatggtggggactccataaatacttgttgagtgaatgaatgaatatgatgatgtgtaatgattagtacagatttaagatgttacagaattttaggaaagagaacatttctgtggctggggcttctgggatgagagaggatgtgtagcttacattttagagaggagcca

SEQ ID NO: 148345 - DNA, 654 bp, Homo Sapiens
tttagtttaagccagatcacaaattttattaaaaatgcttgatgatggagcatgtaattcctaggccattaagccttttgaaggatgcagaaaaacaagttgtactattatccgttgtaagatgttagtgtttatatacaaaaggggaggaggtactagatggccattatgttgttgcagcaattgccgaaacttctcttactcacacccaccagaccctctgtacacaatctgcaatgcttattttatgcctcttagtccctacaagaaaatcccaaaactcaatttgtgcactgttgaagcgaaatcactaaaaaatttatgtaactgttttctgttcgttctgttacttctcatttcatacagttctagaaaatgtgcaaaggagttgcatatggcattaatctgttagaaaatggtggccttttctataaaatacagccaaagatgtgtgttcagttgtggtcattattagggcgatcacgttgttttcattcattcattcaggatttgctggaggatgtcagtttctgcagcagctggcttgacctgggggaggagtgcaggagcatattcctcccaatgcatacagattacaggatgtatttcttgctgctcatgtactcatcccactgcactacatcctacactggt

SEQ ID NO: 148346 - DNA, 707 bp, Homo Sapiens
  misc_feature (186)..(196): n is a, c, g, or t
tttttatttttgatcctttatttgaaaaacaagaaagtaacatcagttcacagaaactatgttacatcacatctcttagacaactcaaattatgcccacacaacacacacacgcctcttctacttatcccttaagaatgtttacaacaatattaaataaatctcgttttgcagaattttcaacatnnnnnnnnnnncagaatttatccctattatttaacttcatgtaaacaatgattataaatgttttactggagtttttcagatggattgaggtggccttcgttttcactctcattctgagatactagagaagcagtaggataaggaacagatgatgtgaggctattggattctccattgacaaccggtgccaagcctacagaagcagagggagctgaagtacttctctgatcgacactcctttgtggagaggatgatgaattgttaagatgctgatctcgaagtgtatgaagttctccaagcaatttgtccatttttttgtttcttttcctgtagcactctcattttgctaaaaagttcgactttctcatcaggtaaacgttctgaagctgatggtttcctgctctgggaaacctccccagttaatgaaagaacttctgcccgtcttctattgtctggaacagctggaggctgaggaatcacgagctgattatgaaaaaggccgattaaagtaataaattcttc

SEQ ID NO: 148347 - DNA, 466 bp, Homo Sapiens
  misc_feature (43)..(43): n is a, c, g, or t
gagggcggcccaccacgtttgtgtttttgttaaggccctgtgnttttgtataaagaagccaagtttattacaaccgaaggccacaaaacatggagaagacttagtgtggagaaagtaaacagtcaaatgtcctttgaccacttacagaatgcatttctctactccatttcatcaaagtgtcaacattctgactcttagtccttgtccccatctttgccttcagagagagtataaggaatccgaaggttgccctgcacacggctcagggtcgggctgcactggcattctgtggtggacagacgtggtcttcctgtgtctgctgaggtgagacttgaggctgaagccccgcccaaacgtcttgcacacatatggtttctcccccgtatgtgtcatttgatgtaaggtgaggtgtgacttttggagaaagccttggccacactctctgcacacacaaggcttctcttcc

SEQ ID NO: 148348 - DNA, 370 bp, Homo Sapiens
tttgaaccctcacccgtcttttaatgaagggatttggctaagaagaaatgccaagtacttccgcaggtcatcctgaggtcaggatgtggtcggtgtgtctgtccctgagcagtcagacctgatggtggctggagctccggaaagctcgggacccctctagcgtcctaggccttctgttttccttcctgctccagggggcaggactggcagattcaaggaagctttcaagaggggttagaaagaaggggtgtgctccaatctgccagcctgatgtccttcatgggaccacaggccaggaactgaggttccctgcgaggggtggatgctgcgtctgtgagcctccccaccttcttgaaggcaagagcgccca

SEQ ID NO: 148349 - DNA, 386 bp, Homo Sapiens
ttttgtcagcccagtttattacagttaatgtctctttcatcaagtgtctaactgctccgaaagccagatgtttcagaaagccagatgtttcacagctgttctggtggcaattacttcaagacatcggtatcaaaggctctgatttttagcttcctcatctgcgtttttttgtgctttcctttctcaagtttcctcaggctcatgttctgaatctcctcccccacaaatgaaatacaacggatacgaattacagagaattttacggaagacactggagcttaagtctgcagattagttttttgtctacaagcggaggcgactggaaaatcaagccaaataagcgttggataactctaaacagccaaagaagcttcaatgggataggg

SEQ ID NO: 148350 - DNA, 605 bp, Homo Sapiens
aaaaatattttgtccttttttaaatgttttgtgtttctctacaggttacaacagttgcttcagttgcctgttttaggtgtttgcacttattttatttcttcttgaaagaatttttatttgcttttgtggtagagattatatgtaattttttttcagtcatataatggtgtgctgtcaacttaaacactgacaggtaaatagaattgtacactgtagtttgaattatttataattgacacactctctccctctccactcctgaagtatgctgctatagaaaatagcagaatcggcttgctgctacgagagaaggaaagagcgaccaccacttgcactgtgtgaaaagattaaatacaaatgatggcaagttctcaagttaactaaatggaatcaaccattaccaggcaaattcttgcaaataccaaaatactactatgccttataaaacaaaatgaaagcaggttaagattttctgctctgtttgtatgctaatatatatgtaaatactaagtattttaatgcttagctcttgaacagtagacctaaaagggttttaagctatttaaatctacttgctagtttttgcatattttatatatatatat

SEQ ID NO: 148351 - DNA, 421 bp, Homo Sapiens
gtatattttttattaaatattctgtaaaatgatgaactattagtgtaaaagctagagttagttctataaaaactaagttgaatgctctaaaaaaagtgagtaaaattacttcttttgaaaaattggccgtcaaattagtgttgaacaaagacaaatgtaaaatattggaagaacttacaaaaaagaaatctgctctcctgattgtttcatatgtgttgaagtttgtgctgtactttactagaactgaaattgtaatcataaatgatagaatatgggtgtgatgcatgcaagaaagactggaattcaagtccgcagatccaatctcaaagacaaggttttggccctacacagaggattggtgaatgaattacatttatacatggtttaagtgaaaataaaatgattaccatgtgtaaaaaaa

SEQ ID NO: 148352 - DNA, 642 bp, Homo Sapiens
tttcaactttaaatgcttttggattttaatcctctggagtatttatatgttttcttgtctcatcccttcaaaactaatctcagagttttgagaatctgggaacttgggcaaaggagaaaacaagcacgcagaccaaggaatctgaaatcgcagttcattacgtcagcataaactgacagtacctttttgtttgtattgacccagctcaaattataaaatcacatgagtaataaaacacaaaatacaggtgttatcattgaaaagtctaaaatgtaattaaacgcgttttttccccctcgcggtggtatcgtttactctgtatctcaacgtttctgtctccctaagcctctcctttcatatcatgagcatacatttttgcatcatgctcacacgttcattagctaggactgaggagtgtgtacgattccaaagggccctcagcgttagctgttagatgcacaaaccttcgcttcctttccacatctactgcactcgaggttcaacagaggatccttgcaagaacagcgcccagagagcattcttgacagatgcgcgcttggctccagcaacccgctctgctgggaagtttcttctaaccactaacacccacctccaatcccccaagctgtcacgacgcatgcg

SEQ ID NO: 148353 - DNA, 630 bp, Homo Sapiens
ttttttacagtatggcaaacatttatttaacatctgtcacataaaagactgttgcttacttgggaatttgtggatgatgttgccaggcccctcactggaatctacatgagagaatgatcacttacgtggcattggtttttgatagattcacttaggacctttgttagatgtattgcaactctagcatgtatttctgcttattatagaaagagcaaaggaacaacaacaacaaaacagggcctatcacaaaatatactgcagaagaatgagttccttgtagtgttttgaatatctgaggtagatggtggcatgcagtcaaggttctgaaatcatcttccgagataccctaaaactacacatcgctttcatctgactgtggctgcacgtgggcaaggctacattgcacaccagccagatccaccttgtgtagcaaagcatgcgccaggggtgcatcgttcagggcgtggcagctgcactgcattagatgtgctggatgtgtgcacagagccacgctctgtctgtacatttacatccgactgtccaggaagccttttctgaccttcgtgaattatttccattgtgctcactcgcgtcttccccactttagcaggcttaccctgaagtgttatt

SEQ ID NO: 148354 - DNA, 315 bp, Homo Sapiens
ttttaagaaaagcttgtccaagggcattcaaatttaatggcttttatataatacttggtgtagtgcctcgtggctgcctctgtgagccagaaataaaggaagctcatggattccccaaaaatgaaatgccactttttccctcatcatggatgactttgttaagatgaaccccttttacaggaaaggggttacacaggctgctgataccagtctagagagggcacccaccagccaaggctgtgttctaacttaggtgtcataccatcggccagaagaaccatgtagccatagaggctgtgaagctaactagtttat

SEQ ID NO: 148355 - DNA, 550 bp, Homo Sapiens
  misc_feature (33)..(33): n is a, c, g, or t
  misc_feature (44)..(44): n is a, c, g, or t
  misc_feature (54)..(54): n is a, c, g, or t
ctcagcttacttcacaattttaggtttcagcanctacagtatgnaaacagaagncacctggctattaatgaggccacaaacttaaggatgttcagagactatagacttagtaaatgacagagctaggtattctcaaaatctagcaatatttaatttgataattggtatttttaaaattcaaacaagaaaaatcagaaaataaatctcatacctggagttttccgttttcataggccagtttatttttactttcagtgattttttccaccttctgttgggcaagctgataaggcaaacaaaggcatcagaacctctaggcatagaaaggaataaccattttcatttttaaacaagtatttacatccttaccatttctatcatcataagatcaagattcctatttatttgctactgctgcttttagtcttttcctacatagttgatcacagggctaatatgcaacatgtacagagactgctaataaaagcatgaagctttaagagtaccagagtttgttggttttgtatattaactttttttgttatgtcag

SEQ ID NO: 148356 - DNA, 424 bp, Homo Sapiens
tttttgctgtttgaaggaacataggtatttattagttcagggaaatattgtggtgggaaggaggggctgaggagatacaagtggcgtcttctgtggagaacgttaatgtgagaggggagtgattgtggaaaagtctgtctttgtccccaactagatgctcattcctggtgagtaggcctctgtgttctgaccctgagttgtccctcttctattagccagcccacattcccgtaatgtttgggtggttacagggctgtctcctggtgaggaggggagggcagctgagtaggacctggtggcctcatggcgatagtcttcttcctccttggcagtcttgtgcctccttccttccaatccagccctcattctttccctctgcacagaaaggatcagcatctccggtacagcccccatctcctcgtgc

SEQ ID NO: 148357 - DNA, 401 bp, Homo Sapiens
gaggattatttgttcattttatgttattgagcacctattatacacaggcgccttgctaggtacagagggcacagcagtgtacaaagcgagatgtttcccgccctcctggagctcatgtcctaggacaagagcagactgcataaataagtgaaaaagataaaactagtgatggggttggagaatggggcaagtcccgaaggatgagaaatcagccatatggagagctgggaagaacattccagccagagcgaagaatgaaacacagatatatgtaataatgacagccaacatgttattgagctccaattcttaacgtattagctcaccacaccttcacataatcctataaagaaggtgctgtggttatgcccattttacaaatgaggagactgaggcacaga

SEQ ID NO: 148358 - DNA, 625 bp, Homo Sapiens
tttaaaaggcataattgagaattttattagagaaataaaaatattcctttggaatactgtgaaaactgcttttcatgtgccggaagtgaccccctctccctaccccatcccccaccaggttccggctgatcacagtcattgctccaggtgaagcataggtggcccatcagctctctgagcagcttctttaactactcaatctggcttacagcctgctctctggaatcacagagcacttaaagatggtattgtgatcatcctcctcttgtttgttttctcagatgaactgcatgcaatttgaaggtggggagatgctcccatgcattgcatcttatgcgctagtgcataatgtaatgcctggtatatgtaacaattaggaaactggttttcaacttaatgctgaaaatgttaaaagctagaaggctgccgaaattcagtgaggaggagaaacgatgagtgcaaagagagatcgtttgcaattccaggaaaagaacagaaatatctgaggttcattttcatcaactgcaggttatggtaagtctgcatcaatgcaggatctacctgatttaaaaggcctaggaaataatcgtggatgtgcctgatgagttagtcacaaggatgctaa

SEQ ID NO: 148359 - DNA, 448 bp, Homo Sapiens
tttactgtacaatggatttttattgaagatttgggaatatcagagtgtaattacagcacaaattaaaaacttatgacaagttttctattatcactgttgtaaatgttcttcacctatactcactcagtgtcagctagggtgtcttgaatgctgacatcctaggtgggatcacatcctctgcaagctcactcactcacatgtttgcactcacagtgttgtgctgattcttggctgagctctcacctggggctgtcagcagcacacctccacgggaactcctcatgtcacttgggcttcctcacaacatggccaccaagtttgaaaggtaaacaacctttagttcaattttgctttttacttgattccttcccaggtgaaaagatgattcctagttcttgttttgctctgaagaagcaggttgggttgctggtccaggctgggctgcctc

SEQ ID NO: 148360 - DNA, 533 bp, Homo Sapiens
gtggtatcatacaaatattttatttgattctttagatctttaatattttgcaaatcttatgccacataatattttatacatagattagtttataaacacttgaaacactgctttgaaagataaaatagaaaaacaagggaaagaagagaggatgggccagccagctcagcaagcatcctcttcatttatgccgagtgcctcctctgtgctcaacaagagatgcacaggtgaggccctgagaaccaggactctggttgcaagaggcagacaagccaagtacaaatcccatttcccacagacagttctggcatcttccacatctcacggtgctctgcaaggtgaccttggtcctcctccagtcaaggggtgggggctgcatctccttccctgaatctgggagggaggcttgtgaatctcctttcatgggcatcaatgtcttcatccgctgcatgggagtcataatatctttttgtcataactcacgagttccgcaaacgtctgcagcttcactcccgagccagcgagaccacgaa

SEQ ID NO: 148361 - DNA, 510 bp, Homo Sapiens
  misc_feature (353)..(361): n is a, c, g, or t
tttagtttggaaaagcagtcaatgcattttatttttggaaaatgaaaatgccaaatgttggtgaaatctcaaccataacagcagtaacttgaagtctgtgcctgcaggcataggattacagagatgggagaagcatgagtttccatccttgggtaacagcctccgagaaggggatgctagagggccttgtccccttgaggtgcccctgagagtaggcaggggacataactttaaattgcaggtaccgctgggaagcgaagtcacggagggattgtgcttcacaactggctgcgtccacagcatggagaggacctgcacgtgggtggcctacaagacaaactgtccatgtttgnnnnnnnnnccaatttgttctcaggcccctgaggaggggatggggaaccagactgctgcagccctcgtgcctgctggggcaggtctggggctccagctcccacagcctggcgtgggctgagggctctgccaatcctttttgtggttggttgtgttgag

SEQ ID NO: 148362 - DNA, 269 bp, Homo Sapiens
tttcaaaaattaaagtaacatttcatatttgcttattctaacagacaaagaataaagaaggaatccgctaagttgcaagctgaggtgcagacaagtgctggttcacagtgacatcctagaaggaatgctctggataagagcttcaagcttctgtggttttctgaggaaagtgaacggaatctagacgtgtcctatagctcaaaaaatcagcgctatggaccacagcgcctaacagagtaaaataatacactgtgcagtttggccactaa

SEQ ID NO: 148363 - DNA, 366 bp, Homo Sapiens
ttgcacatgtctggaataacttaaaatacctgacttttcagtaccaccctgcctgataattggttgacctgcagatttatctttagcagagtaaaaatgtcactctgctcgaggaaacattgttagaattttatagcaagctctgaagtgagtaacagccaactgatcttcaaggttgtcctctgtgatattcctctgagttggcccaaaagaacctcgcacaggttttaaaagaaaaaaataaggtgccaataaagtgcagtaaaattatttactttaattatgtttaattaacacattctttccctagaacttttgctttgcttggccctctttccttgactattcaagtacttactaagtaaa

SEQ ID NO: 148364 - DNA, 852 bp, Homo Sapiens
ttttttttagtgctgaataatagtccagttctggaggtgccacactttgtttatcctttcacctcaaaggacatacaggttccttccaagttttagcaattatgatgaaagctgctataaacacttttgtgtggacataagttttcaacgcatttgggtaaatgccaaggaacaggattatttaattatacggtaagagtatggttggtattataagaaacttccaagctatcttccaacgtggccgtaccactttgcattcctacaggcaatgaataagagttcctgttgcttcccatccttaccagcatttggtggtgttagaatatgtttctagttgttttagtaacaatgtttcttccttcagcaacagctactctcactgctgaagagaaattattttgaggccacaaacctctgaatggcttgataagaaaggaaagtcaaggagaaatgagagtgagacttcctaaaaaatacagtgagtccactttctgtgtcaactgtttatgtgaaaagatatgtgaatatactatcagccattccataagcaggctgtggcatctctgagcaaattagtcatgttagaatgatatctgaaatgctataagggaacattagtaagttgttcttttttcctacttaagtgacttataaattagttgcttacattcactgtaactagtaatttatctgtactaatctgcctaatttaccttattcttctgtataagatgaaaatcttttccaaaaagcatgagtgcatgttcaaagcttcggcattcttcttccgtccatgcagtcattccttctaagaaaaattttaaaataaaatttatgggtccccaaaaa

SEQ ID NO: 148365 - DNA, 406 bp, Homo Sapiens
tttaacatggcagacatttcttttcctttcacataggtataggggaccagaggtagtgtggcagaatccacaatcaccaggccccttctatctggtcactccaccatctggtcggtcaaccaacaggtggcttccacctcagggcccaagaaggttgctcatgctgcagccgttttgtcatattccagccagcaggaaggggcaaagaaggcaacacttccctgctttgatcccactggttagaacttggtcttagtcacatggcactctctgctgtacaggaggctggagaatgcagttgtcctctgcggagaccaacttaaaagctggggttctgcatgcccattaggaggagacagatcaagcacgtagtcacgctgcgctgtgttgcttccctccgcttctt

SEQ ID NO: 148366 - DNA, 433 bp, Homo Sapiens
tttgttggttgactgaatttattcattaaagcaaacaaacacacacgcacaatagttagtctgcagatacttccacagtaattggggagcagttgcatcacttacatgggacttaatttttttggtcatgcctcagtatatgctctcaaaagcctcatggagcagtgctacgcccagtgttgagagcctggcactcaaatggcactttagaatgcttgtttctagtaatagtctccaccttgatgaatggccttattttaatgacattggtatgttggctgggatggaactggagctgggtctgccaacctctgttgccagtgagacatttctcacctggtaaccatcatttgcaagggcctggagttcatgaagctaaattttgatagaaacaactgagttttcccatgagtccttgggtgaccttttaggt

SEQ ID NO: 148367 - DNA, 387 bp, Homo Sapiens
aaacacaaacaagataaatttaattgaaaatgttcattacagaaattaacaatgcttaccattctttaaacaccatgtacattattaatatatactgtatatttccaattaactccattcttaggctcaatttaagaaacacaattgtaacattttatacaaaaaatacttcactaagaaagtagacaaactgcacaaaacagtacaagtataatgtgcatagcaagatagcttgaagcattctatgtatggctttctttaaaaataaaactattaggggaatgggcccatttgggacctactgttacagttgacatatgtaaactgtttcacatcttttttaggcacttgctaacaatagtgttcaatcctgaagaacgaatttac

SEQ ID NO: 148368 - DNA, 744 bp, Homo Sapiens
tttgtgctttgaccttgctgggcactcgtttattgggtcaaatattgtcagagttgttgaacacgcaggcaatgtaatcaatatagtcgaaattggagatttccaaactttaatcctctggtcattttgttaaccagctctaaatcccccgaggatctggtttaaatgcagtttcagacacagtagttctggggagaggcgtaacaagcttccaggtgacgccctagcaccatacttttagaagtcagcattgaagggtgttgatatggggaggaggagaagctagtcgctaagactctgctcacacatcccctaatccccacagtgggagtcggtgggtattcacgcctgtgccgaggtctagggttgcaccgcgctgacttcacactcagcagcatgtgcagctgaggcctccgggcagtcgtctcctgcgaggcgggcagcgaggtcagcttggcagccgctgcctctccagcctggatctggccgcaggcagcggttccctaggaccttgaagctgacctaagtgatgctatggaattcaaatattaaacacgacgatgttgatgattgttctgcttaaattattgatcctcgtgggatcagaggctctgggtaaaagatccgagtttttgtatctgcagttgtggaacaggcagctatgaatcaaacagactggacacctcttcatatttcagaaatgggtgtatggaaatgcatcctcttgggtgtgagtcccatctc

SEQ ID NO: 148369 - DNA, 283 bp, Homo Sapiens
  misc_feature (14)..(14): n is a, c, g, or t
tttaatatttttgnggctttatttctaggctttttttcttaagatatacaaatacctatgcttacatattacagatatttttacaaaattgggatcacactgtactatatatgtttctttgtgatgtgctttttctactttagtttcccatcactgaactctacaagactccattttcaacaataaaaagttggttctataattccttcttcagaggttgccgtgacgtgcctcagcctcccaatagtggtggaattataggcatgagccaccatgcctggcc

SEQ ID NO: 148370 - DNA, 350 bp, Homo Sapiens
ttttttcctgattactttttttcaagagggaaaagtttattgcaggttggggacacttgtaaaaggcaaaatctaacaatgagaacgaactatagggctcgccagtttagaagatgagcaggtaaaacaaatacacggattatgtacaattattaaaaagagcagggtggtggacaaaaaggaaaaactgccagcagccttccagaaggttcacagagtatatccagggagcaccttcccgcccagtcctggctgcctcgggcatgcctcctcctgtggttacctgccctgctccagatgaaatgcagatgaggaagcagctaccggggctcaggagcagagctcattct

SEQ ID NO: 148371 - DNA, 585 bp, Homo Sapiens
ttttttggcagggagattatttaatgcggttcattcaggatgagcttgtaaagtgttacatagctaactagacctagttgggtttcagaggtcaaatcaagtaattaggttttgggctgcatgcagaggtggttagtagttttgatgtccgcacactgggcttgaactgtgatcctgagatttatgttcccagtctccttcaatctggagagattattacttaacaatgagttgatccttgttatactttggtattttggaagaaagttttatccccagacatgttgagacaagagatctaactgaaggagatgagaggatttctataccatatgcgttaccttctaatgctggccacctctgaagggcacgtggcagctgagacgaaattgattttcttcatcactgatcccgtggcctttacacaggctcagaggtgcatcagaatccacaatgaagtggacaagattagtgaccaacacatctgtaaatgttatattttctttttttagttccttagctttttctaccctaggataaattattgaccagttttctgcagtcagattcctgaatcatgttggg

SEQ ID NO: 148372 - DNA, 447 bp, Homo Sapiens
aaggaaaaagccgcacttatttaactgctggccaaacagttcacttcattatgaacaggttatttcagttactgttgaaatatctgatcttcattcactatttaaacttgtcacgagaaagcaccttctgaataaagagtaaggaacaatgacaacagtgaaatatagtcccaacctatttgccttttatcctatatcagtaatcagttcctatatcctccatcagaagatactgcaaagatgttacctcaagcagcgcctctgagacacagtgactgcaccaggtctgctctctgccccttgatgggaagcgactgtctgcacctttcctcttgggatccacctcacctcaagcccagtgcttggcacacaggagaggcttcacagaagtttgtggcattagagattgacagaattccctaaatcagtcctccagtcccagtccca

SEQ ID NO: 148373 - DNA, 850 bp, Homo Sapiens
tcgtttttatttagttttaaaatgtgcaaagcccccctatcatttagaaaggatgcatcatcgcagacaacagataaggtttcgttgaaaaacacaaattgttcaaaacacattaccttttgtattgggaggagagtagtggacatcctttagtcatcttttctgtcctctatacctaactcagttcctgtcaggtagtggacactcaatgtgtttgccgaatgaatcaatgaaataccaccgattatcccaaatagagtcagaaatgttgaaactgcttagaacaggacaattagatattttatattgcaattttcacagaactcctttaaatttcttaaggttaaaagaaaaaatctcccgacacttagaactttgaggtgggcatgtggattttacccaggaaacatcttattttgcagtagtgaacaaataaagtataggagttttgtgatttacatgtagttgctaatggtttcctcaaatatttgacctgaaagagacctagttcattctccttatttaacaggtgaggaaatctgtaccatagaggttcagtaacacagctggctgatagcagaactgggattctaaatccttcgatttctaatctagtgatctttgtatttcactgaaggtttttcaaactgtgctgtccagactctaaggaattcaatagaacatgctttatgcataagtagaatgacgaaggacagagctgtacccctattcctacttccaccccacccagaattgagcagtttttctctgtcttataatagatttatgaataatattttgtttgttcagtttcaataaaacctaaaataaataatttgaaagctctaaa

SEQ ID NO: 148374 - DNA, 598 bp, Homo Sapiens
ttttttcaatagcgttctctatctttattgatacaccactgcacacatgagggaaacagtgctttcctggaaaagattggagtccatcacatttcaaatgggggaagtaaaccctgatgtggacaagggactctggcagtcagagcagctgcagtagggctcagaggagcaatccctcttcgtggcaggtttttgagcaacgattatcccttctaggttcttcattttgttttccactgtcttaagttttttcaaaattttctcttgcagacccaaggacaggaaaagattattattgtcttgaattcggagaccacttccttctgggttggctagcaaagcctcaaaaatatgtgagcccttcttgtaaagtttgtagagtgtgattacaaacaacaatgttttctgaattgactgaatacttcgtttccataaggcatatattcctattcccaataaaatcaagaaagaaatcctcaagatgatttgcacagctggagcaagattatctaatagtcccaaacttgtttgctgaggtgcactagtctctcccaaaaaacttgcttgtatccaattccatactgtgctgagagagaga

SEQ ID NO: 148375 - DNA, 510 bp, Homo Sapiens
  misc_feature (457)..(465): n is a, c, g, or t
aatttggacctaaaaaagtttattattactattattattgtggaaggaaatacatacaggcacattttagtatctacaacagtatttgggaagctgttatgaaacacaaaacttcatttaaattttattataaagacctttattaggagaaaggacatattttctatttcttacttttattttgtgccttgaaggacttgtgaatgtatagaataattattttttcttactgcttcctctttgcaacccaacctccaccaagtcaatcgtgaaggtaggaagaaagctgtatttctgttacttttaaaaatgataacgagaagaaattaaaacaatggcttaagagaaagaggatgtaaggagtacaaagcaaaacttaacaaagagttagtaaaggaacttgcattgacaattcactcagccatgttaattttatcattaatactgtcttcatcannnnnnnnnccaggtctctctgctcgtatttgcttggtgctccgaaatgcacgg

SEQ ID NO: 148376 - DNA, 472 bp, Homo Sapiens
ttttcacatgtgtaacatttattatattaatacttaacaaagccctccaagacccaggctccccctaccccctaccttgggccacgtcttcatcttagtctttggagagaaagctctgaagtcaagtggtgagttttccagaacaagtggaggggcacagggaaggctctgagcaccaccttccccagaacacctcaagctctgccctggccccaggaatagaggtttctgccattcctgaaggtagagaaggtctgggatctgctcatcagtttgtaaacaaatgattcttctccttgacacattctgttctctgctctggccaaagctctgggccctgagacccagtgagatcctggtagctgtccaggctgagagggaggcagcctgcagcctcgtctgtcaccaggtccccttggagttgggaacaccgacgtcctgagacttagtaagaagagtctgaggggctact

SEQ ID NO: 148377 - DNA, 586 bp, Homo Sapiens
  misc_feature (271)..(510): n is a, c, g, or t
aataagaacggccttgcactgaaagaacaataaaccctgcacattaatggctctggttttatacttcaagctacagacttacatgtacagtattctacatggtgatttttgttcagtgtatatgtaatctgacttccgtatcttactgagtattatagacatatttaggattcaaaatagactcaacagcgtttcatactatatagtaatgacaagtggaaacatgtatgccgcataaacgataaagttattaaggctacttttataatannnnnnnnnnnnnnnnnnnnnnnnnnnnnnnnnnnnnnnnnnnnnnnnnnnnnnnnnnnnnnnnnnnnnnnnnnnnnnnnnnnnnnnnnnnnnnnnnnnnnnnnnnnnnnnnnnnnnnnnnnnnnnnnnnnnnnnnnnnnnnnnnnnnnnnnnnnnnnnnnnnnnnnnnnnnnnnnnnnnnnnnnnnnnnnnnnnnnnnnnnnnnnnnnnnnnnnnnnnnnnnnnnnnnnnnnnnnnnnntaacactgtattgtatttgtactgtacgtgtacatggtctgtttacaagatgaatcgtctgactgaaatgactgct

SEQ ID NO: 148378 - DNA, 409 bp, Homo Sapiens
  misc_feature (335)..(337): n is a, c, g, or t
  misc_feature (371)..(371): n is a, c, g, or t
tttgcgctgagctgcttatttattgaaaataaacgacggaaaagtctggccttgcctctgtgcaagcttggaggcctgggtcgccgctgtggacaagcgtcttagtgtcatgcagaccagaaggcagctgcctgtcccagggccggggcccacctcactgcctctgatggggactcccagcccccatggctccgctgtgccctgggcagagggacgggctgggggcaggggagggctggagccacaggaggcagcacagcagccagaaagccgccgtctgagcctcaccctttggttccgggagggcttgggccatcacccaggtgtgatccctnnnaacaggaggcgcagtaccctgggaggaggcgctngagggcggggcggtggtggccccgtcagtcccctcaac

SEQ ID NO: 148379 - DNA, 350 bp, Homo Sapiens
acacaggtggctggtgacaaagggaacagattaagattggagctagctcagtacatgtgtttaagccccacagggccctcgaagagcatccggcctgaagagacaggcaagtccgcctcaagcatgtaaaggacagcatgtgctttcactcaccctcgaaaggacacagctgggattgcatgttctgttcaggagtggcgaggctcgttttgagctatccattcccctgctctgttccctttgtcaccagccacctgtgtctgccagcaaacagcttttccttagagccagtcaaccctcaaatggctgttgcttctgcttcttcccctgcccctccagtgagcaggcaa

SEQ ID NO: 148380 - DNA, 798 bp, Homo Sapiens
tagaccttgacaatttttctttaatggataaaaggcaaaaagatctaggaaattgcttttcctttgagccctggagacctggttattaggcttctgattatcagagcttctccccatcttctcagtgcctagagacccagatcccccaacagcttcctggggtgctaggaatctggccccaggggatctggagggtgggaagcccagaaatgggcacaccattcaaaatcagtcagatttcacctgaggcacaaaagacaaatttcatcccaagaagctttcagccagctctatccatttccaggagggggaaagcaccagatctgcctgacccttgagggacaggaaaaatgccatgaatgtctccatgtcacaaactcagctccagaaccttggtggcagtgttccaatgggaagcgattcctgtgggccaccgagaagggctgagctcaaacacttgcctttggaggtccttgtgccctggaaagtcactgccttcggatggccactgtcactcagccaggaggcaaagcacatattttgacacagctgtaattatgacgaggcttcatcaaagagcaggaacctgccagaggtgacagtccaagctgtgcaggctcattcttctggagctgggacacagtcctgagagatgcagagcaggagaggagactcactgatagctctcgcaagatttgggtccatgttttccaagacgatccaccagaagatacctttaaatagcaaacaccttcagtgtacttcagtttcacaagaactcgctcagtttttcctgga

SEQ ID NO: 148381 - DNA, 496 bp, Homo Sapiens
tttgacatttgagtttgaaacatagattaaagtagcaatgagattttaccagtcatccttatatccaatggggatcactaaagttcattccttctgtgaaattgattgaagtaatgttcgtgcctgttaatttttcccgacagcagctcttcctcctcttcctcgcgggccttcttcatttcctccttggcctgtatggcatccatctccctttctggacccttggtttcgccccaggtggccttgcacaaattatctgcgtactcttcatcatctgtgatcagaaagttatcaaaaatggttccagatctcacctggcaaagctccaggccaatggcaccaatgttctcaaattctgagaggtcataatgcgtcaaatagtcggtattcttcatcttacggtggagccagaagtctttaagaataaccttcggtttcaggccatccggtaacggggcttctggagaattcgggctggccagtccccatccaggtt

SEQ ID NO: 148382 - DNA, 404 bp, Homo Sapiens
  misc_feature (378)..(378): n is a, c, g, or t
tttaaatacccaaatactaagggtgggtgttcttgtcttcattttattgatgaggtatctgcagctcagaggtgaatccactttcctaaaatcatatagctggtgaatggcagccaggatgtgactgacccaggttttagggccagacgtgtattcttgtcaccacctcctgctgccttctgctgcagggtcacacgtactcccactgagaaggcggaaggctattgtgatggtttgggtggcagatgcatgtcaggagtaagtcctcctgcccttttagacaacttgtcagcctcagcactggcctgggggtgctggcaggaagagggttaaagtcctgagaactaggggctcttctctcatgagattggtctaggnggatttcttccaggtcacacccactg

SEQ ID NO: 148383 - DNA, 599 bp, Homo Sapiens
acatgtagcgtctgttgtctttgtacacccatttagattcagtacttcaatgttcctgcagttttgtgcaagggttcttaatgcattgtctcccattccaagacatccacgaggacttaactttcgtaaaaagcccccacatcgttttgaaatattctccactactgtgccctcaatatccctctggaaatcaaataggtcaattcgctgccagttactgccatccagagccagaacattccaggccctggagacctgagcacagcggcacagggtaacaacatctagaaaagaaaatatccgtaacaggagttctttgggaagttttttattgattacagcttcatcactatttgagaacatctcaaacctgctcttggtcactccgttcacgtccctcctcatggggccggcgggtagcggcccgggccgggcgctgcggcgagcggagtgcacagaccgggggcccaggacaggcccgggagttccgggacggggactgggcgccggaggggtgacgccgggaccgtgggacgggaacaagagacctctcggctccggctaggcctccaccacctcccgcggcgccggcggccgca

SEQ ID NO: 148384 - DNA, 630 bp, Homo Sapiens
  misc_feature (599)..(599): n is a, c, g, or t
caaagaaaagaggtttattgggcttcatcgagggtgcagatgcctccgtgtggggctctggtcggcagctggctttcagagcctttccctgccttctggggccctgtgatccctcatgcctacttctttctctcttggtcagccttgtgcgcatgccctctcactcttcatctcttgggcctgtctctgtttctccttggatgttcttctattattcccctctctccatcctccataaataaataatttaattttttttgccttcataaatagtcccctccctgcctctagtcatcccccaagctcctccatgtgcctgctcttcctctgtgtgtggatctaggccccacctagctggtgggacagaccaacagctttgggctgggaattcctaggcaggcttgaaatcctcagccagacagacatcagggatggttcagggaggtgtggtcccctgggatgcctagaattccttctttgaaagctccggtgacttgatcaggggagacttgagctgttggaatggcaaagagaggtggtgacgaccctgcaatggtcagaatggaggcagaaatggggagaaggcttgaaatcattanttttctttctggattttccaagtctacagag

SEQ ID NO: 148385 - DNA, 258 bp, Homo Sapiens
ccttttccccaaaagcaacagcaagacatattttgttagatattttatttttaatgttttctataatttaaaaatgtatagcctgccagatgttgttttcataaccatgatattgttttgaaaaaattttatcttataatactgaatgttctgaccttttatagatgtttttgattttgttttaaataattttaaattatggagcttgacctagatttgccaataaactttctagcctatttattttctctttcttac

SEQ ID NO: 148386 - DNA, 294 bp, Homo Sapiens
caaaaaaatcaactttattaaaatataattttagacaataaattgcattatttaaagtgtacaattagatgagctttcacaattgtatacactcacaagaccaccaacacaatcaggataaacttaattcatcttcaaaagataattttctttaaatagaaatcattccaaaaggaaatctatactgagtatatgagacattaatcccctcttcttttcagaataaatccaactgagtatagattagaattagcataaacctatgtttctcaactaagggtagatttgccccct

SEQ ID NO: 148387 - DNA, 1220 bp, Homo Sapiens
  misc_feature (787)..(799): n is a, c, g, or t
  misc_feature (1137)..(1164): n is a, c, g, or t
ctattcctatttgtccttcttagaaaacatgcacttccactttcccctgcatgaagaaaaatgttgttctcaacaccctacaaaaaggaccagatgtagtgggaagtgtaggatgacaaacagcagagagaagtcaagttacacctgttctcaaaacctaagacaagccctgttaccgtgaaatttcctagatattcaccatactaggcttatgactcacaagtaaaaccaacagggaagctataacgaacactgataaaataggaattatctgcaggcttaagtcttgttgacatgagaagtgcttaagtaaatcaatggtatcgaatatctatgactgaatgcctaaactcctgattctctttctagtagtacaatgtggtaaaagaaaataatttacatttaatgaaaagtaaatataaataagtgtaatttcaagttattgctctactgcagtttttcttataaaaggacttcttcacttattccttgcactataaagtggtatgcttagtccttcacattctagaacacaatggtcctttttatggcccctaatcaaattctatggcaaaggatgcaaagtccttactctcaactctggaaccctcttccttgtgccaaagaccaagaaggccagagactatcttatctcactacgatctattttgagcaatgaatgaaaaaacagaagaattgaaagcactctataaagtgccttttagatgacagggctcctggtgtcagtcttacaagcatttgtgaagtgctaagaaagtcaagcgannnnnnnnnnnnnacattaagttagctatgagtggcaagagttacatggttgctccagatggttagtgtctaaaatggccaagagcagagaagtgctttactttacgtgctgaaactttattttagtaaattctactctagttttaccatctggagcaacacgatgtatactctttcattcacacagcagcattttttcattttttaaaaatgtgtaatactaaatacatgcttgtttttacacttctggaaaaaagagcagggggagcttcaaagattttcagaagtaacacgagttagctaatatcctgctcctaagcctgggcaacatggtgagaccctgtccctacnnnnnnnnnnnnnnnnnnnnnnnnnnnntcctgttcctagatcttttctcacttgatatactttgagtatccttccatatcatt

SEQ ID NO: 148388 - DNA, 919 bp, Homo Sapiens
ttttcagtagctaaaactacagattttatttcacctcattttctttcccttgcccaccttctggtacaggtgctaatgaacagtagaaagttaggggaaaaggcagtagagggaaagagaagccaaggatctggttagcagctcctaaacaactgagaatggactgagctgtttagaattagtggtaggggacccagagccaggaagcaagcacacagcattatttatgtcacctttctgctcccaggcacctctcagctttcacagggcaataggaagcacaggattaaaatgtaaaaccaagagcacaaaagttacacgtaacaacatcagtacatagacaatccataatgacatttctataccatccaaatggaagccacaacaaagttgtctgtgactacattatgattaaagtcaaaacaactgatatttgatagttgatacaagcagctagatttttaaattaacatatgaagagatagacatgagacacacagatcattaaaaaaagggtaatacagcctttcttaaccacagacagaaagaatatgaaagtgtgaataatgatgcctttgaattcatatggaaagctatcaccaaataatttttaagaacatattaccatatcagattgtgttcttatacagagcaaacatcacggttttacaataaaccaaaccaaaataatcttatgtaccaattttttaattttagaaatattttacaaaactgcccaatttaaaaagcactacaactttcaactttatgcacttgattttatattctgctatttactctaaggaaaagaaaatagcttaattctatatagcttaataacaaaggacaatctaaggaaaactgagaatattagcaacttttgctgccatgtcatctgtaaatatttactaattcgata

SEQ ID NO: 148389 - DNA, 366 bp, Homo Sapiens
gtcatttctcttgtttacttattggggaaatgcatgttgacattatgagtcctcttagatgtttccacatcagcatgaaagcactagctctgaatatgatatggaggaacaatgatttgaagaccttcgaaaggcaagcaacttgacacggggcatctttctagatcattgtttggaagagaaccatcaggacgatcccaggggtcctgtgaaacgctgttggcctgggcaaggagggaactggtgctcatcactggccctcttcagaaacaatctgctccgtccaagtgcaatatgagtatttccagctgaccatggggaaacttgttttctagtttatcccagctacattatcaagcctcgtgc

SEQ ID NO: 148390 - DNA, 526 bp, Homo Sapiens
cactctcttggttgcttcttcaatccagttattctcagcagaatgtttctcttccaagggattgcctacaaacaccaggtcttcgaggcatggcagttctgccagcttcacatactcagcccagtcttttaccaggttattagacatgtagagaatcttcaatttcttcattatgtggatccctttcaacttctcaataaaattgtaggagatccacagttcttctaatgtgtcccctactgcctccagtccatttaagttctttatgttgtttcttcctaaagataatatcctcaagttttttaagccattcaggttggcaattttttcaatgcagtttgtagacagtgaaagcttccattccggcggttgctactgtcactgctctggttgctagggcccgcggggtcggtgcgcgtgcgcacttctcggcgctctcggcggaagccctatccccggcagcggtcctttctctccgccctcagggtggtgcgagcggggcattgtgggactgcgtggcggccgc

SEQ ID NO: 148391 - DNA, 759 bp, Homo Sapiens
caatgcaacagcaatgtgctggggtctccaccccaggatgtgaggcagagctacagtcccgcacccgctgcagccgcctgccactcacgggcacggagctgaacgatgaccgcaccccatctgacgctacagtcaccacgaccttcaatatcctggttattgacatcaatgacaatgccccggagttcaacagctccgagtacagcgtggccatcactgagctggcacaggtcggctttgcccttccactcttcatccaggtggtggacaaggatgagaatttgggcctgaacagcatgtttgaggtgtacttggtggggaacaactcccaccacttcatcatctccccgacctccgtccaggggaaggcggacattcgtattcgggtggccatcccactggactacgagaccgtggaccgctacgactttgatctctttgccaatgagagtgtgcctgaccatgtgggctatgccaaggtgaagatcactctcatcaatgaaaatgacaaccggcccatcttcagccagccactgtacaacatcagcctgtacgagaacgtcaccgtggggacctctgtgctgacagtcctggtgagtccccgcttcactgcagggccactgagctctccagggccgactgtggtgaggcacccagagggattttgtccaagggacctcagcaatcagggaaggaggcacccccaaatccctgagctgtgtttgttggtgtattaaataaagtttttggactcttaaa

SEQ ID NO: 148392 - DNA, 694 bp, Homo Sapiens
  misc_feature (64)..(107): n is a, c, g, or t
gaactctttcttctctcccgggagccaatgagcttgggagaaagggcaagggggtacaagggannnnnnnnnnnnnnnnnnnnnnnnnnnnnnnnnnnnnnnnnnnntggggagagtgttatgtggtggatggggaacaatatatttaccttccacataagtttttattgataccaagatgaggtaaatagaactctggtgtggatctgtgggtttgagtccaataagctttctcttttacattcatcttatttaaatctttgctgtcacagtgaagaaataatttagaaaacttataaaagcaattgagtttaacacagattttattgccctatagacagttatgatgtgaccagtggatatcaatgaaacttcttaattatttgagtctgaaaatgcatatttaaaacattaaaagattgactccactttgtgccaagctctgcgggtaggcatatttcatatcttaaaaaggcttgtaattcattcagggaggcaaaagcaaaatctgtaattagaggttagccataatgttatgaaagtgccatgagaatagagagagagaataaaatcataaagatataaataaacgtatttgaactacaggtgatgtattgtcttaaattacttctatatcatatgccagagggccttcaatggaaaatcctaggtagaaagacactctttctatgtt

SEQ ID NO: 148393 - DNA, 520 bp, Homo Sapiens
  misc_feature (352)..(416): n is a, c, g, or t
ttttttttgtgttttatggactttatttaaaggattcaagtcaacttataggaatgtttccactgttccaggatgctgccttcagccctgtcttttagtttaacatgaacataaaaaagtgaatgttgtttcggaagacattgatgaaagtatgatattggaaattgcggagatgatggtcctgctctattctgttgcttagaccccggctggaatgctgcattcagttatggaccctactaaatgcccaggtagtcaaagcccaatcaaagacgaataatcgggacagggaaggaactcaataaggaagcatgaagaacaatggaaatggagctgggcatggtggtgtgtnnnnnnnnnnnnnnnnnnnnnnnnnnnnnnnnnnnnnnnnnnnnnnnnnnnnnnnnnnnnnnnnnaggctgggcaacatagtgagaccccatctcttaaaaaaagaggtagaattgataggtagcctggtgaggagttgtcttcaggttgggagaaggtacatggctga

SEQ ID NO: 148394 - DNA, 474 bp, Homo Sapiens
tttataataaaaggtgtttattgcagtgataaaaatatcaaacaacagtagtaaatgtaagtcttgcagtcaagctttagggtattgttcaataatcaaaataaaatgttgattatgtagcaacacattaacatgcttataatagaaagtgaaataaattacatacccgaatatattcctaaactatgatcagaatgaaggaaaacatgtcacacatatgatcacaaactgaacgcgtgtgtgggaaaatacaggtacatggtcttagtgtagaaagaatgttaacattgatttttttaaaaaagaattctgaggtttgggttcggttttcattattgtttctgcactagatgatttgtaaagttctaaacatgtagcctctagactgattaaaggagcgtgtgacgtgcagtgcaatatcacagagacaggcaataacaaacaataacaatacaggctcctgggacatttaca

SEQ ID NO: 148395 - DNA, 553 bp, Homo Sapiens
ctgctggctaaaattctatgccatttatttccccccgtaactcatctaaaatgtatattgttgttttcaggatgtgaagctgctgcacaaacagttggcagggtgtgagctggaacaaatggatgctcccattggcactggtctggacgacatccttgagaccatcagaattcagtgggagagagatgttgaaaagagccgggtggaggcaggagccctgctccaagctaaggtgagaggcaggaccagcatcctccactctgccctatgcagaaggaggccacgctgagctgcaaactagtcaatgtgcagacgaagaaataacaacggtttagtaacaagttcaacctcattagaaacagaagaaatgaaaattaaaataatagctttttgtttacctatctaaaagtagaaaatgtttaaaatggtaaaaatgctggcaagtatgtggagaagtaggttctctactgtattactgaagagcataaactagtgcactgcctttgaataagaaatttagtaatatgcaccaagagtgttaaaatgcccctag

SEQ ID NO: 148396 - DNA, 553 bp, Homo Sapiens
tttaaacaaggtttttagaatttaataggtgcaaaataggctaatctagctagtaaagaacaggactgtaggaacagtgacagagcaaaagtagagcctttgttacatacagctagtcaaaagtaggcagaaaacagcaagagatatgtatccctcaggacctcagtgctcaacaaagaatatatatcataataacacaaaggtttaaaagcaaccaacaggcttgaaggtttcaactgccttttgttgctgtttggatgaaaagcaaattttgcctctttcctcaggcctctgtttgtacacaggtattgtaattgtattaagcatgtcagggaaatccaaatcccagctaaataattagtgaaatagattctgaactcatttttatgcctgtgtgaattacagatgaacaggctagcatgcctgagacccaacgaggttaatagtatcagctggggcctttctttctggagaatcactgcagttatcacaggcagatgctgtactgttaaatgaaaatgccattgtaggccaaatgttagcagttaaatac

SEQ ID NO: 148397 - DNA, 462 bp, Homo Sapiens
tttggaaaacatcttattaagccaggaccccaactcacaagacaccctttactctcccttgtttgaggaggactcagcaccacagatttaccttagcatgactaattcctgccagttaggacccctcccatttcatggatagaggtcatgctagcatccatggcacagacaaggtctagggaactcaaaggttactgacagcagaggaaaggcagcatgtgggtaaatgcggataattcccacctcctaggccccctgttaacaagggtgaaaagccacattggcacccatggtctgcaccatcccaaggttacagggactcagggatgtgaggacagctcttctctctctccctcacataacccggttattccctgggagaaaaaaggaactagggatgacttgttcccctctttctagttgagtaaccaatcatcttcagtctgtatttctctcaaatgc

SEQ ID NO: 148398 - DNA, 377 bp, Homo Sapiens
tttcacttgaaaaagattttattgtttgttctcaaacaaaaatttacactgttttcaaaacatccttcaaaaacattacctgtgagcactcagccacaggcccttctcccaccaccactataaaataatctctgcagtgttaaatggcagtgggttagtatctcacctctgcttcaccaagttattccacgtgtaattgcacgtttttacctttcctaacaaatttctgccacaatgtactctaagaaacacaaaacctaagaatgtcaaatgcctaagatttccgcatcagaagactgtgcagagtaaattctggatatactttttaattttcttctcagcagggggagctagcactctcatcttgaaggtctaag

SEQ ID NO: 148399 - DNA, 692 bp, Homo Sapiens
  misc_feature (388)..(460): n is a, c, g, or t
aggcaggaatgagaaatcctgtgaatccttttggatccttagggatttcacagtttatttcaggcctggtgccctgagactagctgatgagcattcatgaagcaggctccggtgcccagctgttagaattgtcagccagcctgaaaggggaggtgtttcaagacagtgaggtgtttcccagaaactgttcttctgactccattaccaaaagagactgtgtaccagaatcgggtcccatggagattggaataaaatctggtgcgttgttgagcattccttaggagatagaaccatacctgagaccccagaggtgggtgtcagtgaaagatggctgggctctttatctcactgcctcccttcatcctgagccttgtagcagctctctgannnnnnnnnnnnnnnnnnnnnnnnnnnnnnnnnnnnnnnnnnnnnnnnnnnnnnnnnnnnnnnnnnnnnnnnncaatgaaaaagcccctcctaatgagaagacttgcagatgaaatacaacagaggcttgatcaccatgcaaaagccaaaataggctgtctgtttctcatcttacaggaataatgcagccctctggaaatcacagtggtgcaggtttctttaggctggctcatgtctgccctctactaagatcatggaactatgccgtgatcccacagagaagacaggcgagagtccaccgctga

SEQ ID NO: 148400 - DNA, 477 bp, Homo Sapiens
cctttctaagaggttttatttgttatgtaatgagtgaattaaaagaaatcaagcacttatttctagctctcgggagcaaagtgaaaatttgcaaaaggaactcttatgaaagcaagagattataagtgtaagacaaaattattttaaaaataaactcaatatcaagaaagaaatcgtttctgtggtttggactccaataatattcatttgagatcaacattggtagtttgttgaaatagtcaattgaggagtaatgttggatatattcccaggaaagagaccatttctttgttcagtggggctggacacccttcctaaataattgttgaaagtaggtgttgttcagacattcagtgggaacatttcagtcaataccaaaagccatgcccacagatactaggatctaacacaaaatgagattttcattcaaatccatgaaagaaagatttataactcaacctctatcctgtggtatat

SEQ ID NO: 148401 - DNA, 969 bp, Homo Sapiens
  misc_feature (595)..(852): n is a, c, g, or t
  misc_feature (860)..(860): n is a, c, g, or t
ttcaacaaaatctatttttttattcttttcttgttttgattctcacaggcatagtttgaatagactataatcatatgactcacaatttttaaattttagctttatttacattaaaaatactctcctatgtttctacacgggcgtggccattatcaatttaatggctacacagtataacaagattttgatataatttacttgaattttttttctatgttcacatcatttctagtgtttcacagctgtgaataagacgcctataagcttgtttgtacacataattttttttctctttctgaatgatttttctggattaattatcttgagtgggattactggatcagggaataaataggtggctgaagtgccttaagaaagaagtttctaccaagtgcctgttaatgaatgcttgcctgtgttagaatttattatttattcttatttaccacttccataaggtacagtgccgcccctatctttacctctgcacatctttaattaacagcaaacttgatcatttgtaatggttgttaatgatttatatctctcataccatatggaggtttggaagctaaatgctagcaggaagaattcnnnnnnnnnnnnnnnnnnnnnnnnnnnnnnnnnnnnnnnnnnnnnnnnnnnnnnnnnnnnnnnnnnnnnnnnnnnnnnnnnnnnnnnnnnnnnnnnnnnnnnnnnnnnnnnnnnnnnnnnnnnnnnnnnnnnnnnnnnnnnnnnnnnnnnnnnnnnnnnnnnnnnnnnnnnnnnnnnnnnnnnnnnnnnnnnnnnnnnnnnnnnnnnnnnnnnnnnnnnnnnnnnnnnnnnnnnnnnnnnnnnnnnnnnnnnnnnnnnctgagccnctgcaactgcttggccaattccaatttagaagagaatcaggtgtggtgaattaaaagacagctgcaaatgctttaccacttcttcagttgagttcttaaattgagctgg

SEQ ID NO: 148402 - DNA, 595 bp, Homo Sapiens
tttgaaattactttttattgctatttgttattactcttaagtgccacactgcagtaaatttttttcaatgcagtagaagcatgtgtttttgcttttttggggaatttttatcaagtatgttcaaagaagattatttcctgctttatcttcaaaagtttaagcagtaaatccgggaagcagctgtcagacaggaaatatttttgagtaaaacaatatagtgaggtaataaaacttctcattagagcacctatcatcatttagccagttggtgaccttcatcaagtctcacagcttctctgggctttcatttcctcactggtggtggtagtaacacttgccctgcctctgcctgggatctgtgaaaccacgtgacgcttgcaggagtgctctggaggccctactagggcgattgagtggatgtggatccgggtagtggtgctgccccagggcatcttccacggtgtttttccatgagatccgaactcctgagtgaaagcccaggcccacgtgggtgtggtcattgcctcttcgttgtgttcttatgcagtccccttcatgaggtcagatggtggctgtggagcttagaaaaagctgg

SEQ ID NO: 148403 - DNA, 580 bp, Homo Sapiens
tttttcattgagcagtgttgagattttaatagaaatgcttgtaaagttcttagcatgcatcctagctcaacgaatcttgactattgtgaatgtcattatcatttgagcaaatgcatttcccatccctttgacaagtcgctctaaatccctgtcacctcaccagttctgatgtcggtggaacaggggtcaagttgaattccatgatgaagagactgttgactttaaagacctcaaagaggcccatatggagccacttacttggaagattcatgcctcactctcagccctgagatctgctgtgtgctggtaacatatcagccttggttatcatcaccgccttagccaatgttttgaaagatcacaatgtgactgcccttccacagaggaaagggggtgacctacaatcagagctgtggctcagaactacaaatagtgtattttccttgccttctttccattcacattttccatgcagggtaggccagtaggccctagcagggtgatcaatgcgtttatgtgtctgtctgtctctgtggccctggatctgcgcggccagcttggatgaaacagctcatttact

SEQ ID NO: 148404 - DNA, 809 bp, Homo Sapiens
tttgacacatgttcagacctttatttcctttctctcaccaatctgataattctctgcttcctgagggagaaggacagagataataaaaaaagttatcctcttgttaactgtactgtctgaaggaatgaatggaagtttttaattccttgagccatggccagaaacaactagaggaataagatatttcctctaatgatgtgaataaagcaaagtgtggagcaatgttaccttacaagcatctttatgcaaattaagtgcattttttgttgttatttgacatctcactccataaatgagattcaacctgcatgtaggaaatgaaaaagatgatcttgacttaactaatatttcatccataaaggtaatttttgatttatgggctgaacttgtccataaaaacattgtgaaaaagaaagtttatcttcaactttcttcaccttcctgtctcgttttctatgtttccttttcgcttccagatcccagtgtttttttctgacaatattcttcaggctataggtgtccatacatttcctggatcttcatctcttaccacagaatgtggagttggtatcttaagtcattacatatcctctgtggcccatgcgtaggcctcatcctgatgcgttgaattattattgatggctgaggcagttctgctctgttggtgaaccaataatgtcaaggcaccacctgcaagattaattataggagagaataggctgaggtttctcgggactgagacattaatatagactgagcattagtttcaggggattcaacagacagctgaactaacgcctcgaacaacg

SEQ ID NO: 148405 - DNA, 487 bp, Homo Sapiens
gccttggacagtagacatttatttatcacagttttggagactagaaagtctaagatcaaggcacaggcagactcggttctggtgaggcttctctctttgggttgcaaaaggctggctgtcttctctccatgtcctcagatggcctttcctcaagcatggagtttctcctgtttgccaggccctcttctacgtaccagggacacagcagtgaaaagatagatgtcttctctgctgttaggaaacttgatagatgcagccaggtttattctgtggcattcccatatatccagtgagatgccactgaagagtttcaggtttcagggagtgacctggcctgaggtccaattttcaaaggacctcagcccatacatgaatgagcagggtctcttgtggaggctgggggacaagttggggagcctgaggcgggaggctggccctagcctctcaggcaccctcaggcccacgctttctctctccgttgtagaag

SEQ ID NO: 148406 - DNA, 570 bp, Homo Sapiens
  misc_feature (317)..(333): n is a, c, g, or t
ctgacaatgactcttgcccgtgattgccttccacgtactcaggtgacagggtggtgccttcgtgggtggactcgcttcctgcctggactgaactctgaaaatagctccctcttgaggcagagagagtcatatggtgacacaacccggcttacaacgctgaagagctcccagaattcacagtgactgttcagtcattttatttattcacttactcatttttcctttttgtgttatacccttaaaaaataaacagcacaactcttcatcatcttgaagaccacacctttttgtgatattggccatcaaccatctgagtnnnnnnnnnnnnnnnnnttattacctggggaagataaaatcttctaacgtgatggacttaaccttaactaccagagacgcaccgaactgcaaaagttctcatctctcttcggagaaatagccctccttttcaccattttctcacaacttgggcagaaattccatggcctctgatagggggcgtgcttagcatatttgacacctgggacaaattattttataatacccccctcctctataacagaattattttgg

SEQ ID NO: 148407 - DNA, 537 bp, Homo Sapiens
tttatgaggaattcattcatttatttaacaaatggttactgagtgtagacactatactataaacaggggaacccattcatttattcaacaaataagttactgagtgtagacactacactataaacagcagatagatagatagtgggcggagggagtagtaagagacagtcccaatcttcccgcggcatacaagttagtgggggaatcattatcttattttcctcacatctgctatatgtttcccagtttctttctcatcatgtctatcacaaaaagaatgacacatttagggggaaaaatgaacatccataaattatgaaattcaggccctcatacaacacatgctttccttatatactttcaatttgtacactggaaaccccaagccatctccatttaatgaaactggatatgcaaaggctttggggtttggcaccctaactgttcctttctaaggatgcacagagaactaggtgtgggaagaagataaaagtgacctaccaatgcctagtcattaactctttttatttatttatt

SEQ ID NO: 148408 - DNA, 374 bp, Homo Sapiens
tttctcctgcagctcacatttttatttatcaagcgtttttgtttattagctccagccttcaaaacctctcatgtaaaagcattattatccgcccaacaagcaaatccaatggggaagaagcgtgccaactgaccttgagagtccagtttatgaaagaacttgagacaaaacgctgaagacagcagtttgtattggccatggtaatgtctttcttacttcagcctttgtttcgttttcaggaaatcagaaatagagatatctgagtttagactttgttgcagagtagattgtcttatctcccctctggatgttcaaaataaaattcccccaaatattgggaccaaagctatcacaaaaacaaaacaaacaaacaa

SEQ ID NO: 148409 - DNA, 943 bp, Homo Sapiens
atattgtgacatgatgttcatttttttaatcacagatatttcatctcaatataacactaactttttttaactttagaagtttaccatatgtttagaatgagtcaagaaataagctactgaggagcaactgtgtgtatgacaacaggcttaacaatgcagaaacacaaatagagaaaaagctcttttaccctgggctggaaagccatgccttattgccataggcataagaaattcagtgggagcctagactggtccatgcattgtggagtggtatgtatgccacgtgggaagcctaggaggcacgataggggagtgagtgattataaatatggcctccagtagacagaatgaactgggatggaatgccagcaacaccatttaccagaagaatgaccttgggcaagttgctgagcctctgaaactcagtacctcattcaaagtggagataatagttcctacttcacaggttgttgcatggtataaaagagggtgggaacactaaattcatggtttacatcactgcttaaaaacagggtgaagaggaactctgctgaactgtctttaggacttttgttttcatattccactttacatgaaaagccaaactaaagaaagttcatagtttctaaccacttccatctctatatgctctcttcaataaacatatgctgttctttcaaattacaattcttcaacaaacctcttctgtagccattaatattacactatgttccaaagttagtatactcaaatacaaattatgaaaactgagttgaagtaatgacaatctatagaaataaacattctaaaataaaccgcttttgtgtcaaatcttaaatcttttaaataaatagaagttctggagttctaatgtaatcaatcttctatcattctcccacagtataataatgactagacctttttactcttggggaacttaaag

SEQ ID NO: 148410 - DNA, 590 bp, Homo Sapiens
agatatttgagatccagttcttttgtagaatgaagtagactccattagagactggcaaattccctataattaattacaattttttaaaaaaagcatgtcctctgggagatcccttagaattttcctcacttgtaactgtagctgatctattgtgctgttttacaaagagggggcaaactcattaaagtttttggatcctatagtactgaaatattactcaaaagttcaaatgggctttgatttatttatctgttttggaagcttcagacttttcaaaccattatggccgttaatgcatctgatacaagattggatgtgattataggaactttgagaacataaaacatactgcttttttgcatttctgaaaaattcttaccaaaaggaagaatttgacttctgtccagaaggagtatctgatttgtttggactctggataaactcgagctgtgcatatttggccaagagtttgatttgtggactgatcatcgagccgtgggcaagactcaggcttcagaaagcgatgtcagtgtcaagaatcccacatgaacattaaatatgcttctggacagataaacactcgagccaaa

SEQ ID NO: 148411 - DNA, 392 bp, Homo Sapiens
tttatgtaaagtaggtttattacttatagatagcaatggacaagaaaagtccaggattcattgagacctggtgccccaagccttgggaaatctactcaggtcagatggagtcatctgtacgggccccatttgcgccacagatgagggatcatggaaaacaacccttcctgggttttgcaccctgagcgtaatatgacacgctagcctaaaacactgtaggacaacctgttctcgggagagactagaacagaacctgggctgttccaactacttccacatgttctatggttattcttgagaactacaaatgagaaaaggagtaaacagagttggtactaaggccatctggagaactgtcctgtaatgtataattctcaaggtgagaggctaaa

SEQ ID NO: 148412 - DNA, 563 bp, Homo Sapiens
tttctgtatctaccttgactttatttccccgacgagggggaacgcgcgcgcgagctctgagagggaaggatggcagggagcagcccgggcggactgcaaaggcgcggcgggaacttagggcccgggaggatgcacctctccgcccacactgcagctggactgagacctggccgctagctgccggccgctggaccgggtctggccagtggagggcgctccggacggggcctggctggcctttgccccagcgcaccttggtgcacagtaactgagtgccaggcctggccagcgaagcaggtgtccactgggcagggcggccacccctcacctttccgcgccgcgcctgctcggaggcttagcacccccagggccagccccttagcatttgccgagctccgagtgcccaagaggctggggaggaagaactgaggcacgccgcggagggccaggaactaggctggggcgggtcgaggtcaccactggatttcgggccacagaccctgctaagcgactcccactgtgaatcagtcctcagacgaggatggatacccacctctcggttc

SEQ ID NO: 148413 - DNA, 337 bp, Homo Sapiens
ttttttgaaaataaacttccaatttattaatcacagcagagtcaacattcgtttttaaagtaacggtatacagatgttagatgttatttatttagtctacaaacaacagttggtgtacatgtgaatttgcagtccgcagtaactgcatagcaggtcctcttctcaaggctgggaaccctgaatgacatacagacactctaaagcctttctagcactgatctgccatgattgtagtcctaccactgccactatctaggctgtgtgactctgaacacgggaggatgtctctgttccacagtttcctaactgtatggggagtggaggtaccctagtgatg

SEQ ID NO: 148414 - DNA, 765 bp, Homo Sapiens
tttggttttgtttttaacctatttggtggccaaaacctcaccaggtaaagtttaatagcctctaccacttagtatagatacctaacacatttcagtgaagaaataacgtctgatgatggggagtgcccccaaaccccagtgaggctgttacatggtaaattgtgccaaataattgtacattgtacattgaagaattctgaattccaaaacccatctgcccaagggttttaaacatgcagttctgtgcgccacagtcccttggtccacgctgctgttgaatgaacgctcaggtgggtggcttccacattcctgccgctttgaacggtgcttctgtgaacagcgttgtctgtgtttggtgcatcctggtgagtttttctagaatataaatgtattaaaagtagaattgctgggttgtgaggagcacacatgttcagctttgtaaggagtaccagattgtttttgtagcacagtccgttctcctgataccagagtagaaaaagttgaagtgaacttattctttgctaagcattggcattctcagtctggtgggtgtcccacggcagcgttgtctttccgtacatgctcagtgtgggattctccggctcacagctcttccagcgctgccctctgcccttggaggagcatctaaacccctccctcagctgttatttttttcttgcatgtccagagagcagacatgaaccgcctcatcatgaactacctggtcacaggtaatggcttacagtgaggatgctgttgcatgaa

SEQ ID NO: 148415 - DNA, 524 bp, Homo Sapiens
tttttcccgcagttttattgaggtataattcaccagtaaaacctgtatacatttatgtgagagtgagggtctgagctgctggtcctccacttgatgtaggggaggctgatggcaactgttgtggtatggccaagcctggattcctgggaccagcacttgccaaggctgagggactggggtgaatgtaatccctgtgatcagctgccattaggaatttaaacctactctcagaagtgtacagcagaactaaagaagagaaacaaccaagagtcatctgaaattgtgattggctcattaataatccaaggtcaatgacagagatcattgctcaagcatgttttcctatggctcctatgaagacgattgctctgcaggcttaggctgagtatgttgtggaatggactgtgaaggaccggtgtggcttccttacaatagcgactttgtctcctacttcacggctcctaacatgtgccctgttgtcctggaaactggccaagatgattgaggctggccgcgtcccgcag

SEQ ID NO: 148416 - DNA, 379 bp, Homo Sapiens
tttgattttgtactttttattaacatctgaagcaagttttcgtcaagaaaggattaagaagatgagtcatctataagcagctgatggacactagggttcttctatttcagccagcgaagaggtgaggggatgtctgtgccgtgggaggtgagggggcatcagcctacctgcttctaagactctcaatgaccaggctatgctttggaacaactagacaagactctggctgtaagaccagggcccagcattttctttagagttctccatgtgattgcaataggcagtcaaggctgagacgcggaagcatggggggatgttggcctggtgcaagatggacacattgcctccaacttctggctgcttctgtaaagggtggtag

SEQ ID NO: 148417 - DNA, 650 bp, Homo Sapiens
  misc_feature (598)..(598): n is a, c, g, or t
tttagatcatatatgattttattcaaagtagtataggaataaaaatgccttctaagtaggtaggtttttgcaaacaagtttttcttccccaagttcctgagaaactgtcagaagattttctttcttgccacctcctagatgggcacacagagctggtgaggtaaagtggcttgttatggccttcctgtgggcacataggtgagctggaggtggagctgcaggtctgggcttccctccaaagtccagctccggaggagagccagctcaggagccctctgcagaagtccaaccctgtctttgcggctctctcctctgggctttggatgattgcagtgagctggcttgtaggtgaagcatgcaggggtaattcatccaggatattgtccaggggggtggcaggcaggtcggcccacagtggtcacatgtgtgccttgcttttcctggatgatcaaagctcgccatgtctgagccactgtcctggccagggacccagcacggtcaccgtggctgctgtgagggctgcagtttccttccacacctttgtcatccctggttgctgctgcccctggccaggaaaagtgagatatcagaaacattngatttttcacatgcctggaagagagaagattaattcctgcatcaagaagaag

SEQ ID NO: 148418 - DNA, 328 bp, Homo Sapiens
gctttccagttctgagattttattgttctaaggtgttattgttctcttctcctttgcagttctctttatccttgcagctcatatccattttaatcccttttctgccactttcagtgaggttgcaggagggtatttaatccaccaggttttcccgaagtctcatgatacagattgagtgaataaagaacaccaatgtacttctttaagaggtggtggttttcttctttgcagttttattgaaagtatcttgtttcagaaagaaatcttcttggcttcacttagttgcccgggctggagtgcagtgggcaagagtgagacactctgtctc

SEQ ID NO: 148419 - DNA, 708 bp, Homo Sapiens
  misc_feature (623)..(623): n is a, c, g, or t
  misc_feature (682)..(682): n is a, c, g, or t
ttttgcttaagatctaaaatttatttatcaatcaaaagaagcatttactctgagataccctagaaacattgtggtaaaatgaaattatatttaggttaaattatcatttaattaaactctaataataagaaaatgaaatgaccttggaaacatcttatgaatcatataaatagccaaagaaggaaggaaattatgaatgaaaggtaagctcaggatcattttccatccacatccgggtgcctgcttattcttcagttttcagtctggaagacttctctcccactctgtcagaatttggtgctcccatatgcctctagcattgcttttatccattgtcttaaactcacctcttgctatcttgtatccccagctgaggggacctcaatcctctagaggctaaaaaccctgtttgtctatttcacagtcgtatacattttaggactggctaaaaaccctgtttgtctatttcacagtcgtatacattttaggactggccctttgtagacatttagtaaatatttattcaattaaaggtctaggggttgggggaaaccagtagaagttgcatacgtgactaagggtaagtggtgtggattgggggacttttgagaggtggagtgttnctggggtgctggctgctgcctccgcacctcgtgccgcctcgtgccgaatttcttggccncgagggccaaattccctatagtgtag

SEQ ID NO: 148420 - DNA, 331 bp, Homo Sapiens
aaagagtcgcaaggttagatttcaggagcccttctatgggccatatcttttcctgtcgtccccaaatagctcttattgttcacacagcccaggagagacgttttggagtagcgtgtccgggccttttgggctgtttcacagccttaggaggctgaactcccagaggggtgacgaggacaaagctgatgagatccagaactctcgccatctggccactggcccgctgagcccaaaggcgccggtgcgggagggcagaccggaccgagggaccggttcatctgctcagggcgtgtgagactttcggtcgcggcggagagcgtcgccggtctcc

SEQ ID NO: 148421 - DNA, 561 bp, Homo Sapiens
  misc_feature (145)..(158): n is a, c, g, or t
tttgttgttgatattttaataactgtcttttgatatcattggtttgccttgtaatcttatgtatttagttttattaagtttaagacattattttgagaaggagcccatggatttccccagactggcaaaagggctcatggtaccnnnnnnnnnnnnnnttaacacctggctgagaggccaataggactggagaaaagaagtcagtcttaaagggaatctttgtgctcaataattttagtcatgactcaattcttacccttccatcttttccagtgacataaacatgtcccacacttatattaaaactattaacccctcgtagactttggcttagacaaagacttcacaaccaagagcccaaaagcaaatgtaacaaaaacaaagataagtggaacttaattaagcaaaaagccttccgcacagcaaaataaataatcagcagagttcacagacaacccacagagtgggagaaaatactcacaatctatatatctgacaaaggactagtatccagaatctacaaataattcaaacaaatcagcaagtaaaaagccaaacaat

SEQ ID NO: 148422 - DNA, 672 bp, Homo Sapiens
  misc_feature (486)..(486): n is a, c, g, or t
ttttgccttcaaaatgtgcacattttaatagtaagaataattaaattaaatagacattatgcagtggtgagtgccagcagagggttagtagagggtgatacagaaaaatgcacagaagacacttaactggtatatggaatcaggaagatccccttggaattttgggaaaatgaacaagagttcatcaagccaagagaatcaggtggcatgtgacaggagggagagttacaggaagagaaaatagcaggaactaaggcccacaggaactgacagatattagacctagcccgagtgcttttccttttaagcaatctgggtgtcccacctttgtccttacacgtcttacatctccaggttatgcctaggtgttggtgcctgttccttatgttgcttcttatagaatgtgaactacttcaatccacataccaggttttccttcagcaacaggaaaattttctcatcacgtattttaaaattagtttatanttcttctttcagacattttaaattgcaagtggttaaggttagaattcaagggcctgagctttgtagttgccagacctggctttcattccatcttcagcctctctacttaacagctgtatgggtcagggcaacttatgtttaactctgtgaagtccagtgtctccatctatgagccagagataataa

SEQ ID NO: 148423 - DNA, 327 bp, Homo Sapiens
caagacagcagattgaagtcattgttagcatacctctcccacttggaaagacaaaatagtaagaagagattcacattgtgaacttttttccaagaagcaacacaggaacttaacaggaaaactgaaagaaatcacacgtttgaaagaagcagtgggctgcagcctacaccgtgagccagtcaaaaaactaggagtcctgagagtatgacaggggaataaactgcctctgggatatacattcccatcagagaacctggcagtccaggccatggggaggccttaaccctgcccagcataggagctgatttagtgagcggtggggagtat

SEQ ID NO: 148424 - DNA, 519 bp, Homo Sapiens
tttaatttgtactattttttatttaaataatagtatgtatgtaacagaatagtaaagatgtaacctgtggatgctgttttacagcagcagaaactggaacacatgcagtctcatgattgtcctacttttttgccagatcattgcattgtctgcccaggcacccctcatcccatctttctccatcccttttcttaccttttcatgttccttgtcttttcatgacagcatttatcaatgtctgaaagtagaatgttgttgattgactctctcttcaactagaacataagcaatgagcggcccagcctttgtcccacacactgcagtgtgtcccacttctaagaaagtgtccaacacacagcaggaactcagtcagcatttcttgaatgaattaagtgaagtgatgcatacaggccacattctgagctgctggaggagccagtagttgattaccaaactctagtcctttatcttggtgtcctgatgtcctgactgatacacagtttgtaggcaaatagcagg

SEQ ID NO: 148425 - DNA, 328 bp, Homo Sapiens
  misc_feature (308)..(308): n is a, c, g, or t
tttttcactggtgagcaaaatttattgcaatcatgtagcttaaggtgcttcccagcaccagctttccctgtatgtccatctggatagatcatgttctgttgccccagattccatgtggcaccagtctacatgatggtgtctcactagtcattaactcttcctttttcttttctctgtcctcagaatttcaagttttttcctttgtaatctcttagatctctcctggcagattgggctctagaaaatgtatatttccttctccaccttggtggccgaatcctttggagcccacctctcacattcagctncccggttacttggttatttg

SEQ ID NO: 148426 - DNA, 570 bp, Homo Sapiens
  misc_feature (81)..(92): n is a, c, g, or t
ttttgaggaaatcagatgactttttattgttttctttcctataccaaataagagaaaaactataagtgagagagacatggnnnnnnnnnnnngacccagtgagatcatattgtgtgagggctgttggtagtggtagtgggaagctaactaaaatcttaagaggttcttcatgtttagaaacaaatggtttacatttttgtcatgtgaaaacaccttccatctgtatatttaaaactttacctctgtcttttaaagtagcccttagatttggtaacctcagaatgatgtgtggaaaggcactggcagaaggtgatgtgatagaaagtagaatccagaaaagctcaaaggagccttcagccagaagggacccaagaaggaagcccttagtgactgtgcagacattggagaaggttctctactaccccaggttacagttttagggacacacactaatcttaagggacaggagagagtcagctgaactctgagttaaaattatgaggtctattcttctaagtataagtgaggaagaaacaaactgatgtgggagagtggaatttgtcattttag

SEQ ID NO: 148427 - DNA, 669 bp, Homo Sapiens
catttcatttttttgcatttattttcttaaaactttagggggaagccttctcatatgcatgcagactgacagagaagccaaatcaaatgagagcaaagtcacatgagaaaacactcatgcaaacacgtgtggagtgtccagcagctgctcactgctctgcccaatgctttagggatacagaaaacatgggcactggccctaagaaacttcagatgccacattcttctaggttcctaaagggaaacgaaaatgatttagccacatatggtccttttacaacactagctaaattgggacaacagatcttacaccacattttctaaaaatgtcactgagtacattataccaagacaccttctcctgccttcttccccagccaagggtacgctttcaatattaccagagtctaccttctaccttggatcccatcatcatctccaaactcctccaaaatctctaagtcacatttttcttgaaattgtttatatggtacccctctctccttcaaataaaactagaccccatttgaaagaaaatttaatctcttcttaaccagcatagacttttattctaatcttgactacatgattagttcacacacacattttacgcagtgaatcagcaattatttttctagtggttctgagtgtcaagattaatttcactatc

SEQ ID NO: 148428 - DNA, 440 bp, Homo Sapiens
agtcctttcaatttaataaaacattggtattgaggtgtcgtaggaaaatggaaagtcactgctccgtgtctggctcagtatccacgtttggcttacatcataaatccagagccatggggagtgtcttttccctacttcatcggagcctagaatgcccacaggtggggtccggtgtgggcagcacaggggaagcatagagagggtgagacagccctggggaaaggcaggggcagggagcaagctccgagggcagggccaacatgtcaggtttactgctgaactccagggtctagaacagagtgagagggaggagggactccataattagctgtcgaataagtggaatcccaagaagaaaactgggtgggagtgtggagataaacactagcaacaacgacacaaagaaagcaaggattgcttcatagccgggacaagctcat

SEQ ID NO: 148429 - DNA, 586 bp, Homo Sapiens
gcacgttttgatgtgtttatttatttgggatgcgcggaggctctgaatggagaaagtcgtcgatgcctgcactggtcttggcctgttctttatgttccgcgcggtgacagcttccacgtctcccgggaacagaggcctgtaacgttattcagcacaccttctgttgagcagagcacctgacttcaaggaatgtacaacggcttgcccttcaaaccagtgtgtaaaagttttgtatgctttctccatcttcatccacgtttttcttatttggtaccttctaaaaaatgctgcagggagagcagaatgtaaccgaccagggcaccagactgggtgtgggctctgccagcctccctggcaagtgggctgggttttgcgctccctcgtgtcgttggtggccacagtttcaaatctgcttgctgttttctccttaggtgatttctctgtttactcgtgttcctcacaccttagaaggaatttgcttgtttttgttttcttctctttcatttacaagtaggagtactgatcttactctcctcttacagagcttgcatgatgatgccgcacactgaaatgctttctcagcatt

SEQ ID NO: 148430 - DNA, 398 bp, Homo Sapiens
tttgctgaacacaattgaagtttatttcttgctcttaaaatccaaaaaatgggtattcctcattggtgtgtgggtttctccccagtggtgatttagagaacccggctgcatctatcttgtggctctgccttctttaacatggcttccaagatggtcgcatccacagctgcaggctggattgacctgacttggaaaaagaacgctccatggaaggcatggcaaattctgctcataggccactataatgcgcgaggatctccggggccgttggcagcgcctggcacttctgagctcggcggacgagagcctgcaggtttcctccagtcagggacggcgaagggcggaaagcgcaggaggaggcagtgttaggccttaggccgggtgggccgggtcaggag

SEQ ID NO: 148431 - DNA, 501 bp, Homo Sapiens
gctgaacacaattgaagtttatttcttgctcttaaaatccaaaaaatgggtattcctcattggtgtgtgggtttctccccagtggtgatttaaagaacccggctgcatctatcttgtggctctgccttctttaacatggcttccaagatggtcgcatccacctgcattgcattggcagaaggtgaaaggcataaatatcttgtgtgagaggttttcatgggcctggaatagcaacatcatttccattcatattctttgactagacctcagtcaaatggttgtgcctaactgcaatgaagactggaaaatgtagtctatttgtgtgtcttggaagaaaaggagatagacttggtgagccactaaccaatcttcccagagtgagcatctatcatatggttcttctccatctgtgataatgaatacctaagttgccctcacttccccaccactcagataaagccatgaggaaggtctttgtacctaaaaacctttgtgagttct

SEQ ID NO: 148432 - DNA, 764 bp, Homo Sapiens
ttttgaagttgaatcccatttatttaaattaaaacccatatgcttaaccacaatgctttaaaggcttcccgtgtatatgctgtatggtcagtgaagggacaaaaggaaagacaatcagaatattcctcttcccaaggacaaacctgtggtattcattatggtaataataatatttgtttaattgaggtacacatgtacggtatattaccaatagcaaagtaccttcccaaatgttatgtcatttagttatcacaagggtcctactgggggtttggtagaacacatagcaatgtcattaggaacctaacttttgggtcaaacaggtttaggcttaaatcgtagcctggaaatttattagccccacaaccatggggaaattaagctctcagttccctcatctgtgacaggtgataagatacgcctacctctcagggtagatgacaggattatttgtcagtgagcacatgcaataataaatgtttgtggtcttgttttatgtattatgaatcccaattctcaggagtaagaagagttggcaccggccagaaggtaagaggttgggcaaagtttcctttctccagtaattttccatgatcccttaggccctccaaaggtgtagaatgtggggttttcaaaactcaagttctcccgcccccaccgggttcagatgaaggcccatcttctaaacccccgcctcaaggtgatacaaagctttcggataaactgcctccagacttgcttgaattgagcagcagaaacccagc

SEQ ID NO: 148433 - DNA, 413 bp, Homo Sapiens
  misc_feature (314)..(314): n is a, c, g, or t
  misc_feature (326)..(326): n is a, c, g, or t
  misc_feature (393)..(393): n is a, c, g, or t
tttaatcattgctaacagtggagtggaggtagagggatagatatcctgcagtgctctagttctggaccatgaaaaattgaccaacttcctgcacaactttcaaatgtactgctagacatacatgtaagttaaaacctatttaaaataatcaaactcagaacctaaagcagttttatgtatatttttaatagttttgataaacattaaacatcagtttttatttagtatctactctatttcttcactccattttcttatacttcctgtatagaatagcttccaatcttctcttcaacccaaatttatttgcatanaatgtaaacatncggtctactttagacatgatgttgatttttatgggtacaaatgcatctcatctatggatcttctttnctggataatataaggacttt

SEQ ID NO: 148434 - DNA, 419 bp, Homo Sapiens
  misc_feature (403)..(403): n is a, c, g, or t
ttttttctttctatttattcatcgaagaataatcatttggcgaatagtttttcccttataataaaactcgataaattcatttttatcttattaaggacaaaaaaatgatagaccttatttgaaaatggaagaccagacctgtaacagatcatcggtgaggagatgacatgggaaggaggccatcaggcagtgctgcctttgcccataactcagatgcgatgcattcaggctgcaggtaccacttcatgctagggctctgcatttacagttagaggagctttctgatgcacttgttaaccaggatttatttagttcctctcttctcagcatcagaaacagggcctgtgtctggtcatggtctgtctcctccaaagccttcacagcagacacggagctttgtttnctgtgtggtatattca

SEQ ID NO: 148435 - DNA, 382 bp, Homo Sapiens
gcccaaaccacattctgtttattcctgggtgtgcaatgtgctgtcttcttaatcacacttacaggtgtatctaaatatatacaaaaacaccgtagaaaaatgcggctggtctcctgccaacagatggtaggtgaactgaggcttactccagctatcctggctacaaggtgctgctcagccatccctgggatcttctcaagctctcctatcctgctgtgatgctgtgtggtttctcagcaaaaaatggaggagcagctgttaccaaggtgtgcaccagcgagccgttttcggctggcatctgtgtgtagctgctgccactaccgagcgttgagtcaccgtgctgctctgtcagcaggctgagctgagatgtgcagagaggaag

SEQ ID NO: 148436 - DNA, 291 bp, Homo Sapiens
gaaagatccaggagaattgatctgggggtgggctgtccaggattcagaagattggggatccaagtgcctggatttgggggagaggcaggaatcaggggtagtggagggccccagaacctggaaaatagaaaatgtccgcgggcgctgtgtcaagagccggttgctctagaccagaccctgatgccagtgaggcgggtggcactggtttgatgagggtggagcctccaaccagccttgaggtcctgccttcctggctgagtgacccctggcacacccctcctccctactgag

SEQ ID NO: 148437 - DNA, 297 bp, Homo Sapiens
tttaatgaaaaatgccttttatttaggttaccattcaaatttatatctagttctgtcttccgttcacatttttctgtaaaacttctcatgaaactttcttagccggaatctcacagcagttttagcaacttttcacatcctgtagctcaggtgaattctccaaatgtgtctaggataccttagagcttgatctcataaggactgctgtcctctctgctcactgccttgtcctcacaggccaatttcgtcacacgtgtgttacaggtgactccaataggaaatccagcttctctttgg

SEQ ID NO: 148438 - DNA, 718 bp, Homo Sapiens
tttgaatctttcatacttttctttatttatataaaggggaaagaacggggaaggaaataaaagtgccgaccaaggtatatataatttgaaggtagtgggtgaaatactttacatttgttaattcataaaaatgagcaaaggaaaaactacaagcaacctaaatattcagcagtgatataatgaatggaatattatacagtcatttaaagtaattataaagactatgtagcaatatagaaaaatgctcattatatcatattaggtagagaaagcaggttactgggtgtaggtatgcagatgctgattgcagttgtgtaaggtccatatgcatgagcacagccacacactaaagtcaccacttgctctagaatcacgggcgtgtggtgatcctttgctctcttatctgtcaaactgtttgtgtgttgtttcattgtttgtcacattatttttataggcatgcttttcttgaggtgccctctttgtcagtatttccctctctcccatatggcctacccatcaattttaaaagggaaaaataaagatattttcatgcttgaaagtcttggcaggtagcaaacttttgaggaggcatcagttgcattcacttcattgctgttttcctctcactcactgtgcttcagccacactgtcctcccgactgccccatgaaattgccaggtacattgcacccaaacacatttgcgtagactgatcttag

SEQ ID NO: 148439 - DNA, 857 bp, Homo Sapiens
  misc_feature (105)..(115): n is a, c, g, or t
ttttttagagcacagacttcaaactttattgttatttaatagtttgccatttctatatttacagtaacagtgaacatttaagtcttttaagtcttacatttaacnnnnnnnnnnnaggtcttatagtcatggttatagtccacgtgggaaaatggcatatgctttatttctattaagtgttgtcttatttatagggattgtaggtttttcttcaaaactgtctcctatttattgaggcttaggggtaattattagtggtgctgtgggttgtggtattgtgttgaattttggtggggctttcatggggttaatagtcttttttatttacttgggtggtataatggttatttttggttatactccagtgatagctattgaggagtatcctgaaacatgagggccaagtactgatatttgaggggccttattattaggattattaatagagttgatactggtttggtgaatagttgaatatgatggggtggtgatcacggttgattttaatagcatagggagttgatttaatttttgagggggaggggttgattcatgaggattttgtaggtgcagctgccttgtataattatgggtgttggttggtggttgctggttgatcattgttagtatttttgtcgcaattgaaattactcagggtaatagattagataattaatagtagagtttaggcctttttggtcagatacagtaatggaggctgaagtttgggttcgtgaaatggtttttggtatagacttttctagtcaaactgggtctagtagaagtgaagctagattttggcttatgcaataggcttaagtcggggggctgaatggtgaattgtagctgaataaaaa

SEQ ID NO: 148440 - DNA, 538 bp, Homo Sapiens
tttctggttatctagttctttttttattcatgtgggtaaataaggaatgaaaatatgagtttttactgttcttgctttgttttccaataaaaggtgctgttccaatggaaaatatctctgtagaccctctcaatttcagtaccatctcttcttttcacaggggatatgtaatcttgttttctccaaattaggatgttgagatgaaatgttaatttgtatgtcaatgttgtcctgagaatgaaaaggtatggtatcaatggaaccatccagaggactagcttttgagcatctgacgatcaatggcatctctttacactctgacagatgaaatcacatataacaggttgttttctgtaaggctagagctggagtgccctaattaataaaatgttctacttaatacctggattatcaataaggatacatttaattacaaaagtacattgaagatagcatttctttcttgacaattcagaagacattccatgtcctaatttagaaaatattcccctgtggttatcactgcatagctagcatt

SEQ ID NO: 148441 - DNA, 625 bp, Homo Sapiens
gcctgtgttccagtggaactttatttggaaaacagtcagtgggttagatttggcccacaggccatagtttgttacccctggcctgaaggcctttgaatcacaagcctggtgtaagggtgggagacggagtggaaaggtagtgatggagcacgaggtggtaattgctgcggcaaactgccaagtaggaacttacctctctgtggtggatgttctcaactcccagggtgcccttcccaagtcttttgcttttggagcagaagcaatgtcaaatctctccattctaccaaaatgttgagcttttcagaatcactttcttacaagcttaggaagctcttcagagtgcaattcaccatattcagtgctggatgctgaaggcaatgtgctcgtgatcgtgggaccttcctgttatgatgctggggagtctgcacaggtcgtgatgctcctggaagccattgctataatcagatggctagcagtaacttagctatccacaaaagttttctctcttcttgagctgggacattggacacttactctctcttcttgaccatctcttggttctctggccttcacactatgggacttacacaagcagagcaacccctacccctgatacctcaggtct

SEQ ID NO: 148442 - DNA, 402 bp, Homo Sapiens
ttttggcatggagcggagagtttattcaccagttctctgaaatgtacacgcaggatcaggaacaatatatgcaagtggtataaagacttcagtcttttcaccacttttcactgtggaccaactctactatgggtgaaatggcaggttgaacaggacatcccccaggacttcggatgaggttaacacaagtgttaacacagaggaggataattcatagcatgttgtaaagctggaaatccctatgccttcttgggtctttttctcctctgactactgccgttgaacttctctccactgtcgcttttctgagctgcatcttcgttcatcattttgaacagtttggaaagaaaatatctctgccatcaaaccgtgccgcctgtacagaccactagcgggtatgca

SEQ ID NO: 148443 - DNA, 468 bp, Homo Sapiens
gatccatagtttgttgaatccatggatgcagaacccatggataaggagggccgactgtattttaaatgtctctagtgattccgatgctccttccttggcccccactcctccccctgttgagaaacaagatttaaaactctgccttatgctgggatatcatgaactcagtagaatgttacacttcatcctatttcttcatcaggttctgcattagccaggcattttattttcagctactctagagcgtctttttttctgtcaggtgtttttttccagtataggaaagtagcccatttcctttaaagaccacccagcaggcatgatcccctgaggtgtttttttgttgagtgcttttgcatacttaaggagtaactgacctggcccggtggctcacgcccggcctgaactcaataaacttttatccaagcacctggataaaggatatcctgaattttttcttttctttct

SEQ ID NO: 148444 - DNA, 875 bp, Homo Sapiens
  misc_feature (148)..(219): n is a, c, g, or t
tttgtgttccagtaaaactttatttacaaaagaatgcaggtggcaggatttggtccaaggggataccaacccgtggtctaggccagtataatgtagccaggctgcaaactgttgtcgtaactgtggtaactcaggattcccaggaagnnnnnnnnnnnnnnnnnnnnnnnnnnnnnnnnnnnnnnnnnnnnnnnnnnnnnnnnnnnnnnnnnnnnnnnngattctatatttgctaagtgaaagagatgagcatggggatcactacagttttatcttggtttaacaatttatgatttcaagaaaatatgggtggtaggaaagcacagtttccctggcatcattattcccagatcttttccttactgactgctcttctatttgccccagctccatgtattttcctgggattctgacctgaaatggccactgtcactgtcattactcctggcccttcccaggacactcacaccctctgtggaatttgcctttagtatggttaggacacttctgaggaagtttggaaacgggaatttctcatctgaggaaattcagaaatttgtaaagaacagcctctctgggtggaggaaccaaagggaaaagaatcagctaaagtccaatgggagaagttagagttaggaaatggtgtatttcttgtcctaacttacctaaaagttgggcagttttcaaaataaccaaagcccttcatcctcttcttgtggaatcgacctaggcccaattattttcctaacttcagtgttatttaatcatatcttagacccattactcaaactttaacctgaggtaggtttagggtgcatcactattcatttggcagactcaatccacaggccgacaatccggactctagccgcagt

SEQ ID NO: 148445 - DNA, 615 bp, Homo Sapiens
  misc_feature (21)..(21): n is a, c, g, or t
ctctcagctacctcacagggnatgttttgacattatatgaattatgttaattagtgccaggacagtgccaggtgcagacagtctcaataaatatgagtttcttctctacttcttatttctatttcctttttttcttggtgcctatagacagattttatatcagagcaactgtattgaccagaatgacaattcatttgctttactcctcttttctcaagcttgctattttaccatattgttcttctcttgaaaaaacatttttttaaagtcgtctaaatgattaggggcagaaataagtatctgaagaaggaatgtggtagcccctcctgggatgtggaatcctgaacaacccccaacatgagagatccttcatgagagattgggtcaacatggtattctttcaggggaaatctgtgcccatataaatgaatcgtagcacagacctgagttcagatccttgccttggcatttacaacttgggtaaacttgagtagagggagaatgaagagttttggaactcctttctctcagctgtacaatggagactaataacgcttacccaatgatattcctatgaagactcaataaaataataaaaatgtgcttgatatcaaa

SEQ ID NO: 148446 - DNA, 520 bp, Homo Sapiens
ttttttttattattctttcaacctttatgaatgtatcaacatttgcaaaataaaaaagttgtggaggaggaagaaaaacaaaaaccaggatgcactgaggtctgaggtgaaggtcctaggagcatcagttctctgttgggatcaaggttgctgggacagagcttgatccctgtcaactgctaaaacaatccaggacaatccaatagtagagctgaattttgattaccttggtcctgagcttcacagccctttggcagaggaaatcctgtgacactgaggtgtaaccacaagactggcccaaactgaccctattctgttggtaacaggaggtatagcagagccaaaactgaaagtcatgtaacccggacatgcacaaaggaggaaaatcataactcggaaccaacgtttcctccctgtggagccaagaagacagggacatgaccggagcttgaggggcggaacgctttcagaagggaagggtccatcatcctggaagatctggtgctgaaacctgccattc

SEQ ID NO: 148447 - DNA, 637 bp, Homo Sapiens
ttttacgtgtcttagtagtctaatttatttaaccagttcctttttgaaggaaattcaggttgtttcctacctcgtgctattacaagtagtcctagaatgaacaattttccttacacatgggatcaattcaggggtgacttcgaagaacacattattacattacattatttaagtgcaaatactggtgatgagtccgttgcagatctgaactagcctctcctccaagatgattggcatccttcaggtgatttatttacacagtgaccaccccatttcataaaggaatgaagagcagttggactcttccagctggagaccgctggaggagttgggtcaggggatgctgagagctaacgttgactaccacctgtgtgccaggaagtactaaatcaacgcttggctaagttgttggacttgtcgaatcctgagggcaacatcataaaaggcagggtcttcctattctcatcccataaacggatgaggagatggtggtgcagcgagcccagggctcatgctgaatggcagaaccagacctgcagcagcccagcagagtgattctgtgtggatggtcgccctgagacaaggccacctctggacacatcccttcctctggtagcccacatcagtggatactaaa

SEQ ID NO: 148448 - DNA, 749 bp, Homo Sapiens
gattgaaatgggaattttacgttatagtacattttactacagtaaaaaatgttttaaaaaagaaatcattactctcttgctaagatcttgtttcatcttaacacacacgagatgccttgtcttcatttcgtggacaggcaaggccgaattccgtttcacagatagaggactgagatctggaggcagagggcaggaattaaaaacaagacaaacaagagccttatacaggcagtgtctttctgagtctgatccctgttgtcttgagagctgcggtgagggaaagtcgtcttcagaggccctcagggtcaaagcagtttgttgcccttgagatagacaaagctcctaaccctttccagctttttgccgacagctcgattctgatgggcactgaccttttccgaccctgttttcaggagccgactcctggcaggttggttgtaggggccctcttgagtgcttcacacacagcagtcctgttggggtgaaggtcaccgtcactgtgataattgttgtcgtcgttgaaaccacccagcccgaaagcagcatgggctgtgcccagagccgccgtgccagaagcccacgcttagaaatagagggccgaagaccaaagaggactgcgggttcttgggccaaacgtgaccctctcaaatcccccaactcggggatttcgttagctggggactggtgtgcccgggttccaagacccctgcgtagactctgtctataggtggaagaaggcctttgccccg

SEQ ID NO: 148449 - DNA, 791 bp, Homo Sapiens
  misc_feature (375)..(375): n is a, c, g, or t
  misc_feature (496)..(496): n is a, c, g, or t
  misc_feature (557)..(557): n is a, c, g, or t
  misc_feature (613)..(613): n is a, c, g, or t
  misc_feature (719)..(719): n is a, c, g, or t
tttgattttttaatggaatttttatttagaccagtctaggttttgatacaggaaaatttattttttcccttcattaaaggaggagtaaggctgtgactccagaatggctatctcaccttaagccacttgcccagtgctgacaaaatcccaaaaccgtctctgtgtgggcttcctgatacctgtcttctaattagcattctcagcatctgtggatgaagaaggggttcatcttccacactttcctaacaagcactggagactcttaagatttcagtggagtgacagaatcctttaggatgaaatgagaagcttattcccaattaccgatccttgatagaataggtcctgcctcctcttgtggatcagttacttatnccattcatccatggacatggaatgcccacatggaactagccaagtgaatcagtgatgtctccatcctcactaatgcctgctgacagtagaatgttcttctcatggtgagaatggactccantgaatgatcagctttgtgcctccttcgtagaaagggaaaaggaggtggagaatccttcacncaaagaccctctttgacttaaaatacagggtaagcagtattagaaatccatgtgcncaaagcccacctattaagattctgaacaaacaggagcctctataccacaaggctctgttgttaatatgtggttagttatgtcaaggacgctaaacaaagctgcttntcatgtggtccgtttgagctctcgcagttgataaccacagcgactcctgggtcacaaccctaaacgggcagc

SEQ ID NO: 148450 - DNA, 700 bp, Homo Sapiens
tttggtttctcctggactctgccccatgtacattttattttattctgatttgaactcatatccttttgctgtaatatatcagaacagtacatctaattcagaaaagtaagcttttctgagtcctgtgaatcctagtgaatcatcaagctttagagtagtctcagggaacctggcgcagatgcagatattagacttgagacctagagaagttaagggctttctagaacatgtagctcaagcctgggcctggagtgtgacgaggtcatggacattaagctggaatgaaggtctgtaccaactcagtccttttctggtgaggcagcatggaaagacattggccttttctccatctgtgatgacagtgatccctggacgtgacttcttcaagtgtccttggtgagtttaactcttcagagtccacatgaatggaaatgaatataaaatcagaatccaacacataaaaagaaagttcagcaaatgcaggactccagtctccactgcttcacagtagggtttgtccttgtgttttcagtagattatagttcatcatttttgaaaggcactgttgttaacgatgtagcaccttcccgtcactggtatctcagtagccaccagtcagagcagctcctagcagactccagaatcatgttaatatcttccatccgatcacctctctgaagactgtttgtagataagtgtg

SEQ ID NO: 148451 - DNA, 604 bp, Homo Sapiens
tttttcatttaattctcacaatggacatgtgagacatttattattagtgccatttaacagaagagaaaactgagatacaaaaaagccaagtaactttccaagttgcacaactaatgtggcaggaccaaggtttgaacccagggagcagacatccagaaccatgaacttcatagcctcccctgtgttagaggtgctgcagtttcttgacttctgatattctgacctggcctctcctcagctctgagagccttcatctttggttgtttctgtgccccttccaggttgcagatccttgctgcagaaggccaaggatggttcaaccacagtgttctatttacttcctctgggcccgcttgtgagtggtttagcttgttgctggtggaatctccattacatacccacaaaaagtgctcccaagtcccactgctctctctcccggccaccagcccctgccacccatctatgagaagacatcacttcttgctacaggccattcagcactttcaaggttttatccatatttttgcacatacactcacactcacaccctttattcatatctctaagaaaaacctccagctctctatatttttggggagagacc

SEQ ID NO: 148452 - DNA, 376 bp, Homo Sapiens
acattagaaaattttttatttaaatggtcaacattttgtagactaattatagtttgctcccatcccagaatacatcttgggagtagataacttatcaggcctgaccccacaaacaactgcaggggaattctgacggagagttaggtggtgaaccctgtgatcagagaatgcaaaatggacaccaggacactttccagccctgccgtgagtagaggtgctgagcaataccacctgcaagggtggggacatgatgaaatcacagagactatatgggagttagcctgggcaggcactataaggccagtgcacagcccatacaacagccctgaatggcccatgcagaagcctgatgggacacaaagaataacagtagatt

SEQ ID NO: 148453 - DNA, 469 bp, Homo Sapiens
ttttaacttttaaggagctttttatttattgttccaagaatgccaggttctttggtttcctgctttcttaaattgccatgtgtctctaaataggtttttttcaaaatcggaattagcacaaagatagatagatttgtcttctttgaattcaccagcctccctacttggtaggattgcaaaactatcttatgaacccagcagagaaaatatcctctcttcttgatgatcctgcttgttggaactctgacctctccatttcttctgtggtttcactgggtaatctgaagacaagtcttcacgtggtggttcctggaagcaatgacatctaaagttgatctaaagtcgagaggattgaagcgtgccagcctgagtcgttttgaactcagctctagtgagaagtctgagatattctctggtgtcaaactcaggagatgtgaattgtggtgctgcttcatcccaaagagtcctg

SEQ ID NO: 148454 - DNA, 707 bp, Homo Sapiens
tttgaagaggtggcaagtttattagtaagatgtaaacatcatctagggagatcatttcctgaggtcaattttgactgggatgtgtatggggcttggggctggagaggatgagtcagtgaagttggggcagagatactggaagcaaagaatgggacttgagcatgttaaaggatatgcctatgactggcagtcctgagtaagggaggatgagagagagccagggccacaagctatttcctccctcttgtgttctcagtggagcacatctgctgtgacagcccaagggctccagaatggcctccctactctgcaatcaagctctgcatgtgaattcccacgcgagcctgttgctcatccacattaaacaaacatcccttttgcacttgcctgaaatatcaacaaacatcaggactccgtcaaaataatccataaagggtcgctctggggagaaatgtccatagacaatgaggtctggtaaatgagctgctattctgactatgggccagtcctggaattcttcttttggagtgttcatgttcaagacaaatgttcaggattttatggtgacaggaagcagtctccaaataggtcttctccacttcatccagggctgaggaaaagccagacctcagttagggactaggtcttttaagactgcagaagacaggagaggaggccgggtgacattattctgaagacagctgaag

SEQ ID NO: 148455 - DNA, 542 bp, Homo Sapiens
tttcttttaacataagacctaaggttttaatcctgggtagggcaacaaaggcaggaaagaagagaaagaaagagaaggaggtggagttgtattcaaactacatatgtgatgctgagcttaatgtattctaactcttctctgattgtcagatgctctgcaggagtcaccatattgcaggcactttcctgcaatagataacaagttagaattcaagtcttttgttgatagctgtctttatggtgaacattaagtcaaatatatcaccctctgggtaactgaccgtcttcctctgcatcccttctgtggcagcagttagagcatacgcactaaaattaagtagatgtggatctaaatcccagctctactgtttagtatttgcacatccttgagctatttcctgaagctctgagccagtaaggaggtgatctccaactaggtgtttagtctcctcattggtaagataacaggattgccattaagcctgagtcctctctttaacttattgaagatttttaaggctgggagcaatataatgatttgcc

SEQ ID NO: 148456 - DNA, 707 bp, Homo Sapiens
  misc_feature (71)..(83): n is a, c, g, or t
ttttatatggctttttctttattttaaatgaatttggcattagagggtataatgtgacacaatattttttnnnnnnnnnnnnnctcgtacttggagctggaagatatggatgcatatcctagctctttaggagccatatgacattaacaaatcccttaatatcagtggtgtggctgtcagatggatgtgccggccatctgacttcttatctaacatcacattcccttcctaccaacatcacagaattattgcaaaatttcagaagaggtagatgaacaagggctacctaaatataaggaataaatttactttactttgaatgtttctgtcttgtatttccaactaaataaagatatcctcaagagctatagtctttgaacttctatgtcccatgctgcacctaacaatatgcttcattatacatagcgggcatttaattgagcctgcttacatcattcctctctggtgaggagagtttctctagattcagaaagaaacttccagaagatcaggagaaaggagcagagtgaatttcaaagggttggaaatgaagggggccaagtaaggattagcttatcaaggacctattttggacacagtttagttgggaataatttaaagaattattctaagaatacttcaaattgccaagcatatcatacttttccagagggcaatcacatacattcatcagtccctcgtgcccc

SEQ ID NO: 148457 - DNA, 933 bp, Homo Sapiens
ggaaactgtttattaaaactgcatgaaaagaccagtgactctaaccaaagttccaagtaaatttgctatgtgtatatgctccagggcggacactgaagacggactggattcatgagaaaatggcaaatgtataaatgtggctcaagagccactaacttataaggttattttaaaaattgttactgctgcttttgaaggggtgatttaactttattttgaacgctaatagtgtatcaggtgctgttcagaatattccacagttcctgctggactactaacctaatcatttcaaagcagtggttctcaaatttttcttcatcatgggatactttattacaggtttatttttagtggatcactgcccccaagagccctctaccaccttaattttccattcctctattcctttgccctcgcaccccacccgcttcattagtgcctgtgccttcttgtaagatctcttggcccccgttcctcactcctcttgtgacctgtagccccaggaccttttggttgtcagctgctggttacagcaagtggttgggaggccctagtattagctctgcatgtggtgatcttgccatgggactggaagcctgagggaggatggctggagtggggtgggctgtggtgaaggggatgggatggagattaatctgtggaccaccatttaggccctagtggcctctggtgatccacaggctcaatttgagaaccactaatttcatgacaaaacagatatgtaagacctaaaatcaagggagagaatggacgcctcgtgctacgaagatgtaggtgcatctggtttcagattctgcagtgagacctgtgaactccacctacggctgcctcatcattgggggagtcttaggtggctaagaagggcattctgaagaaacgcgttgtggtgaagggacaaagcttggttggatg

SEQ ID NO: 148458 - DNA, 601 bp, Homo Sapiens
ttttttaaaagaaaaaagcatataaatttattgatgtgcatgagggaagatcacagagtgattaccccactatgcaatggggtacaggttatacacccttcttaggggaaaagggagatgaggaagtctggatgattttaggggcatagtaaatgatttttaggggaagtcaatgggcttgaagaacatacaaaggcctgggacaaaatctgctgggcccacagaacctacagtggtttgtgacaagtctatccaggagtgtttactgacttcagtgtttcctcctgtcatgtgagttcagttattgaaaactcagggaagagaccagcagtaattgttttctttttggcaggtccagtctttaggcagataaggaaacttcaaagaacaacttcatcctgggagtatatctcctcttggctgcattttccttaaagttgttgtgagaatgaatagatagcaatcaatggcatccagcaactccaaggccctatttctgtatgggctcaagcagcaataatcaatccattctctcccattttatcattgccattttcctatgacgctgtaggtaaaccattaagcttggtatccaatttca

SEQ ID NO: 148459 - DNA, 729 bp, Homo Sapiens
  misc_feature (389)..(490): n is a, c, g, or t
ttttttcttggtatatgatactttattcaaaaatttttttatgactcttaagaagcccagcaaattgctttctccaactttaattatcagataattgtataccatacaatttcatatagaatatagtgtcaccactaagatctctttaattccttattctgaatgtgcaaaccacaatctgaaacaacacacattcttctctgctttccccaatgacaatcatacagcatgtcaattatacatttattatctttttctttggatgtcatcctgtcctgtgtctaggtttttggacattaattatcacttttttcttatggtcccctcttgtctctactaactctcttccttcaacatacacattgatcaaataataattctttcttggnnnnnnnnnnnnnnnnnnnnnnnnnnnnnnnnnnnnnnnnnnnnnnnnnnnnnnnnnnnnnnnnnnnnnnnnnnnnnnnnnnnnnnnnnnnnnnnnnnnnnnacgtgaagatttctcacatgaagttagattttagtggaatcctgagtctccctacagctagcactctatgtattaattgtctactgctgagtgacaagttgctacaatcaagggcttaaaataacacatagtttctgcaggtctgaaaactaggtaggcttgactggtgtcctacaaagacaaaatcgaggtattgatgggactgggctattatctggagattttgttgagtaatctgc

SEQ ID NO: 148460 - DNA, 658 bp, Homo Sapiens
gtttaaaaaccctaaatttttccttattttattatcaagaaatgtaattattaaatgccttacatttataagtgagaaatcatccatttagcctggacatggtaaatctgagggcagggagagataataactgtctccaaatgtctgaagacccagaagcccagggagacttgctctgtggcctcaggtggaggcaggtttcagctgagtgaggggaacttctgccaggttgtccagagagttcccccttggtggctatgatctcgaacaggctggataagcacctggggtccctgcatgtggagaggagctcatattcctgcagtcccacctcatacttctggagtggacaacatatcctgagtttcggagaggcagtacaagaggcagtgagaacacaggatcagagtcaaagaggtcttcattggaatctctgttctgccactaacttgttctgtgccttggtttttttatcttccaaggcttttcaggtgagcaactgctttatctccgggaaggacacgattaagcagcaggtctacagcacacgctcccctttaagaaggcagagaatccccgtgcccgcctttcagttgtctcatcaggcaggagatgtttaattctataccagatgcaaggtttaaatcaataactcatg

SEQ ID NO: 148461 - DNA, 519 bp, Homo Sapiens
  misc_feature (188)..(209): n is a, c, g, or t
  misc_feature (302)..(302): n is a, c, g, or t
atgaaaacagcagaaatttatttcttaaatttgtagaggctgggaagtccaagatcaaggcaccaacagatatggtgtcttgtgagggctcgctgtctgctagatggtgccttcaaactgcatcttcacatggtgaaagggatgaacaagctccctcatgcctattttataagggcactaatctcatnnnnnnnnnnnnnnnnnnnnnngtttatcacccccccaaaggcccaacttttttaatactgtcacattagggattaggttttggcatatgaactttgagggacacaaacattcangccatagcccataggaattacacttaacatcctaaagttgtaagactataatttgattttatagtagcttagattcaataacatacaaaatatctgcttttttacagctccatcaccactccttttagttgttgatgtgaacaaattacatctttatatactgtgtgccccaaaacataaattaataagtcttttaaatacactagtctcttaaatt

SEQ ID NO: 148462 - DNA, 557 bp, Homo Sapiens
tttctgtaagatttattttgtggacattcattctccagggaggcttttggactcaaactcctgagatttgagaaactcttagctgcatcctggtgtcccagggaagaccagctccctgtcagccacggtgccagttcctcaggctcttctgtcagggtctgggctttggtttgctctcccggaggccagtgctgggggttagggtgtggaagtgcctggccctttgcccatctgtctgcttacctattctgcaggtctggagctgctgttagctcagggtgcttttgtgtgaattagaaaaaggggcctcatcaaccaggtgagtagggagatgcagccagcgccaggacctgtggctctgtgagcgagtagaggcagggtttagctcccacttgccttttgtggtcacttgtctagtgaaatgcacattctgggcagtggtacatgtgctcctgtctgggtgccatccccgatacctctttggggaccgctttctattggtggttcttccttcttcaaactctccctcccatgatctggaatttcatatcacagcg

SEQ ID NO: 148463 - DNA, 497 bp, Homo Sapiens
caacaacagcctttgttatttaattcatgacactaaccacgcgcaagctcaaacaaacacacatgctatcctaaccatcactctaccctttatattcacatttcatttatggcttgactttttgtcatatcctgaaatgaagctttgcatttacccgatgagttgcgtctcctggtgctcctcagttcttgctatttcttttgtcttataaaagatcaggagcagacttattgtgcagatcgtccaccttttcctaatggagcgcattttgggtgcccgagaaagtcctggttgccccagctcccgcaccttcttttgatataaaggctccgttttggggagatagtcgcgggggtgaaatctgtaaaatgcgaggagagcttggagccgggatcccgggatcagatcactggggtcttctgtggccgagctccctctggtcctcgaacgctgcccagcgacctctcgccctgtttgcgccagctctgccagggtcg

SEQ ID NO: 148464 - DNA, 940 bp, Homo Sapiens
  misc_feature (881)..(881): n is a, c, g, or t
tttgtttgaggttttagtaatactttaaaattttctaacagttttccacccccaagtaaaatatctttgaaaaacttacaatctcaaaaagcagaagaaagctcaccttattacaaaattgtgactgtcaatctcctttccacattcactgtctaacagaatgccagaatttccaacaactgcacaggtcttaaacctgcgattcttcattggtgaaacttcaggtaggaggctatgtagatcatgagaaatgtttagtgtccggcgcctgtcaagcacatagtgtatgacatcaccaggcttaaaactgctcttgaccactgacacatctcgttctgcatctaagaaacgaagtatgttcttccttatctctaggaccaaagaggaattgattttccaaccttctacattgtgctggaagattgaagagccagcctttcgaatgattttatcagagctattgacaagtgaccgactcaaagacaattcaccatctccgatgagttgcgtctcctggtgctcctcagttcttgctatttcttttgtcttataaaagatcaggagcagacttattgtgcagatcgtccacctcttcctaatggagcgcatcttgggtgcccgagaaagtcctggttgccccagctcccgcaccttctcttgatataaaggctccgttttggggagatagtcgcgggggtgaaatctgtaaaatgcgaggagagcttggagccgggatcccgggatcagatcactggggtcttctgtggccgagctccctctggtcctcgaacgctgcccagcgacctctcgccctgtttgcgccagctctgccagggtcgctccgcgccgcctccctggggctcaggtttctttccagatgnagacaccttgtgcattggaggtggcggcagcttctgcagcatcccgggaattccggacc

SEQ ID NO: 148465 - DNA, 482 bp, Homo Sapiens
ttttatgttatagtattttattgttcatactctgtcatctcctcctttcacagaccagtagatatacttggttataaagtctataatccctgaatttgtttgcttttcatgaccatctgcactggttttattgtcatctaatgtaggtgttaagccattgtcacttttttaaaaaaatagttttgccagagtcagtggatcacgtctatactcctaacactttgggaagcgaggtgggaggattgcatgaacccaggagttcgtcttcatcgaacgaaacaaaacaaaacaaaaattagccggtatggtgttaaacaccttgtagtcccagctactcgggaagctgaggtgcgaggatctcatgagcccaggaattccaggatgcggtgacctgtgatcatgccactgctctccagtgagtgagctcttgtcttatccgttagcagtcacttgtgttcctcttcctgccacttccagccctt

SEQ ID NO: 148466 - DNA, 700 bp, Homo Sapiens
tttggaatctcaggacaaactttatttggcccatagaaggttttacagaattctgagtttggatgcctttagacagccaatctccatttcaccgcaatccccactgctccccattgcctacctatggacccggcactcatttctgtttcctcctgccttctgtagactctaacgatgtggtgcctgctctggggagtggagagtctctgaagggtttccaccaggtgataagcatgatcatgcctttgctttacaaagattcccttggtgatgatgcagaggaggatggaggggtatcatggagacagacgagtccttttggaggctgttgcgataatccaggcaaaagatgtcaagggcctgcaattgtgtccaagcacagtggatacgttgatagaaatatgatgcttctactttaatcagactttctgatgtttctctttttcccttgtctgttttgaaacttctagtttttcagtgtaacaccagagctgtagagggagaagggccactaggagattccatttcagtgatgtagccagcaggaaagcccccataagtgagagcctggagaagtatctcctaccctggactgtggcaggagggaaaaagagcagtcactgtagggtgaatagagtggtccttagatttagtgttttacttcccctcccagccttgagccagctgctgtgactcatgg

SEQ ID NO: 148467 - DNA, 554 bp, Homo Sapiens
ttttgtagagcaaaacaaaaacggcctttattcccaaacaaatagcggaaaggcaacatttagaccacagccatttacctctcagagctctttggggcgaagttgacactgtgacaaggtatcccagcccatcttttggccctgggaaaggctaaaattgggaaggaaatgcgtttatgttggttgtggttctgagggcacgtctgttcccagctaaactcctgcagtcagcagatgccctgaaataaatcaaacctcctcatgctgttgggacagcgacgcttcgtgtacacctttttggagggcaatttagcaatagcctaaaagaaaatgcacatactctttggctcagcactttgaccgctaggaatttactacagatttccttgctgagtgagccaggctgcgtgcacaagttcattgctacattattagttatgctgaaaatggaaacaacatgtctaccaacaggggactgcttcaataaatttagtgggagccatgtgataaaactctaagcagaatgaggcaggggagacagagagatgtccaag

SEQ ID NO: 148468 - DNA, 446 bp, Homo Sapiens
ttttgaaggagcagaatttttattcctattataatgagtgtatcaatacttccaacaccaggaagtttatgtttcttggagggcaaggaaatacttttgaactttgttcaggttaagccgcgccaagactggccctttgcttccctctggactagagaaaggtcaacctgtttcttatacatgaagcgaggatccaaaatttctatagtgagcggtgggtgggttagcgacagccattggtggtagtagggcttgaaaatgcacgctcatagtcctttgcataagattaagaaaacgactgttttgtacatcagacggacattcaagggcaggggcgcaaaacccctcctccaagcccctttttgtcactatccgctgctcctcattcctgccttttgcctggctttctgggagagagggcaaaaagggagaaggggaagtgtctt

SEQ ID NO: 148469 - DNA, 457 bp, Homo Sapiens
tttttcaaatttcacattcagtttttattgtcattgatggtgttttccctcctatttcccatggcttatttattgctaccaattcacagtccttacagcaacagcaagttagatgatctgatgaggattactttgtttccacacaggagtatagtgtgtactgcttcctagagcttgatctttctggttgcagattttggtaacggtggaagactacatcttctaggggagctcatggtaagaatgaagtagaagaggcaggagtccaatgagtcattctatatcatcaggtgcccagactgcaatcgcgaaggaagaattgtttgccttgaggcttatcatacttcccacaagggcagggcttggtgtcagagtgtaatctcgttgtctgtgtgagagagttaagtttccacgctggcccacggaaagcatttggaaaattgctcgtgccgattct

SEQ ID NO: 148470 - DNA, 440 bp, Homo Sapiens
tttaggggggagaaccttgagattttattaattaacactggagttcatgaaaatgaaatggaatttgtagcacatccagaagcctccccactctcatgtgaggggtccccatttcttaggtttagaacacaaagctgtaacagctacactcaaactggccggcttctggcttttggtcaaagtaattgcagatattccactagtaggtgagagtgtggattttgacggctgattgcttgacctaagcctgtgcttcatcctgcctgcacagagctgttgccagggcactgagggtccagatatgtggtctcagcagctgagctggacaaggaaacttgcctaagactagaccatattttgaatttttccaggttcattcccagggttccaagacttcagtgttcatcttcttttggtgttgtcaaagttccaacttggag

SEQ ID NO: 148471 - DNA, 658 bp, Homo Sapiens
  misc_feature (122)..(181): n is a, c, g, or t
gacaaaggcataaaaacaatttaatggaggaaagagtatcttttcaacaaatgaacacatgatactagagatagcctaggtgtgctcatgtgtgcatgcatacacacacacccccctaagtnnnnnnnnnnnnnnnnnnnnnnnnnnnnnnnnnnnnnnnnnnnnnnnnnnnnnnnnnnnntttttaggaaaacactcgggagaaaaccttagagatttatgggtaggcagagttctttgacttgacatcaaatgcatgatgaataaaaaggaaaaggtgataaactgaacttcatcaaattaagaacctttcgtctgtgaaagaccctcccttgcagtgcagcaaatcatttcactcacaggcctgagcagttttagaacatccttgtagaaaataatatgttactcccttgggtcttttttctcggccagcaaaactgaaaaacacagacctacaggcttagggggccacagagggctcttttccataatctctaattgtaagggccagaatgatgggtatccagataaaaacaccaagtcttcctaaatctgtttcttcatgcttgacctttaaattcttcctctacagagtcatcatcaatatgaataccaaacactcctcttggtgagtcacattcagacgtctggctactgt

SEQ ID NO: 148472 - DNA, 760 bp, Homo Sapiens
  misc_feature (736)..(736): n is a, c, g, or t
tttatgtcttcaaattggtttttattgaatatatggagaacatttcagataatacatgtagcagaatctctggaaacacttggtggaactttggccttccaatatatgtttgctatcttagtcaggatcctgttaacttggattcttttatgttaacaatatttacatctacagaaatagatgttaagacagtgaaaacatttacttggttcaaatgctgactcaatatagatgacaggtctgatatttcaatgatgtacttgtaaaagcaaagtataaacagatgtttcctcactccccataggtatttcttactgagaggtactattagtttgtgttcctttctgctactccctctaataatactaaaatttatgttcatgcaattttgtcttactttagtagtccaattatgaattttagaagttatattttaaaatgaatttaccccaatttaacttaattcccagaagagctgcatgaatgttgtcttaattcagagtaagtgttaaaaagccttccacagatgggacaaaagtatttccaaccattattggtgtttgtgatcataacattcatggtatggatatatgtcaatatatccacaaaaccttttatattaaaaatactttcaatttgtatctgtgacacaaagagcacagacctcacaatagcacggaatctacatttccctttagtgtcagttgatttgcaaaattttcctgatgtcattctnctcagtgaggggacggtagtagtg

SEQ ID NO: 148473 - DNA, 711 bp, Homo Sapiens
  misc_feature (475)..(489): n is a, c, g, or t
tttgagctgatgagtctcaccatcttattatttattctttattattaacaaagccagacatgcacgcaggactccccgtgaccattcccggggaagaaaggacgagctgaggttcgggacatatctagccccatatcctcgatgatcaagcccgtaggttccatgcagggagagaatccctcaggcccacccccacctctcctttgagacagcagagttgagagaaaagcagggatgcaggcgttcaatccatccacgcagagtgctggggccaaaaccaatactggtcctctactgctgacctcaggcccgtgttacatgaacggggtgtttgcaccgatgaccatgccagatgcttgggaatgctgcttgtccttttgcgtttctctggcagacttgcaatgaagccaggtcagtcccaagacctgcgttccagttccagcccccttaccagccttggaagccagcatgtatnnnnnnnnnnnnnnnaagcactctgtgactcagtttcctattctgtaatatgggaacaatagtaccacccaccatccagactatgacacagaaccatcctaggccagaataagtgatgtctctacatccccaaagcttggagttccccaaacttgtctgatcataagagtctcccaagatgcttgtgatagatagaggttctctcaccccatcacgtgtgcatttttacagagcacc

SEQ ID NO: 148474 - DNA, 686 bp, Homo Sapiens
  misc_feature (223)..(232): n is a, c, g, or t
  misc_feature (519)..(541): n is a, c, g, or t
cagatctccttggggtattgtctccataacctttatgtgaagcatcaatgatttcaccattcttccacccaaacctcaccataatttgatgtgtgttcttccttcaattttagcagaatttatgtttctctgataaaagagctcttttctaaatgtcttatcatagttagtgtccctcactagatcctgttcagacatgttacaaaaagtttattctggtgcnnnnnnnnnnttgaaattcatacacacttttttataatacatattttccatgaaaatttagaagaacacttatatagatgaatgatagattatcaaagttttcctagatttgtcaggctttgttcttcacggttttcaaatgaaagggcctggagaaaccgaagaactaaaagggttgcagaaagagtcctaaggggaaagaaaaactgatatactcacatcttcgacctaggcaacaaaagttatgagtcaagatatttggtcacataactaaagataacttaggttttatgacannnnnnnnnnnnnnnnnnnnnnngtcagttaaaatagggaaattttaactgaaatatcaatgaacagtaccattccctatcctcaccattggtacagcggatcttgtttttcttaatgtggtacatattaataaaatttatgagacctaaggtctactgcatttgaaa

SEQ ID NO: 148475 - DNA, 1245 bp, Homo Sapiens
  misc_feature (598)..(624): n is a, c, g, or t
  misc_feature (752)..(780): n is a, c, g, or t
tttaggaaaagtacagtttatttctaaattaaatgtatacatggtttgggaagatttactcattaagcaaacactttggtaagaataaattgagcgcttactgaatggcagtctcagttcctgcggccctcccgcttattacctcatttgatttaaaaacaaaaacaaaacgttatgaaagccggcttcgaggcattcctctgaagggaagggactccccgacccagcgcctcccccgtcacgtgaccctgtgacccggagcagccatcttaggcatcgcctcatagaggaactacatcttccagaatcctcgcgccctgcgtcgtgctggcacttttaccggccgggccttagagcggagcctgtagccaggcgccatctttgacgctggcagtcttggttttctgctagtgctgctgctgctgggaggacgacggacggcagcggccaagcaagaagaaagacgtggcagcaagcgggagtcggggatagtgtcatcggttcggtaaagtttctgttctctgatttggggatattccctgcccaaaaaattcctggaaaattgactagtattaagtgtgagtaaaaggtgtccacnnnnnnnnnnnnnnnnnnnnnnnnnnngtcttggatagtatttggcaagatttagcctagaaattatgtagtatttattacataagaatcaaaattgctttgttactgggctggtttcaaagtttagaactcatttctatgtatcaaaatcgggnnnnnnnnnnnnnnnnnnnnnnnnnnnnnacattcttaaatggtaaatatgccattgtgaaatgaaatctcaactccaaaagtttacccttttactaactggagtaaatgtatacttacaaagtctttagctgtagccattagtagtaaagaatttggacctaggctgcgtaagcaagcctttccagggccactatttaatggcaaaccagtgatactggtgttgatacaaaataagaaataaattttcccttaaaataaagctttctgggttttgacagtgcccagtttaaaaatggctataatgctggctctgccttcctacagcctggcctgcaccactcctggaatttactctattacccataccgtttctaatcctttttggggtaaaaccctcccctgaatgaccgaatggatggaatatatatacccttacctccccttatttataccctactggatattatgggggaaagggaattttacccttct

SEQ ID NO: 148476 - DNA, 708 bp, Homo Sapiens
tttttcatgtatctacatttttatttaaaattaaaaggtctcctccaaacctaactgtcattctaactctaagaatgcaatatgttctgtaaacattaagaaaataacttacagcttctgcttcagaaggatcataccagacattgatgtacgggtgttggagagcttcatctacagagatccttttagatgcatctattaccagcattttggataacaaatcccttgcctgactggctttaagtttgttgtgttctgagtcagctgggaaaaggacatcagggaagagtttctcaaagctatatccagcatatttaggtctgttttcaacgtaagtccttactgttggttgcagtttcttcatgaattcaggacatggtgttccaagctgttcaataactttattccactgatcaatatctaatatcaagtagctaagaaaaatactccataactaatgttcaatacattcatttacaagaatgtattcttgtattcatattacaagaaaatagaaatttaaaaattcctaagaaaggatgtggcagttataaattttatatctcacaggcaccctgcaaaaggcaatgattgtaggtggacagaaatgatcaataaataagctttattaaccttatttattgtgtgttcaaactaactgattttaccttaaaatggaagcttaaactcacaaattctaaataaaat

SEQ ID NO: 148477 - DNA, 1031 bp, Homo Sapiens
tttcatttacaagaatgtattcttgtattcatattacaagaaaatagaaatttaaaaattcctaagaaaggatgtggcagttataaattttatatctcacaggcaccttattgtaaccttgtgaatatgccttttcccattcttcctccgttttccttgtagcccatgccaaggatgacctcgggtgctctgtagtagcgagtcactacataaggcgtcatcataaaactcgttcctgcagtcctggccagaccgaagtcaagaatcttcaaagtgcaatcagattttactactatattactgggctttaagtcccgatgaataattccagcagaatgaaggtgcttgattccacacagcatctgatagagaaggtaggacattctttcatgatctagctccatctgaatcacttggcaaagatttgcatccatgagctccatgactatgtaaacatcttgaaattcttctagggatttctgtggtgtgaaaacattcaaaaggccaattatatttttgtgattaacacatttcataagaactagctctctgtaggcccgcttggcatgagtctgattctgaaatggtcggcttagcttcttgattgcaacatttctttcaagaatggcatcataagctgcgcatactattccttgagctcctgagccctataggttttaaattctgatatcgtttcaggactggtgaatgtagaaatctccaatctctacactataaaaaattgttgtcacgcttgcttctgctcatgatggcaagcaattaatttaatggcttcatccaaaaattcaccaagaagtgtttctttgatcctaggcaacttctgattccttagtttcttcatccttgacaggatgtgatgaaatgatgctttacctctgtgattttccttctagaaacccataaggccagtccggcagcgcagcgaacggcgacagggaagcccgccagcggggacaggggccgtccggggtggtcgccgcggccgttacccagcgctgctcgcggctccg

SEQ ID NO: 148478 - DNA, 557 bp, Homo Sapiens
agaaaaatatcaatcattttatttacacaatgatctttacatccttctaaccaatcttccaatctgatggaccaaacagacaatattcaggtagtcttcaactgaccagtgaattttttttcacattataggcaggcataatctatttaaagctaactggatctggcacgggtcattatggatgacagtttgttttaaccaccctggccaagcttgttgtaagacattcaaaacttcaagttccagttggcttttgctatacacatgtgtatccaacgtttgctcatctggcttcagtaacagtctcactttaatttgtgaaggatttgtccactttatcaagtgatatttattcattttatttgacttctgaattggcaagatctttctagccccatcacatggaaatggaatccaaactaacaaggctgatcaaatctcagatgcaggccacaataaataacaaccatccattcatccattaaaaattcattgcatatacagtcctttgcttatacattgcacccagtgggtaggagagcagagaggaagaaatt

SEQ ID NO: 148479 - DNA, 530 bp, Homo Sapiens
gctggctggaagaaactttttatttaattttataaaactgtaatatacatgaatgtgggataggattatgggtggaagtgaattatgtctcatatccatagatagagtggatgtcaaatattagttgtactaagagatttttttcctcttgttttaataatgacttacagcataattaagtggccatcctagtccttccctaaaaggcaaagaaccctgtcctagtctttacaaagtgattcttacagtttgaacccactaaggacaaagcataaatattgtcatatgccgtcaccctacacaaacttgaaagacttccgtgtgatacaaatgaacctcaggggaaaatacactcaacgaggttgccaaaggcatgtttatcccctggctgtgcttcctgagtttgtattacttctgcttcttggagacttgcctgaaaaatgttcattggttccaattaagcagccactgagctgcttagtgacaacaacattaagaacaacatttcatcccagcactttgggaggccg

SEQ ID NO: 148480 - DNA, 529 bp, Homo Sapiens
acaataacatagagtttatttctctttcatgtgaaagtagcctagagatgcgtaatccaggactaatctgttgtctgagtcatcaggatccttatcttgctgcttcgccattcttagtatgtcacctcatggtacaaaatggtgcctcaaaattgagccatcacatctactagtagacagtaggaaaaatgagggtaaaaagtaggcatatccattttcctctgagaattctgggaatcacaaaacacttgtgatgttatctccttggccattatttagctacatggcatgtgcagttgtgtaaaggaatgattttgacagtctgaagaaacagaaaattagcatgtaactggcagatctatctcttttaaatgaaagctatctttagagaatagattctaacaaatctgtggttattctattattttgaaagaggaattcctatgctttacaaattatattatatgcgaagctcagacttcatattaaatcacagtttcacaacttaatatatggcttgagagtcaag

SEQ ID NO: 148481 - DNA, 330 bp, Homo Sapiens
aaggggaatattgaaagaaattttattggagcagcccaaaaaagcatatgtaccttagagtaatagtaattaaataagacagtgaaattaaagaagaagaacatatttagacagagtaacagaccaagtttagtttcgggagaattaagcagctgctctaaagactgtgtgtatgtgctggcggaagacacagactccgtaatcagttgtctccatgccttctccctcttcccgggttacagtgtgcatgtctagaagcgggaggtctgtgtttctcctttctcgaaggttcttcaaagattgctgagaggaaactgggcccttttctgg

SEQ ID NO: 148482 - DNA, 701 bp, Homo Sapiens
caaatatacaatgtttaatgaacaaataaagttgtacaagaatatgcatatacaacatatacatataccatttacataaattgtatgtagtttatgtaaataatataaataaaatgtaatactatttacataaattaaaaaatactcagaacacgagtatatatactattttaactttttttggggatgagggtcttgctacattgtccagactggagagcagtggctattcacaggcacaatcatggcgcactgcagtcctgaactcccggacccaagcaatcctccatctcagcctcctgagtagctgaaactatagatgtgcaccattgcgtctggtctattttaacttttttagatggatatatggtcatggtgactctgttctcctacccccaatccaggagatatttggcaatgtctgctcacagttttggttgttatgtgaaggaggggaggggggacaggatggtggtgctgtcggcatttagtaggtagaggtcagggatgttgctaaacatcctacaatgtacagggcagccgctataacaaagaatggtctggatcaaaatgtcaatggtgtttaggttgagaaaccctgataagtatgtatgtagtaaagatacaaaaacatgcaaaggcacacaacacacccactccaggacagtggaaggggaatgggctttgagttccatttcatt

SEQ ID NO: 148483 - DNA, 419 bp, Homo Sapiens
ggggtttggaggaaagcttttatttttcttcctgctccggttcagaaggtctgaagctcatacctaaccaggcataacacagaatctgcaaaacaaaaacccctaaaaaagcagacccagagcagtgtaaacacttctgggtgtgtccctgactggctgcccaaggtctctgtgtcttcggagacaaagccattcgcttagttggtctactttaaaaggccacttgaactcgctttccatggcgatttgccttgtgagcactttcaggagagcctggaagctgaaaaacggtagaaaaatttccgtgcgggccgtggggggctggcggcaactggggggccgcagatcagagtgggccactggcagccaacggcccccggggctcaggcggggagcagctctgtggtgtgggattgagg

SEQ ID NO: 148484 - DNA, 463 bp, Homo Sapiens
tttttcaggggaagagggatctttattggctctgggattcgtcttctagggctgccataaaaatttaccctctcatagttccagaagccagaagtgcaaaatcaaggtgtcagcagggtcatgctccctccaaaggctctcgagaagcatccattcagtgcctcttccagtgcctggcggagccaggcactccctggcttgggacggcatcactccagtctctgcctccatcaacacatggccttcttctgtgtctctgcgtgcccgtctctgtctcttattaggacagaataagagtgctggccttcctatcctctcactggatttagggcccaccttttccagtgtgatctcgtcttgatccttaccttaattatgtctgaggcaggagattatagaagtcctctctggaacgctgtatgaacaaggcttccattgcaataaggctgggtaatagtcccaa

SEQ ID NO: 148485 - DNA, 777 bp, Homo Sapiens
ttttagatgtgtaagaaatttattggagaaatgtttgtaaagtaaaagggagaagaggagaaggaactcttcagcctgtcatgaaggtctgacccctggttgtggagttccatgtgttccagaaatggacctgcattagttgtcctgttatgctcagttgctgcttgagtagcctgtgggaaatgtggccttaacatgaacacagtggcggacccataagaacagcagctgggacacctggttgattatgttcccctgagcaggagatatgagcccatggattttcatgtcaccatggtcatcataagaataaacacggtgtcagagaaactgggccatgaagacaagggaatccttcagagtggagtgattcctagcaccttattttaagacaaataatgctctcacatgaaacttgtttagttgcttttgtgacaataaataataactccttaggtgtatttatcttcttatgggtgacagtgacacatctctcttggcgcaaatcagcgaaacttaattccaacacccagtattgttgaatgtgaggttagaaatcagaacgacttttctttctgttgttttcctaccccggaatcttcctaagagaccacaagtttcacactgggatgatggggagaaggacatcaccctgtgtatttgcatcatttcccagaactgcctttctaatagctcgagatttttgcgacacagctttggccggacttggcttgatctgggctccaggatcggtcccaccacccgggctcggagcgg

SEQ ID NO: 148486 - DNA, 717 bp, Homo Sapiens
aaaaacaccattgactgcccaatgagaatattttcttcatatccttcccccaacaaattctccaaactacttcatgtctatatttacatccagtcaaatagacatagctttggagaattttacaaattaaaaggccattctgctaatatgtcccaatgacatcagtatttctgttggttttgtcttcacatcattaggccagttcttattttcactgcaaaggcagctccagcaggaagattagaaacttgaggtgacttgaggcaaaatgtgtttggaatcttcttgcagctacttcttaaattgaaataacctacacaatgcaattcttcccagagacatcctgatttgcatccacagaatcacactcaatctcatgcaagacagagggcctggctaactctgctcaggcaagcgtagaaggaagcatgtgctgtccccactggcagagtcagcagcagcagagtggcagatgatgcagccaagccttcccttaatgctgacctggtgactgcattgtcccttctttattctgcaaattctctctgttactccattctgccatacagcatcagtggcatcctaaggctggtttatgggggcaagacggcttccagtggtaaccagagctttgtgcttcctgtgcagatatgtcatcattaatattggccttgtctagaaggacacatcacgtcacattgttagagcaggcctgct

SEQ ID NO: 148487 - DNA, 525 bp, Homo Sapiens
atcattatattcattttaatgtacaggaaatttagggcctgttaggttaagcagttttgcccacgatcatagagcttgtcagtggtagcactgggatttgaacttctgactctccattggaacatgctgggacctggaggggctgtttatggtgctccaatgacagcctctctcctccgaagggataatttctcaggctctgcctgctgattagaccttgcgaaagccctcgtcttcctctcttgtgctgggcacagaatgagatatctgatctggttgtggggaggaagaagaagaacgagattagggaagggaacgagaatgaacacttactgaccacttagtctgcgctggtcactgttcaggcacactctgtctgacatgttacatctttcatgtagatgtaaggcaagatagcataggatggagcaggagttggcaaactatagcttgagggtcaaatccagcttgcagcctggttttgtatggcttgaaagctaagaatgggttttacatttttaaatg

SEQ ID NO: 148488 - DNA, 636 bp, Homo Sapiens
ttttcaggaaaataatgcactttattatgtcatagcatcaaaataagatttatattcctgattgcgattaaagaaatattgtattcaccacacacgtaggcatatgatcaaatcttcacagccttttgttgttgttttttctttctagtcctctgccacatgatatattttcttcttaggtaggcatagtaatggcattactgatgaagtaagtaaatgaggtaagattgcctttctctaaagaattcccagttgtgaaaaggctgtgaaaagaaacggtggctcatatattcaaagcattaataaatcttcagaagactttaggagttatggaggcagtagacagtaagtggataccaccacatactgtgaaggtgtatatattttcttgaaatgttactatttgaaatgttactattttgctgttctctagtgttgctgtttctgtttctgttaatctgtttctgtatgagaatctccttcttttagaaaaatgcacttctgtgagtcttcaaagtaattattgtgcttcataaaaactgtgttattatgttggcttaggataatatgctttttacatcaaaataacttatagttattctctcctctgttggtaattataacccgagtccactg

SEQ ID NO: 148489 - DNA, 489 bp, Homo Sapiens
ttttctcaatccatgaaatttaaaattcctgagtttatttatcaaatatcagtatcatttgaagaaggaaataaacagtcacaatgttctcttgcgaacactgcacttggagcttctggaacttctgctcctctccaccctcccaccgactccttcccatgggctgtgggagtcaccaccatgtgaagaggaacaccgtgtgcccagctggcacaggttgggggcagagtgcaaatcagacactagaggaggggctctctctccctccctcccgcaaacatatttctggctggaagcagacacagatgacaccaatcaggttcaggtgacccacaagagatggcattttccaggtcacaagcccttcttctgcctcacaaacctccaagctcaggtgcacagggcccaggtgctaggtgtgaccccatgttggaggctgtgcacggcctgtagggcaaaggctaggcctagaaatgggccaggccactg

SEQ ID NO: 148490 - DNA, 566 bp, Homo Sapiens
tttcaggatggttcttttatttcttcttttaacaactatttattggccgtggctgttccagacacacacaagtgaggaactcgccccagtgggtgagcaggcagggacggtgcctaagtccccacatgactgcagcggagtgcagtggatgctaaacgtgggagctggcaggagtgcctgcctccgtgcctcggagctgttggagtgagcatctgggatgcatgttataccttgcctcttcactcagatggaaagttgagcttcaaataaagaggccaactctatgcctcttaagattcttgggaactcatagcgcccattggatcttcagcacgatcccatgggggtatttccgagttgaacttttcactttctgtccattcgggctcagctacctggtgaagctacttgagatctttgttagctgtgtttggtctgtgttttctggacaattactttttagtttttaaatgggtagactacttagaaaccaccaagagctgttacttgtgtgttccttcagatataagctggataatttaccgctgtgatataagacgtttttt

SEQ ID NO: 148491 - DNA, 405 bp, Homo Sapiens
ttttcacagaatagtcagatctttatttgaaagggatgctatagaccaagacgaccctggccagtccatctgtaagcacttagggaccttctgtcagtctcccttttatgagaactgaggtccggagtgaggaggtgatacattcaaagacacacagcaagttagtgaagagctggagctagaacctggcctgccagccctgtgttctccccatgcaccctggctcaggagctcctggtggccaccctccttgaccttgaaaactgctcactgccatgttggaggtaaactcttcagagctccggctctggtggccagagctgggctggtgctgggctgcagggaatcgagttacctagttggagaggatccctcaggagccagcctctctccagttggcaagag

SEQ ID NO: 148492 - DNA, 484 bp, Homo Sapiens
gaacatatatttccatatgacagtacttggatcttatcttcaacattttagaagggtgctgtgcagagtctgtttgaacatctgcagtgatggggaactaaccacctattgaggtagccctttctagctatggcctcttctgcctgtaggaaaagactttactgtattggtttggctaaatgcttagtatttcatacaatatttaactcctcttgcaccagagagcccttgagtatttgaggaaggcacatttatctctgctttcatgagatgttgcttgtcctttggtcctagcacttattactccactgtgagatcctgcaggacgtggtggggaggtggggaggcagttacctattttagcagctgctaatgtttcccaagtgcttggttcctgccaggcaccatgctaagggctaaacattcattaaatcattggatcttcctaattacactacgacatagaaaccttcattttctccat

SEQ ID NO: 148493 - DNA, 416 bp, Homo Sapiens
ttttaaaagcttaaaattaaacaaccttttaatgttctctacagatcagaaaaggatgatgcattagactgtgtctggaatagtcagagaaacattctgatgggaaatgacctttgatctgagtcttaatgaactagcatttccaggtggacagactgggtaaacaaggaagggagtaaaagtgagaagttatcaaggtcgttgttaaaagcatgcactggtgtcacaggcaggtgttccaattccaattttcctgtgtcctggatgtattaccaaggcaaggactctaattttccttgactcccattttcccatatattaaacaaaggctataaaatacggacctcctcaggtagctctttgttttggcaacataaatcaatggtgagaagtaaaacaggcaatcgttctgcatg

SEQ ID NO: 148494 - DNA, 430 bp, Homo Sapiens
tacttatggggctcaggctcatagactctgaggtctggaagttgaaaatgacttacaagtcaattttaagcacctttacaaatgagccttgggttacaggattgttttttgtatttatgctgattttgtgtgtattcagtgtgcaaacctaacctttcttatattctttaaaaaggagctgtgatgtgagtcaattcaatttactaagcatcagagcgtcctgttatctagcatgacagtcacaaaggggaatgaagcaagggctctgccttaaaaggagatctttaatcagaaatgataattaatacactgtgagattgaaataacaagagtaggcacagggttttttgcacacaaagagaagagtggaaaaatcttgtgagcggaaataataaaaacttattcctttaggagtttaatggatctgaaa

SEQ ID NO: 148495 - DNA, 678 bp, Homo Sapiens
tttaagctctcttgtttattggtttgagtacttagccatccaacacccacctcattttaaattggaattatcactcagtgatagtgatgaaggcagtttgggggtatcccagcaggcagagagtgagcaaagtgaggtttagagaggccatgcagagtgtccttatctgatacctactttgggtcgatggcttgtgctcttgggtttgactgggaaccttggagtcattgatggcatagggctcctgacagtccctgcagcataaacagaagatcttcaagatcaggttttggtgggctgctgttggaggcaaaggaatgaggggcaatgggttccggaatctgaattccagatgcctattggaaattgactgtggtgggggtatcattgggtcagcctctcccaaggcattaatataatactcctcccctctcccaaatcttctgtagctacccatggccagcagatccttctgcctaggccattttttcctattctgtacaaagttttcttacccatggaaaggagttgaaacttctactctgccagctttgtctgcaggggtgccttgttgaatcagccagtcttgagtttgagcccagttcactgggctgggctgtttcctaagtaaacataagaccgtggctgaaaaatgctagtccttcacctgtgttcaca

SEQ ID NO: 148496 - DNA, 556 bp, Homo Sapiens
tttttaaatgtttttattatcactgtttaacagatgaggaaactgaggtatagatgggctgagggacctgtccaagttcacacaattaataggtggcagaactgggatttgaatctaacttgtgatttcaaagacgtccctctaattaaaagctggacccaacctgaggcatatttgagaactcatggaagttactagaagtggggtataggcctcttcagaactggccttgaaatttcaactcttcttaatacaaaagcaacatcatggtctttctcttgttttcatttactaggctccaaatcaccaaacttctttgcctctctgggaaaactaaatgacccaccacttcagaagaaggtcatggggtctgtgcacagcttttcacatcctccctgaaacaccaacacgcccggtccaggttaaaggatatcagcactgccacacactcttctttttcccaaattaatcaagaagtaggaatttctgacaaatgccatctgctgatttttcagagagacaagttttggtggtgtgaccagcaggtgcctcggct

SEQ ID NO: 148497 - DNA, 425 bp, Homo Sapiens
  misc_feature (266)..(266): n is a, c, g, or t
ccaacatgcctctttcttctaacaaaatcttacactgagaaccaagtacacgaacagaaatgagaagaggaggagtatgtgtgaaagagagattggtgatagcatctctatctaaagacagaacattgggtggtagtcctaaggctcctcagacatcccctctccacctccgagccccttttgtaggtatttagagatcagtggcatctattgacttcaaggaaaatgagttgtggaatgagacaggtctgagttcaaatcttggnttctgctatgtatccgcaataaaattatgagctagtcttttgacatctatgagctacaaaataagataatattctagttatgattatctttaaagggctgtaagaattatcagatatgtggtccagaatatagtatgtcttcttataaggtagatgcta

SEQ ID NO: 148498 - DNA, 588 bp, Homo Sapiens
ttttttgtataatcctttattctctctgaggtggtaaggggatcacttccatcttattctcacctttatttctagtaataagatttccaattcttccaccaggctgtaagctctcctgtcgactccacccttagtgaataataggttctgctttggttccaaggggataggacttctacactaaatcacatctagttccctagcctcatgtcttaagaaagagcctctctgggaatttctccaaaacaactctggtttaaagaatgttgatgtcactttaattgttgtacactcagacctagtctcattcattcaacagagaatttaaagaacatcccattacatggcaataaaatacaaaggggagtgatccgggtatggttaattctggtaaattgacaagtaattagtcttttcttaaataacatttgaggcatacaaaaaatacagctaacatgatatacctgggaacccattactctgaatttaagaattacagcgcagattgaggtaaagccctaatcaccttttactctctttttggaggtaatcaccaggctgagtttggtgtttatcattcctgtactg

SEQ ID NO: 148499 - DNA, 421 bp, Homo Sapiens
  misc_feature (279)..(293): n is a, c, g, or t
ttttccttgttcacaaatatgcattttattttgtaattattacccacagattgccattaaacgttatgtccagtaaggacttccctaggtgagtctgacatcttttaagccagcttattttttaatactgttattcaccacataatttacaaacagagaagaaaggaccttcatacaccttaagaaaaatgaagtgtcaaattactacagtcagccctccgtatctgtgggttccacttcttcagattcaactaatcttagatagaaaatttggggggnnnnnnnnnnnnnnntaatacaaatttaaaaatcggtacagtataacaactccttacatggcatttacattgtatgaggtattaccagcaatctagagatgatctttttgtatgtggaagggcatgcataggttataagcaaa

SEQ ID NO: 148500 - DNA, 737 bp, Homo Sapiens
tttgacttgattaatggtttattccctaaggctctaaagcacatggaatggatcattttggctgctgcagaaaccatgggtaagagaacatggtgaggtcctatagagcctaccaccccaagtcaaggagagccacaagtttcagtgtatgcaaatatgaggtcagcgccggtttggggaataggaaagacgcaggggctgtgtcgacttttggaggccagtccagaagtcgagtccaggcgatggtaggagctactccccagacctgagcacctctcctaacagcagctcaggcaaaggccacgtctcggaacagttggctgcacaggtcacgtgacgcgcccctagcccggctctatttggctgcaagagcgctctgtcgcctgcctcggactctgtttcccagaagtcttcctggaaactacatttcgcagggggctttgcggcgcctacttcctcctggctgattagatgggactggtgccgttggccggacgtttttgggagcttcacaggctcttggttatccctcagcagagattcttcttttactctgtacagttttcagcatccctcaagctgatatttcgattaaacaaattttagaattctgagaaatggcgaaataatgtaaaaaaaacaaatgatattggccctaaattatcctccagcccctgctgctcatcggacactttatgaggttacaaaggaccatggcgctgcgcatatgggggatc

SEQ ID NO: 148501 - DNA, 472 bp, Homo Sapiens
gtttttgttgtcagctggttagacatgtctggtcgcggcaaaggcggtaaaggtttgggtaagggaggtgccaagcgtcaccgaaaagtgctgcgggataacatccaaggcatcaccaaaccggccattcggcgccttgctaggcgtggtggggttaagcgaatttccggtttgatttatgaggagactcgtggcgttctcaaggtgtttctggagaacgtgatccgggacgccgtgacctacacggagcacgccaagcgcaagactgtcactgccatggatgtggtttacgcgctcaagcgtcaaggacgcactctgtacggcttcggcggttaatcttttcgtcagttttcttccaatggcccttttcagggccgcccactccctctcagaaagagctgtgattgtattctttcggatggtaacatctcaatggctttactcggctattctgcctagtatgtagaactaa

SEQ ID NO: 148502 - DNA, 424 bp, Homo Sapiens
acacggaactaaaaggagctttcgctgtgtcaagcacaagacggaccccagagacacacatagtgcacctcatagaagcttctaatagtcttgatatctactaaagaataggactaactatggaacaatgaagatgagctggaaatgacaggtgacttgccagcaggccagagtgtgacttttgttagtccctcaatgggaggtgtcaattctcccttcggttgtgagaatcagttggttcatttgtggagaaggttgcaggggggatctttgaatcacagccttcagatgccagaagggcagagggaatcccacacgggctggtggatcatgtgtgtgcatttctctcccttctaatctgaggaaactacagcgggaagtacgtgagcatgcatcagagagccgcaggggatactctagaaca

SEQ ID NO: 148503 - DNA, 496 bp, Homo Sapiens
tcggacctgcagctctctctgatggctgctctccttttctgcatgctcacattctttcacgcttagtttcctcagattagaagggagagaaatgcacacacatgatccaccagcccgtgtgggattccctctgcccttctggcatctgaaggctgtgattcaaagatcccccctgcaaccttcccacaaatgaaccaactgattctcacaaccgaagggagaattgacacctcccattgagggaccaaaaaaagtcacactctggcctgctggcaagtcacctgtcatttccagctcatcttcatagttccatagttagtcctattctttagtaaatataaagactattaaaagcttctatgaggtgcactatgtgtgtctctggggtcagtcttgtgcttgacacagcgaaagctcattttagttcagtgtgaaaaaccagacctcaccaatgtcatcacaactaactccatcagagagagctgcaggtaccgca

SEQ ID NO: 148504 - DNA, 340 bp, Homo Sapiens
tttactagctgctagcatttattgcagtggatactaaataacacccatagacatcacttaatctacatcaggagtatttcaggaatagaacgctttcatagcagatgtgtatctgccagtggggggaaggggaaggatacattggagaaggggcagggtgagcttttaaaatgggaagcaggtaagtcagtgaaaagcaaatgggcagggagtgaacatctgggattttagttcactaactcagtgtgtgatcttgggcaaatcacttaatctttctggcatttggtgttcttctgtacagagctctgagattagactagaacatctctaagctccaaca

SEQ ID NO: 148505 - DNA, 667 bp, Homo Sapiens
tttttttatgcaagtcgaattttatttggtaactctgaaaatgacaatagctaacattgaatagcccattacagtttaatggggtctttctcaagctctaccttatttaatctccttagcaatcatatgaggcagttactgtgccactagaaagaatgctaattgcaaatcatcttgcggttagagatatttccatgtcagacagtgtctgccagtagaattttaagcttttcaagctgatgttctctttttacccagagcagagatcttgggtgatgtcgcctgaatgagcctttccgatatacttactgccaaaggcatccaactctccatatctttgtcttcccattatccatctgtgtgctagcaaagctgcgttttgtctgaggttttgtatgtttgcctctttcctccttcctcttcttcctccctcctctttggcaacagcagtttctccttggcactgttcttctccctacttacatcggctcctggagctggaaaccctgcagaactcttctgacaatttccttctttataggaccttcacattgaaatgtggatgtatagtccttgttttgccagaacagacaagaaaatagtgcaaggctggtcagagttgacttcactgccttgtggacaaaggaaatcatgcaacacggactca

SEQ ID NO: 148506 - DNA, 515 bp, Homo Sapiens
actatttttatgcgattcacctctatataacatttatttggtgtttataaccattacaaagtattatgacaattattttgccttgttttatatgtaaatgaattcagtgctcataactagcccttttcccatggcctctctatttttgagattttcatttgatcagcataatcatgattgcatttctttaatgagtaggttgctccctcaaagaatggctgtgattctttgtttgcttctttccctcagaactctggagactttgcttgcagagagtctcttgaagagtctggagactcttcatctgcattccttcttcatttttgaagtagctgtacctcagctttgaaaattgctaatgattaatatttatcttatgaactattaatcatatagaacctacctgatgttagtgggtatcaggctacctaccaggtagaagtattaggtagactggcgactgatttggagcagtcatcaattgttagttctcttgcctgggtggtgtgggagga

SEQ ID NO: 148507 - DNA, 661 bp, Homo Sapiens
cttctataagcaatcactttatagtgtcagacctaaggcatccttgtgaataaaatgcctatgagcaacagcattgggaattacatctggtcaatatgcaatctttgtagcactatgagaaaggttcttcctcagcagtgaactggtgaggtgaataattcaagtaagaattcacattgctggaggccagattgctgaaatatttcacgattagaattataagaacacgagagatttttggagagagaataaaggtcacttggtccatcaaagcatatcctttatagtactccatttccccaaggatggcatctaattgtttcttgaatgacactcctgttttttgcctcaacaactttgcctgcaggctcttctaagcatttattattctccacatggaaaggtgtaaaggaagaagcatgtgggttgctactggtgacagtatattgccatcataaaagaattcacggcacagctaatgcaaatgagagtgaggtagagaccctctcaaagtgggaactggaggcctgaagctcaatctagcttacaacttttcatttctatgactagtacaattttacattgtttatgcctttcgggttttgttaactgcaaatgaaagccttcaagctaatacatgaaattttatttttaatttaaa

SEQ ID NO: 148508 - DNA, 429 bp, Homo Sapiens
  misc_feature (408)..(408): n is a, c, g, or t
tttgacttgctgggaggatttaatgagagaatccacatgaatggaccttgtgtctggcatatcataagagcccagtgaatgtccaatgtcttccttttccagatcttgggcttcttgttaggatctgataggtcatgtccatgaagtcctgaatcttgagtttacatattgagtgttgagatatctgtgctggatcagagctcccagatgcgccagggccttgtgatgatccgtggcctgctggaggattgctgaatggccactccctgctgagagttcagccacaaacggttcgttaataagctggctgccagctcccgatggcaccagggttcccactgcttgcggcccctctcctgggtggctgatggcagtcttatggtctggcagttagtgattcaaagactnctgaagtgggagggtaaaggg

SEQ ID NO: 148509 - DNA, 487 bp, Homo Sapiens
aaaggcaaaataatgtttaatttcattacatcaaagttaaagatttctgttcatcaaaagacacaatggacaaggtaaatcaacatgtaacagcttgagaggtgacatttgcagtctgtactattgacttaagattgacatattgacccaaatatgcaaggaagtcagccgtggcaggtggggctgtttgagggcaccagcctgcgctgcgggggtgtccttattgaccacaggtgggtcctcacagcggctcactgcagcggcaggtaagtcccttcctggggtgggcgaagggaggactatgggaaggcaagcgctgggggtaggatcacaagggagggtggtgcccactgggaagaagctgatccatcctccagttggtgctgtcccagactgagagagatttgaggatggcggtctctcccctcattggtcagggccccagccattgtccttgagagaactctgtgcttttgatggagtcctg

SEQ ID NO: 148510 - DNA, 586 bp, Homo Sapiens
ttttccggttctattttcagtttatttgctctctgttttatggatttcagactcttcaaaatactcttcagtggctttgtttccaaatgaaaaccagaaaaatgatgctggaatttcatagaggcagcggcggatggaagagggctcctcctgtctataaccatgggaatattgtttttgattgtagaccaactaacttatattattttttgttaattctattttgatgtggattatttggaagtatgctgactattttttaaagagtagaaattttctggtgatctgtttgttttcaatgtgttggttcattctcctgtggtcagaaaacaaggctccgaatggtgtatctatccttgttctgtgtcccaagcagagaacaggttcagggtataaaattatcacgccatcttcaaattgagagttatagggtcttgtggttctttgagttacatttggatattttcccaaggcagcatcgctttatccaccataccttctcaatctggaaccaatttatgggatgtttctctgagcattgtgataccctgggaagagaactcagccacaaagtgccagacttctg

SEQ ID NO: 148511 - DNA, 576 bp, Homo Sapiens
cttgtataaattataatttttatttaataaacctaaaatgctctgtgctgagtctgaggaatcctttgttcttagctgagtgtgtagatgttggttggtagatcagctgggtaactctcaggtctataccataccagagtcttcgtggccactagtgccatttgggtcgagcacaaaactgtctatgagactgaaggcttgggtatgaaatgggatggggagtgggtgctgattgctctactgcgccccctggtgtgagggaagctaggagcaggaggtagtcctggggatcccagaagacagaccggaaaagtagctggccctgggtgtgtgagggggagtctggaccaggcagtgccttggggttgcagtgttggccttggctccattgagctgtggtctctgccaccctgggattctgaacagaagggtctctggcaaagctgtgactttattgattcagatactgacattgggcacaggggagatacgagaaaacctgggagtcaaaacccagatgggcacacggttggtgcctggccccacctctgccccaaatgagcggccagtaagctg

SEQ ID NO: 148512 - DNA, 942 bp, Homo Sapiens
  misc_feature (462)..(462): n is a, c, g, or t
  misc_feature (830)..(830): n is a, c, g, or t
ggctggctaggccctggctttatttagtctgattgttacagcaataataatgatgacgatgatgatgatagtaataataataaaacaataatttaactagatgcctggggccgaaattcctgccgctccccttgcaataaaccccaaaccatcgcgggacggaggccaggcgagtgtggaaagcgaaggagccagagacgcgataggaaagaatggagactccgccggtggtgcaaacagggctgggaaggtttgtgcacccgggtagtccctggctgctgctgccaggctgcctcagccggtcgctgctgccgcggcgactggcgacaagctaccagccacctacgatggcccaaggaggcgaagaagagcaagcgatcaggacaccaaaacggttatcggaggcaggttcccagcacaccagcccggcgagggccgagccccgcgggcggcagcaagttntgggagctggaggtaaccgaattaaaaggcgccttagaaactccgcttcgggactttgctcagcagggctccgggttggagggcgcccgaggccttagccaccgacgaggggagaacaggcagacataatatatattcacatcgagccccagagcgagcggcaggcgacaaatcttccctcctttgcgcctctcgcctcctctcgcccgaactctgcagatcccattcatgacgaagggcttcttccaaactgagagaaaaaagttttcaactttatggttccaaattttttcccccttgcagatccgggagagacggataacacttttttcccccaacagccggtccaaggagatttgtgtcaagtnaacaaagttaggcgcccacgtgatcctccgagccaatggccgccccgccatgggtccgagacgttctaattgtcgccgcctccgcggcgaatagaaatctcacatccctttg

SEQ ID NO: 148513 - DNA, 559 bp, Homo Sapiens
  misc_feature (368)..(463): n is a, c, g, or t
tttagggttgaaacaattatttattattaggagatgttaatgtaatccaccatattgttaaaaggaaacaaaaataacactgggaagatgttttaaaaattcaacatgtacctctgattaaacagtaaatgagttttgatgactcatagagtgtgttgcatcatgaagcatgtggcttctaccttcccttaagtctgcactcccaaagctagtaaagggcctttttgaatcaatatttatcttcttgagagggaagttttgtaaatacacatacatacatatatacatatatgtgcatgtggtatgtattttctatatctatggaatgtctgctaatgttgcattgttaaattgaataaacactaaannnnnnnnnnnnnnnnnnnnnnnnnnnnnnnnnnnnnnnnnnnnnnnnnnnnnnnnnnnnnnnnnnnnnnnnnnnnnnnnnnnnnnnnnnnnnnnnccttatatgaccttcaggaagtttcagaacattaacagcagttacttctgagtgttagaattttggctgacttttattttctttcttctataccac

SEQ ID NO: 148514 - DNA, 413 bp, Homo Sapiens
ttttagatactgcaggaaatgcatttaattggccaaggaataagagttttgtttttaaaaattaaagaaattacatcaacatatctccactaagtaatttccactcctacgtattttgatatagagatgttgctatttttctatttacagtgctaggtacatagtgagcttttaacgaataaacacttatggattgttcagttggctgaagataattcagacttgcctgaggcatggaaaatacagggtgagaataggaggaagtatcgattggtaaatgtgcatggaaaagcactgctacagtttgaatgtttgttccctcccaaactcacactgaaatttaattactatcccagtagtttgcaggattaaaaaaagaaatttgattgccattgtaacaatattaagaggtg

SEQ ID NO: 148515 - DNA, 477 bp, Homo Sapiens
  misc_feature (200)..(296): n is a, c, g, or t
aaagttaatgtgctttgtttttggattcctgaaaaacaaaatgtttattatccagggattttagtggtgtctttgcatatcaagatgaggaaactgaagcacagagaagttatacaacttgcccaacgtcacactgctagtaagcgcaggatctgaactattacatcatattgcaggagttaagggtctcatactgtcannnnnnnnnnnnnnnnnnnnnnnnnnnnnnnnnnnnnnnnnnnnnnnnnnnnnnnnnnnnnnnnnnnnnnnnnnnnnnnnnnnnnnnnnnnnnnnnnccagaggagtaacaaggaaggctagcagtgcagcccaggtccagagctgatgaatggtgcagtgctgctgttgtcatagcaaccaagaggaaaaaagcagcaccatataaggatctgtgacatggattctgggaacaatttatattaaaaagctgtaagctcctcatgccttaaagctgta

SEQ ID NO: 148516 - DNA, 551 bp, Homo Sapiens
cttccctaggcaggaaaatgttgctcatttttatttgtcatctaataaataaatgccagatttggaggtggaaccttcaaagtgaagttgcctcatcctgagaaaatgttggtgtctgtttacatccatatattaatggaataatcttccagatcagtcagagtacttgagacacaatcagtgatacatatgcccccattgttcttaattagcttctgattaaaatgtcttctcatgctcttcaagcttaattgttgtcattgacatccatgaaagtactcttgcaaagatttctgtattgagaattagaggcagggaatctatagtgaagcactgtgtccccaggaagttcttctctctcccctgattataatcagtctctgactgccatcacacaagaattataatacctaggtaataaacaccctgaagacgtactgtgactgtaatatttgggttcttcaggctaaggggccctgcagtggcaggcttttgtgttcagcagtgctcagcagttccatcccgaattttctttcatcagtagatagcgt

SEQ ID NO: 148517 - DNA, 565 bp, Homo Sapiens
tttaggatttttactagtttatttgaacattaagctcagcaattcatgtatcaggcagcacccgactgctagctgttcaggattccgtcgaggccacgcaaggggaaaacctttggcctggtgctgacttcttgatgggccgccatcttgggcactttcctgagtgcttctgaatccccatcctggagggtggtggggatggatggctggttttctggggcaatccccaaaccctgggcttttctcattgattatggtgactatcacagacagcttccagcatagagggaagcattgcttgctgcttccacaggaactaatttagtcagaaaccctaaccgcggcaggcagtacatgggtgcatttcatattttgctttccagatctttcctgcacccggagggcattgagcttatcaggcaacagtgaaaaccagtaactgcttaaatgcggttgctgaggcttcgaaaagtggtgtcagtctgcctttgcagaggtccctctgctgaggaggatcaggtgttatacatacagcacctctcagcttcgcaaggaatctgtcaag

SEQ ID NO: 148518 - DNA, 579 bp, Homo Sapiens
caccactgtctgctgagctgtgtgtgtcagaaacagagggaaccaggtgccagtccctcccctggcctagctcttcccactaccatgactcttgttgggagtgaaaggattttaccccctttctttgtcagcagctggcctggactcccaggggagcctggtcaatattaatggacacgcaaggctgtggggcacacagggttttgtgattatggattatctcatgctcagcaccatcttgaaggtggagacaaaagttctcagccagggccaggaattccaagcccacagtgggtctggatttaaagtactattgtgcctgggcctgtgatgtcagcatcccccactcccagggggccctggagaacatggcatctcagagcagttcaaggggctcaagcagactgggcctcggaggactggccaggctgggaaaatgccattgtttcctgaatttccctggaccgcagccaccacctttaaagctttagttagttaatggggaaggatgaaagggggaaatttaatagggttcttccaaataaatggggattcacagcccaccgctgaatagcctaa

SEQ ID NO: 148519 - DNA, 571 bp, Homo Sapiens
ttttcttccaagatagttcttttattgtcaaccttctttaaagatttatgctgaaacataaagtaagtctccaaatagacttactttagccaaaggcacagagaataagctcttaccactttctgctagagcagcagccacttcattgagagtggaatagatgttgcaggcagcccatcggcactgggcccccagagcacccagagtttccataagcacctgtattaaagacaaagcagggtatgagcaagcctgggccaaacaactagtcaaggagataaagtttatatattttacaatcagaaaatacaacgggaatgacttaagccagtgattttcaaattgggctctacagaacctcttcagtattctaagaaggcaagtattgggggaagccatgggaagagggaggctccagctgactctatgtttttaccaatttaaattaagcttccccataagatttaataaaccaaggacttcagagccaaaacttttctgaaaaaacagatttacagttctgcttctgcttagaacatacaaagctacaagagaagctcccaccttaacg

SEQ ID NO: 148520 - DNA, 471 bp, Homo Sapiens
ggttttctattatttttattcacaaatgttatttttggtgtttgagataatatctgtatatatctacctagagattttccttttgtcctgggaatccttctgggtgccaagctacacagcatgctaagggccaatcctactcttgacagcaggacgttctgcttctaatccagctaaacgttggctgttttatctgtggagcagaattttacctggcaccgtttctgcgagctttaatcataaagctcatcattgcttaagtgagctgagcccatatcctgtttctaaagcaactacataactagtaacaagaaactgaactggggaagcagagagtaaatggagaattttgatgacatttcatgatactaagattttccatcagagctccttcctacataacaaatgctgatgataataataatattctatattggaagtgagaaattctgccaagaagtctcatgctgc

SEQ ID NO: 148521 - DNA, 567 bp, Homo Sapiens
ccagctggtcactcaaacgagacatttattacccctaatctccctaatccataagacaatcgggccaagaaagataacatagataactgcttgacgagaagaacagttctggttccactgaggacttcaccaggctcatgctcttctgggaggggttgcacttccttagtgtcacctggaaggagcaggctggggtgatgctcagctgctgggggaacccacacatccaaggtgcctgaatacaggactccgtcccctgcttcctgtaagctaggcctgggtatctcgagtagtagttgggtgctgctcacgatgacgatgaccgcaaatcataaccctttggtcagtctgagaggacagtaggccctccaatcacaaacaggcaaaaaagaactgggagagggggggtcagccttagatggcaggaaatgtgcagaactgtttgttttctttgcaactttagttggcattctgctagaagttgatatcatctaaagaacaagaaggtctagtgcaaaaacacattcttgctccttatcttttgccaagacgcttccccattgtttg

SEQ ID NO: 148522 - DNA, 656 bp, Homo Sapiens
atgcctctcaggactcagaagtatattctgaaaattttttcttacagtaatacgtattgattctgtaacagttatttttattttgagaaaagttttctaaaaatgtgttaaaaaaatagaagctttcttttacttagttccttgaaagaactctcattagtttagtcagattgatttcttttgaaaaacaactatattgcctgacagtttaccactgaatctcagcagcctgccaggcacacaaataggttttactaggctgaatttcttaaggtttcctgaagaaccccacataaagatggtcatttatctttatggatagattttccataatggatttatggatgaatttatggatgaaaggcagtttgccagtcctctaccaagttgctatttgcagacaggtgacatattcaacaatttcaccctttaaaactttcaggtcaacataatgttgaattaaagaagccagacacaaatgagacataaggtatagttccatttaaatgaagttcaagaataggcaaatgtgagacacagtgatgtaagtcagaatagtgattaactggagggaaaattattgactgggaaggaaacaaagttggtggaaatgttctatatcttaattttgatcatgaatacatggatgcatatat

SEQ ID NO: 148523 - DNA, 986 bp, Homo Sapiens
  misc_feature (337)..(345): n is a, c, g, or t
  misc_feature (446)..(493): n is a, c, g, or t
acacatatatccaaattttaatgtacacaagaaacacaattcataattgttctgtgagataatatgtatccaatactaaacacatttctatatttatcttctcactctcatcacagcttaataaaattataatgatgacctttcaaagtaccattgcctgatccacattgacacagcatccctagctccaaatctcagctattgcaaggggcctgctgcatctcactgcctgacagtctatgctggatgcactacaggcagcattagggtctgttaccactcatgcttgtaccccagaagccagcatagtacttaacacagagttagggctgtgatnnnnnnnnntttcaccgaatgatgagtaaatacataaggtctttgggcatgtcttacattgtgttcataccaatacacatgatactgtggctacatcacctgtcccaaannnnnnnnnnnnnnnnnnnnnnnnnnnnnnnnnnnnnnnnnnnnnnnnctgtggccatattaaggaatgagctgtaaaacaacccagattcagttggcaaacatgattgctttaacccagactatcctcgttgattgaagttatccaacagagtcaaatcctttctctaaacatctagaatgtcataaatatgaggcattgctttcaatacaaaatattctttggaggaacaataagatttctcctgtgagattatgttgagacttctcaatcctctttgggaactataacggcagatgttagagagggattggatatgccactcatggccgataccagtcatggcatcttagacaaaggctataaacagcagaagaatgtttaaaatggcttcagtgattctccttcaggccaaaggaattacaaccatgtgttctcagcagagaaggcgtagtattccgctgtggtcacttattatcccgtcagtagctatatggaacgtggataatgagcaaagttgttttttccgttcagaactggg

SEQ ID NO: 148524 - DNA, 740 bp, Homo Sapiens
  misc_feature (97)..(159): n is a, c, g, or t
  misc_feature (553)..(566): n is a, c, g, or t
  misc_feature (728)..(728): n is a, c, g, or t
tttttactttgattttcggttttattggcaagagtgattcgtgaaaaccatgactagatgaacattggaggaaacattcccaagcattaatcacttnnnnnnnnnnnnnnnnnnnnnnnnnnnnnnnnnnnnnnnnnnnnnnnnnnnnnnnnnnnnnnnaaggaatgctttgtaaagcttagttctaatattacagaattcatagttatgtaattaatctcaaaatcactcaccattgaagacccttgctatttttatttcctataacacgaagtctattatctccttaataatttttaatttccatccttagaacttcttcagctctgctactttttccttaaggccagggtcataggcagcacactggtgataactcactgtctagaaatattgcattttgtttacaaagttattttctatgttcagcattttgctggctgccttgggtacagtacctcaattgaatgtctacacctgcatatttgtggacattgaaatcatctaccatttttcagagacactaccttgtgatataaaaaaacagaagccnnnnnnnnnnnnnntcccaaggaatttctgaaggagcctctcttcactactctgctcttgttagaataatgagtaacactggtataacattctacaatttacaagaatatttatctgcttcatgaaacctcaaaacaaacctttgagactatcaggatcctaaccactttacagangaagataactta

SEQ ID NO: 148525 - DNA, 744 bp, Homo Sapiens
ttggcagacagttgtgaaactttattgagagaattttactggtgaagtttccaacataaagactgcatgtatggttttcagcttgtcttcatttaaaccgatggttgcccttcacctgcttctggtattttaacaggctccagatttggcagagattctcccttgacattaggaccatctccacgttcacccccagtctttggccgagtcagttcccagagataggctgccaggcctaggcacttggaagtccagtgctccctcgtctctctcttgaccaggtgtataatcctgactttcaattggtggttcctcttgttgaagctggtcatcactgggcagctcctgggcaaccacagcccctactggatgattagagtcttgatcatctcttctttctctagatctggatcttgttctttgatgtccactcatgtttcactctccaacagcacgcccagcactcgccccatcttcacgtgattcctcccctctacggtccaccttcctccgtcgtcctggcccagaaacgacgacaaaggcccatggggcgtcgcgacctgggaggagccggacgtcgacggcgaggcccttttctctcagaagccacggactgtggtttctgtgccgcacgacctgtccaaagcccgctggctccccttcacattcactcacaactaaattcccaggaggactgatctgcggacctaccagctgagtcccagtcagtgagaaagaatgaag

SEQ ID NO: 148526 - DNA, 618 bp, Homo Sapiens
ttttacactgctttttttattaaaaccttagtattaaaatgtacagttacttctcatttttctcaatggcaagttttttaagatacagaattctatttaataccagatactttttttaggagcaagagaaaatatcggtgtaaagtgagaacaacagtataacaatctgattttgttgagagttcatcaggatgactggaaacacaggttgggtcattactatgagagttctatgtccacatgatgccatcaaatcaaattctttgtggaagtgtttctttctggtgacgtaagtaccactgtagcagtccgtttcttttgaagtgagtaacagtctgtaatttctctcagccagtccccagggcaacaccttctttatgtgggtaaagtccttatctaaaatatccaagaggaccagagttgtagtttttgctctagcatgtcttcctcaagcatcggtttaccaaaatacaggattatttgtgggggcctatccagtacaggatgatagtagagaggaatgctatgttactttgctctgtctttaaggcctgcttcttttcatccatggcttctctatctataccaagggcttgctgtcttctgctggctcctctg

SEQ ID NO: 148527 - DNA, 475 bp, Homo Sapiens
  misc_feature (37)..(37): n is a, c, g, or t
caagtaatttattcaattaacaaatatttattgagcncctactatattttaggcactgtgctaaaatcaattccaatggtcaacaaatatgtgaacaaatggtaatcattattgaaggaatgcaaatgtacaaaaagtgacttttccatttttcacctattcaatggtctatattcaaaataaatgattctccaggattggatgagcgtggctttgggatctcttctactgtaggtagatgtacagctgcataatcttcctgaaggcacttgagcaatgtctatagaatggcttaaaatgcatacatatcttaaaaatggccaaccaggagcaggaagcactcctaacaacctgattgtggtttccaaatgccatttgggaaagtaccaaaatacctaaaggaaagaagagggctccttggaaaatggcgacttaaaggtgagagacaggaaagaacaagatgaacttggaacat

SEQ ID NO: 148528 - DNA, 424 bp, Homo Sapiens
tattcagcaatttttttattcccactgttaatgaaattattaaaattatttttgcctgctggatcattagctgtgtatgtgcacattggaagcagtgcttattcacagaggggagcccactcactcctgaaataagatggtttcttccttctctccaaaacattcattggtaaacataatgtagtccgtcttccagatagagattctcaaagcccctatatggatgttataaaggcaatgtatcttggcatatcataaaagggagcaaaaggaataggtcaagaataaaggaatttcctgagaatataatgccttgcacataactgaggatcatcaagtaatattaagtaaaggagaagaataatatgtggtagtgagaggtgaagccagctggacttcctgggtccagtagggacttggagaa

SEQ ID NO: 148529 - DNA, 297 bp, Homo Sapiens
ttataagtgaaaaataatagtcttttattttccattcttgagttatttcacttaaaataatggcctcatatcccttgccctgaaattaacagccagcaggggtgtcctcagtatcaaaacaagtcgaccacacaaagccgtcaaagactccaggaacccaggtccatggggtgcagcccctccttcatgtctcaaaattcacatccatgttaaaggctctggtgagggtgacatttccaggaagccacagcccatgtcaaccccctgcaaagctgtgaccttgtccgcgggcaggtg

SEQ ID NO: 148530 - DNA, 707 bp, Homo Sapiens
tttggcagttttctattttattattaaatgcaaaagatacgaagttcaaaactcaaagatggaccagtgagaatttcctttgcctgtcttagagaagataaaattctggtagtactgctaatgttgacgttaaccttctccttatcctcctagctatgggttattaggggtttattcttttcccagccctgtgctggctctgtacacatcatcttaatcctcacactagtttatagaggtaggcagtattgtacccattttccatacaaggaaactgaggcttggagaggcttagtgacttgcttgaggtctctcacctagtaagtgagggaactgaatccaaaccctcattgactaaatccaaagtcttactgttaacctcaaagtggagaaagtagagagctggatacatcttaagaaaacagggttagactgactatcatgctgattccactgcgagagtcctgtaagggagctggctgtggttccccaccatgggaattagatggcttcctggaacaaagagccgatggcatcagcaggcagctcacagatgtgcccagaagatagtgaggaatgaggctgtactgtgtgaggaagagggccatttcaggagcaaggactcagtgtaatggagtgaacttaggtgaatcttttgatcttttgagcctcagtttgttcatctgcaaagtgaaggagttgatcca

SEQ ID NO: 148531 - DNA, 440 bp, Homo Sapiens
ttttaaaagatttactttttcttgggctttaataatcaccaagaccttgacatgtggagatacagaagaaagggaaagggaaggaaatgagttttccagttgagctgcagcatcagcataaagttttggaaaggatctatgtcatggagggctttgaaatttccttggtaggtggtgggagccattggagttttactgcgaccaacattagcacagcaattcttcagagagagaaatttagacatcttttggtagatgaattggtgtaagggcaaactggagacaggaagatcaatcaattagcaatcttttctgagatgacagccttttgatcttgcctgtgtctctcctctactcctgcaatcaccaggaccagatatggcagcgtttcatttcctcctccagttctacaagggcttcctgtgtcatgtccttcttca

SEQ ID NO: 148532 - DNA, 381 bp, Homo Sapiens
tttgctgtttctctttttatttatctgttattccttaagattaagagaaaggaaatttagcgtgtatgagtaggttagaggcatcaagtgttggtgatttccctctaacagttctgaagatgcaagtacggccgatacataactgtagattttggaaacagctttatgttcgaatgccattgttctttattgcctacagtgttgcatttgaggtcagcgttatctcagctttggtgttttcttctcagtagaagttgctgtcatcagttcaccctcttctgaggctctgcttttggtacctacaaacctaatttcaagcttcatcaaaagtacataagaaggttttgttgtggattgaacaaaataaaaggcccgttatgt

SEQ ID NO: 148533 - DNA, 663 bp, Homo Sapiens
  misc_feature (277)..(287): n is a, c, g, or t
tttataatgaactaacaatttattttcactctttctctaagttaaaaattcccagtacattcaaatgaacaatgaaaataattgcagaattgtctcctgaaatggaaatagatttttgggggcgaggcattagcaatttcttgttatttttcagaaatcagccactaaccctttcaaagcttcttggtgactattgcaggagaaatcagaatattaatcttgtggttttatttcagagttcgctgccaggaaggaggtataattgggataggagacnnnnnnnnnnnagctgtgtcactgttcaaggaggggggtttggaacctcagcataagaattacactctgtgatgaggatgtagcaggggagaagaaaggtgattttcactatgggaagctatacttacatcaagtataaaatagactgaagtcattttgaattacgttatacttgtaaagtttacctcctggagtttcagttagtaccagtgtactaactgggttaaaacagttcatggcaccttagatcatttctaactcatggcaaaaatctttcctggtggaacgtgtaactgtattttaaatgcccctttataagcaaccaagtatttgggatgttattttgatattagtagtgaatttttcagtatcttccagtaccctttg

SEQ ID NO: 148534 - DNA, 486 bp, Homo Sapiens
  misc_feature (449)..(449): n is a, c, g, or t
  misc_feature (454)..(454): n is a, c, g, or t
tttgttttctcccatttctcctgtcttataaactaggcaagacagggggagaggagggcagtaggagaagtggtggtctccttccttactatgatcaacatttgtaagttaatttagcttgaaacaatttcaagcttagataaaaggttgcatgaatagtgcaccttcccagagacccccattcaagggtcaccaggtgtccctgcaatgtctctgaaggaaaggagcctgttgcctggcaagagtggtgtcatctcgaagcaaaatcactgtggtggccgatgttagactcctgcataccaaggtcttcacacaaggcctgtagcattgataacccctcagaaagatgctacctaacttccccagcagtcatgaattttgcaagaaagtctaagacatcaccagctgcacatgtttttaccaaaaagcttgctatataaaggatgctntctgnggggcaggtgcagggatccactgtcttgtggc

SEQ ID NO: 148535 - DNA, 321 bp, Homo Sapiens
ttttcaaagatagagattatttattcaacaaacattatggcagattcaagtagcaaaacagtctgtaaatttgggcatgtagacccaaaaaagatcctctctcaaactgctaacctggtgttgctaaatgaaacagttcttgccgaagaattttcacaggtgttcatttgcatccatgaaattcctctcgttacatcagtttttaaacaggttgtttgcatcaagtttcaagagtaatttgtgaacattgctgtctgactatccatccccatagcagagatagtaacttcttaaaatttccagttattcctgaggtttcgg

SEQ ID NO: 148536 - DNA, 749 bp, Homo Sapiens
ttttgtttttaatcttgaggatgagtcaccctcaatttatttccaaatttcttctgtcatcagctgttcatttctttactttgaaaatcaccagattaacactgccaaaggcaagaggtaggaaatgatccaagaggacaagtcagaggtatcacatggtgagtggctgagaaactggaacaagacaaccctcaggaaagtctcttttttgtcccagcaaaggcaccaatgtgtgaacctaattcacactttcattattctaatcaggttatttttatatcagtgtaattttagaacaagacttgctaggggattatttatttcttaggaaattctgtccatcactctgcatatccaaggtctagcaccagaattcatttcaagccaagaaattatattcctattacctctcctttgtaatactttcacatgccttctttattccctgaatcttccttttgtacaacgaatttcaaaacagaatgaccagactttctaacatcacaattataagaaatgtgatctagttgaatgtgaggtgtctgaacctgggtgaatctgcattgctcatcaatctctctcagtccttagaacgcctgtaaagcataagcttgctattttatctatattcgaattgccttttttaagctgattgggttctcaaacccatttagcctctaactccgagtcagggttggaaataggaaactggagtccagatgttctccctaggatctaggtccaagtca

SEQ ID NO: 148537 - DNA, 633 bp, Homo Sapiens
  misc_feature (620)..(620): n is a, c, g, or t
cgggatataaaaaacatcacattttaatgacataatcacctctcttcattatgtcattagcaaaagcaccataattacacacttagaacctgaaatcatcaataggggccctgttttgtaatttgaactataatttataatggtgaaccctccacagttccaggcaacatgcagagaaggtaatttctagatagatgacaagcggtgccttcagcagcctgggtagtcacactgttcgatagtaagaaagaggtttggagccctggtgggaagcttcaagttaaagaagccaagaaattaaataaacggaaagtagatttgaaatacacacggcaaactggcaatttgtctttgagtgttttaaaatcacaaacaagacactctggtgtttttcaaagacaaaggttgggatttcccctaacatttagaaacagttgggagcatgtatgtgaactcatgtgttgaaactgctctgcattcatttaggacttttatcttcaagtcaccttctggaggacttgggcgtgtgtttggaaacgtccctctggagccgcgtgggaatccttagggttcagccgcataggcgctggggagtctggagcaaatagcacccaccggtnctgggtccgctct

SEQ ID NO: 148538 - DNA, 547 bp, Homo Sapiens
  misc_feature (72)..(72): n is a, c, g, or t
tgaggtagagttaccaatccaattttatcaggaccacagatattttgagctaaaccccatgatcttttcatncagtaaaaataatttttatgaaaaaagaaagcaggcttcccaggccatggcacatagatatatttacaatttttaatgtaataattaaaaatggtattgtttatattttaaaaaacagcccagctgtattattctgtcaccaagaattattaattgaggatgctgtcaatgctgaattttatagttcagccttcacaatcccatccatgatgaagagttgattctcttacggtatacaatatactctcacaactttcagccttctcttaaagacatgccccaaatgagcaggatggatataaagaatgtaattcattcaaacaactcctccctgttctgccccctcccctcacattcccctcttctcaaaaacatctgaagtatgaaagttgtctttaaatagtaaaagcaccacaatctattaacaccacatattatctttaaacttaaatattttagtgatgtcttggacatc

SEQ ID NO: 148539 - DNA, 525 bp, Homo Sapiens
tttttagtcagtgattttagtcatttatttatgtattcattgaccatttctcctcctggctcctgaagccctggagggtagctgttcctttccaactccagaacttggcttggtacctgctggtgagtctgtgcctatcaaatgcggaatgaacgaagtttttagaagtgaggatctcctgagcagcttcttcctgtgactgagatggtggatgaagggctcttctgggacctctgcttttatttccatgcttgctaaagcagccagcacatggctgtacttcagagaacttccccatctacattcccattttagggctgtgctgtttacaacagcctcagatccaggttgcaaggaggggaggggaaagaaagcacccagctcacagcaggtgtttatgaatccttcctgccagcttcagagaatctaattggtctggttatgttgtgtttaaaaaattaacacattgaattgctaaacccatgttgcattagtgcacaaactatagctcttctctgaaagctc

SEQ ID NO: 148540 - DNA, 831 bp, Homo Sapiens
tttcttttcacaactcactttattttggtgtcagcatcctcctggagcatggctctggggctgtaggatagctcttgtatctctgcttcgactgccgaacatgactttaacttaaatcattcccctgtctgcttcctttcatggctagtttctgaaggaatactctattcgttttatcacatgcagccattttcctcgtgcagaaccacgggaaaccaaagagaaatactgtacactactgagcacctttgctactctttcttccaatatgaatgaaattgctttattattttcagcatatgcctactatcagctttctctgggaaaactgctggctcgatccgtaagcagccctgttcttatttaacagaaggctatgactgtaacaaatgtacaacataaaaaagtcaaaggcatcctgtcggttacacaggacattcggaataacaaatgtacaggaaaacttgggaacatgacttaaagtaatttggtcacacccccatttcatttaactctttctggctcagatttgtcattctgacaggaggcccaagatatagtccattaccacaattgatcatagaaacaacactggtctctcagtcagcagccactgcgtgccagtgttcatcatgctagttcccagagttttagaggattaactttactttctggttcaacccatctgctggggaaggtatggccctattttgaaatgtgcaaaagggagacagtgctgggggtgcccacagtggaaggagagaagacaggcttactgaccacccctatgaccttgaataagtcacatcacctctctgtgcctcttattaa

SEQ ID NO: 148541 - DNA, 397 bp, Homo Sapiens
ggagaaaggtaaagctggtacaggaaatgttaatggttggtaaaaggttttgggcgttcgtttaattctgtcagctttgctataagattgaaaatttttaaaattgaaagttggagagaaagccaacaacattaaacaatatatcatttaaagatgcatatttatgtgacaaaaactaaagaaagtttttaaaacaaagtataaacacacaatttaggagagtggtttactttgggtgaagcagggacttaagatagggaaaggaccacataggtggttcagtgtgttggcagtgctctgatttgtatcatggattcatgagtgttgatttagttctactgtgctttgtgattttcatatatgtgacttatttgtatatatcaaacattatattaaa

SEQ ID NO: 148542 - DNA, 471 bp, Homo Sapiens
ccagaaagaaacagagaaatatttactttaaggaattgctcatgactgtggatacttgcaaatctgaaatttgcgggagaggcgggcaggctggagaccctgggaagtgttgatgttgcagtcttcagtccaaagacagctgaaattgaatccacctttggattcatcttcatgaggatttcttcatcttcgagggacctcagtgttttctcttaagaccttccacctgaggttggtgttgcacttctcatggtgatgggcaggttctcacaggctcctcacagcacgccatgcgggtggcagacaaggagaggacccttctgcccgtctgctcatcttgcaggtgggaagtctgagccatgggttgttctgagcagcatcctgagcttctctcctgtctctacctccacaccccgaaggtaggcgccatcttcaaaatcctcatcatctcatccttgaggctattttcca

SEQ ID NO: 148543 - DNA, 529 bp, Homo Sapiens
ttttgcagaataaagcagtattttatttctatgagatgggcactgaaaccaatacacaacacattcagagatcaaagctaactgtcccatattcttgtctcatatcttgggtgtagcttccttttatcggggccccttctggcaagcctctgaccaggttagctagacattgagaagaagagtccagaacttccacctccatgcctccattccagattacctatggaatcttgaaacaactgcgtcattctatagtcaatagtttcaattgtctgtagatgttatttatttccagaaaactatttcgtttcattggcagatcctttcctgctttcccatacagtgatggatgtattataataaaaaaggctttcctaatcagtgccaatactttccagatttcctgaggaagcctagaacttaaatatttgcaaatacatcagatgaacatatggttgccagttgttactgctatctcattttctttctgcttttgcaaatccgtctcttctcgcctcattttttccag

SEQ ID NO: 148544 - DNA, 346 bp, Homo Sapiens
ttatgggaaattcattttatttgacttttttatttgtaatatcaactatggagcagagcacagtttgcaaggtgttccctgacagtctcattcttctaaattattaatgccgtgctgttgatatattgtcagccttgtacctacattctatgaaaatgagttttacagtaggttgggatttataacaaagcttgacatatgcagctaattcacctacacagtcctgtcagttttaggttcataaataattgatactcaaggcttgaagttcagctactgttagtacttcagctgttaaatttcagcagcataatggatgaatatttgtttataatttctgtacatg

SEQ ID NO: 148545 - DNA, 672 bp, Homo Sapiens
  misc_feature (325)..(325): n is a, c, g, or t
ttcatttaaagtttttattgcaattttgcataattttacattgattccaagtgaaaatatttgtattgggagtctatcaattacacacaagttttgggcatataaaacagttgctttaatttccttttagtgaaataagacatccagtgtttctttctggatttacataaaatctgtcaagctaagtgttctgcacatgtttattgacccacattgtagaagtgctttgtatgatactgaggtaaacaccatcctgacaaatctgtatgcaggaatacattttcattcacagggggggatattatccatagccttaaatggaaangctgcctgtcctttattttgctcaatcagattccaaattccttctaaataataatgaacaaaacaataaaagaagcaatttttgaaccaatgataattcttactgttcttttcaaaaaccaaacaccactccaccagattttctgctacccctacctcccactcttagtaatgtaggatgcagagctgaattttaacatttacacagaaacatttgctgcacactgtcacattgtaattggtagaggatttcatattttccttgatagagtttgcatattgtgttttcaaattgtactttaaaacatttgcaccccttgaaacatggtagttaattgggttaacaat

SEQ ID NO: 148546 - DNA, 740 bp, Homo Sapiens
caccaattcatagcattaattgacatttccatttaaaatgctaggaaagctgtataaattgtaaacatggaaaccaaatacttgcataaattatttcaaaaactctacagcacattagaaaacagtgcagctattgaaggatagaaacataaaaccgacaaatagaagggaggggccgattattaaatcgtatacccatactgagatttcagtgcctgtttgaggaccagcaaaccatgattgtcaagtttaagttgcagtattgatgccacagttggcctcaatttgctctgcacatttcgtacattaacgctcataatctagggatgagtgtgcaggaagagccagaaaaacatggaccttgacaaaggagggagagacaagtcagtactccagggcagctctgccgagcaacctttcctattaacgctagccagactccctgcgtcccagagatgctccggaggagggcaaagtcgagggcgttcccactccccttttctgaaacaagtcctctggtgcttagagcaactgaatgaatgggtggagcctcagttcctctagtatctccctcttctttccccacatttgcaggaggaacagtacagcatatgcgacttgaacttggccctgtactattcccaacttgtacacttagggagtcaagttatgaatacttgaaatctggtaagtacaggaaagactattcgtgatgctccaagtagcccagaaaggttctg

SEQ ID NO: 148547 - DNA, 541 bp, Homo Sapiens
ttttggcctcaaacaacaacactttatttagtctatgatttgggtcagctaggcagttcttatctgcatgagctcagctaatctctgtggagctctttcaagcatccttagtctgcttttaggttggctggtggttggataatccaggaagtcttttccatgtgtctagtgtctagttggctgttgatcagggcaacaaagccatctggaccatatgccctttgttatccagcaggcttgcttgggcttcttcacagagttgtagggctccaagagcatcaagaggaagtaagtaatcacaatgtgcaagtgattttcatatgtctgtttcaagtcacttttctatagtcagcatggtttgctgagtattttaagcccactattgggactcgatgcccagaaatgaagattcctctcaaaatattactgcttattggcaatgcacctggtcacccaagaagttcgatggagatgttcaaagagattaatattgttttcatgcctgctaacacaacattcattctgcagtccatggttcaag

SEQ ID NO: 148548 - DNA, 461 bp, Homo Sapiens
  misc_feature (187)..(210): n is a, c, g, or t
  misc_feature (342)..(355): n is a, c, g, or t
ctcatatatgaagcaaatttgttttaaaaccctataaaacagcaacattctctcctcagaccctactttttacaaagacttggttgttaaacatttatcagtacaccactccataaatccttgcatttgtcattattattgcctatgggaaatatatatataagacaaacacatccaatgcgcgtgnnnnnnnnnnnnnnnnnnnnnnnntactcaaagactacttttccaacaagtgcacattttaaaactactctttggcagaaactgtactagtattagaggacacgaacatgacttaaggaggtaccctgccttatctgcaagggagtatctagttgnnnnnnnnnnnnnncaatattgtgaaattttcccctcatctttgcctcattttttcctgtgagtcatgaaacaaatatttcttgagaacgactggtaattaaacaagtatttgcagaaaa

SEQ ID NO: 148549 - DNA, 549 bp, Homo Sapiens
  misc_feature (49)..(170): n is a, c, g, or t
aaatatgacttcaaattaatattttccttctgggtacataatttaaaannnnnnnnnnnnnnnnnnnnnnnnnnnnnnnnnnnnnnnnnnnnnnnnnnnnnnnnnnnnnnnnnnnnnnnnnnnnnnnnnnnnnnnnnnnnnnnnnnnnnnnnnnnnnnnnnnnnnnnnnnaaaatcattttatattgtaatttgacatctatgtaatgtacaatgatttaaaaatcaagtcatttttctcatatatagcaaaaattcagatctgaaattatataatgatactaccataatcacaagaaaatttacaatttcctccatgccttctaaggaaaatatacctaggtaggttgcaggtttttggtttgctgagaacgaagtcttgttcagggtcagggtgatggcctttcctatgctagatcacagccttatatatcacgggtaaggaagagaaccccagagctaattgtgctataaaaaaagtagtgtggggagagggcaggaaaggtggaggtggggttcactggtgaggagaggagcctggggttgcttg

SEQ ID NO: 148550 - DNA, 577 bp, Homo Sapiens
  misc_feature (103)..(132): n is a, c, g, or t
ttttttgaaaggcaactagcaatttattccggagagggagaggtctcactcttccaagtctttcatcaggctgaggttgcccttttcttctttccgttgttgnnnnnnnnnnnnnnnnnnnnnnnnnnnnnnaactgctttgagtcacatttaagcaagacagccaaaagctccaggccatcaggagacggtaaacaacagaacttatgataaaatgcagtttcttttcttgagcagagggccccagatagcgggccagctatggcgaggttggagtgaggcctagagaacgtgttaacatctttattaacaatcttaatcttgcaaaggtggtaggggtgatgaacgacaagatgtaacagccaaggccacctggagagcacagggctgaaagagcattgtagtgggtggtgtgtaagccttggtttttccagaatagaggctgaagatcatccaggaggctgtgagaggctccagggaggtgaccggtacagtgtattgggcagcttattagtggaaagatggcagcaacttggaaggaattcacagaaccagggaaagccgtcaaaatgtggag

SEQ ID NO: 148551 - DNA, 735 bp, Homo Sapiens
ttttttccatctttttatttaggtacaaccctaaagaatctgggatgtcaataccgggcacgcgatccattcactcaagtaagccatatccagcttatgcggatgccagctccctgctgccccagttaagaattgagagccttgtgctgaaattaccaggagctgtatcttcactctgtgtctgtgaataaaaggaaggagatgcataaccaagtttgtgcgggcatgagcctgcagggctgttcactgccaaaggattcaactggaactccagcatctaatgcttcttttcacatcttcctggcagctcagtgtatttgttggccctcccaaggcttgacaaagagcacatgtggctgtctgaagcttgaggtgcacacagaaagctggcactttcttactttaattacacacatacttggctttgaaatacctctgtgtatttaatgcagaaggagttgtattttaggttttaagcaaagaatgctgcaccacccaccgctttaatcttccctaaccagaccccaaatcccacagcagtggttcatgtagtgagataagccgtggcaacacatttatgaagccctggttagactcaatgctatttttctcatcatcttgctcagtcaaatttaaggtttaaaataaacacaggggaagctgcagcgaagtttctggagcaaagggtaactataggtgaatgaccatggccggctgcttttagatagctccacg

SEQ ID NO: 148552 - DNA, 363 bp, Homo Sapiens
tttcacagaaaaaggggagtttattactttaagctaattccagtagccagtgtatcagcatatattttgcacctgttcccaggtccccatttctataaggagacactaggagggacagatgatacatgcacatttagtgggttgtagtccacaggaaagagacactgagcttaagaaacatgaatctttagtaatgagcaggaagcatttctgctttttgctctcagagaaacattatctgggcagtaagcatgtgtgctctttgctcccgtgaagacactatctctatgtaaatatgccttaaaagatagtccaggacaaacagcagtcagtgcttctgcttgtaagacatggagacatcag

SEQ ID NO: 148553 - DNA, 382 bp, Homo Sapiens
cagttggcaagtaggtttatttagtactcaatatatgtaagcactagggattcaggggaaaacaagatagagaaagtctgccccgttggaacttaaatctcctgactgctggtgaattcataaataagtgaatcctgtagtataatgtatagttgagtatagtccgcttgagcactactttgtggaaaatcttctgactttaacatagtcttaaaatcctaaactgtcaggaactttccaggttccttcagctaagtaaggtgaggcacaccaggcaaaggaacagcagagctttggcaagggggagcagaaataacacagcattgagcaggcttccattataatcaataccacatatctactttagaaaatgatggtttca

SEQ ID NO: 148554 - DNA, 333 bp, Homo Sapiens
gggacttaaataatataccgatttatttctctgtcaagtaacagtctagtagtgagtagtccaggttggtggggcagctctcctatcttcagttagtcatttgaggacattgtttcttccatcttgttgcttcttcaatccctatggtgctattttaactggctgaaattagatcaagctcttccatttccattgatgagaactaatcacatgaccataactggttgcaaagtaggctgggaagtggaggctaaaactgaatatccatatgcctagctaaaattccactactagggaagaggagaagaaaagatttctggtgaccactagcag

SEQ ID NO: 148555 - DNA, 705 bp, Homo Sapiens
  misc_feature (668)..(668): n is a, c, g, or t
tttgaatttcagataaacaattttaaaataatgtctcaagcagaagttggaacatacttatacccaaaaagtatttgtttatttgtaattccaatttaactggcatattattttgtattttatttggcaacctagaatgggggtaatagccccccaaatcgctccctttgttaattggtccctgttttctgtcccccaacccctaaaggcagcagctgactcccccaactaggggcggggcctgttagggtcaggcagtgcctttaacccagacgctgagcaggagagcagagagggggtgcttcagcctgaaactaccccttccccagaaggctggggtcccaggcgggcctggcacctgggctcagaggctctggctggatttgccaaactccctgattgtagcatgtttgtttctggtctggggagctgttgagtacctggagctgccctcttccctggggctcctcctggcaggcggcttccgaccctgccctcaggtgggctggccctttccagggcaggagaaaaaggggaacccaccatacctctccagaaaagagggaggcgcagcctgggagtgggggctcgacccaggagcgagaaagaggaaccccagccaggcaggacccgccccagaaggtcactgctgttgctggcagccagtnaaaagaggatccagaaaaggagagggcttgtttctgg

SEQ ID NO: 148556 - DNA, 449 bp, Homo Sapiens
tttttaaaccacaaacatttatttctcacagttctggaggctgaaaggtcaagatcagagtgtcagcatggtcaggttctgatgagagctctcttcctggcttacagatggccaccttctcactgtgctcacatggcctttaagaggagcagggtgagagggccatgaaccatgggcagtggcagaagtcgaggaaagccttggcatctccagtcacgttcacagatgacaggtaggtaaaggtggtgacagaaaagacttccagccccttcaaaacagccccgcaggagtggcacctcctcaggcatttccccagccgccagcctcagtggcttaatacagcaaaggtctttttcttgctcacatcacagaccacatgggatcagcagaaaggggggatgaggaagagttgttctgctccatgcagtctccaggggcccaggcaccct

SEQ ID NO: 148557 - DNA, 705 bp, Homo Sapiens
acagcacctgtttattagctcacaattctctaagtcagaagtctaggcacatctgggttctctgcttgggatcccacaagtctgaaatcaaggtgttggccaggtgtgtcctcatatggaggcttgactagagaaagatcaacttccaagctccctctggatgttggaagaattcattttcttgtgaccatattagcaaggcccctgttttctcactttctgttggcaggggaccactctcaactctcagcttgtagaggtccctcttgggtcctcctcttgtggccctctccacacatagcatttggtccttcatgggagcaccagctcttctctctgaagtgaatcctgtcctgatcatcacctccttgctgacagggccattaagcgcagttcacacaaacaaaccacgatgccttgaggttgagactgggaggtatgttaagggagcatggagccagccattctgcagatggggaaactggcacagtgctgaacagggctagtttcttcaaagccaagaatgaggtgagggagcaagtatgtacattttcatcaacttgccaggcgggcatctcaggttcaatgaggactagataggaattccatccacaaggctgtgtctgcttagttaaggtccaaagaaagagctgatcacccaaaaatcccttaccaataacataactttatgttctatgacaatga

SEQ ID NO: 148558 - DNA, 469 bp, Homo Sapiens
ttttaattagactctcgttattatttgaaactaaaaatagtttgttttaagattgatggcgtgtttgtaatccatagcagttttctcccttccttgctatttataacaactctggtttcctctgtaactaagtctgtctcctcctataaaagaggaagtcaggctaagtctgctcctgagctaagatctcctgagtctgcaccccaggagaggctctctggagctctgagctcctgttgctgggcagaactcggcttagtctccaggtgggcattggaagatatggctggactatatgccagcaggatgggctatgcctgctctcccatggaaccatgcatagctgctggggtgtggctgggtattaggactggaggtccagaacgctgtatcttccactcctacaagttttgcttaatgcttagagtttttttgcaaatgccaatgcccagtgctaaccttggttctc

SEQ ID NO: 148559 - DNA, 514 bp, Homo Sapiens
  misc_feature (504)..(504): n is a, c, g, or t
tttcagagtatggttgggtatttatttgttttgttaccaagccccaggaactatttaaccaggcactatttagttgcattccatttatacatttcattaatgacaataatgctatcatagaacaacggtgtgctcagttgtggctgaaaagtatagaaagtccagtagaatcttattctaagttgctgtgctgaattcagttggccctgggccattgtcatagaggtttaattattaaataaatctaatttccttacttaagactggctgtgatagaacagaaacttagtaacacctgtgaaaaaaaagtatattggacaacaatctgggttaaattcaaaattaataaagctatgtgatattagttatgtaggagaacttttttccaaaataaaatttttgaaaacaaaatgattgtttagccctaaaaatgttcaaatcagcaaacatttactcagttctatgcagagagtggtgtagaagcccaatgaaggactgcaaatnctgaattgta

SEQ ID NO: 148560 - DNA, 425 bp, Homo Sapiens
aaattttaaactgctgttttaataggtgtctttaattataaattttgatgtcctcacaatttcatttatgctttattatcactataacaattagagccattaatttttgtaattatgctgatcgtgttgatgacagaagtaatatagatggtgattctggcattgccacccaaaacgtttcacacaaatcaggtgctgcactggaccccggctcctccgtctctgtcggggcagagctggacgccggggattcttccatggggcgcgggggcaggtccgcaggtctcattcgccgaagcccggaagaggcaccggccccaaggctggggagactgagacagaggaggatagagagggagaaacaactgagacggaggacacggagacaagccccgagaagcgaagagcgtgtcgactgccggaaa

SEQ ID NO: 148561 - DNA, 686 bp, Homo Sapiens
  misc_feature (442)..(442): n is a, c, g, or t
  misc_feature (501)..(501): n is a, c, g, or t
  misc_feature (589)..(589): n is a, c, g, or t
tttctggtccaagcattattttattttaacatactgcagctaaggttagctgattaaacacccaaatgacaatttcttaaatagatttttactttagcccatgaatgagaactctgttgcatgtgttggctgggcaattctccctacagtcacaacctggtcacaaggtaaaaatgtgttttctacatgttaaatccttccctctgccaatttccttgtatgtagaaaatacatatatttttttcacttaaaaacattctaaaaaattgaacttggcttctgaaactagcctacaaaagggagagcagaaatgaaactttatgtgttgttatctttcatttacagatgaagaaatgctcatcaaaagtccaacagaaccagaagtccatgtcctggagaccaatggttctcctgtgggcaattttgtccccataaggagacncttagcaatgcctggagatatttttgtttgtcacaactaagagggatgataccagcatnttatgggtagaggccaaggatccagctaaacatcttacaatgacaggacagcctctcacagcacaggattatcctatccaagatatcnatagttccactgttgaaaaactgtggtctgaaagataaactcacactttttatgctgcatcaagcagcccttccataatgtagtgcaagcattagga

SEQ ID NO: 148562 - DNA, 676 bp, Homo Sapiens
tttaaattttaaaacagaataaaagattatttattggtttttgctaacaatgattactattggtttgaaaaatgaatctggataaaatgtagaataacatcacatatttaagctgcatatggatcaaacagggaaaactctatttctgcatatcagatcgtttcttattttagtcacttaattcacagttacatagtattcatcatgaggagaaacagacagagtgtgaatggctcactgttacccacactattcctggaaaaacaggtcctaaagattaaaagactcaactgcataaataaaaggcatgatgacattgttattacaggcaaacattttttaagatgccatcactgaaaatggatgacctatactttggtaagaatgcagagaactgaaacatcactttgggggcgacataaatgtggcaaccagtatagaaacacatttggcaatatctaaagacaaaggcataacctatgacccagaaatcctacctcttgggatatacccaacctacgtgtatgcacaaaacactgcaacactacatgtacatttgtttactaagtgatatatccaataatgttcataatggctctaattcataatggcctaaaactggaatacttaactatccatcaacactagaataagtaaattgtagcatattcatttg

SEQ ID NO: 148563 - DNA, 457 bp, Homo Sapiens
tttgaagttggcactattattatccatttattagatgaggaagctgagtcattgagatattaagtaatctactcaaagtgccactgttaataagcatggggccacaatttaaactcaggcgtcatgatttcagagtccactgaaatcataatgaaaggttttcagatgataaaaaacccacctcaaattggcttacataaaaagtggaacttactcccttgtatcatggaccagtccctggcgctatcccagtgtgccgtcagtatttggtactcttctctctcatctcagatctcgttctcaggcagcctctctgtgtgtggtgaccgcagcaacactgggtccacatcattttcagcttcgagtttagaagacagagaggagcttgtgccgataagtctcaggactgagtctcagtgatcccagtggggtgtctgactcataactgaacatttca

SEQ ID NO: 148564 - DNA, 772 bp, Homo Sapiens
gcttctgggagcgtcagagcaacggaactgcctctgcttcccaacccacatgacagaaaatgcggtcaaatcttcatgagcctttcttccaacaacatcagccactcctggaagttctaaaactctatcactagtatggaccagtggtcactctttggacccgtgtgccttggccacaggagcaggatcatctggaacctggcagcactctctgtagtcacacaggagaagtgagaatttccagaagaattgccgtgctgggcagtcagaaccacagatgcccgtgccagaagctcaccgccacatctctgccctcagtacatctttatcttgcacgacccaagacagacaagagcaagagagagccacttaagcccacctttcccagctttcttctctctccactttaccccttttgcccctgccataaccagcacccacaggacacacagactatgcacccagatgtccacagtgactgggcagggcatgaaattaacgaagcagggtgaaccccaggcaacagggcctggtggggactgcagtgagctttgtctgcacccttcagaggaagtagctgctgcccagctccagccctgggggaatgacgaccaaatgttgctagaccttcatacctttcaagagaagttggaagtgctgctttttacatgacatctcctgatgttcaacagttggcaaccgatttagttctcaaaaaccaccatattagccaaacaaaataaatgtgtggtcaaattggcctacagacaaa

SEQ ID NO: 148565 - DNA, 739 bp, Homo Sapiens
  misc_feature (420)..(451): n is a, c, g, or t
ttttttaactttaacacataacattttatttctctttcattcaaagtttactatggatctgacagatcttccaaggaggatcctttccaggtgggcgcttaggaatttaggctaattccctcttgtggctcttctgtctcaaacgtggtcaatattattgttgctagcacgatgtttaatcaaaagacaccaggaactttcaacttcacagtaatgttttaaaaggttggagatttcaaatgcacacagtctttgactctggctagcaggctgctgcagagaaagtagagggagcaaactccaggggagagggttctgatgggatatggattccttcatagcaattaccacaagcaccagagctttcaatttaattaaaccaattcttcagttttgggatccatctctgggcttagttgnnnnnnnnnnnnnnnnnnnnnnnnnnnnnnnngtaacgttcttgcttcttcagtcttgtatctgagtgcagcgggatatcttggggtgtggcttgtccagcctagcatcattcatcaggcagagaactggtgacactggcagcagcagacactaattgataaatagtgtggtgtgtctgcattttcacgcacagatgggcctgggcacatctggattgcgctggtgcttctggcactcccacatgtgcacacactgcccttgttcagtccctgcaggaaaagcacagattgacatatcattatcatccagagtccacagt

SEQ ID NO: 148566 - DNA, 420 bp, Homo Sapiens
tttctctcgcctttttattcctgatgcacttttgtcccctctttgtccaaggttctcatcacattctgatatccccactccttgctggtttccccgagttgctgggtgcctcttgatgaaggcgcctaggagacagagcttcacacttgtccttgcccactgccaaccgtctctgacgggcatcaaaaaccacatgccctgcctgggtgcctggtccagggcagtgggacttccagttgatatgggtaggcatagacatctgacgatagttctggtagcctgaaggaactgtatccacagggcggtacgccccgtgctggctgcctgcccgccaggaggatgactgcagctcaattaatacaggtacctctgagaaggtctgcaggtcattggagaccacttgggccttggaagggcagg

SEQ ID NO: 148567 - DNA, 551 bp, Homo Sapiens
tttctgtttattattttttttaattacgcaagttttgcatgattacaatctccttgtaaaaaactgaagctttatgaataggcctgggactgtcacttccatttctggtctccagaggtgaccttggttttcagttgatgcaagttcatctggcacatgctgcaggtctctctgtgacagaatgtccgagctaaggagttttagcttcttcacagggtcattggcaaccaggggctggggtggagctgagaatttctacaggacttattactcctttgtgttttgcaactggggttgctcacttagataataagagttgtgatttgggagtgagggaaggagttgggggtaattttggcgcaaggcctgtgacactgtattgtcagcagctgtcattaagcactgtgccactggaaggtagaagggagggtgcagaaaagctgatgggaggacatgaaatcccatctttatttgcttatagataggcctggctggggtagaaatgtgctcgctacaaacagtggccctcttagtttctttcgtgtccccac

SEQ ID NO: 148568 - DNA, 626 bp, Homo Sapiens
aaaggtaccacctgcaatgaattttatgatgcagaatagtttcaggaaaatggagaaattttcatcttgctgaggttgttttcatcagcagttgaaaggttgcacagtttcaagactaagcaatgtaatttcattttttagcacctgggaacaagtcagtgacttgatatcataggaggtgtcttctccattttacgaatagcagaaatgaggctctgggagttgtagtgacttgccccaggcagaacccagactcaagcttcctgactgcacacatgcaggcacttggcggaccactcagcctcttggggcacttgaaagtcttctggataaacctcctgagatctggtgcaccctgacccaccagccccattgttgaaaattccagattagagatctttcatttggttggggcgttgggtctgagttaaaatgcactgcccttggaagaggtggcacgttaggcttccattggatactgagaacatattgattagcctccatgctcagaatgcccctcacaaagtggagacggggggcttaggaaaagaagtcagttttcttgaggatcaggaaaggaaaggtggagtggggcaggaaaccccagaactggggcattgagaaca

SEQ ID NO: 148569 - DNA, 460 bp, Homo Sapiens
tttactgcttataaatgggtttattctaaagatgattaaaagctggaatatgttttcctgcagaaaaatgttgtcactagcaatgacatttgcaggctgcccagaaaagccacacaccatggtgttacctattgaatacaggaaaataagaaggaaaaatacttctgcacaccccagacgtctctgatcttcttgaatgtcctcctcttcccatctttctcccaaccagaagccattgtaagccctcaaggaatggtagtggacactttatcatagcagttgatccggtttgtgagggagggcttttagaaggcgggtgtgatgtgtctggtcattactgtagcatttgccacaaggcctggcccaggggtggtcatccagtgtctgctggccagctgcgtgaatgattgatttaatgaatgaaggaaggaaagagcagattagactagggaacatcgtc

SEQ ID NO: 148570 - DNA, 1470 bp, Homo Sapiens
  misc_feature (118)..(118): n is a, c, g, or t
  misc_feature (190)..(190): n is a, c, g, or t
  misc_feature (1101)..(1101): n is a, c, g, or t
tccataaattttaaaaaggtccccttttatccccccaaccaaggaatgctctttccatttcccagttatatcaacactcgctcaacggggcccaaatgagttaaagtccagttattanaagaaatttgttccccccagtacatggttaactttccaaatcaccggtcaaatagaacccctatcaaacttntcccccccacgctataaaagttactattagtattgacggtcagacctacccatgattccttccatttggttcagatttccatttcctaaatcatcctgtcaaggaaatctcaaaggaagaaactttagtggatttcttccaaaggctgtgtaattttccaaatgattttccctctggttgcaaaagcctgttcagtccttcaatccttttttagtcgtttagcttttgcaatgttttcttggcgtttttgcttcttcttttgctccttctccctggcctcaatcatcttggccaatttccaagacagtacagcacttgctaggaacagtggagtaagggccaaaataacggttgtaaggaagccataggggtcctttgcagcccattccacaacatactcagcccaagcctttatatcaaacatcttcacagcagtcttatgaaaactggggcttatgcttgagtagtgatcccttaactttgtcctggtgttattagtgacccaatcacgacttcagatgacccttggtagtctgtcttcttgagttctactgtacacatctgagagacggtttaaattctgtacaattggcctatcggggctgcagacccacggaggccacgttcactcctgcccgtcggccttggcaagcgcgggccccttgtcgcgcagagcggagggtcctgggagatcctgggttggcccagccacaccttgcgccgccgccgtttctgctggacaccaggagaaaaccacggcagctgcagccaccaacttcccctacatagccccacgggatcggatcccactccccactcaccgccagaccggaagcaggaaggcggaagtcgcggcctttgcgtcccgcccacaggcgacccgagccgccagccgggcgtgacttctccantcatcttcctccacgtgattcgtagagacctctggacatctgagcctaagcagggccactaaatgagagagaatcccatcactgaaaagcaacaatgaatatattaaggaccacaggagagatagaagaaatattgcaactgaagctgctagatggttatgatgatctgaataggtgtgatcttgactttagcgaattaacagtcatgtaggtgaaattatcttggactctccagacaagaccagccaccagctgaataccagtgggtgaccccagtcaatcacatggaacagaagaatcactcagctgagccctgccagaattcttgatccacaaaatcctgaagtgcaattaaatgatggttgtttt

SEQ ID NO: 148571 - DNA, 645 bp, Homo Sapiens
ggagatgaatattttcttatttttgtaaaaaatgttttccagaatgataatccaatcaaattttaacacttggtgaaaaaattcattcagcttaactcagtggcatcaatagcaaatcaacccactggctaaatattgaaggagagctcagctcatcaggaatgcatgaggaacatccagttacctgtaccccctgatagagcaaggttctggtttagctatcctctttataacaaaggtcattaaacgtctgaggagcagcttaaaattcctgaagtttgaaacccactgtagccacctctggtctttaacgtaggcagactccatttccattcaggagcggtgtgcctgccactgcacagctcagctgtgtttaacatccttcaggacctgttctaggttctccagcttggcttggagctggtgtttctccttcacggccaaatcgcgctctctggtcacgagggtgagcgggtggttgagatgcacatactctgccttcacctgcaagcggaagggatggagacaaggaggttatcacaacatgcctaagagttggtatccgttgcttcctctttaggagcaaaatcttcaatttcctcctagagaatccttccctccctccttctccatcatggactggcc

SEQ ID NO: 148572 - DNA, 348 bp, Homo Sapiens
tttatgatttcacagggggattttattacttgcaccaagtaaggaggacactagggatagtcccaaaggcagtgcctccccaaacaaaggtgaacacccgggctagttagctgagtcattgtattagaggtggaataaaggcagtgcaggcacatttatcatgcttttacatacatcagatgtatagaaaatggcacataaactacttcctgggtggggattttagtatggtagtgaggagagtttgccagaagttcatctccagtttagtcatctctggacccaaccactgggctgagcttctttctggaacttcttgaaacaacaagaactcaaggcgcaacagtt

SEQ ID NO: 148573 - DNA, 535 bp, Homo Sapiens
ttttgaaaattatgatatttgttatttatttagctgaggctaaaataggtattttagtaaaaccaatgagaacatttagagtccaatccatggttgtcccgttgtatgacgatgtggccatgatcatgggagagattcatgattgatggtgacaaagattctttggcttgctgtaactgcttggtcagactttggaatcttctgctaggcccacctgtgcacttctttgtaaaatgtgctgtgggaatgggggattctgtgtcagagctggggggtcgggtccggtgagatggggatgcggatttagataatagggatgggaagttccgcgtgtgcggcggatataaggtcggtgtagacttggtcgttcaagtgaggcggggtccacactcggtggcccggtgactgggttatcgagtggagccagggcagcccagagatgctggggtcccgcgagcctaggttgggtttccagggctgggggctcggcggcggctcctgggcgccccctggcggccccgactcaaccgccacg

SEQ ID NO: 148574 - DNA, 437 bp, Homo Sapiens
ttttttcagggagagtcatgcgtttattgttcaaaccagggctttctacctgaagagcaggcagtggggtggggagtcacaggtgtctgggtatgtggggccaatgcggttctttgtggggatggacacagggctgtggctgaggttgaggatggagctctttggggctgtagattcagaggacattaaagatgggctgaggtacacaggcaatgaggagaaaggggttggtaaagagggtgggttagggttgaggcgcagaagtggagctgggactggtgacagggatgggaatgaatgggtttgggaacagggtattgagagtggggaagagagaggcaggtaggagtggctttgggattagggagaggatagggaatggggttggaggagccctgggggttgagaatgaggtaaggattgtggttgtggttggg

SEQ ID NO: 148575 - DNA, 487 bp, Homo Sapiens
aaaacaatatctgcaatcaatgactctttttcagaaggactataacatccagggatattccttgttctatattgaagcacaatcatattagtattgaggacaccacctcaaaataaatagtttgctcactaatgattcagtgataagaaatcgctactaatccgcacaccctcatgtttacagtataattaccaataggttcatcatgaggaccctgaggcacagagagatgatcttcctcctgagtcttccaaggaagattcaattctactgttctgagtttgggttccaagtaggtagcacggtgtgcactcatcttgcctgaatgcatgtctcttgaactatatttcaataaaatgccagtatctacctaaggggaacaatatgtccttttttaaaaaaagactgtctttgaagatattattctatttgggtgggagaagaaacaacagatttgtaagttcatgtcttctataaataatttaag

SEQ ID NO: 148576 - DNA, 390 bp, Homo Sapiens
  misc_feature (46)..(46): n is a, c, g, or t
tattcccattttacagatggcccagagaagggaagcaagacagtgncacccaggagcccagcaccaagcccagggctgtttcccctacacctggccatcatctttccaggggtctgggcagtgccagtccaaggggacctaattgtaggcaatgtggatggtttttgtagaggcccagacttctaaagacaggcggtccaggggctctcatgataggagaatgggaatggccaatccaaagaagagaaagcgcgaccaagaactggtattcagattgggtggcgcaggggctctcatgataggctggctggagagagttgcagactgagcccctccctgtccctgcagtcatctctgggcctgcctgagagctgattgtgctgcggccgc

SEQ ID NO: 148577 - DNA, 347 bp, Homo Sapiens
ttttaccatctaaaataaattttttttaattaacatctacaaaatccttacaaaataaacccaagtcagaatttctactttctcaaaccagaattactactatctcatggtgaaatggaagctaacagagtttgaacaatttgtttctggaagaaacagagagacaagtttaaaactcttgtcaggccctaaagctgataactcttattcagatccatttctaactaccactatttcctcagcatgactacaaatccagtcatgatcctctcttcaataaaatcctttaatgtacctaccccttcagaatcaagtccagactcctcaacaggaacacaatccttcag

SEQ ID NO: 148578 - DNA, 706 bp, Homo Sapiens
  misc_feature (529)..(566): n is a, c, g, or t
tttctatttactttttcttttattaagcggaagaataaataaacataactggcctcaattatttaacactaaaaatgttgacattgtagagataaacgtcaacaccaagaaatacgttttccatgttctccttaaaacaaaatagaaagtttgaatgatatcaataattatcccttagaattgggatgtattcaggttttatgcgtgttacatagagcaaacaggctattttcaatttctgtgtttgtatatttacctataattgccaactttctgcaaatgatgtttcctcttgtgtaaataccaactggatttagcaaatgtcatgattattcgtgccacctattagtgaaatgtagtatgacagcatcttttgtgtgcaagacagctactatggggagaggaaggttgtcaggacaaattaaacaggaattctgtactcaagaacggtggagaatctatcttttatgaggcaattcaaaatttgaacactggaagggtatttgatggtagtaaggaattactaccnnnnnnnnnnnnnnnnnnnnnnnnnnnnnnnnnnnnnnggtgtgacattggtattgtggttatgttaaaacgtctttatcttttagagacacatagtaagatatttatgaatgagcgaaaatgatatgtgtaacatgatttaaaatagtattagcaattttgatacatgcacaacggg

SEQ ID NO: 148579 - DNA, 796 bp, Homo Sapiens
  misc_feature (289)..(332): n is a, c, g, or t
  misc_feature (550)..(562): n is a, c, g, or t
gtaaatcattaataaaaattttgcaacatattttattatataaaaatgttcaaattcttaacatggaaaagaattttcaaaatcaacatacaaaccacaaactggagcaaatgctgaatcaaatatcaataaagtgttaataatctcacagtacaaagaacccacaaagtcactgagaaaaatactaagccctcgagatattaggcagtagatcattgtccattccctaccaaatacaatagggaattcttacagcagttattaaaactggccaataaataggtcaaannnnnnnnnnnnnnnnnnnnnnnnnnnnnnnnnnnnnnnnnnnntaaccagaaacatacattttcaaattttggtgaatgtcataataaaggtcaacaaaggggaaagtgaggtaagttgtgtcacaactattatatataaaagaataatatgtaactactagaaaactattagcattataataaaatagtaactgtgttaaaactttaattcaaaaagttagtttcacagtcatttctactatgtaaaaatatacacaatnnnnnnnnnnnnnctagcaagaaatttagacctaaagaagcttcagagatgcctcagaggtctcctcaattcccctagaaattaatctaatgcttttacaaacaaacagcacacacttttatttcagagattacatgaagggtgtgtgccagggacagtctggaactggcctcctcacattatcccaaaccttccttacccctcagctctcctcccctaaaccttcaccccaaccacacacccctta

SEQ ID NO: 148580 - DNA, 809 bp, Homo Sapiens
tttaaaaatcatcattgctttattaatactcctgccactactaggaatataaaaagtaaatgcaaaggtatgcaagaaaaatgaaaattaatttttaaaaatattcttatggttatctatgttatttccattaaaaatactttaaaaacatatagtttcattgttacaacagtatttttcagggccaagatgatgaaccatcagtaaattcattccagattcaaaaggagaacccactagtagtttgctcctccccctgtaacatcttactgtgacagaaataaactcaaattgccaaatcgcagagtaaatatgcaagcttcctttgctggtagaagtctgtgaaatgtgttcctcgggctctttggatttctgaacatgaaattgagtaccttgttcttggatccagctgacgatcaagagaagctcactgttgttcctttagacctaggtgatttatgaagctgatagcagaactttagaatgaggaaagggccaaggctgaagtctttatttaatctgatttcatggaaagtcccctttttcttttggatcataggtgctgtgaagtataaaacttgagctgtatgtcagtttcagttgaggcagtttaataattttacataccatgatcagtttcacaactgattctcttccttgttccaaatctggagaaacgataaatttactgactctggatctcagtaaataagaagcaaatatagaaaatacaccctgaggcatggactcttctattaaatatatgatactatttgttaaaatccttaaatatggctattgatttttaa

SEQ ID NO: 148581 - DNA, 527 bp, Homo Sapiens
tttttaaaaaggtttatttttcactcaggcaaaatgtgtatattgggttggcaagggggttctgctcttcagcatcactcagggaccctgatgaccaaagctccatatgacacatgcctctagaattgccttaggtcaagagacatggtgagctgtgcatagcatgcaaagcgaccactggaaatgacacgtcacttgattacgttcaattggctaatgcaagtccatgtttgtatctgctttgtaaaccagaatatttgtgaataaccctaatgagtcatagaggcagcctttgccattttgtgctaccagatcctatggttattctgttattttcccctgtttttataaaactttcctatattttcgatttatttttcacaaatgctctttctacctctcttctataagtgagcctggctttcttattaatgatgttacctcccatgaaattcttgccaggacagctttctctttttcccttcttttatcgctaacagaggacaaagaaagaggattaatcttct

SEQ ID NO: 148582 - DNA, 259 bp, Homo Sapiens
ttttgatccaaatagtctaggagtttatttctcccatagttgttcaggtaaggacgactagaaagttctgtgtgttcttccagctactgaggttcttcttaattatctttttgacctgccatcctgcagtatttacaaatatttaacaaccagctttccaagtgtacttccaacatgatgaagttttatttttccttgaaccatgtgtattcatatttatgcactaagtgttgctcggtgttcccgatctggatttcag

SEQ ID NO: 148583 - DNA, 535 bp, Homo Sapiens
acaaccacaatcagtttaatgagcttcattcactcccagtctaaatcgggaagaaaaaaggccccgctggaaacacatcctgtctcctcctcggtgaggtgacagtggggccgggcacagcaagggggaaggatattagaaggtgctgaaaagggagagctctcccttctccccattggagggatcaaagcctttatttaatgtggccagagcagatcacagagcctccaggagtgctggctcctccctggcatcccagcctccctgaggctcataggctcacgtggtcccagattccagcaggccagccccatggaggctaagattgcatcctagggagcaaacggtggctgccggaagtagcccaaccttgccagaccacataaggctggagacacaggcagcaggatggtgtgttgagggggtggggaggggcttggcagtgatgcctgggtttatttcttggattgttattttggtgagaggtgccctcaacatcttggataactaaggctgggtcctgcatggaagagag

SEQ ID NO: 148584 - DNA, 509 bp, Homo Sapiens
ttttctgggaataatttattttttaaattatatataaaaaagttgttaaagggagaaagtatgcatctgaaaaggaatacacaatgagaagaaccagtgccgttactatggagagctgagaggtggagaatgaaaaagccattggtctcagttttcctgccatgattgccttttacgagaaggatgatatgccaagaacgggtgcagcattcgctggtgccctggacagcaatctgtatttcatccctgaggcacctggaatctgtaagaatattcaagcaactttagaggactacaggtgaaattgtgtgcatgggggcagcacttcagttacaaattcttccttataaaaaaaatatgttgtggttggaggacacatattgaggataatgtctgggaatattggattccatggaatgggggtctatctgtatttctatgtgaaaaggccaatggccatatcattagctcagtaatgaaactatgttactgcccttggtataatttct

SEQ ID NO: 148585 - DNA, 554 bp, Homo Sapiens
tttgtctgaagaagtttttatttaacttttattgttaaaggacattaattttcactgagtatggaattccaagtctttagtatttttctgtcaacactttgaaaatattggcccatttgttcctctatgtgtaactctctatacacatataagattttgtttaattctgcttttgataagcatgaccatgatatgcctgtgcatagatttcttcacatttacactgtgtgagttttgctgggattcttgaaatataaatatacaacttttaataatttggaggaatacttggctatgctgtttttacatttatgtttatgttatttatttatgttttgtctgtcttattctcgctttccactccctccatctgggaatccaactatgcacaagttggcacttttggtattgcctcattggtttcagcctctttccaacactttttcaaatatatttctctcttctcttcagaccagatcctctccattgaactatcttcatgtttgctggtattaataccttccttggtcatctccattttgatcttaatgcca

SEQ ID NO: 148586 - DNA, 441 bp, Homo Sapiens
ttttgagatcatctctattttattacacaatttgccctaagacctaggcaagcagggtccctagctcaggccccaggccagattctcaggggaccccacacttttgagtgctcttcttgaaatattctaagttctcttcagtggctgggatcatcccagttggtttctcttcagagtactctgtgacccacctcttgatctgtgtggttggccaaatgccctgaggcagttcagggctcatgcctatggggttgtccagggcaacctgacaagtagattgcttctgctgaccagcacagtatttattttatggcattgaacaatactgggccactagaatggtactgattggctaatttggggtgattcacattggatatatgagttcagaactctgtgctactaacagttcaccaccaacccttgaggttgcctcgtgcc

SEQ ID NO: 148587 - DNA, 308 bp, Homo Sapiens
ggcctttctgttatctattgaaattttaggtaagagaataatataaaatttcagaaatgatcttccattcccttctattttattaacaaaagcccaaaccgaaaacccaagcaaaaaacatgaaacattccccagacatctagctaaagaattctgtaggtaaaccacacactttgagaatataagcttcaagaaggcagaggtttttgtgtctgttctagtcctaatgcctagagcaaacttggacacaaagtaagtgatggttcaggaacaacagagtagaggcagctgacactttcttgtaaaag

SEQ ID NO: 148588 - DNA, 754 bp, Homo Sapiens
  misc_feature (97)..(146): n is a, c, g, or t
cagtactttgaatatgtcaatttattgacttctgagctccattatttctgataagaagcaagttgttagtcttactatttctcatatgtgaataatnnnnnnnnnnnnnnnnnnnnnnnnnnnnnnnnnnnnnnnnnnnnnnnnnngatggtttgactatgatatgtctaggtgtggatctctttatgtttaggctacttggagttctttaaactttttggatgtgtagattaatgttttccagcaaacttgggacattttcagctactgtatcttcagtagtttatttttcttctttctcccttctctccttttggaacttctattttgcatatgttggcatgccagttgtttttcattgtttctgacactctgttacttttttaaagttcttttgtttgtttctttagactggataacatctattgacctatcttcaagttcactgattccgtttttcagcctaaacttgctgttgaaccttctattaagttttgtatttgttactgtactttttaattccatagtttctctttggttctttaatttctgtctttcttttgatattgtctgtctaatgaggcattgttttcatacttgttttaaattatttaaaagtggttttctttaattttccaaacacatttatactaagctgatttaaaagttttctctattaagtatgctcttcagatagtatgggccacagtctcctgtttctttgcatgtgttgtacttttttgtcaaaaattat

SEQ ID NO: 148589 - DNA, 501 bp, Homo Sapiens
tttgtcatgttcttggttatatttttattatcaatgatttgtggacattatgcaacaatgctatcttcactgaagtcatcagcatcagcttttcaaagctataagggtgccaaagaagtgcctggactttgtctatccattacaaggaaatgatggcaacccattttgcaaaggtttggatacacgtagaaatgctccatcacttgctacctgatctgtgaggtaccagggaaggtgaaatggccccatttatctgcagacagtgaatttgcaggtttctgcttctctaattgcacaaaatcatggcattgtggaaagggaggtttaccagatgtggagggatggagagtttgattatcactgctctcttttccatgtccctagtcactcctgggtctgagaacttagtgaacttcatcttatttgtattcctgcctccaccgctggctgccatctcatacggaggacctgggagaccttttccatgcctgtgctatttca

SEQ ID NO: 148590 - DNA, 612 bp, Homo Sapiens
ttattcaccagtaagagactttattttgtattcaaataaaagtctaaaccattaaaaaaggcagtgtatgctttttgaaaacttgtcctgagagaggattttcgttggcttgttttgtcatgttgaagcagggtgaccattcaaactgttgggcagaaaaatttctctgccctgcgtttctgctgtgaggagttcttgtcttcctgaggaagcattacagctaatcatgatgtggactttgcctcctgcccagttctcttgctgtgtctgtgcccctctgtgtctcaaggaatgtctctgggtatttacactgactgttctgtgacttagatctggtagatttccaggccccctattctatgcctgctctttgcctaattaacatctactcctctctcagatctcaactcaaacattacacctgagattaaggcaagcacccctctcttatattcttaccacagtaaatcatgttgcaattacttgtttcatgcttgtccgttctgccagagcacaagttccaagaaggcagggtctgccttgttcacgggtagaggtccagtaactagttcagagccttgcatatatgggggatcaagaaacatgtttgag

SEQ ID NO: 148591 - DNA, 587 bp, Homo Sapiens
ttttcaaagttgcaagaaatagtttaatctaagattaataaaacagttactataatgtctcccattcaccacgcatttggtgcctgctgtctttaattccgaccacgcctgcctgtaggttgtggctgtctccagctaacctgggaaagagtggctctgggagggaagtgacttgccgaggtcacgcagttccagcccacgaagccccacgtgtgcgcttccttcccctgctcctttgtttccggtctggtaaatggggatctttagtgatcttgaggcttctggcacgttcttagtacagtgtgttcctatgcgccttgtaaagcaaaagcaactctgaacttcttagctcgcgtcatcagctgttcccaggtgatggcacctgggcactcccagcagggctggaggtggaaaagatggacttttcagtgcatttaccagcaggagccgggctgcctggaggtcaggagagtaaatcacacctcccaggcctgagagcaggaggcgcatagacagcagggacagccgagggcctcagaggaaccatcgctggcccttcaccctgtttagaaactgaggccaggctg

SEQ ID NO: 148592 - DNA, 578 bp, Homo Sapiens
  misc_feature (197)..(197): n is a, c, g, or t
taaatttaaaatttttattttgtagagatcaggtcttaccaagttgcccaggctagtcttgaactcctggccttaagcaatcctcccacctcagcctcccacagtgctggtattacagttgtgagccactgtgcccagcccaccaacacaattttgacttattattttttaggaatattcaaaatatatgagttggngaaattttgtgttcttaatattttgtaaaaccagttggtctcttttggctcccacatcatatttggaagtttgccatcacattctgagaagcccacattaggtggcattaacctattaaaaaaaagaaagtccctggtattttttattactccaacacttgaatctctcaagtagaacaaagaatcgtaagacaatttgtctttgcttttataatcccgttttctgaatttatacaagcagttttatgaattttacatctcttgttttctgaatgtatgacaagaaattaaaagttatagggaaagtatgaatttgttctacttccaattcccagagtttctcaaatgacatccaactttataattaaggagtcaaactgc

SEQ ID NO: 148593 - DNA, 600 bp, Homo Sapiens
caattaataaaacaaaattttattcattacctgttgtaacattaatatcttaccaggtacaaccatggttatataagaaatgaaaggtacaatccctgattttgatgagctctacagttagctgttgtcttgtatagatatttctacataagaaatctctagagacaactagaactgggctatgtataaatgtgcatatagaattcagtctatagttcagagccctttgttggttcttccttctctgactcatggcttctgagaaatgataggatccaaagttctgtctctagttttctccactttaggtctgagaacaagaaacaataactgctttccttagagaagaaataacatatagctgcagagggaataagatgtttcctagttaggaaggaaggaaaggtgattgtttagagtttgcttttccgaggatactaaagaatgtggtttccctgacttgcctccacctcgtcctcctcaccccaccctttctatgcctctccctctttctatgttgaccacatgactgggcaccctcttcatgaaactcttggctctgcagaaaaaagaagccctaatttatagcagatgccaatt

SEQ ID NO: 148594 - DNA, 538 bp, Homo Sapiens
gcaggggagcaatagaggacttgtaatttatttctttaatacagcagcagtttgtcaggagtgtcacaaaaatgtggatttggctttattattgtttgcacactgctcatcacaaatgaatacttcatcctaaggcagagaaaacagaagaaatattaacagttatttaacttgaccactattatatttcaaggaactgcgttgttaccagggtttttagacaaaatacagaacccccagttaatcttaaatttcagatgaataatacatactttctttccctagcataagtatgtcccacatatggcaaccctagtggtcagtgttattggtttaatgctgcatgctgtaccagcagagtgagaatatgggtatggtagatgtgatgttttaaaatctgcttaggtttcctttgattctttggtagaatttatatgaaaatgaattcttaagcattctgtataaatctctgatcagctatccagaaacaactgaaagaacaaaatataggctgcacttaaattattctttaaggcaa

SEQ ID NO: 148595 - DNA, 659 bp, Homo Sapiens
atttaaagggctttccagtaaaaatcggaaaacctgctagtcaaattctagaagagctgtgacactggaaaagacatttttgtagctaagttcatgaacaaattcacacgctccacactgccgccttctcggcctccctttccccagccgatctccatcacctgcccctgccctcaaagcaccgagtcccccagggcctgtgcctcagggcagctgccaggactgccagtccccaccaggggctgtctccctccctgggggacacgctcagagctgcactggctggggaggctctgggcggaagggtggagagacaaagaggtctttgtgtccctctggctggatgggaggacagacaggtcagccaaggctgtgtgactggtgaggcccacccaaggtcccagactcctgccaccacctacctggggccctgacatgtgcaagacatctctgtgtgcctcagtttcccggctgcgaggtggggtcaggccacgcaccagcctgcctccccacctggcttcccgcccggcgtcaccagccctcacagcttcatgttcctgcggtttaccactttggtgtctttcctggccccttccccacgggcacgtgaactcgccgcatccccagtgctttcacagactggtgagggctgggaaggg

SEQ ID NO: 148596 - DNA, 760 bp, Homo Sapiens
gtatttaattcatttattcagacctatttcatttacatatccacaattttctgagcaaagtatttgtttatttatgcagtgacttctctgagcactagagctgtgaacagacagacctggcccaggccctcagagggtgaacgttctggtaaaggaggcacaataaacaaggaaataaacaagattggtgaagagggtgaaactgctctacaggaaataaactgggaattgaaagagcaaagggaagaaaggccacagtggatggggacagcctctctgaagaggtgggctttgagctcaagctgagcactgagaagtttccagcccagtaacggccatcaggagatcacgccaggtcaagggcacagcaggtgccaaggcctggaggtaggactgggctggacaagtccagggaacagagaggacgccaggactgaggacgtagggagagcaggttgcagggatgcaggaaggggtggggggtgtggatcaggcagaacctcctgggacagggtgagcccccttggggttcacatggggagcagtgggaagtgattggaggagtttttatggtggaggtgcagcacagctggtgcacatgtctggacagccactgactggctgctgggagggaatggagggaatgaagggtcagggcaagcatggaaaccgtgggtccaggctgaacccagacctacaagatgcaaatgtatctttcctgagcctcaggtcctcatctgtgattgagggaatcatgagc

SEQ ID NO: 148597 - DNA, 572 bp, Homo Sapiens
  misc_feature (557)..(557): n is a, c, g, or t
cttaagcatttatttcaggtttattttcggacaccagtatgtggaaaatggtaataataataaatttgagacccggctcaataatgatttttctctgcaatggtggcaactttaatcttcccgaattcctactctcttccactggatgttgcaggtaacatttgtctacaagcagattaggatactgagtttaatgtgcacgtgttttctatgcgagcccttgggatcaacacttatcctgctccagaatggctggtcctttctgcctctgctctgtcagtcatccctcctgggctgacttggaaaggatcttgtacttggtcaggtaggctcgttctctgcagttcaggtaaaccctgaaggggctgagatttaaatgccacctgccaataacattcctagaagctagaacaataaatttttcctctaaggggcagctgggcagctcatagtgtccacaacgagtactgggaactggaaatctgagatcaggatcaggatgtagcacagttgggttctagtgagtgtcctcttctgggatgcagaatgctaacttncttgttgtattctca

SEQ ID NO: 148598 - DNA, 512 bp, Homo Sapiens
tttgagagtgcacatttatttaattgtggatgacacggcctgttatgggtcactaatagattggattacaaaataaagattcaaaaataattcagaaaacataggccaaagttgataacactggcagctacagggataaacgtagagtcatttactgaacacacactgcggagggcaaccagggtttcgggacccacgctcgtgcctggggtcgagagaagctgatatttgagctgagctgtcaagaaacaaatagtttttttctgagagagaagagcacacggcgcttatggaagagatggcatgagccaagttgtggagggacagacagagcttctgggggaagatggagcagttgatctactcgtttaaatgtgcgctgaatgtcagccgtgtgtcaggcaagggccgcgtgctaggaacacagccctgagcaagaggacctcacgttttgagaacagattggtgttaattgccgtaaagtaactgaggagcagagtgaatgaacagtg

SEQ ID NO: 148599 - DNA, 866 bp, Homo Sapiens
tttaaagatgagccattttactaaagccaaatttatttgtaactaggcatctacaagaccaaattgttaaaacctcaagcttataatcttgggcttctgtctgtggcactattttagtaggtgggcaagttcaactaaagccagccccatgggtgtatttggaaggagatgcaattgccatcacacttgattatcccttctcatctctcatcccctcttctctcactcctgtgcctgaaataaacatatacatatacaaaaaccaattctaacaaaaacagtcacacagagtttattgctcacagctatttaaagaactattccatggaagagtctatacaactcaaggaaatctgtgggtacttaccagatatatttggctccagatttcagtggcggcaggttaatggagaagggaaaagggaaataggtggatttgtaggtattatacaatgtctgaatctatgctgaatcacacaatacatactaagaaatgctcacagaaatcaatgaaaaaacaagaatagccagagccactacctagtaatttacaaatacaaaattcctattacttggattgaaagttgtcagtaaagaaattgactttgtgccttgagtccctatttgacatagccgactctcctatcaataagccccctcacctgcttacccagtagtgctgacttttctttgctcgacttttacaccctagttactcttaaatttgtgccttcaaattctgtcaacaatatgcacacattgaagactgtttatcctaacaagtttcttccatagtgtcgttcatcaggatcctaccatagtctgctggtaacaaagcttaatcaacttggaaccatatgattctg

SEQ ID NO: 148600 - DNA, 627 bp, Homo Sapiens
ttttttgggttcaagtctggtttaatatctatttcttctcattggcacgtaaaggcatgtaaagaagccttgaattgaatgcacaaaccctcgtctttaccctttaacgcctcatgactttgccaaacatctttaaacaagaacaaagctctcagagatttccttgtacctttcccctgtgccttttcctcctattcttgttttactgacgttggacatggcctttttcaggagacgagagtggctttacacatgcagagtactagtgtttatccgactgacgacgccttcatacttgtgatttcctttgctttaggtcgggattccaggctaatcaatagttgcttcgattcagaaatgcaaaaccctaacctcactcaaaaatttcaggcccagggatccagataataccagatgggtcttaagaaagccgttttgctgtgggataaagagccgcttagtcggggatcgttttcgggtcattttactgagcgccgcctcgccgggctcagagcggttcctgggaaattggaccaatgggctcgcgctgcgcgctgcggtgccgcccaggacctgggcctacatttccctacatgcactgcagctcggagccggccggcgggaaga

SEQ ID NO: 148601 - DNA, 565 bp, Homo Sapiens
tttaccatttttttgttcctttttattcccgagtagtgttccattgtatggaggtaatacatttgtttatccatttaccttttgatggacatttgggttatttttcatattcttgatatattttgaaggcagtgctgaaagaattttctggtgcataggccgtaacatattgcagaaagagcagagtcatggataactctcaacttcttagtttaacaactgggaagatggagttgacaattactgaagtgggggacacagccgactagaatgaaacacctcgaacatccagcacattgcctggcacaccgtgaacgttctattgatatctctgctctttaggttgctcccggacaagtcactatcttctaggaccaagactcagtttattccttcactctgatgaagccagctgctctgttgccaagctgctctatggagaggcccttatggcaaggaactgagtggggactgcagccagcatactgtgataaactaaagtcttcagtccaacagcccatgaggaaccaaattctgccatcgatcacttgaatgagcttggaag

SEQ ID NO: 148602 - DNA, 515 bp, Homo Sapiens
  misc_feature (350)..(350): n is a, c, g, or t
tgtcttgtttaatccacagaagcacaatcctataagctgggtgtgaccttgaggagactgagacttcagaggtgtcaaggacccccttcagcatcacacccaggagggagctgttggaggcaggcccacatctaagactgtgtgatgcccaggtccccgcccttacccagcctaacgcagggctccggcgtgcaggtgtcacggtgtcgctgcttctcactaacgcagggctccggcgtgcaggtgtcacggtgtcgctgcttctcactaacgcagggctccggcgtgcaggtgtcacggtgtcgctgcttctcacttgtgtaagaagtgccaccgcagaagtaccacangatttcagtcctacatggactttttcttcttgctgtggtggtcaatacacagaatattctggaatctcaggctgaatttatacaatctcctactgctgactgataccggtagttctgcagaagatgcaaattcttcacatgatcattttttgtatcaattctctg

SEQ ID NO: 148603 - DNA, 435 bp, Homo Sapiens
gaagggcttcagagatagttctcattttgtagctcacatgagcactcattcaggagagaggcctttcagttgtcctgactgccacaaaagcttcagtcagagctcacatttggtcacgcaccaaagaacacacacaggtgagagaccttttaagtgcgaaaactgtgggaaaggattcgccgacagctccgccctcattaagcaccaacgaatccacaccggagaaagaccctacaaatgtggagagtgtgggaagagcttcaatcagagctcccactttattacccatcagcgaatccacttaggagacaggccctatcgatgtcctgagtgtggcaagaccttcaatcagcgttcccatttcctcacacaccagagaacgcatacaggagaaaaacctttccactgtagtaaatgtaacaagagcttcaaaaa

SEQ ID NO: 148604 - DNA, 474 bp, Homo Sapiens
aagatttaattatgtttttattgatattaattagggaagtagaaaaaaatgaaatttatctgaaaacttaagtcaacaagaacacagttttcaaattaaattgattctgtactggagtctggcttaaaattgattcagaatggttacttgctttagtgactactaccttgcaatttgtccagaagcacaacagctattcgatgctgagcttgaattagttcaagatgcaaatccatcatgaaactatttgaggcaagtggtttgtaagtatctccatctatatggtgggtacgcttggcatagcagtggtcaattactgatgatccatttggcaaagaggttaacatgcaattcaaatttattccaccgattgctctgtcaagaagtttataagcaaaaagtaactgttccacaggatttttctgtaatattggaagaatttctgtgatcccttttggagctccagggaatttg

SEQ ID NO: 148605 - DNA, 737 bp, Homo Sapiens
  misc_feature (437)..(481): n is a, c, g, or t
tataaatatctcgatttgtgtttggtgggcattttctttggctgacttcagccttctagagaatacagtttttgcctgtccctatctgtatttcaagaatttgaaatactgctgtatgccatttcgttgatttcgttgtttaatacatagttgttgagtggttgtcttgtgccttctagcttggtctatatgtaataaaacttgacatcaatttattcaagcagagacctcttaatataccatgctgtcacttctagctttccagttgaaagacaagatggctgacactcataccaaggtggattgtgtcactggttctcctgttgcacacttcctgggatctttatctgatttagccttcatatatggctgagggaagtgtttaagcagcaacctttgatggtgttttaggcgaccacatttccctcacccctcannnnnnnnnnnnnnnnnnnnnnnnnnnnnnnnnnnnnnnnnnnnntggattgcttgagcccaggagttcgaggccagcctggacatcctagtgagaccttgactcgattgctctctcatctcctctcctccacaggacttgcacacgaagtctgtatgtccgtagggctttgtacatcactcttgcaaaaggactctcttcgtcttgctttcagacttcttcaggtgagggaataattgagttgcccactcaacactctatggggtaacctgctgagatatcgggtgcagccatttcagag

SEQ ID NO: 148606 - DNA, 434 bp, Homo Sapiens
ttttttagggtgtctacagaagtgtgaacttttatttggtaaaatttttttagtctagagagctatttgccatgcaaaatttaaaactagtatttaccaagaaacatcttcctaagattatgacaatgatggcaagctatcgcttgcagactttgaaaaacagtaagagaagacagacttctgttggaggtgtttggaccatgtttaccagaagcaaatgtatagttactagtgccaatagcccatatagattcaggaaaaattttaaagggtcagagagtaatacttgctagacactctcctctgttgggctgcagcccactgctgaagtcaaggcaatcattgagagttcagccccatcctggcatttgggccccaagaagacattcatgattatttcagtaactatattcaagacttccattgagctttta

SEQ ID NO: 148607 - DNA, 510 bp, Homo Sapiens
tttaaaagtctaggagaatttatttccaaaggggctatcatcaaagacatgtatacgggaaaaccacaaagaacctagaattcttagctgctgacctcttaccatccctagactaagggatgaaaggagggggtttttactgaagcccaaaaggagaatcatgtagtctgtttccttgtgaagaccagtgtcctttgatgaagccagggaattaacactcagatttcgcactctaccttccttctagtttctgacaagtctctctggtgcccctacccagcagaaagtagatggcagcctttttgatgtagcccatgctggttagtctccttctggtacctgtgtccttatgtagtctcctctaacatggaatcaggactggttatgaccgatcgcagaaatgacagcatgtgatttccaaggcttagttttgtggttttaaactgtgttcttaggcaattgcaagttgcttgaaggcaaggacaacttcagtcttattccacaggactt

SEQ ID NO: 148608 - DNA, 383 bp, Homo Sapiens
ctttttcatggcacttatattttattaggaggaaacaagactggtataaacaatattagtctgtgatgtgatatgtagaaaattcagatagtgttgtgagaactagggctactctgaatcaaatgatcaggcgaggcctcagctgacacttaaactggaagtgaagtgggattcctccagcagcacatttagaaaccagggttgacactcacagtagggctgacctacatcaagtgacattagccaaagctcagacacctctggcttcagtgttgctgtagcagaaatcaagataaacattttccctgtctgtataattgctaaggtcatcaaatgtgacatacaggatttgttcactgtctcagtacttgttacaatcaggg

SEQ ID NO: 148609 - DNA, 497 bp, Homo Sapiens
  misc_feature (342)..(350): n is a, c, g, or t
aattgtgcatcctgcctgacctcttcttcaactaggcagtgactggtatagtttgagctttgtcttttttatttcagacttttaagaaacttgtggactgtactttgtctttaatgatgttttaagggaaaattacacataaacacacatatgtatacagaatattttgagtaaatttaattgaactctttttaatgcagattcaaaacatcgtgttgtaaaactttgtggtattggttgttatgagagatagtatgtccagctgattgatgcgtcttaaagaaaatggaagtttggcatcagttgggttaataagttataattcacctcttattaggctgnnnnnnnnntctctgaggaatgaactgaaaacattctggggagacaagtgtctgtgccataagggtaactaggcatattttagtcactaaatattccttggatggacagatggatagatgaatgaatgagaataggtgaaatatgacaattctaaa

SEQ ID NO: 148610 - DNA, 675 bp, Homo Sapiens
cttaaattcttatctataaatgttttattggactcttcaggcgtgagatgctttctctccatattctctatacctggggattggggccagcattcttttcaagaaaatgagctggcttttgaagaacacagaattaaccagaacattgcttcctgaatgtcatcttttccttcctccgcaaacagatttcatctactctttttaaaaacataagtttgtttagaatggcttttcagagctattttcacacccacattatgaacaaacgaatctgtttcaatcaatgttctttgaaagaaggcaagtttgcagatgtattaaatgtcttgctgatttttatccgtcacgcttatttctgaacctctggccatcttttcaataggctacattcctactgcttcaaagtctgctcacaaaggacaaccctcataagtttttgtcatttacccaaaatttcctattggaaggttcgactcgtctgcctggagagataaagatggaagtccagcagtagctgtgcaaatggccaccagatgttccagaacagatacaggtgctgctgtcttcagaacaggaaaatgctagaaaatgctgccaaggcacccaaagtctagctgataccaactacttgctaaaagacctctcaaacactgtcaacataaaaaccaaataatc

SEQ ID NO: 148611 - DNA, 299 bp, Homo Sapiens
ttttttaaaatatgttcattggtattgttttattagttgctagaatatgcattcaacttcactgaaacgagacttaaaaggtaagaggtacactacatcgcgactataggagtaagaaaatttaatttcttcacgccatctgaccaagatgttaaattactgaaccctttagtcttgtttttgttttgtagatagaaatcaagatgctggacaaacctttctcatggaatagtcaaaatatttaaggaacaaatctatacagtttaataactgccaacatttggcagggctcatgcctg

SEQ ID NO: 148612 - DNA, 613 bp, Homo Sapiens
tttgatttacaaaaacatgaatttattcccatgctcaagggtgtacatttgactgcagtttgatctaggctggcggagttgggcaactcttcttcagctgttgtttggggttacatctgctttacatgtctttcactgttcttggaccagtacgtctactcagcagttccttttctattttcttcaactgacttgaaattatgtcatgctcctggcccagtcgtcttctaggcaggtcagttgtcccatgctacagatatgtttatgatgccgttctaatgtcaccgtgcttccaccaatcctgtgctattcttgtagagtggctagcagtggtaatttttctttgaatgcagtagttcagattgggatgtacacttgattcttcttcttcactgtaaattgttgaatgtgacagaatattcaggtattttggataggttagaaagatatcttgatcctgtcttcagttattagcctaataagaatggaaacagcttgcaaaagtaagacgcaagtagggtagcagcaggctcatctggggaattactggtctgaagtttgggcacaaattattggagccaaagaagagagaaatctatatcctttaggaaag

SEQ ID NO: 148613 - DNA, 641 bp, Homo Sapiens
agacagatgaagtgtccattttttcttttattgtgtgcatgaagtatggggattacaagcagtagtttttatgtgctttttagtttttcatatacaaagataatgttaatattagctcatttacattttgaaacttttgtaatagtggtatagatttgcactgcataattcacattctctcagtctcctgcacacagttgtgagatgactggttaagagggcactttgtttcaaagttaaatgatccagatgagtattgaacctgtaagcttagctttgttcattatcatgaggttctgatcaacaaagcagttcaacagagaaccatgccatgctgtcatttccgcttgaaaataagccttttagaggtagaaggtacaaacatgcatatacacatgcaccaataaaaaaaggaaattgtgtatggttattaaggtagagttgaaacaggaaataacgtgcgtttataagtggtttaaaaataattcttttaataaaattttcagaaatacttgatatacgcatggaaaattaaatgttttatgaaataaactccaatcagtagacaagttaatggcttttttaaaagcactaatgacttatttacttaggctatataaatttaggttagataaatctga

SEQ ID NO: 148614 - DNA, 599 bp, Homo Sapiens
tctgaactattaaagcaggataatctttattttctttgcacttaggtttcattcttgttcattctctacaaaccaactttctccgctgatgacctagacatagcattcccagcctcccgttttcccagatcaggaatttcattataaatcccaattacaaatccctgcttagagaagggttgagtcagttgtaccaccatggtccagttaactatagctgagggaacaggcatgcggctttttaatgtctaagagggtattttgttcctagaaaatgaaatgccctcattgagttgaacagactaaatttgttttaacaatcccatttacaattcaaattcctttaaacaacttaatagcatttatacatttaaaaaaatgattcttttaagcagcattgcaaatgcttgaccccattagcataaaccttcccaagtgcttaactctcataaacataataaattaaacatatggtgactttccaagttctctgaaacatttcagtacttttgcagacttagtaacattttaaaatacctttcaactgaaactcataagtctaaaagtctgttaagcattttaaattagaatcttaaggc

SEQ ID NO: 148615 - DNA, 539 bp, Homo Sapiens
  misc_feature (380)..(380): n is a, c, g, or t
tttccagtattattttctattcctttatatgaaatttttaaaagtagtaagtatatacagtatgcttcagctagttctaaccaagaggagccactctagatcagtttctctagcattcatcggaagatgattaaatgcaggaaatcacttcctcagcagcacatctaaaagccccaatgtgcagctcaacccttgatgaattgcaagctttttgcaagagcccagacctaggagctactagatggcctaggatactagtatggagtcacctgggccaatgccccatgtatacataagacttcacctgggagctgggagacacggctctgggtatggagcttttacaggagctgcaaacacagcctgtgcccctgtttggntggggaattccttgttttcaattcccctggagagagaagagtggggaatagaacaagttaaaacaccacaaactttgctgttcttatagaggttcagcagcttttcttgaattaatgccctttacattgttgtaaacctttggttaatttccaaagttt

SEQ ID NO: 148616 - DNA, 377 bp, Homo Sapiens
tttgaatgtttcatatacttttaatcctcaatagtctttggaatggataaatgatcaccctgtcttatagatgaggaaagtgaaacgtgaagagcttaagtaacttgcccggggttgcatagctagaaagcagtgaagttctactctctgggcagagccagagctcactgccacgacgctcaggtcctattggattcaggtggtagtgatgctgtagggcagcttgagtacagggacgagcagtagccatggccaccctgggcaggaggaaaagctgtttccctagagagatagctagggaagttcatcgttggcgagtggggggaatgccagcctcaccttcccttcccttgtgcagaaaacagcggaagcagatg

SEQ ID NO: 148617 - DNA, 491 bp, Homo Sapiens
ggccatgtaaatatatttttaagagaaaaagaagcaaaagtagagtgtcttctgtttaaatgcttttcagaatgttatggggaaaagggctgtgggttacttgaagcgtgagaggtctttgacaaaagtggtagatgagaagcacacacagacgcacacacatgtgaagggatttttaatatttatcaaggcaactaaatacataaagatcaattggagaagctggagaatttctctaccttaagagaaaacaggttaaaattaggaattagctgccaagaaaatccctgaaagaacatttaaggggaatcacaactctgatacacagagatttcatttaaaaacccctccccattttttgccaagccacagagaaacagaaaaccagcttccttctcattgaaggagacagagaagccttgggcattaacatcgcaagagtatctctgccttgctcagagtgtgtagtaataaaaagaatcacagttaaa

SEQ ID NO: 148618 - DNA, 764 bp, Homo Sapiens
  misc_feature (410)..(432): n is a, c, g, or t
gccttccccttatatttcctttttattgtggaatgtatcaaatggtcaaaggctaacttcagactgattaaattcaaaaactatttcctttgttcttatgtttttgttttaaaattcataccagtttgcacgggaaagataggccaaaccaatccttttcacacacattagtgtttcaggctgaggagctcagattctggggacacgttgaatggttttcaggaagaaaggagagagactgcaaaaccccatttggttcaaagggcagcagggtgatgacatgccatatctttggagttacgctatgatctgcttggctctgtggctgtccttgattgaatattaaatgtcttcagaggagaaaacaggaacttatccttatcagcaaaactggcggctttattgctttnnnnnnnnnnnnnnnnnnnnnnnatatcaagatcaaattaaaggggtttctatgtaatattggctaattatttccttttttctaccgttctattcagtcgtctcactttcggttctactgaggtcagtccaacttcccatctccaaaaataattctagtcttttcctcccatcccacctctgaatctgactcaaaaaggagtcaattcaaaggtcaaatagtccccaaaagtatttatgtatagtttaatatttaaaagaaccacttaacctacatatggtatttaagaaaaactttacatatttatggaaaaaatagtctctgaagcaatgccctgggtgcatgttacatccgt

SEQ ID NO: 148619 - DNA, 702 bp, Homo Sapiens
tttgcctggtaccaaagatcctttattaaatactcaatataatcatgcatggtttatcatattttctcgattttacagacttagtaatggacttgtccatatttatttatttccataaataattaggagagcctggagttgcaccaagttctctctgacttgaagagcttatcaattaaaaaataagtcagagtcagggtgactctgactctagccccataagtaggaaaggatttgagatgtccactgcttcaattatcttcagagcaagataacaaccctttattaaagcaggagagaaagtatcctattgtttaacttctgtagggacagcgatttcttggattgcttaggtttccaactttggactcttctgtatatgtagtgtagattcagttgtaaaatgttgcttcctctctgagaaaactcttctggttctactggacacccttctagacagtacctagtgaaagtaatacgggtaaatagccagctgaaagagcatgacggagctagtcacagtccatatatactgcagccagattgattttgaagtaacaatcactatgaattaaagagcagcatggcatagccaaaaaggaatcaatttggcagtcagacataattggattcaaattccagcttcatcacttaactgattaaccttaagaaaagttatttaacctctcagagcacctattt

SEQ ID NO: 148620 - DNA, 465 bp, Homo Sapiens
ctcagagcaaggtgtaaacataccagacacacaggacacaggaagaggctctggttgctgctgccccagaaaggaactgtgatcttctgcattgcaagcagcctgctaatcaaagcctgaaaaatcgcccccaaatcaaaacgcatcaaagggctgcaggtgcacattctgcatgaggagtgagagaatcagcattatcatggcaaatagctctcagcctggtaagcgaaggattcaggctcctactgaagggacaatctaggtaatggcctcatttagccaagaaaatctgtaagaaagctattggtggaaagaaaagacttgaaacagattggctgacaaatgccatgtggctctacagccaccgagtcacagtggcaggaagaagaaatgcatgtggctggtgggcttgttatcacaggtgcagaaaacttcaactcctaactgagctccaacacacaggca

SEQ ID NO: 148621 - DNA, 794 bp, Homo Sapiens
tttggtggctcaaaacaatacaaatttattctctcacgtatcaggaagccagaagtccaaaattagtttgtcgtcagggccatactttctctggaggttcaactggaagattctgcctttgctgcttctgcttctggcggttgctggcttccctgcaaggtgtgtgctcacatttttctgctccatcttcattcacatcaccttccccttactctgactcttctgctctcctatctgctctgccacccaggagcgtgcatctcattcatcagacctgagtcttctggaatcctggctgtaaaggagtctgcaaattagagcctttagcttttcagccacagatctaagccaggttctggatataaagccttttgcttggaggatcaactgagatatgactctgtatatgttttcttctctcaagacttctcccagaggcaacttgaccatttatcagggtgactgccctaggaaaagggaaataactagattattgagggattattgttattggatttaaatgattgctaataaccagagaccagaaatacccatatggtagactagtcaaaatgggaccttatggaagtcaagtaatagatgacatactggcttgagtctgtctcagagagggtctgtgggcttattctgtggttatttccccaatgtctgaatatatagtgggaacagatatacttaggaactggcaacatgttcaagctgattctctggccacaggagtgaagctgatgtgaagggccaatctgaagctgcctttagttccaagatgataa

SEQ ID NO: 148622 - DNA, 663 bp, Homo Sapiens
tttacaaatcctcattacatttatttactagtgtgttaaacatatactagatcgcgatttttaatctctgagcctgtgttttgatcatcttcatccgactgctgctctgagccttgtgaattaatgtattcatattcaataggcttcggataattatatgggtagccattgtcatcaaaaaaccttcggaaggtaaattcatagaatgcatgttcaggatgctttccatttttataccatccattgagagtgtcatttacattttcttcctcgttatcatcactccataatttatcaggatcaacaggatcaaaatttgatgtatctgttgggtgtgtgattttaggaatgtatgaagcagactgctgtctcaggtcactggagaagtcaattgttttaaaaaaatggatgagcttttatttcatcagcaccattcttgcctaagcgatcttcgggtcctcggcaaagtttaataataagatcagaagcttcaggactgagtttagcttgtggtggaatgtgaagagatgtttgccagttggtaaccttcatttgtgtttctaatggtgtttgtgccaagaaaggaggttgtcccaccaacatttcaaaaagaataacaccaacactccaccaatcacacaactgtgtgtatcctgttcgtag

SEQ ID NO: 148623 - DNA, 629 bp, Homo Sapiens
gaaattatgaattgtttctaagtctattattaaaaatagccttgcttcatttcttcctaaaatggagacaaatatgtatagtgtctgtgttaccagtatgtgtaagagtaatatcttaatgcgtgtaaaatgtttataggaacctgtatttcaaagagctatttttgcaagtgacactatccttttaagaaacttttttattcaaacttttttctccatttataactattctattatttcttaatgttcagaacccttttcattatctataaggttaaattttaggtaagtaatgagaaaataataatatgtggagaagaaatgagtgaggagtcgagatgtgtgtcaatcaagaatgagtttgtcagcccttgtattatgattttactcgggaggggataattattgaaggatgtaatgtaagggcagtgatactatatggtatgtaagactgttaaaatcactgaggtaagctattacttgaactaagcatagaaatagagacagatttttaatgcatttaattatcaaaatatctaaattaaagatttgatgtggctgttcactggaaacaaatggcagacaaacagaatatttcttggaatcataaatgacatcatcctgtcaaa

SEQ ID NO: 148624 - DNA, 522 bp, Homo Sapiens
tttttgatgttacatgttcaggtttatttgattcagcattttttgtaatagcagaagactagatacaattcaagggtccagcaataaaggactagatcataaaatcaaaaaggcattgaaagttaagccaaatgaaaacatgtcacttgggcgtatacattatcagcaaaataatgttggaaatgcagtgaagggtgagcctaagaagtttctagcaaggaatggtaaatgagagacaactgtgcattacaaaattttacaaatgttaaaaaatgtcaagtggtttttaagttgctttaccttttactgtaatacatgaaaaacttgtaagggcttgcacaggttgccttgttttagttcccattcctgttttttataaataaggttttcaggaatcgagtcctcatggctcagttagaactcctctgattcttagtttcttcaccttatgaaggaagtgttgtctgtatatctccattttacaggtcaagcagccaggaaatgacagagctgggagtgaaa

SEQ ID NO: 148625 - DNA, 358 bp, Homo Sapiens
gcatgaaccatgcccagcctagaagaaatattttgtaaattaaagtaagtgctaggaagagcacagagacaaaacaattatccttattttgggagggtgaggggaggaaagggatggaacaggattcttagaggagggtgtacttgaaattaatggatgagtttgacattgaacagtagagtcagggaaaaagagcagagggaacaatttgtaggttcaaattgtttgacttgccaattcaacataaatacaggacttgatcacaactgattaaatgcagcatatttaatattattttaaaacagtgtttgaagtttatttctggaataatgttgatagtactattagtagtagtagt

SEQ ID NO: 148626 - DNA, 636 bp, Homo Sapiens
atttggatcaagttcataaatggcagatgacaagaaagggattgtatctccctgagaactgggaggaagcttctccccaacacgtgtgggttgtcttctgggcagaatgggccagtcccatgcccctgacctgccctacttgggctctggccttgttcctctgtgcctttgcccacagctccaaagcatcggggagaaagacaacaacctggttcctattggcaagccagcctcagaggtgagtggctctagcaggtggggcctgtgtgggggccgcagtggaccgaggctctgctctaattctgaatgtcctgtctctgacccagagcagttgtggttctcagatctgggtaaaagcccctgggcctggacctcagcctggtccagcataggtgagctgagctattccatccttgatggcagggaagtctggaaggccagtgtggtggaggcggcagcggtagcggccaaacagctcttagcatactgcaagaagcggggtgcaccagggaagagcacatggtcagccagcacggtggcacctgctggcagtagggcatgggcctccagcagctgcaggtccctcaggtaacatcgtggccggtgtgccaggagcaccaggtctgcccgactcag

SEQ ID NO: 148627 - DNA, 798 bp, Homo Sapiens
  misc_feature (308)..(308): n is a, c, g, or t
gtacttaataaaatgttagctggtaatttaaatttttcccttattaagtgatgtcccttttgtgatgagcaagttcagaaagatctatatcacacttacgtatctagagtcttcgtctggattcattttcactttaccatctacctactgttctcaaaataaatgttatacatagtggcaaagagcacaaattcttacttattgtagtactgactgactgcaaacaacagaaatggactctaacttaatcaggaaaggcatttgttgtcaaagtattagatagttcacagaattaactggaagcctgnaggatcagattcagaaaattagcaagagtccagaaagatcacacagcaggtaagagggcccagatcaagacaaggggggttcagaggctgcccctggacactcatttccagtggtgctggactcccaatgccatcactgatgctatggataatttttcaacgctcaatctttgtattattcaatattccaagttctgggcaaaaatgtccaattgggatcatttagctctgacagaggtggggtcagcccctttggtttccatattgattgatagtaccctccctcccaccaagatgtttacagcagatgatttccccaagcatgaagctattgtggcccaggtaactcccaacatgacaaatgaccaccacaattaacctcttgcaactgcagttttcttgtccgtacagtggggataagaatctctactacattccaattgtggagagttaattgaagtttcctgaacatgctgtccatgtgccttct

SEQ ID NO: 148628 - DNA, 902 bp, Homo Sapiens
tttgaagagacttcaaatgttttattttaaatcggattgatgggccttcacacatcaggggactgttggtcactaaagcacaaagctcctggcacacccgaagggccacccacgtaccctcagaccaaggaagggcagccaaggggcaggaatggccaagagccccatccccaccaccagcatggcgatggcgtaggttaagaagggggtcagcagtcatcagtcttccagaactctccacatatcaggatcacaagcggctgcaggctggaacctcagcctccagcaccttacacgggggaatctgcccacaagagggagctgctgtgtcactccgagtccctccatgtagaaaaagcctttgggaactactgaacagaagtaaattcagattgtcctggatctacacgtgaatcttctcacttcttgccttttacacacacaccagtcttcaaggtctggattcattacttttagtttagtcatgctcagagcacagcaaagctggctggcaaggcgtcttcatcctcgggatcttcatcactcatgggcctggcctctagggggtcctcaatgctcgctggatgaatgagggtgtgctcattggccatttcaatttcatcttgaaatttttctagctttatgtctgctctgatcccaaggcagcttccttcggtgcgagcggactgagagagtatctcagcaggactgaagtaagcagaactccgcgcttggccagtgtgtctccttcagttgccccttaagctctccatgccagcctgaaaggctccactcaagaatacacagctggcttcagatgtgagaatcgatcaacgcactgaacagcgacatttctcctcgtgccgaattcggcgcgccgtcgacttcatactctctccact

SEQ ID NO: 148629 - DNA, 317 bp, Homo Sapiens
accctccaattgcagacacaatattacatgagatgccgtttgaagctttcacctggagttggcacatctgtgagactccaaacacataacaataatagttttttcaaaatccaggcacggattgggcttactgcacacttcagcgtaggagcacgtcggttcaccattagagtaacggatctcaggggtcaaagttgtggactcaattgtagaggaaaccactgggctcaccaagagaatgatcgtttccggcccctttttacattacttcatgcaacacggagactcctgaaagttgtagatgagttggatttttg

SEQ ID NO: 148630 - DNA, 464 bp, Homo Sapiens
tttgtagcttctctcttttatttattcttttctccaacacatcagtggccctccagctgttgagtggggagagtgacaggttcaatgagaaggacattcagatgcatccacagaggacttttcaccagtactcatgtctcctttctggatcctcagccctctgttcttttcaaagtcatgaagctttcattgtgtcctatgctttggaaactgctgaggatcaggactctttgccttctctagagatctcaccatcagctttcttattcctggctctttccagtgtcctttggagaatgtcaaccctggggactagaaagggaaggcaatgttgtttgggagctaagccaaggctgcaaattctgtgtgaagcctgtccctgccatgactggtgcacgacctgaggtgagttacataatcctggtcacctcaatttcttcatgtatgaaatggttaagttcttc

SEQ ID NO: 148631 - DNA, 686 bp, Homo Sapiens
ttttccatggctatctcttccatttatttcacctttttttctgcattgctccttagacacaaggaccgagacaaatagtacaacactgagggcctgctctctatcgctcctgatcctgtctctctctccacacctcagtattttaagatagattcaaaattgaccacgagtgctttgaccctcccctctacatccccccaaatctcccacctatactctcacctgtgccttttccttcactgttggaggagtctggcctctacctcagctgggtgtaagaggctgagtgggagagatggggggagtatttggaagcaaatggtgtgcctgaaagctcaggcttggctcagggtggggggctgctgcagcaggctggctatcacccttggtgatgatgatggaatgcttggtggaacaggaggaagaggaggcgcatgtgcccgccttggtctggtccttaggaaggtaatggactacagcattcaggagccggccccggaagtgtgggctgagaaagttgtaaaggatggggttgatgacacagtgcagcatggagaagcagtcaatgacatcatagaagaagtagagcaggtggaccaggtggcagtggagggagatgtgggtcccatgcagtgtgagcagcagcagggtcacatgatagggcagccagcacatgacaaagacgg

SEQ ID NO: 148632 - DNA, 553 bp, Homo Sapiens
ttaaccttctttaatttttattttgttaataatagaggagccactctcttatagggaatggccacccgccatcaccatagctcatctgcccaacacatctgcacctgacttccgcgtctgcacctcactttcctggttcagtacacagtacttcatgcaaagagccgtttgccaacatcacagcttccagcatccgatatggaaagaaggcgctttcactccacgcagaccttgcttgtcttttctgtagaatagttgtagaggataagcctgctccatgggtgaggcggctgcacagcaatggcagattttgttgtcaccaccagaagcagaaatcacgaataacaaaggaatctagagacgtcagagaaatgggaggtcatagagcaaaaataccacccaaataccgacaaaaataacccattacatatctgaacattttagagcaggacgagaccagcagtgagcatttgacccacccaaataccaacaaaaataacccattacatatctgaacattttagagcaggacaggaccagcagtgagcattcg

SEQ ID NO: 148633 - DNA, 800 bp, Homo Sapiens
ttttgaagctgcagcttttaatctttctaaagacaataggctaaagtgaggtcctcataataagatgctagtcaccaggaaggaagccagggaaaatctcctcccagggggtaattgatccctattggcctaacactgcatgtagcactgagttaggaggctccatggagaagtgtctgcttcttttcctctgctgtcagaacaaagttcacaaacaactttgttttccccacacctttggagttagctagttagggcccctatttatgtccaggggaccagacctggacatttgtaaaagaactgaatatagatggatagctaagaaaaaaacaaatgttaagattatcattatttatagcccaatgatttagtaatctaaaaaaatccaagaacaacaaaataatgcctaagaaggacaagaattttaaaacatgcagtttagaaaaccaaatttctcaggcctagagctcaagtaaaagaaaatctgagataatgaagtctggaacactgggcctgcattctgctcctgactctgtgcccttgggtaagacattgaacttccccaccccagattcatcctacaccctaaggagggtgtaggattttgtagccttcctagtgatggcatactattaatcagaaccttaaccagctctattctcactatcccagtaaaatgatgttaaaaattagacctcgtgacatgagagaagaggggaaattaattacagattacaaagaaattgtgggatctaagtttagggtgaggtgtttattgaacctctagggttggtcat

SEQ ID NO: 148634 - DNA, 623 bp, Homo Sapiens
tttcagtgcaacaaatatttattgagttcctgctatatgtgagagacagaccagctgtggggtagtctggccctgccctcagtaagctgacaatctggtggatgatacagctgtacagggtgtaggagcatcattgtactgttgcaatggctataatctaaatgcaatggtgaagagaaggctgtaacccagcctgcagagggccagagggtcttctgtgctgttgttgcttttcttccctttttgtcatggtctttgatgtgcatgtctctcaagcttttgactctcaaagtttgttgacaaaccagtttgggtgctaacaaaatgatcaagaacttcaggaccagctcacaccacgagtcttacaagggaagttttgcatttcccctttcttatcacaaagccactaaattgcccaaaactcatggattagaattacaatttggaaactccttgggcaattcagaatctctatgaatgtcgtatgtcattgaacactgataggaatttttcagttggtgagaattccccctaggctgacagcaagctctctctagcatctgtgaactggtagcctgtgttttatctaattcccttttcacagacaggttagctcttcagat

SEQ ID NO: 148635 - DNA, 757 bp, Homo Sapiens
tgagccccatgcccagccaaaaaagtccttgttataagaaaggctgccaaacacgaatataaagaaggatttatgtgaattccatcagacaatctgcttgcatttacttactctgttgttaaaatatattcccaatttctgtttgtagctaattttgtattactgtaagggaccgactaactgggctcttttcgctctatgagaatttttttctaataaaatacaattattaactgtttggtatcatagaacaagcctgatctactgatctacttaaacacatttctatttcccaccaattatgaaacatattggtatatcttgcttctatcttcaatagtctattacttttcaagcactggaaaacattttaaagcaatggtaatgactgttccgccgatttttcatttgaggggaaaatctgaatacttacttttattattcatttataactggattgtttacttctccaagatactgctacttttgggggaaaacaacactaagtcaaatgacagaaaaaaatatgaacataaatgattctgctgctcttcagtttgctgctgaaaatgtgaacatcctggaggggtgcctggtgcagcagcttaggcacttgcctacagacctaatgtgatcctgcctgtgttctaaggttacctattacaaaccgtaaaatgagtactaagagtcatgaacaagtcccaggttatctacattacactaaataaatcagataatgttttctggcttggtgaaa

SEQ ID NO: 148636 - DNA, 499 bp, Homo Sapiens
tttacttttgagcaattttaattacggtttttgtttacttttccagtagaaattaactgttatttgtcctttccacacagaaaacattttatccactttccccacttatagaatgtatgttgggcatccccgggccttgtctcttaggcttttcattcttcagacatcccaagctgctggagacttgactgaggaccaggcaggatgaatgatctgtgccaggaggcaacatcttcttttcgcatggcctgatttcaggagaaaaagcagattctgaagaactggccctggaagtcagcatactctttcctgagactcttgccctttcttttgacgttaggctttatctgacacttaaagtagagattttgctgagtttcagcttctgaattgtcagacatttctgtacagagattagcataactttacaggcaaaattctgtagccctttttcacgcaaaagttcccatatcttccagaaataatttcaagtattctc

SEQ ID NO: 148637 - DNA, 1127 bp, Homo Sapiens
cttttatggaattacatttcatagccatgttaactgcttagatcaaatatacctgctcatacagccttagccatcaataaaccacactttcaaattatttttctttttataagtgaaaataaaatcttatttcctttctttggataccacaaaacaatgacacatccactagtctgatctgtgtagagagcttaaaattaatcagagagtctcaaatgctgttattatcattatgtaaaatatgctgtgatttgttcaaatttgctaaaatctggttcataacatttgcttgcattgaatgctaatatgcttagtcagactaagtgcttctgtcaattatagtcttttaaatagatgagtctgtcttatactaatatgtgaaattatacttcttggtaaaatttgtgttgatatgctttatattaatggtgcattttttaaaatttagagataaagctaattaattgtagtttaagtttaagatataaaaatttgagggactttctgcttttgtttcaaagacattcggagaacacatgcccaagaaatgtaagccatgcttaaaaatactgcattttgaagcttgcagtaactatctaatgaattcgtctcagagtgattctccttcagaaaaacaaaattttataggtcacatttggaaacaaggagaggaggaaataactgacattgcaatatggggaaataaatgggaaataaaaggccataatgattggtcttcaggaagctgtaaggattgttcttcaggaactaatttttcttgctactttattgtgtggacaatataatgcctcacgtatctgttggcatagtccctagtttctctctgctgtacccattcttcacatattttctagcattctttcaagaggatcaggagtctttgcccagatacctgtttgggaaaaggaagaaagagagtaaaaaattaataattaaatcaattttggagttattctgcagatgacacacagcagctttcttagtgtaatggaaagccagcctggtattaagcatctaacctcacaaagaatggcagtaataaaaatatctcttcaattaaaaagccccacactttagtttcaactaccaagccttggaaatgtaat

SEQ ID NO: 148638 - DNA, 609 bp, Homo Sapiens
ttttggcttcaagaacataaatttattttttcacaattatggagacgggaagttcaagattaaggtgttagctagttgatttctcttaaagcctctttccttggcttgtagatggctgtgtcctcacgtggtttttcttccatgtatacatgcttgtagtgtctcttccacttgttacaacgacacagtcctaccagattagggccccactttcatgatccttacatagcataaaaagacttttccaatgtgctcgagttactgatcttgagatggggagggtattcttgacgatctgggtgggcccaatgtaaccatgagagtcgttataagagggaggcagaaaggtcagttgaagaaggagatggaacagcagaaacaaaggtgagatttatgcatggccatgagtcaaggaatgtaggtagcctccagaacctttaaagctgccaacaactccgagagtactgcaggcctccatcggcaactcctgcaagtgtaacaccaaggagcgtgtccggctcatgaaggtctttcagtcaacatattcaaagtgtgagcacaggctttcaatgtggaaggagcatggtctgatccgcggaggaatgtctc

SEQ ID NO: 148639 - DNA, 673 bp, Homo Sapiens
tttcaaaattcaattatttattgagcccgtactcgatgagacacagctaaaaagtgccccttccccatccctgaacaattccccctacccagccaggatcaatgcctcagctgggcacatcctatgtttttctagtcttctacaatagatctcctatagtgtaggggtaggcatgctcaaaagcatagaatcttcttagaaagtagtggatagcagtgatcatcacagctaatggagaatttgcttcattttggaaaggcctgggtgttctccaggtacacatctgtgggtgactccaggtccatggtggattctggtaggtcagtggttgattctgcactggcagcaatataagaatattttccaccgtggaaaagtgcaagaactgactggcaaatgggcgaagtggagtctctgaggtcctagaggagagctggactgaggcgttaaggggcaggagtgacctacctcctctagaagatttgacttcttcctgaccacctatgacccggaagctcctcttctctcctcacccttcgaattgtcccacccttccagaccgaaccatgtaaatcttccgcgtattgattgatgtctcattctcaatttttatctttctggacgagagtttcctggaatagctgacttttgttgaagacagtgaatagtacag

SEQ ID NO: 148640 - DNA, 663 bp, Homo Sapiens
aatgtcttggaacattttttatttcaaatttgttattttaagtacacattgtgatttaatgactctttctgggacttcagtttgtggttgaggtctgagagctgaagaatgcatgtttaatttttttcatcctataaccagtgtttcatcttagactaaagagatgcacattttaggaatcccacagaatcactgaaaaaaacattgatgtttatacaaatgcttgcatgtttgagtgaatttaactaaaggaaacaatcagatctggttccaaagactttgtgggaccctactaaatccttaatttctcccttacttctgacttcacaggactttacgtggatgtacagtgctgggctttatttgtgggcactagggtctcctccgttgacactggtctttgtggcttcagcttgtagcacaggggacattttctcattggagggaggctgagctctggctgagttttgacgagcaggtggaattttcatcctcgctttggaagtggtgaagagaactggctgaagctctcctcttttgtagaatggtatttgatgcagcatcctaaagtgctgacactttatttgcagttctctgggaattaactggattcactcagcacgggtatgagcgtgcatgtgtgagtgcgtgctgagacagact

SEQ ID NO: 148641 - DNA, 410 bp, Homo Sapiens
ttttacgtatatgaattatttatttccaacagcaattctaaaagttgagcaccggcctccgctgtggtctaagcaacgccagagccttctgggaaaggcgcccctgccgtggagggaggatgggccagtggtgggtgagtggaggccacagctcagctctgaggtttcagcctcagtgaccgggcagactgccttctttgccttcctcacacggaggtggcccagagttggtggccctgagtttgtgttgggggttggtgccctccctctgcggttgtcactggggtgccttccccccaggctccttctcctcttctccgagaaagaggccggggcacctgtcctcccagctcacacattccaggaacccccaggggaggacggtcctcagcagctgaccctctcccctt

SEQ ID NO: 148642 - DNA, 541 bp, Homo Sapiens
tttcggactactcatatgagttttatttgttagtatttccttctttctcttaaaaaagttgagtacaaaaggatttatctttattagttacactttattgagcacttgctaaatgacaagcacactatatatattacctcatttagcttttacagcaaccctaaatggcacacacagttattctttctgttttacagatgcagaaactgaccatctcaagaccacaaagccggtaacccacatagccaggaagtgtttccagggtatacacactagatggtctctatgctattttcagggggaaggggttgttgcattccttgtactggagactctatccacatttaagaatctttcgttcctactttgcatttgtgtagtttaaatcgtactgatccctgaatcactctggatcacaaatatttttaaacttcagtttcttgcttctactttgatcttgtttttcccactgcacacaactagctacttaagactgttatccaaaatctaaatttacaggaaaattggcttgaaatgaaat

SEQ ID NO: 148643 - DNA, 596 bp, Homo Sapiens
tttgattcattaaaattttattgaggtcttttgtctctgatgctatatgaggtgctccgaaatgctttggtcttataagacagaagttctcaatgatatatttacctcaacaattaagctgtcctggatgaaaagcttaaccttgtatagggtggtaattggctttccacaatatggtgttgttgatttctcaggaaacagtaaatagaggcaaagaaagcccttctggcttgtaaagctctgtgcttctctctagtaaactctgattactcacaagcatccacaggaccattaatctcacatcaaatggagaaattaactccaggaaaagcaagctaaacccccacccctaaacctctcaaaaccccaacatcaaaatgagcattgaatattcaatgttttatgaagaaatcgcaggaaattaaagcagcctgaagctcatgaatcagaggagaccaaacatgaatgcgtctgtttggtgggatggctggctgccgggctgtatgcgtattcctagggcctgaagtcagagcggcagctggaatgaaatctgccagaaagcctgggtgagtggagtctaactggggtaaaccacc

SEQ ID NO: 148644 - DNA, 566 bp, Homo Sapiens
gaaggaggcagaaaagtgtttatttaaaaccttcacagtttactgtttatgtccttcttcttatatacaaagttataaatctttgcttatttgatcagggttccagcttttttattttcttggttacaagatgactgccctcagtaacaagaaccacatgctttctcatttatcaagggagagaaaggagccacagcccacaattttggggctaaagtcctgtaattggtgccaatttgctcaaccctgaacaacatcttgtggccaggggaacaacgtaggttgggattgggttatcttaactggactaactttggagataaaggtgaggttaatttcacctcaatttcttaggtgtactatgcacaatgtgggaagagtggaataaatgttgggattgcaactacagtgtccatgataatcactttcaaagcatatatatatgtaacaactatattgttagttgcagttaaactagatctaagaatatgtaattgtgtctgacataattttttatgtttgattcttaacaagttttaagtccggctcctcacctgttccctttt

SEQ ID NO: 148645 - DNA, 708 bp, Homo Sapiens
  misc_feature (545)..(545): n is a, c, g, or t
ttttaaatacgcagacttttattaagtatttttctcatgtaaagtacacttttcaagttattttcatctttgtccttccattttatattctgctttgctttggtgtatttccggttcctctctaatgcttactaatttcaatatccacctctagtcctatacgaggacttgctatctgggggtggttgatttttatttgccccttgatggtctagtgcaggtttggagaaactcaggaacgaggaatagtcgtgcagtgtctgagcctttgccctcctgagaactgcttttcagttgttttcatgcacacaggttgcagtgctcagccctgccccattcagctcttgagaggcattcttctggctccagcagattcaagatgggagagaatggagacgggtctccaaagcactatggaatgcagtgcattctgtaggtttttcatgtgtttggtcgatacagacgcagaacatgcaatgctatgccacctccctggccctctgcccctcctgccttgcctcatgctttgaggattccatctcttntgagttggaggagccgccacctcccagtgcacctcttctgtgtaatacgttttggtgaccctgtgcttgtaacccatcattgggatagggcagcacggctacattaatgactcaacctcctcctatccattggaatgtgaggctccgcttcagaggaagagaa

SEQ ID NO: 148646 - DNA, 716 bp, Homo Sapiens
agcctttaatggaaatgaagtcagggagagaaaagaaaggcagaagagtaaccagataaagagaataaaaaaaagagcaataggcattttctttcctccagcaactacggacacaaactggaataaggacagtagagggggtgaaaggggttgtttttaattttcaagaagaaaagaggtgttgagggcaaagggggcaattcttcatcatgaccacaaggtggtgatattggcccagaacagtttggttgctgttttgcgggggaaggcatcaagaccaagtagccgcttgtgtgagaagatagtcacaattccaacagagagaaagatttgggaattattgcatggaaatccctaaagtcatcagccccatatgtaaccacgactctgtcactcttggagctttgctgtcctcccgaggtggtggagaggtcctcggggatcggcatgggctcatcgccctcatctggagtatcgcttacaggggggctttccttccctgaaacttgggacatgtcttgaccctcatcagcatccatggtcctcaggttatcaaccaaccgaggcctcgccaaggccaagtgagagctgccttttccacacaaatccagactttgaggacctagggctgctcggagttcccctcagacccagccacctgggagggattcttggtgcctggctacagggcctctgtgtcctcttcctcctccccc

SEQ ID NO: 148647 - DNA, 891 bp, Homo Sapiens
tttcttagatcacgactgattttactatcatacggccatttaaaaggaatttaatggatttttgagcacattaaactggacctaaactaatgtactctaaatgggaaataaaaatgaaattgagacaaaaacatacacaacatataaatacaccattagttggaagaaggtattagtgttagtgtgttaggataaggaacatcatcttttggcatgtttgagattacaatatgatcattagatgcatttcaaaatatcgtctgtgggcatactgtggggaatttgctagcctctgtgactcccttctacattaatctaataaatcatgcagaagtaagtgaagtgagaaagatcttttatcactctactggatagaaggatttcaagaaatagaagctccttactaccactttaagccccagatattctctgtcctttctaactagcctcttcctcattctaggcataactgtgataatgtcagtcactatgtaattacaattggttctttaaacatgatttgacatatgtgacataaaacacctcataataacgactaaaactgaatcaatccattatttgtaactttacatttagttaaatgtcggttctttattactgtttacttattatgttttaaaccccccaccgcaacacacacaaaagaacaataggagatctctggtaaagagcagtagagtcaattgattagagtttcatgaatatcacttgaccctcagcaagtcacatcacctgtcaaccccagtttcctaattgctagaacaaaggagttgaactatgttatctcaaaagtctattctagttcagtgtattattttaaacatttctaagtgttatttattctttcaagtgccactagatattttctat

SEQ ID NO: 148648 - DNA, 480 bp, Homo Sapiens
ttttaaatgacgaaaacagattttatttagtaaccactgacagtggggaaccatctgggtttcataactggcacatatcaaaatcaggctccactcctaccagagcctgggagacgagggccctatcttcagacgttgactgaaacaaacagtaaattcctttggcggcatcaattgagttttctcaggcaggcacttgagaagaccggggctattagtaactatgttcgggtttgttcaggtctttatagaccaaggtggccacctagtccagaagagggctcagaagaagccgcctagagtttggtcaaaaagagaatctttgccaagtagatgggggaactgggcggctgggggctgttggggatgtgatggtttatagtatttcttgtatattcaattattaaaccgtagcaatgaaatgcctaatcgaaatcataaaacgaaacaaagttttggctacattagcctatccgttat

SEQ ID NO: 148649 - DNA, 657 bp, Homo Sapiens
  misc_feature (278)..(291): n is a, c, g, or t
  misc_feature (548)..(548): n is a, c, g, or t
ttttttaaaatgcaatagatgatagtttttatttcaaaggttaagtttgtttaaatgtagtagaagaaaacctggactgaagacattgttgaacttcacataaatgtttattcttcacaagagatactggtttctaacatatcctttaaggcaacaattatagcaggtccacagaacataacaacatctcttcatcagactgtagttttggaatgcatggccacaggaaatcccaaaccaatcatttcttggagccgccttggtaagtcttctcaggnnnnnnnnnnnnnngtcttttccttaaattttgttcattctaatgaaatttataaaatgtttattttatatacaaaaacacaggtttggctgttgaatgtcttaatttttttggcatttcagtgagtagagaaaaggtcttaacatggagaattttatacttaattttatacttttcatgattgattgcttggatagtggtcttttgacataatttcaggttatttgttacattgtttaaactgaagtattctctttgaaatagatcacanaatccattgatgtctttaatactcgggtacttggaaatggtaatctcatgatatctgatgtcaggctacaacatgctggagtatatgtttgtcgggccactacccctgg

SEQ ID NO: 148650 - DNA, 649 bp, Homo Sapiens
cccaggaccccaggaggatgattttattcagggactctgaaggcaactgcttgcagttattaaaccacctgctgagaatccaaattctaatttgatctccacaggcaggaattcctcagggaacatgtagttcaaacttaagggaggatcagaaaaacagaagtccttctgtggtaggttgtttataagatagccaaatcaagtccttctatccttatgtgcccactcctttacaatgtgactgccttttttcccaccaagaggtagggtctattttgctaccccctcagtctgaactagcccatgacttgctttgaccaatccagtagagcagaagagatgctgtgtgacttctaggcctcaacttcaagaggtgttgcagcttccgctctcgttctctttcaacacttctgccatcacgtaaagaaactcagtctggtcttccttagccatttattcaagggcacttagaaggcaatggagccagaacttgagcctaagtttgtgactcatggattcaagcatttctggcctggatcaagtttttcagctccatgtgcctcagcttcctcctagtaagaaaaagttggagcaacttttcccttggagattacatcaaagatacttgaggttatgttttccatactag

SEQ ID NO: 148651 - DNA, 700 bp, Homo Sapiens
  misc_feature (454)..(462): n is a, c, g, or t
ttttctatttcaaagttttattttaataacagaaggatgtatagaagcaagtacttttcttgattttctcctcaaagagagtgaagctgcaaagggcaaaacacaggtaaatatgctatttagggaatgagtcagaaattttatgaggctatggggaattatcaagctccaaaaacaccttgtggtaccttaagaagtggggatttggagattatctaacctaaagcctttgatttactcataagaaaaccaaaacctgcaagcaaataaggtgcctgcccaaaggcacacagctcgtttgcaaagagtacagaccctacaccatggtgcttagacctacatttgctaaaatgagttattacaaatgccacccagcagtataggctaaaagagttttggtaaatattctatgtaccttatttactccaaggaaatttagattttatacgatacnnnnnnnnntctgcctcagcaagtgactgagatacaattcattaatgaatccaggtttagaaaccaaagtctgccagatgcacagagaacagttatgttgtaactagcaacattctaagagcccttgctaattctggttagatcagaaccactttttcttagccatggatagctttggctaatgaaaagtctattgttttttattctatgtgggcagtcttggctttgccaagtaaatgttgtgcta

SEQ ID NO: 148652 - DNA, 446 bp, Homo Sapiens
attcagaacagtgtctacaacatcggtgaatgaagtaggataacataactgagtagggagaaaataagccatggacatggaggcaagaaatgcaagtcactgggtcttggtctgtggagatggtggatacagcaactaaaagctcagcactgaccattcctgaagtttacatggagctgccagagacagaaggtacttgggagagacaaggtttcccacatactacagctggcacagcatgacagagaaatgcagtttcgttagtgcttctctcagtatattgttgcagactgttaagataaccgtctgaatctatagctccagagaaaatagagaaagcggtttccatttcttacactcttggctcctgcaggcttccatcattgccgctgctgctgtcaccactactaccactgcagggttgcctgtttgtttctgtctacatt

SEQ ID NO: 148653 - DNA, 342 bp, Homo Sapiens
ctgcattctgatatctttttaaatggaagagaaaccaatgctattttagttgctgctctggcctgcaatgaagctcagacaacatgaaaccctgcgttcttatttcaaagacataacagaaactctttgggtgctcagcattagagtttgtcttttcactcttggttatatttgtcattctcaattatattactcctttgccccaaggatagagatttcggttagttcgactagttatcctcagcctccactgaggcttatattcaactaaatgcctgtaacagaatgctcaaactataatggaataaatcaggcacgcccgtactttctgccctgttggaa

SEQ ID NO: 148654 - DNA, 540 bp, Homo Sapiens
tttgtttttaagtacatattttttaatgtttctgacatttcatcttttaaaacctcacatggcagtcccagaacagtgtatctcctccaccttcatgtgagtggtcatttgtatgaatgcccacacgttactcaccagtctttatctgtaagcctgatcatgccaaaaacacactttgcctttaacttctcaagctcaggatgcagactgttgggtttgcttccacaggggaaaaaagttccttagaaccaaaggaaaacacagcgaaacagacagccctgtcctgacagtcctcttccaggacagtagcagtctccagcctttgaccccacgaaggtcttgggcctcctctcaaggttgcaggcaggaaggagactgagtccaaccagcttcttctgtggtggtcctcactgcaagtttttcccccactttgggggaaaaattttcagggaaaacttctgggctgtagttggagagcagatccataggcccctccccagatctactcaatcacagtttctaggggtaggcagagaattg

SEQ ID NO: 148655 - DNA, 468 bp, Homo Sapiens
tttctttcccattccttgtgctagccattctttatttagtaatgaatcctcccctcaggattttgagatttggcatttttcagcatccaggtaacatctctcatgattagaaaattacagaccgtatctgtgactaacattcagtttccaacctaacaatagtgtttattcctccattaggagaagtttttgagtcaagtaaaatatggtttgtttcatatcatgccagaattgagcttctttatacagtgatggaaagcaagggaatggggccaactactgggagaagagtaactaaagtcagtcctttgctcctaaaggattttaaggtgcttaagctcgtaactcaggttgtgaatcttctcaccttgcagtcatcttaagtgaacctctgaagagagaagtggctaacagtaaacttgatggtttagaatgcagctaccaattatcgagtaccttattacagcc

SEQ ID NO: 148656 - DNA, 586 bp, Homo Sapiens
tttaaaagtctgaatcacctttaatatgggttacaaaagtagcaaaaccagctgaggcttaataagaggaggtggagtagggatccaaagggcagaaccactcctcactgcccactccccaccatatcctgggccctcttctggaggggatgggtggataaggggaagtgaatggtggctggatcttcggttttcttccccagaacagagcaggctgagcccagcaaccccaggaagcccacaaagggaaagatatatgagatgggggtaggggagcaccggagcagtctccgagagtgcaggctatggagacagcactcacaccacagaacagccctcagcttgggggcccaggacctggaccacatcttcctggcccatggcaaccagggcattctatagcaccttgtgggtggcaccactgtcttcttggatagcccagtccctcagcagtgtgtaggctcacacctggccttgggccatgatttctacagcctcagcttggtagcccagatggtctgccagtccccgccagcccttgtcaggttcacgtgacacctctaacagccgctccactttctcctgg

SEQ ID NO: 148657 - DNA, 553 bp, Homo Sapiens
ttttattgacataaatatagttgtaaatgccttcgctccataatagaaacccatgccagtttgtggtgcttgggtgttgtattttgaatttttctattacactcaaaggctaatttccccttaagatgattataacaaataatttttgatttatcatatctgaagaaagaaatgataatacatgatattaagtcattcaaaccatatgaagtttaggtaggagaaaaatgtattcttagtgggaacacaaagtcttgactccataaatagcaattccttttctctgagatctggtttatactttcattttttaaaagtcatccccccacagataagtctaaagcctgaaaagctaactttaatattgtaagttcagaggctgactcttggaggtattaaattaaaacttgccaatgcccttgttcagagctcttcacataggatgatattctgcacacacacgtgctccagttatttttgcttcaacatgcgagtagcattttgatagaagtgtatgtccagcaaagaattgctgctaactgattcaaaccag

SEQ ID NO: 148658 - DNA, 605 bp, Homo Sapiens
caagagttaataattttatgaaggccagcttgattacatcactcattcttcttggcatagagatattgtccaatactgcttttatttgatattcaactcttgagaattactgttgtctttgggtttcacatattttcaataatgattttatttaatactcatgcagtgggtaaaattaataccagttaattttactggtagaagattttaaatttaaaaagaaaaaatgaaacataatctggatttttgtatgaatccatgttaagctttgccatcagtaccagactggtccctctaccatttccactgcttccctttcagtcaggattgcatttgctctactgccttttagactatcctagaaaattgaggagattctaagtcatcccattcatgacgattactaaggtttttgtcagtctacataaaacttagtcgtgtgccacagataactttaaaaaacccaatgtatgcaaagattttgttttgtttgttgttcatatgtattctttctgttttgtttctgaaatatttcaatatgtaagaccaactattggcatcaggtctatatcactaaacataaatattaaatgttgtacttgaaa

SEQ ID NO: 148659 - DNA, 532 bp, Homo Sapiens
ttttttctcttccagtatcttagtttattcccacagccaccttttgaagtcaacgaaattgcaaacttcgtccctggcaatatgttttacagatgaagaaatgaaggttgggccagtatcggtgatttcattacggtaaattgccagttagtgacaaagctggcactaaaagcaaggtcttgtgacttttagtccaaagtcttcctccgtgggggccctgatcctccagcctgggtcttcctgcctgtgggctccctgtgggcaccgccactctcaattcccagcccctttgtgttgttctgtctgctcaggggcagctcatgctccacctcaacctccatcccgtgggcctctccacatagctgggttcaggcagggtcttctcctgccgctttggcttgtccagggtcccgtcacccattctctgcctcctccctccacacagggcccggcagaggcgcctcagaaactcaggtcggtcctcagcagggcatgtgggaagggcccggtgtcgggcattgtttccctgtca

SEQ ID NO: 148660 - DNA, 543 bp, Homo Sapiens
tttttataaaacttcccaatcatgatctttaatttttacgaacacaaaggaatcacattctttagtaaaaaaagggtgattacatggcattcaaataaattctagggaaggacagattcaaacatcctatgaccaaaacacattgtacaaacctacgttagccctgaaaggagtattttttcaccttgacagcaaagtacacaccaattggcagaaaatacatggctgtctcattattgaaataaatattacattttacctagccacagcatatttactgtgcccatataaatgaaaaaagtactacacaatatatcataatggtaactaagccacaacaaacttacggaataagtaagatacataaatgataattctgaattgcaaaacagtaatagcactgagaaaacgagacaaaaactaataaaacactgttaaaaatagctaatttttctgaatacctgttatgaaaatatctgtacccacctagaccaggcatttttgacattaatgagtgatgcatgtcagttatattgcatgaaa

SEQ ID NO: 148661 - DNA, 550 bp, Homo Sapiens
  misc_feature (440)..(440): n is a, c, g, or t
ttttacttaaaaaacctctttattttgagaattatagattcacagagagtttcagaaataatagaggaactctgtctacctttacccagtttcccccaagggtaacatctggcactattacagtaccatgtcacaaccaggacactgacaccaactgtcccttgaatgagaccgtgtgattttgtccttcactttcctcccttccgcagctcctggagggaaagggctctgttctcctctccctcagctttctccctgtgttaccccttcctttcctcagggcctttccatcctgagggagaacagcacagtttggtttcctgtgtcccttgctgccacgctgccgcgattctcccaaatgttggtgtccttatattgcttattgggaattaatcatttcctttcaacattgtggcttcccaaagagcgaagttttgccntcttttctggggatggagatgtgaactggaccggcaattgaggggtgctatgcttgacggggatctcttccttggattctgcctccctgcaccctacttcaggcaccccg

SEQ ID NO: 148662 - DNA, 560 bp, Homo Sapiens
tttgaagacgatgaagaagagctttatttagtgttagaagagctcagaggagacctgtagtgggttgttactctctgtaggcacatcatcccttgagtattcagctctcaacagagagggggccctggagaggggtggctcctctctgcaggcagggtgttcgggatgtctgctggtctttgaagctctcgcagaaagggtagcttctctcttcgaagctcttgcagagagggtagctcctctctcaatccaaagtccaccagggctccatacactgatgccgacagttgtagtagcaacacttcttgaccccctgcaactcttatcacgccagcgcataggtaagagagtgaaagggcagtcaagatcaaactctgggcaatatcccggtttccgtgcagctgcactcctcaagactccaggctgggtcattcagaggcaaaggaggatgttcacagagagtagaaagaagccgctcagcttcataatgcaagaaaacggtgtgggggcacctggaggctggacctgtctatgtcagctttggcggggccccatcaaca

SEQ ID NO: 148663 - DNA, 461 bp, Homo Sapiens
  misc_feature (229)..(237): n is a, c, g, or t
  misc_feature (412)..(420): n is a, c, g, or t
gtagcttccttttagtacctactaagtcttcgggtgtatatacaaataatttattcatatcagtactttttgattaattactatttattttatacatattagatatctcagtgaaatgaaaatattccaattcaaagtttattgaaaaagaagcattgttttcaatggtgacaagagtgacaccagaagatctactgtttttaacgatgacaagtgtgataccacaagnnnnnnnnntaagaaaatgtactcaaacagtctcaaatacatcagttgcttgactggatccaagctgatcatgaactgggtggtaaaagataatgacactggcagtttcagagaaattaaatgaacaaaacagaacaaaaagactaacaggagtaactatgatgctatctgctctaaaactaannnnnnnnngagatagtctagctctgcacctaggctggagtacagtggca

SEQ ID NO: 148664 - DNA, 1067 bp, Homo Sapiens
tttcaatgacaaaacacacactttattacagctcacaaactgaacaagaatgaatgaaacccaccatggataacaaaacacatagaatagtggcctaattgattcataatagaatccactgctttgcatatttatttttccatctcttacagcttaaaaagaacaaaatggattttaattaaatcttgacttataagaatcctatgtatcagtgatgagttgtctaatgtcaaatttccaactgaagaaataattattgactaagttatgaatgaatatagcacattactagagaattaactatgtgtgcatttattgtcaggcaaccatgtaggattgaaaaacacagagtacaccaggagacccaggttctaaccatggcctggccactaagtagctaggtgagtttaggaaaatcctggaacctctctaggcctggcttgctttatctggaaattaggtatttgactagatgatatagaaagtgcttttggctctcagaggccattgaagtatgggccactgtggctcttcgaccccattgaagtgtggagtaaggctaactattgttggacagcagaaatacagtaaaaacatagaacattagattaactgaagccgatggggaccttcctctcacaggccattattttttcccaagcaagattgaggagtctcacagctacagttgaaaactggacttttctcaattagcagatgtagttaatgggcagaatttcttcaaagttttcctcttctctatttctctaaaaccaatggctgtgatagctactcatcacgcgcatcctggcttttccttctggcttcataaaggtgcttgtgtggcagaatggactgtgcgaaggtcctgccctggaccagagggagaggagttccatgaggtgaaatataagggaacaggtgcgtccacctggggccaagtctgggatgaaaaatgcttttcataggttcctgagggtgacagttgtacaaaggcctccttgggggcagaaggtggcaaaggcacagctgcagatgggctgatgagactgtttattccctcgcag

SEQ ID NO: 148665 - DNA, 651 bp, Homo Sapiens
ttttttgattctgtcatgcttttattttaaagaaaatatgggatgttttgattcttggtacacaacaggatattgctgctaagaactgtagatagtttggtagagagtcattaactcctattcatccttcaataaccaactcaaataaaacattcttcatggaactttcataagacacttcctcctgaggtagaactattgtttccacttgtggctttccctagtactttgtatatgctttggttcaggtgtttttatgtgtatccccaattatttaccaggataatctgtatatatgaagcatccactatcatgtggttgcagacatcacagaaagtgggcttcttgaagatgtattcctgaaaggcatgagccttgccacctggatgcagaccagccctggcgggtgtggacgtcaggcttcctggagcagggagtgggctggagctggggctgatctcagccaccatgtgtgcttgcagtttcatgtcttcgctgttggttcgctggaagaagttgtcagcacttttgctccgtaaactcttggtcttgaaagaaagtgatcgttttagtttctggagcttggattcctggctgctggtggatgcaggagagggcggttgctcggcgcccaccgcctccttgggcagc

SEQ ID NO: 148666 - DNA, 337 bp, Homo Sapiens
tttttttagagaggaaggagggattattttacacaggatggtcaggggaggccactttgataggtggcatttagcagtgaggcttcctgaactcagcatgactgctccgcttggctcagattccagctctgtccactgtagttgaggaattatcccttatatttctgctttaccttcagtagcttcttccaatcttctctttcatccgatgaccttgaggcacatttaatgaataaaccaggatgggtcaggaagaagttccacatttcccaacaggacaatcatccccctgccccctcccattactgtggatgagctgtccatgttcctgctgaag

SEQ ID NO: 148667 - DNA, 454 bp, Homo Sapiens
tttcagttcaaagatattaatattatttcagcatacctgttaaagtgacttaacaatctacttgtagactgagtttttggtcatattcgaaggaccaaaaaatcaaaattgatttaggattaacttcaaaataggacccaatcacaatagttgttcctattgcactgctatgcagtttgcctggggtcatttcttcctggagagtgacgcctgacacgcctgccttccactcagcctccacagctgggaacagaattacactggtgccctctgctgggatgaaatgggaagttgatcaggaaacaatggtgtcctcgtcttttcaacatagagatggaggtggcgattccaggcccactgcagcctccaggctggattcatttagtgttctctccaggcctccctctcaggtgtcttctttgcatcatacctgaatcttgtgccaggctttctg

SEQ ID NO: 148668 - DNA, 697 bp, Homo Sapiens
ccatgacatttcactatttatttaaaatattaggaaaacgaatatgccacaaaggcttaaaaagcaatcattagtcaaatcaaaaggcaaattgcaaatctgctgaaaaccacaaattcaacaattgcactggctgagttagaaatggcccaacattaaggataatctcaaatgttcctggaccaaggaagaaggggtatatggaaaatgagttttaatttcttcagattcctttctccaagtgggggggtgtaaatcaaagcaaaacaaaaaccagtatctgtgttccatgtcaaatgccaactataatgatttaagtaaattatttctcagtaattagagcagaaattaaaagtagtcctttattatggctctggagtggtgtgataatgaacttaaatacccaccagaacttgacctatgctgagaatcataaagtggacagttattctatcaaggcaggacctttttccaagaaggcaaaatacttcctgtgacatttttgcagaattaaagatccatcagcatttggaaaaattattttgctcattagtacaagcaaggtaatcctatatatagaatggtggctcagaacttaactgcactggaatactgaaggctccgtcctaaagaaaggcagaacagtgctgtgggcaatttacacctcggtcactccaaactggcctttgaggtaatg

SEQ ID NO: 148669 - DNA, 690 bp, Homo Sapiens
ttttttgccattttacgtgtccatttattgccctaaatggggaggggcttcctgcctgggccttaaagggccagaggcaggaaggccgtggggacccagtgggaagtgtgacagcggggatgggggcagcgatgaggaggccagggggatcccatctgacgcccaactcatgggtgggactgaggcccaccctgttcccacactctgagatgtcatgggccaggaagcccagactacagcccgagcccaggttccaagaggaagcttcatgacgacagtggaggggctgagcttcccgtcactgggggcaagcaaggccagactctcggaagcccatccttgtccaccctgccatcagcccaggctgcacctgcttagctgagatgcctgtgagaggccgaggtgacctctctctccctcccctgagggaggcctgcttgtcacctggagatacctgccccacccccactctcgcctgagcaggtggaaggctcagcctgggagcctggcggcctgcagaatccggccagatccttctctcaggcatcctgataggtgggatgggccttgttttccagtcaaaccagaaaggcgtgggtggcgacacttccaccgagtggccgtccacagccctcagagctgccttgcaagggagctctcacacaggagcctggggcagggctggagtcc

SEQ ID NO: 148670 - DNA, 586 bp, Homo Sapiens
  misc_feature (200)..(200): n is a, c, g, or t
atcatttgtatatatattttgagcatctttgctgggtggaagaaggatttagggagacacacagtgaatcagaaatagtccttgacctcaaagacaaacccccagcctagattcatacacagttacctaccattaacacaagtcagagagagaggaggagtggatgcaatgacaagggcaatggtggtgaatgaattgancatttggaattggtcctcgggggatgactgagacttcccaggtcagaggcagaggatgaacattcctgtaggggttcccctctcttgctggtcatggaaatgcaaggtggacattgagattccctcggtttcaagtgtcattctttgcttcaggaaaataaagctttcttaaatatttgtattcttgccttcctctctcattcctctctcttccatttaaacatgtcttgtttcacatctttttcttttgccatctgcagaagaaagcacagcttggcagccacctctgatagatcagactttcacagctttgaggacccctgccttctagtcaaaaccctgatggcttcttcaaatctctcccccatgggtcctgtttagcaagg

SEQ ID NO: 148671 - DNA, 584 bp, Homo Sapiens
gattgtttttatttaaggaagaagaaagggccctttttgtataaataataccaacaaagctaatattttttaaaaaagaaattcatccaaaaccagtgtatctctttatatattaactttaaataattggtttgattgatttcccctctgccaccttgagttgattatattaattttagataatatcattcccaaactttaatccaaggacaattgtaggattggctgcataagaatcaccttgggagctttacaataaatacacactcttggtacctatttccagtccttcagattcagaaggccctggcgcaggaatctttaacaaaggtcaatttacactaatggcgacagtcttaaatttgccacatctaaccccaaactggccactcagatgatagatttctatagtttcctttggatgtcttgctctgatcaccttggtgatttttcagtcagattactttatccatccttataatttagcatgtataacactggaacaatttcagagcactggcttctaagtccatggggcaagtgggatttgtataaataggccgggaagttctactccgagaaaa

SEQ ID NO: 148672 - DNA, 867 bp, Homo Sapiens
tttaaatgcaattaacctttaatttatatatatgaatgaagagggatctgaggtattaaaaacttaaaatagctaattcaaaaataatttatacttggcattggaaatccttataattccctacatcatttttctttcttaattatgttcctcctaagctaataataaagttaattttccattcttgaatgcagattaactgattgtggaaagaagtggtccagcattttgatgggttgaggagagcctgcctaggattaaaatgtgaactttagcagttgacttattttcacgtcatcaatgtttttgagtcaaaggtgccatatagcagagtcttctaccaggattcctcatcctgatcattcccctctccacttctttcttggtaaggtagaccaactataactctctcagagatgagggtggggccaatctcatccaaattttatagcttctcaggtggtgtctgggtgtggtagtgatcatggtggggcagaggtgggataaatctttaggaggcaagtacagtgttaccctcagatagctttaagacacagtatcctcctgtgtgaagacagggtcatcatacatgccttacccatcccccctgggtttgctgtgaagattaaatcagataataggtgtgaaagcactttgaaatttgtaaagtgttacacaaatataacatattgtctctgtctttagtactcagaatacttaagggatttaaagaaatccttctgtggtcgtaaagcagattaggataaaagagctggtgaaactcatcattactaataaaaaattactcaaagtatatgtcaatggtattatctctatgaatttttttaaaaaccacactttttgttt

SEQ ID NO: 148673 - DNA, 665 bp, Homo Sapiens
ctgccgtgacatggacatttattaaagttcaggccttgaatgcaccacaatctaaatttatttgaatttttacttcttgtttaaaatcaggttaaatattctggtcaagaatactatataggtgatactgtgtccttccttctatatcacaccaggaagtacatgtcatttgtcccacaactggtaatcttgactttaattacttggttaaggtagttcttgagtatattttttaaaggcacaataaaggttagtcaacatacacaccatgatcggcaaagccttccaacttaacgcatcacttcctaccttgtgctaaacatatattcattccattctaagggcaataacacagtgccaggttgctgtgttcctttaattacatgaaaatgatctcaaatggtgccactagaatgaactcaaaatctacaaaatgacatacagaactcaaaaaggcttgcctcatgtgtaattaatatttgcttttcagtggtatttacttccataacctagagcctcatgagcccatagatgacccaagacattagtacgttgtaggccctagtgtttcctttccctgttacaactatagtaagttttgtgcttttctgccattttttgtttctatgtgcaagagtaacttccagttatgtgtcctactgtaa

SEQ ID NO: 148674 - DNA, 571 bp, Homo Sapiens
agccgctcttcttcgccatagaacacctgcttcttggccttcccggcagccacactggctacagacacgagagggatggcctggctctcagcgttgaagagctctgtggtcaggccgaggtagttgtgcagagccagaaaggtcaccctctgcagccgcaccatgatgatctgcaccaccctcaccagagtttccggatatttctcaaaaactccatgaaaagccgcagctggaagccggaggatggtggacgggatggccgcgcggacggagaccgttttgtaaggtgcagcatggccggtgatgatgtccaggatgctgagcaggctgtggacgctgtctcccgccagaacctctttcaccaccacctcggtgccgtcagtgtcctggatgcagacctccagccgcccgtcctgcaccacacagatgctggggtccggctccctgggctggaagacgtgcttcccttcctgcagctgcacaaagacgatgtgtttgcaaagctccaggaacagcggcttctcaaagtggcccaggacccgaacgtttttcagcatgtaccggcacgagg

SEQ ID NO: 148675 - DNA, 389 bp, Homo Sapiens
  misc_feature (232)..(246): n is a, c, g, or t
tttatagttacattattattgttttattttactaaatattacaaagcaccaagcatctgccacacattgtctcatgttcatacaaatactgccggtggctccattcgtaatacacatcacatagtacaaggctgaagagtgtggatgctgtagggagcttccagttttgagaatttagtctctgatttctctttgagtttgagtaggttctgtaaactttcttgtgacacannnnnnnnnnnnnnnctgtgtccctaggcaaatcaccacctcccgagtctcagcatgttaatcttgactgtgtctttccaaagcattcagtcagttttcctagattttctagtaatttttccatatattatgtttcttttcaatggagccgtcccata

SEQ ID NO: 148676 - DNA, 725 bp, Homo Sapiens
  misc_feature (46)..(55): n is a, c, g, or t
atcatgtatttttaatagttatcaaatattacataataatacaagnnnnnnnnnnagatgagcctagaagatctaattgctactatggaacttagaaatattttgaaacaatttcttgggttccgaaaattgactgtggatgaagccgactagcaattcaactgggagtgacaaaaagaaggggtgctaggctggtaacagaggatgggaacatctgtggttgggttctgttgggagagaaatagggtgatattgtgacttcagtggtagctaactaaatgcaacattataatgccccttgggaattttgccaatctgtatgcaaaaatggagctttgtcagctactctgtgtttatgtacagagctatgtcagctactctttgtttatgatagtcttcggtgaattgcactaatcaattagttattgatcatgagccttaaaattctggtacagtggaccagaaggcatgcgcttttcttttgagagaatcaaaaggtacctggagaacatttactaggtggcttggaaggggatctgaagatattctaagaatagcaagaaaaaataataatgctgtaagtaaaaatgcagcttattgcataagagatactgagattttcacaaattacataatacattttcaaatatatttgaatatttttctgatttgtgcatgcctttgttgtactaaaataaacatgtactgtctaaggtattaaatcc

SEQ ID NO: 148677 - DNA, 623 bp, Homo Sapiens
tttcaggtgcatataatttatttggaaagtgatcccagagggcatcaggaagtagggagtggggaagcgagccagagaaaggaaggcaggcaattcagggtatattagtgagcgggttatcactgggtcttcttaaaattagggggtgtcatgtgactcattctggtcagtggattctgaacaaacatgactggtgtaatttccaggtgaaatcatcttattacaggagccacactttctagtgctctcttctcttctgctgtcctgagatggcaacattgcaaaatggcagagcccacaccagcctgggtccctgagtgactctgtagagaaaagccccccgctgaccagcactagacatctttcatgagtgagaaataagtttcgttgttttcaaccaccaagaattgggggctgtttgttactgcagcatagcctgacagatacatagagagaaaggactcaaaccttcctctccacttcatcttcttgctcccacgaggagaataggtcttggtgttcccctgagcactgggagctggggaattgataccccagctcctgttagtcattggatgaaggttgctcctagtaggtattcattccgccaagattatagctgc

SEQ ID NO: 148678 - DNA, 854 bp, Homo Sapiens
gactgctaagaaagttaatcatttttatatgtttattagcccattgtgtttccttcttgtgtatcttgcctgatcatgtcctttgctcatttttatgaaaagctgagctttttcttacatatttgtatgaattctttatgtattaataacattaaacctttttctatcatacattgcaaatatattttatgatatttttgccatgtgcttttaatattaatagtcaattcaatttttttaggtacaacgtgaaaggccatccccactctgagatcagttcttcaactatattttcttcttgatcttttatagtatcatttaaaatatttaccattttaagccatcataaacctatactgatataaaatgtgaggtagaattgaattccccacccagtctcagtataattaattaaaaataagccctactagatctgcactgtcgtgctccagccccactggcctccttgcaattctcaaataaccagacataatcaattctcagggcctttgcagtgtgttgcctcaggcttcagtgctctacctcagatattcacatagcaacgtctctcaatttcttttgatcaacaatccaccacctcaaagagggcttctcttggctatcttatcaaaactattctatttatctattttactttttcttctaacactataaattttaacctgtttattttttgtctgttaccatcattagtgtaagttccatgaaagaaaagatttgtgttcatttttacttctgtaacctcgaaggcctagaagactgcccaatgcataatactcaataggtatttgttaaattaatcattttactgcattaatttgaaataccctctt

SEQ ID NO: 148679 - DNA, 343 bp, Homo Sapiens
tagacctgagttgtctttttatttgtctgtcttctgcactagtctctgaattgggcaaaaacaccatttctgactcataccacatgctccatagatggcaaaatgtgctaagccctaagcgtatcacacactgtttcttgcattcttcagagtagccatacacagtcagccttccgtatccaagggctcttcagattcaaccaacttatcaacaagtagcctccaaggtcactgggggaagaaagagaaggtagagggaggaacacgtgctcttaattccctgaaatgtcatttttcttcagagcctgttgaccaaaattaatccaatggacccaagccaact

SEQ ID NO: 148680 - DNA, 580 bp, Homo Sapiens
tttgatgcctatgtatgtatttatttgttttttagagaagggggtctcattatactgctcagactggatttgaactcctggactcaagtgctcttcctgcctcagtctccagagtagctgggactacaggctcaccctactgcacccaggctggaatttcaatgtcaagttcaatggctggaaatcaaacttttcctatagcagtatatttatggtgccatagtgttgtggcgtgggcacccaccagtattgttttgtatgctgttggaatgaatgccttctagatttactgggagaggtccatccatgtccaaagttccaactctcttacaatctttaatgtgcaaatgggagtggagtaccaagaagaacctggatggtaaagctccacttgcaggtagagtccaattcaaatgttatttgggtctctgtcatctctgttttctcatcctcattgagtctcttttgctaatgccatccctggtgggccagtgccctcagtgtgagtatttcttctggcttcctagccttttatttccttcaagagtaaggtgagattgagcatggcagaagcagcctg

SEQ ID NO: 148681 - DNA, 452 bp, Homo Sapiens
ttttaggtattcctaggggtaaatttattttttgttaaataataagatgtttatgtgcacatgctagttcgaccactttttaactttagttaatgttttgcaatttctcctgttgtgtggtcatactgtaaggagacttctgttaatttgctcttctgctttcctaaccacgttgatttggcagtgcttcactgcatcagtgcaatctgtagcattagaaagggatagaagcaacaagaatatgtgtagatcaaagcaactctaactcctgagtcctctagcttttttgtggttagaatgcaaataggacagttcttcagttcttcactcacagcaagcatttatggacctgaagaaagcgcctcgccagcaaggtgcatgatcgtccaccagggcaccattctggataatgttaagaacctcttagaatttgcagaaacactccaatttat

SEQ ID NO: 148682 - DNA, 1438 bp, Homo Sapiens
  misc_feature (945)..(945): n is a, c, g, or t
  misc_feature (956)..(956): n is a, c, g, or t
tgcaagcagaatggtggctggctggtcttgtaaatccccttggaatccgccaaaataagtctgcctgggttcagaatttatgatggtcaagccggtgtcaacattcgtgctcggcctcaagcttctgaaagctgttttcccggttgaggaccttcattctggccccggattcaaggtgatgagaagacaggtgcaggtgggcacccatagctgggctgctgacctggaatgaccggccagggcttttccacgaagtgccagcacacctgtctgatgtggggctcccactgggctcaggaagctccagagaatgcccctgggacctcttgcctggttcctctggctcctgggttctgaggtcctctttgcagagacagaagtcagcctggagcccaggggaagcatgccagctcccaagatgccattcttaacaccaagttctggattcagctgaacctgaagcagaatcttgttgccatcgtagtcctgagtctgccacctggtgctgctgataggcatgcatggattgggtagcagaggcactaactggccgatctcttgaaccttaaactgcagcaccgaagactctttggggtccactgacattcccgggggcagctgcttcagggagagctgcagagcaaagctcttggaggcatagagcacgaagaaacaaaattgctcttttgcaaggtcgcttctctctgcaggatcatctcgtagagtctgatggcgtcttcatagttatcaaaactgcagtacagcgtcaccctcaggatctcggagccacagtgcacctgcctcaccccccagatgggcagctgactgtccaggctgtagaactcctgattggcaaaaaagtagggacacagccttccccgagtgtcctgggtggggtagcactgccatggcgaatgctggagagagtccaggacgcgaaatagntctatcctctnccggggctttcgtgcaggaagagcaacacggacatccctggaaaccgggaccgcttggaatgggacttttcacagtatttcacaggactggcccgttcagacacctgaaagagccggacctctgggcaaatgcaatccaggagctggtccagagtcctctgcagaagggagccgtgcccagagttggcaagaagatggacagtcatggccagaggcccctgtgtctcatccatggaggaactgcctgaggctgacaaagacagcgtgtgtagaaggcccactgttcaagtttctgaaatgaatgaagaagcggcccagccttcagcccgcctgaaaaccttcagctgcagcggctacttctgagcagagctcttaaccagactaacacgtgctcctggccacccgtggacttacggcaagagaagctcacaccagctcgggttcagcagcctccctctccacacagcagcagcggggtcacg

SEQ ID NO: 148683 - DNA, 481 bp, Homo Sapiens
tcagattatgctgtggacggaggggatggtggaattgttcactgttgccatgatggtttttcgtacatttttcctccaaagctcctagagttaatttccttggaaaatttacttctgaatatattttataaatctggggagtatcaccatgtcttagaatgagctgagtggtaaattcagttgccaatttgagtacgtatttcagaaagctgctattgacccctaagggggcactgaataatgactgtgcttggagaagagaggttgattagccatcaaatgaatttgactagatgacttgcctgtttacttcatatatgtgaaatacagagaagcatttaatcgtaaatgtttcatttattttatgatcctgagaacattgcagctggatttattgcttttccatacttttattttctttcactcttccctgtttccctcactgctattttcacctactgctgtttaaccttcaattaaa

SEQ ID NO: 148684 - DNA, 509 bp, Homo Sapiens
  misc_feature (112)..(341): n is a, c, g, or t
  misc_feature (368)..(429): n is a, c, g, or t
tttttttctatcatttctgttttatttgagttggaatactttcataaaaacacacattctctcatctactgttttgttttccaggagtaaagttcatatagaaaaggcaggnnnnnnnnnnnnnnnnnnnnnnnnnnnnnnnnnnnnnnnnnnnnnnnnnnnnnnnnnnnnnnnnnnnnnnnnnnnnnnnnnnnnnnnnnnnnnnnnnnnnnnnnnnnnnnnnnnnnnnnnnnnnnnnnnnnnnnnnnnnnnnnnnnnnnnnnnnnnnnnnnnnnnnnnnnnnnnnnnnnnnnnnnnnnnnnnnnnnnnnnnnnnnnnnnnnnnnnnnnnnnnnnnnnnnntcgctaatccagacttcatccccattnnnnnnnnnnnnnnnnnnnnnnnnnnnnnnnnnnnnnnnnnnnnnnnnnnnnnnnnnnnnnntccagtattttagtttctggtcaaaatctcccatctctccattcatccttaatcccttttgagccatcttgtgcactcta

SEQ ID NO: 148685 - DNA, 333 bp, Homo Sapiens
  misc_feature (304)..(304): n is a, c, g, or t
ccgaaaaaaaggatgttatatttatagggcctatttataagcctttatttaaattttttttgataggctcagccggggacccagacactataatgattggcgcatttttccgtccttcaaaggggcgggttttagagtcagttttgcctcagcgggccctgggattggccgacaggggtttaccggtggtttttattggccttccgggccgtccgtcggacccgaggaggcggggcaggcggttggttggtgactgggcgggcgggccccggaattgtccctcgtgccgcctcgtgccgaattnctggcctcgagggccaaattccctatagt

SEQ ID NO: 148686 - DNA, 307 bp, Homo Sapiens
  misc_feature (145)..(145): n is a, c, g, or t
  misc_feature (213)..(213): n is a, c, g, or t
  misc_feature (228)..(228): n is a, c, g, or t
ctgccaactaccatgcctggactagaaatttctttttaaaaccctactccttctctaaagcgcagctcaaatctttcctatgaggctgagtttgagtcgaaagaaggcactatgggtaggggctgccgctttctgcgaaggggancaaggatgaaacgttcccttaccatggtgtgggacagtatggccaagcaagccccaggtgatgggctntggaatggggtctantggggaggggggaagagagaggtggcagaactgctcagcatcttacctccccagaccactgcaggaaccacatgtaggg

SEQ ID NO: 148687 - DNA, 647 bp, Homo Sapiens
tttcatagtttaaggtaaaaattttaatcataggttatagaacaataaagcaaaactataatagccactctgagcaacagtcatcatgaaaatcttacattcttaagatgctttctagtgttgggagcaccatcacatccatcaccccttctgagcctcagaatagctctgggaggaggcagggcaacagacccacacccattccacagatggcaacactaagcccagcaccatgctcaaggccaccagtcactcctagctggagctgactctgaaggatggggctctctcaactgaaccactattgggccagcttgtgtgataacagccgtattcctagtctttccacattcacatgaaggctaaactcagcatccgagaagtggagaggggcctcagagactcactcaccttttaattttagggctgcagaagctgtgacacattgggagtgactgatggaaatctcatcaagttgaagcgggggtaaggtaggtattttagggcaggaagaggcatcatttttacaaatgaactgccaagcaccaacagattatgcagctgcttgtgagtcttttgctccaaactcctcttctgctaccctcgtccactgttcctactatgtcccctgggaactcctttttcat

SEQ ID NO: 148688 - DNA, 657 bp, Homo Sapiens
  misc_feature (86)..(208): n is a, c, g, or t
attctggaatgtgtttaatcaatccttgttgttggacattaggtagtgttaaagtgtttcctgttgatgttgatgcttctttagtnnnnnnnnnnnnnnnnnnnnnnnnnnnnnnnnnnnnnnnnnnnnnnnnnnnnnnnnnnnnnnnnnnnnnnnnnnnnnnnnnnnnnnnnnnnnnnnnnnnnnnnnnnnnnnnnnnnnnnnnnnnaattgaaagtgtacaagtcagtgatttttagtgtatttacagagttgtgcaacatcaccacagttaattgtagcatatttttatcacctgttgatatcttcccagcttcccctcatattcaagagactgggggtacagctttgtacctctcttgctcactgtcatgttgcacataagggcttcgtaaattaaaaattagtaacttgaaaataagtgcttagtctgttgaatgctgtgtgttggacagtgttgcaaactaaactcacgcaaggagtcacttgtgttagtattctgtgcatgatggttacgtatcgtgttttgccgttagaaacgagaacagacaaatgagaacatgttcgttaaagggctctgaaacagtgtgaattataaatgtattgatggtggggatgtgtcaccatttgcagttagattcaggagctgatgaacaa

SEQ ID NO: 148689 - DNA, 359 bp, Homo Sapiens
ccaaagatggcagtgatttaatcttttgtctctggacagctctgctcccgccccgtgggtgcccctactgatgtgctgtccatttcagaaattaaatcaagcagcagggggaggatggggttcttggccctgacgcggtgacaaatgctccaaaggaatcagctgtgaaaaggttgttagaagccaggatgagagacagagacgggatgaggtcatggacatggagaacacagagggacagagctgacggttccctcacacctgcacacacaggctcacagggggaccacatgtcagaaacagtccccccgggcatcccaaagcaacttcactttgccacacacaaaggaacaagggca

SEQ ID NO: 148690 - DNA, 535 bp, Homo Sapiens
tttggagtgacagcatttaacctttaatgtgggtctctcagccctgagtacagctgcagtctaagggtggggttggggggatctaccgttttttcctcttagtgtgtgctttggattagtaacctgatggaaagcacgctggagttggacggcctggtttgcatctgcttctaccacctttgttatttcggcagtcctcagtctcggactctccctctgtgaaatgggggaacatgaacttcctcagatcgtgacagcgcagctccacctggcacagggtgaatgcccacaggtggcagctgagtgacgcagggagggccggccagccctgcagcaactgaagcatccactggcacctcaagtgctggtcataggaccagacaccaccacaccagctaggctcggagcacacaactgggtccctgaaaccctcaggaacttgtttctgtcctgccttctgccagaggggctggagcagcctctacccatggcacctcaagtctgcacccttttatgaagggtcactaatcagtca

SEQ ID NO: 148691 - DNA, 335 bp, Homo Sapiens
aaacgtttattacttcaagggaaagacttttcttttattcaacatgatactggaagccactgggaggtctgggcagaggtgtgacatgatctaatgtctgtaggaggaggattcatctgtgttggtgcttaatgctgatgcttaggagccgttgcaataatccaagtaggagatgctggtgactgaggctggagaggagcactggacgggtgggaactcactacccaaggatgaggccatggagtgaacccagtgtgctgtgatcgacacacgaccaccgatgatggaaatttccagagtggggctttggccacagagaaaggggagcaacagca

SEQ ID NO: 148692 - DNA, 595 bp, Homo Sapiens
tttttgtattcacagagttgatggattattttaatggtatgatatgttaaatgaaaagagcagtgtagcagattgcattttccaacatggcagaaacatcaccactcgtctcacagggtttcactacaatgtggcctcgacgatcctcctatcaaatgatggggtctttgccacgtccccttgaagctgggcagatctcagtgtctgccttgaccaagaatagtgcagaactaacattatgtgactttcaaggctgactcattaaaatgtcatgcactttcaccttgctctcttgagatgctcactcttgggacccagccaccatgctgtgacgaggcctaaggcaccacatggacaggccatgagtaggtatttcagtggatgtccccagctgacatctcagctgatgacttacatcaactgccaggcatgtaagtgataaccctcttaataattctagccctcacccacgaagccatccccaacctctgtatctccccatttgaggccccagacatcatggaacagaaacaagtgattccaccatgatcctctcaaatccctgatctgcagaatacttcagattctctctttt

SEQ ID NO: 148693 - DNA, 605 bp, Homo Sapiens
ttttttacaggatgcagtattcaatttatttctattataacaaaagtaataatatgaatcagcaaatattatgaattagaaagtaaaattactttagtgttgtgaaagtcatccagattttgtgcatctaattaagtctgatgcatgtagtcagggatgaagaaagtccctgaattccaagagatgctgtttcagtcaggataggctagctcatcttctatattccaatgcctagggagtttctcaggacaagaatggaatcccatgttgtgttcgtctaccgtttggccgttatcttcccatccttctattgatggtcatattcttgttctccaagatctctgtcttgttctctgttgttcttttttgtagaattcttttctctgtgttcatactgtccattgaagagaagcaagtcagctcgtgtaacccaggtgttcttgtttgctctttctgtcattctcacagtagaacatcatgatcccctggcttcttcacagaaatactgaatgaaacctgagaagtgctttgcagaccatctgttagcatgttgacgtaatgacgatgaaattttccagcctcatcttccaagaattcaattcctt

SEQ ID NO: 148694 - DNA, 459 bp, Homo Sapiens
gtatttcctcttttaagaaattgagagcaagtaccttttacctgggaaggggaaactcatcaaatgctatctgctcttgggacccaatcctgagttactttatcagattaacctgatagtcaccagaactccattcaaacagaacacaggactgttatatttgggtcagtaaaggacaaagatctggtgtctggactgcaggtgctgtggtatcgttggaagcaaagatggaaaacaaagcaggagatgaagggttcatagagataaacttcttcctattttgcctgggattccaggtagcagaactggagctcagacctcttttggggggatcctaagcaatacttttgctgctcccttctggtccacatcacaagtctggagaatctaaaacaagctgggcaatgagaaaatctaactcttcatgtgttattcccaataaatcagttatgacataaa

SEQ ID NO: 148695 - DNA, 473 bp, Homo Sapiens
cttgtgtatacattagcagctttatctttaagtaatgaagatcagtttataagtggttttttaaaaaatgcatttcccaagtacagattgctacacatcttattcacaactatggccctattgatttcagcccaccctgctgatacttgagttttgggtaataatgatctttttgtcaacctttttattactcacagataatatgaaagtcccaactggcccatctttcatgcaagaggcttttatagcccacaagtgtccttggccaatgcttcctgccctctcttcctatcctctcacctctctctctagggcagccccaactgctatttatagagagatgtgcttaactgtggatgtcctcagctgtttccagtccccttatttcactttcttcctctgggtgaatggctccctcctgcttcaccatctcctctccaaaatgagcctgcctctttgcatgccttcaaatc

SEQ ID NO: 148696 - DNA, 517 bp, Homo Sapiens
tttttcatcggcaattatgacgtctgtatttatttatggacataaagaggcatgtgccaacaaaaaaagcatgttacaaagcaggatatatactattttttaaaatctataaatgtacagatgtaccgcaggttatgaaacacacaacagatacaaaattgttttatgcaaattgctccataaggtacataatttaattttagagatgtggacatttgtacatccagtgcaaggctaaatgtgggaaatgcacttcagagctccacagccccttccccatgcccctcactgggtcctcacctgtctccattacctgctgtgatctctgtgtgtcagccacgctaattccatgttgtttgtgtcatttcgcctttactgccttctaatttcaactggaaagtgctgataaggacagaggctagcagtctatttgaaggcgtaaagggaaagatacagcacccctagtacaaagttggtggctaggcatgggtggctcaataatttcaaagaccttgtc

SEQ ID NO: 148697 - DNA, 501 bp, Homo Sapiens
  misc_feature (292)..(292): n is a, c, g, or t
tttataattaacggaaagttattttatttcacttttacagaattaagaatataatatatgttctttccacaatagtatttgccaatcaaaacaaaactaatgaaaagcctctggcaatcagaagttcttctgatttatttttatatccatcctccaaattttaatttgttaggtaagtacactctggaaagataatctgatgataggaaagtcaaagcttgaatttctgccttcattttagagtctgccattatttccatttcttttctccaaaatggttggcaggtaacantaaggtctcctcaggatactgtcaagtttcatttggtccctttttgtcagtggaatcaaactatctttaggtacatttaatcttttaagatcagaagggagaagaccaagccatctaatagcttgaactgtgagatgatgagcttcaaaagacatagacatagatccatacttatagatgcacattatttctattgcatggtgatcagc

SEQ ID NO: 148698 - DNA, 301 bp, Homo Sapiens
ttttaaaagaccatattttattaaaaaaagagtgtgttttgatgcatgattttgtgactctacatttttaagtaaggatgaagaacttggtgattaattaaatgattcctcagttgctcatcaatgccatcagatgccttgaatatactgtgaggacagcatcactccggtcgcactgcagtcgccatctcggccaccacccacagtgaggcgagccgcggtgccgcaggctgcagcctccagcatttggcaggtgtcttccttccccttctcctctgcctttaagttgggcacagaagag

SEQ ID NO: 148699 - DNA, 511 bp, Homo Sapiens
ttggtagttattatttattagacaatgaggttgaagctacaattgaagggacagaatgccctttgccaataggttccatgattctgatgcagtatagatcatttttctatccaagattatatgggatctaaaaattggcaaaaagaagaatggagtcagaccttttggaaatgagcatgtattttaagtctgtttcctttgctgatttggagtttttgctgatttcttaccctcagaagaggcttttgtgaccataagaattctgattcagtcctactgtgtgtactgaacttaggctttcttgtgctcgtcttcttcacagatacccccatgagactccgaatatgcctgaggcagagtaatcttcctaccaaattccctatgtattcctaaaaacatatagcagcgctttctaaacactggttcatggagtccatctgtaatgattttcaatgagctttggtgtagccaagggtgtcatggttgctcaggagccaaagggtcaccttag

SEQ ID NO: 148700 - DNA, 586 bp, Homo Sapiens
agccaataagcaaattatatctttattgaaatctattgaaatttacccaaagagatcccactcataacacacagcaaaacttattgaaaccattcctcctgccactttctctctacattaatatcttatttgtgcatgtgtgtgtgcattcaattgtcactgcacctgccgccaaagcctctcctctccctcctatgctccacagatctctcaaacaagatttttttctctgcctctcttccccgtgtctatatctgttacttttctcttgtccatagctctctgatattttccatgtaaaactgggtggtctctcacaacttctccgagtctcttcaacagccacaatcatacacaattgactctggaacccacctggcaaggctctctccctaggagaggtcagaggagggcagactgtttctcctctgcaagcagaggaagggaaatactgtgactatttgaattacagtctttctctgccagaagggaactatttaataaaaattaattgaatacttatttttaaatcctacttaatatgaactttatcatgaaaatggacatgggccctgtcatcaaagag

SEQ ID NO: 148701 - DNA, 769 bp, Homo Sapiens
tttggttttaaaacagggactttattggctcatttaactgaagagtgaagaggcatacgggctttgggggtggattcagaagtccacaccctcagcgctctgactccagacctctttgatcctttcagagcatctcttctctgtgtgtcaactctgtcctctggttaggtcctttgatggccaaaatggctttagtagtctcacatccaatttctttataactctccctacacaaaagaatagactcttcttccatggtttctccaaaccctgattaaatatctcctcacgtctcatggacctaaattaggtcttgttcatccaggtagtgtacagatgaatgtctagcaatgctctctccctgtcatggctgatttcaaactaccaatgcgatgtccctggacccagcgtgcggtagaggggcctgcagtggactctctgaagcccctgggagctggctccagcagtcggctaggtctgtccctgaaccaattcctgtgaataggtagataagccctgctgattggcttaggaaaatcaaaggtggctgatgaagcttgttggggttagttccattcttccacatgtaaggtagggatggagaaagtggataacagttggccaattgtgaaatgtctggtaccagagcacgaagcatgggggacaatgaagaggagcgaagttaaggagtaaggagagattgactacagtattcatctttgcactaaactattcatccaagctctctacagtttggccccagttcatt

SEQ ID NO: 148702 - DNA, 561 bp, Homo Sapiens
ggtctatatggtctttattgcaactattcaactcattgtaggcgtgaaggccgccacagacaatacacagaatggggtatggctgcaagccaatgaaactttatttacaaaaaccagcagcaggccaactgccagtttgccaacccctgaactaggcctcttttggcataagaggaaaaatagaagggtcacactgagacttgttatttcttctcaattccctcctccaccctccagcttttgcctttatgaagatagcattacacatggacggcaatggacaaaagtagataccacccttttctgctgatgtctcttccaaggctatatcagggatctgatggggacagaggacagtggataggaaatccgaccaagatcacctgattactgcttgaagtcactactctggaactttttagccctcttaaaagggtcactcccttgggaattcatttccaaccctagcttacccggtgatggcgtctctgtctcaggtgatgcataaggaaccacagcatgtgactatcaaacaggtcagtttggtgcaagctatcttca

SEQ ID NO: 148703 - DNA, 349 bp, Homo Sapiens
tttgttttgaattttttattataaacatacaatgagttcagtagagcacatatataacttgtaaataagaatatgtatccggtaaataaatgcacatttctgttggtggcgccatcagacactgagacactgagaggaggggccacaagggggatgaggcagaagcctcctgccagtgagggcccaagagccctgtccagggcttgggcttccttcctaaggttagatgtggggcagctctggcagaagagtgataggatcagattttcagttgtggcagttactctagccagaactggaaggtggcatggaaggggccaatacttctttctttcttttaaagtttgtt

SEQ ID NO: 148704 - DNA, 1298 bp, Homo Sapiens
  misc_feature (38)..(38): n is a, c, g, or t
  misc_feature (314)..(314): n is a, c, g, or t
  misc_feature (1250)..(1250): n is a, c, g, or t
ttgggttggagagccagctcagggaaattttgggtggntaattcctgagggggcagacaagggggtagtgggaaggtgttaggtgtcttgtcaagctgtttgcagggaggtggtgactgagctgtcagtcacaataacagggctaatatccagccttctctgtctgttcagagtcccaatgcgaaggcatctgcttagcagataaatgtttcaatatgctgcactggagcgcaacaacactacagagccactcttgctgctctgcttgggtggctaagtgctcagagttcaaaaggtgcatctgtgattctcangggatcccattgcagatcagctccccgtcccgaatggccgcgggtgcaatgagagggggtggaaactggtactgagattttatagcatcaggaaccttcaagcttcttcttttgaccgactggagcacacgccggttaggggggtgcttcttgtggattcggttcaggaagtccactttgacgacatgctgcgaaacggtgtcctggaaacgatcaaacacctggcaccgattgctcagtgtcatattcttctggttcagcaccacatgttcgatgtgattcggacacatccatctgcccaggggcatggcagtgagcggcgggcttgagcgcaatccatggtgaaccaggaggagggcaatagtcacacttggatgagaggagcccacacggcaactcctgttacacgtgaagcagactttgacgggtaagggaacgagaccattgtgatctaattcatgctgtgtcttcttaacatttttccctgtggtttcctcctttcttctcctcttgctagaacctggtagtgcagtggtacaagtcagttcattgggcaactgaaattgggtggggttccgctccatggcggcagcaatcagcagctcaaaggtccgcctcagctggggctgcacatagtctggctccgctgttactggttcctcatccacgtcaatgatgtcttcgtcgacatcattctgctcagaggtgggagtctctgtgctggcgctggatgtgggtgtgccaggcctgctggctctcctttccaggatccgggcatgggcaatggcctttagttcagttttgctggccgatctgtccaacaagtcagtgtcactgctgggggatgtagtccgtttgccagatttgtccaccagtccattgacatgacccagctcttttgccctcgtgcgggaattcgccacccaggcctctttncgggttgtgtttggggaggggaagccccatgggttgtgtgtggttgtg

SEQ ID NO: 148705 - DNA, 766 bp, Homo Sapiens
  misc_feature (104)..(104): n is a, c, g, or t
tttttaaagctcttcttttttaatatataaaagccccttcccaaggagtttgctgtggaaatgtgtttgggagtgggaaggtggggagaaagaccaggctgtanggactggtgggtttcagggggcttggtggtgggtgctctccagagctcatggaaaaagcagaacaattacaaacatttcttccagggcccctgaaagggtgctccccatcaagtcacctaagcctttcggtcctcatctccctcagggaccagggctggggaagggaacctggctgactcactggaaccaccacacccatctcagcctcacccagtcaaaggtcttttgatacaacccacagccaatcaggaaggttctacccatgggggagagcagatgcgagggctgcgtgcctacctcactgcccacctccccccttcccactgtcatggaaacccgagtgagccaccaggttgacccctttcctcttgcctgtgtgacccaggcctccaccctgcagaagccagggggtgagaggtttgaagagggcagatgggaatgccatccaccacagcctcaccctgactcgatgtgtgacctgggacagccttctaaggccggggctgcagggggctgtcttctgaatacgtggaccactcacggctcagcctgggatcgcagaaggccagacctcagttcctgagacagaacctctgacctcccagctgccccatcttaatgtgacaagggcagtgctgctggggcgggggggacctggcct

SEQ ID NO: 148706 - DNA, 620 bp, Homo Sapiens
agtcaggcagcaggtcgggatagccgctgagctgaccagtgactcatgtggctgtaatcactaggacaacagccttgtatctggctgaaaggctggtgaagccactgaggatggatgacagacgtattgcctgctacaactgcagcagaggtggggggctcaaagatggcaaatgtgatctacttttgaatttttaacacacactaaattataaatttttctaatgcaatctacaattattcagcattttcacctttctagtcaagtcaagagctttaccgtgatttaattattcattggtattatttacatcaacctgttacagctgctaagagcttttattatttcatataaaaagctattttgtttacattcaacaattatatttactattattctttatcaactcgtatgcttcgcatgtaccctatatacttttattctgttttcatctttttttctatccaatatatttattaataattctgttgaagacctaagggaggtaattttccttagactttgtttgaaaacattttcatttttctctttttcttgtattacagtttaactgtgtgtgaaattgtagagtaacagttttcctaatccttttgaatatt

SEQ ID NO: 148707 - DNA, 520 bp, Homo Sapiens
  misc_feature (470)..(470): n is a, c, g, or t
tttctatttctttaaatttattagttatatcctcaatacattctccagcttttaattttatcccatcaattacaagatagtcctcttcatagtggttttcaaacagactgcctgcaggagcttctgggctgcatttagataacttttctcccatatttatttcctctccatgtccttcttctgattcatcaggtgtggctgtgggttgcagtgcttgctgcagcatttgctccagctcttttagtaaaacttccgtctcacagacaaccctgttctcctttgataaggcatcatcagaataaacattttcaaaagagcattttaaaattgctttccttttcctttttctaaatttgggcttcttcttttcaatattatttttagaagtctgcttctcttcccctcttctctctccagtgttgatccttttcacttcagcattgattatgcccagggtctttcttgacatnctggggtagattcttagcgttgactctcatcttgatagctgaaaaggcta

SEQ ID NO: 148708 - DNA, 643 bp, Homo Sapiens
ttttgcctttcagggaacgtaaattttatttactgaacgtaaatcttaaagccatagttttcaatctgcatgtgtgatcaccagaaattgatttcaaagagatacaaaattatttaacgtgttgcttggcaatgcaaatcccaggctagatagtcaagattgtcaatagtggaaaattcagatgatgtttcctgttgtgatccttgttggtacagattattttcatctgccttttggtgaatgcgccactactggatgcaatccatgtcctcaagcggcccattgcttctaataggcacttcccttgtactagctgaaatacttcttctgtttcatgccacacgatcccttccaaattcacactggtcccaggttcacagggcccaagacactctggctctgtcactactccaacttcacatgtattgacacccactgaacgagtccgaaccaaaagctgttcaaccggtgctgcaatattggatgaagatggggaaaagtaggagggtagaatctgaggcgtgagactgctggaaatcggcggtggtggcgctggcactgtaaacagggggtcaactgttggggaagtcattccttcatccaacaagtttttgccaggtgccacaatgtgccaaaggtgggg

SEQ ID NO: 148709 - DNA, 457 bp, Homo Sapiens
agcaccggttgaacagcttttggttcggactcgttctgtgggtgtcaatacatgtgaagttggagtagtgacagagccagagtgtcttgggccctgtgaacctgggaccagtgtgaatttggaagggatcgtgtggcatgaaacagaagaagactccaggtttcccttgagcctgtattgagacggtgaatttcgttctgagggttctgcgtgggccggcgtgttgtgtggagccgcgtggcgcggggagcgcagcacggtcacgcagaccgaagctttcactgcacggccggactcgttagtgcgaatgagcctgtgtcccgcgtgcaccgagggagccgagcagcgcaggcggccctctagccccgcacggccagcgcgccgtgggggatgcgtccctttgcctccgccacgctcacctctacccgaccgctgcctctgtgctccgggcggccgc

SEQ ID NO: 148710 - DNA, 671 bp, Homo Sapiens
ttttgaccctgccttgagagagtttaatatttagtagctaaaacagttattatctgttaatttgcctggatgaatcagagaaggctctcaaatgaagcagcctctggaagacgagggcattccagggaggaagggcggcatatgcaccagcatggaggcgggaggagacagcacgatgtacttggcattcttgctaagtcctgtgggggctccatccttgactcttttcattccacgctgatgtcttctgggctctgcgcctcaggggagaacttgcaatgctgggatcaccttgacgtggcagggatgttccttgcaaagccttatcctgctcaatcttcacctaattacgttggttttaggcttgaagcaggggccttgctggctgacctctcaaagcctccctttcccttgttcccatgtgtagcattctgttttgggagcacagaatgtactctggtctagaggaagctaagccactgtttgcaatcagtccaagcagatcaagttaaggaccaggccattttggaggcacacaaggactcctcttggcagatgggcacgacaggcttgcttgcagactgagtggtgaacagccccttccatctcttcgtttgcttgtatcaaatagcaaattccagaatcactatacagagtggtggatggggcaa

SEQ ID NO: 148711 - DNA, 643 bp, Homo Sapiens
ttttggtgtaaaacaaccatttattttgctcatggattccatgggtcaggaattcacagggcacagcatggaaggcctgtctctgctccaggatgtctgggcctcagctggaaaattcaaaggctgggagctggaattatccgaggactcattcattcacgtgtctggtggtcgatgttggctgtcagctggggcctcagttcctttccatggggactcttctgcatgggctgatactcatcccaggtgtgtgggggctgctgaggcatctcatcactaaatggagggcctcctgtgctccaggcactgctgcttcagcagagaggcctggtctctttccccagtgagcatcccagggaatgggtgggaaaggagagctatacggaaacccacaaagtagtcattgtcctttgacattccggccacagggatgggggccttgtgataagtgcgctccaggcaggggaacagcatctgcaaaggcccgaagtcagacccgccagttgtgattcattttggagcttctttcttccacatgggggcccactctgtcagcctctcccggagctgcctgcagactggtaaccacagctcccatgtgggtggcactgaggcaggccacggttctgggtctgaaaatgca

SEQ ID NO: 148712 - DNA, 838 bp, Homo Sapiens
ctagttaaaaatttaatagagcctcaaggtcccacagttaaacatggtctagccttttcatttcacctgcaggaaactgaggcccagagaggtgacaatgtgcccagtgcgaagaggacccatagagcttggcttcaatgcccgagcaactgactcccgttccatgtccttcgggtgctgctcctggctgtctccctgatctttctagaaagcaggtgcatgcagtgtagttggtgtgagatgcagctccttgggaagctgatggcaactcccgcactactgcacctgccacaggagccgcctccccagcccgcctgaactggcaggtgtttgaggctcagcatgctgagaccacgtggtcactggcacctggggccagcaatcaggcagcccagtgagccaggagctccagctgtggtcctgggcccccacctacagctccagggcaggctggatccaactccctccgttggctccagcttctgtggcagcctttcctgccttagagagtgcttggccagcatcaagctctccatgcgtggggagagggaaggggtctgcagctgaaatggcagctctgttactaagtggatattgtggctgttggaaacaatgctgatggggtgtgcccaaagctggccatgtttaggggattcaggtgtagagggcattgtgtgaacactgcaggatcaaacagttggctgaagacctcagctctgcccttgacttcctcatcgtatcaaggtgtcactccaccttgctcagccacagtttcctcatttgcacctcgtgccgcctcgtgccgaattcttggcctcgagggccaaattccctatag

SEQ ID NO: 148713 - DNA, 296 bp, Homo Sapiens
agaaatgaaattatagcttttataggttttacatgggcttctgtgctgggatccctggaataaataccatgtagcttcatctgcctggtgtggctccataaggagaggattaagagaagaatggaagccagtgtttccacaaaaggaaggatgaacatcattttggcacttcttctattgatatcttaggagtctgtgtactctgtccttaaatctagaatggtttgtgactaattcaactaataaaaatgctataataattctaaagctaaatcatgaaaagccatgcagttttt

SEQ ID NO: 148714 - DNA, 459 bp, Homo Sapiens
tattttgaatgtttaggcttaaataactaatcatctagagttccacagatgcctaaactatgaagtttttataaaactagagtttgactgaatcttcaactagacagactcaactttcccagaataattttattataatcaaaccatgttgaaggttctaaattttatttaacattagatatcttaaaacttgtagaatcctaaatggcctataaactataatccaaatgaaaggcatattacaaatattgctagctaaaaattaataattttttagtggcagttattttgtgctttttttcccccacatttaaacagtagactttatcttaagtggcctggtatcttctgttttgaaagtcttctaattaaaattctttggtccttgatgtctgtcagcatttttttaactaaaggtcacaacccattaacaaccatgaaattggtgttgggaagaaa

SEQ ID NO: 148715 - DNA, 847 bp, Homo Sapiens
  misc_feature (793)..(793): n is a, c, g, or t
  misc_feature (831)..(831): n is a, c, g, or t
gctggacaagtgtttattgaaggtcccctgcagccgggtcccgtgctgggcactgcacacccacggacacagcctcccgtcctaagaccccaccccatcagggccagcaagggaggaagggggccatgactgtgtctctctctccctcctgcagggcccagccgcggccgccgaactgcatggtccagggcgctggtcactgccaccttcctgcacccacttctgctgccaggggagcagggcccggcccagagcagaacgcagagcccctgcggcctggggagctcctggggaggggctggctgcggtcggtggccccggaggacggccaggctcacacccacaggtctcccagccgccccttctcctctgccgatcgctcgccccgctcttcctcggggaactggcagcttctggcgtcttcggtcgacggcggcacctccagcagcagctgggtctctcggggccacatgcactgactcctcagctgccagatgtgcagtccaagctgggccgaggtcatgaggaggactcaggcggccacggccaggatgacgacggtcagtcacccaagcggctctgtcggcggggaccctgggactcacacagcgttgtgggtcttgttcccagggaacactgtgagaaacccggactgggtgcagtctgtccaaggtttgcagtggccttcgtggcccccggagaaggtccccgaggcacagtcgatacactggaagccaaaactgaatttcccctgggactgtaccccctggcctgggggacaagggtggtgccngcaggtcgtgccagcaaggtctccgcagtgggattcanggctgacacacatgca

SEQ ID NO: 148716 - DNA, 986 bp, Homo Sapiens
actcggacgagggcacgcggccctgctctaccgaggaggatacttctctggtgagcaggcgggagaagtgttggagagcgccgtcctggctttgtgttcccagctgaaagacgatgcagttgccctggtagacgtgatcgctcctcctgactttgttctggactcaccgattggcagagccgacggcgagctctacaaaaacctctggggcgctgtcctgcaggaaagcaaggtgttggagcgggcatcctggtggccagagttttctgtgaacaaacctgtcataggaagtctgaaatcgaagctctagtgggactggcacacattcagccaagtctaatgaaacgaagggaactaatcagacgtggacctcaacttctgattccagaacacgccggagattgctgctgctttctgagcccgcacctgtgcgcctaaactgctgattggcctcaactgcccaggcggacgggagggaggcacccggccggctggactaatctgggatcgcggtgatttgcagcgtggaaaagaaatgcagatgatcatgtctacctgatgcgccgtgggttttttgataattagaatttcgcacattcagttttcagggttcagctcctttctctaaagtaaacagcccattgtcagggatcttctggtcagacaacctgtgattcatctagattttttaccgagctccacttcattgagaagtcaatgatgccagtctggttctttgtcaactctccctcggctttgtcacataattgaattatgtcataaccttattaatttgcacatagatcatctgaatgtcgtggtttaagacttaaggaggaacatctgtttgattactttcttttgtggaactggaaatttccatcgaggaaatgtttttttaaaaagtctaatgatttgaatgggcaattcagtctccaaccgcccccctccccctgccaccagttatatacaaatcactttattgg

SEQ ID NO: 148717 - DNA, 977 bp, Homo Sapiens
cattgcaatgccagccgttcgccgccgctcacagggtaccaacacccgtgaacaagggacccaccgagcggacccgttgctcaacaacaggtccagacctgctcagatagcagctcggagcctcgcagcctggctggcgcctggctccccgtaggcgatgggccccactgtgtggatgacgtacttgcccgggagccgatagccgccggtgatcttggccttgccagtcttacagctctgcagggtccggcactcgtcggtaagcagggggccggcggcccgatgaatgcagccgtccacgccaccgcctccgagcagggagctgttggcggcgttgacgatggcgtccacctccagcttggtgatgtcgctgcggagcagggagattttctcattgagctgcttgtcctttttatacctgggctcctccaccttcacagccacccctttcgccatctccttccatgtcgggatcttcttcagcctgacaaagtccttgcagaagtaatgttcctcccgctgcttgtcactcaggcccttcagaaaggatttcgcctccttccagtcggtggaggtgctcaggtccaccttcgccgccatggccaggggggcccaagtgcgcaccccggctgtccgccccaccgccgccgccccccacgccccaactcccgccgaggtccgcgcacggcggccgaacacgcccaggaacgccgggggaccgcacgtgctgctgcgggtcctcgtggcacccgccaagtgtccgggccgggggcgcggggggacgagcagctgccccgccgcgcgcagctgtgccaggcggccggacagtcggctctgtagagacatgagcgggcggcgcgggacggctctccgcccacttggactctatttacggcgctcgggagtgtctctcccttatttactctgggaccgggtggcgactgccagccagatcccgggaattccggaccggtcca

SEQ ID NO: 148718 - DNA, 755 bp, Homo Sapiens
  misc_feature (190)..(276): n is a, c, g, or t
  misc_feature (278)..(309): n is a, c, g, or t
  misc_feature (588)..(605): n is a, c, g, or t
tgagaagacaacccacagaatgggagatatttgttaatcatatacctgataagaatctatgctgctgtctaaatgtttatgtctccccccacccaattcatatgtgaaggcctcaaccgcaaggtgatgggattagtgcataaggataaggatggaggcccttgtggccatgtgtggtggctcatgccgnnnnnnnnnnnnnnnnnnnnnnnnnnnnnnnnnnnnnnnnnnnnnnnnnnnnnnnnnnnnnnnnnnnnnnnnnnnnnnnnnnnnnnnannnnnnnnnnnnnnnnnnnnnnnnnnnnnnnnaggcccaagagagaaaccccctaccctttctgccattagaggaagtgggccttcaccagacagagtctgccaacaccttgatcttggacttcccagcctccagaacagtgagaatttctgatgtttattagctacccagtctgtggtattttgtaagagcagcccaaatggactaagacattctagtagcacaatatagaaagaacttttacaactcaatgaaaagacaactcagaaaatgggcatggtagaacttgtcctgtgaagaagccaagaccnnnnnnnnnnnnnnnnnntggacataggacttgaatagacattccaaagagtggcaggtgccaacaagcacatgaaaagatgatcagcatcatgaatcgttagagaagtgcaaattgaaactgcagtgagataccacttcatggccagtaggacagccatttcctaaa

SEQ ID NO: 148719 - DNA, 824 bp, Homo Sapiens
ccaaaggtttttaaatttgggagtttccccccccattttggcgggcaaggttccaaatcccagaatggacttaagtttttcgagggcattttcttttcaaattcaggttcttttttccagaattcctccaaatgagggtccctggtgggaatttcccccgtgagggggttcttttcccttggaacccggccaaaattttttccccggatctccttcacagccaagctttctcctggaaaactcaggagcccaaatccatagtttttcggtttctgacccaaacaattaaatgtatcctgttgttttgtgatatgcagtatttggatttatctttgattccaagagtagtgatccgtcggactctgcccgaaccagcagcgacatccccttgagctcctccacgtaagtggaggagacgtgcccggtgcctcggtcgtcccattgccggtcttcgttcagggtatagaccttcactcgccgccgcgtatccgacatggtggctgctgtctccaccgctctagccgccgcctcctcgcttacctcgtccgcgctcctcactcttaggagacggtaaaggcagtagtggcggtggcggcggcggcggcttcggagaggcccgaattcaccatggctccaaaggttcagccgcgagaaggggtgacaagagccactgaggcctctccgcccggaggccccgttacctctcacttcacccgcgcatacacccactctcccgtctctttgccccccagggctcgcttgctctcccgccgccgcggtaactactacagatccgccatcttgtaacccgaccggacgcgtgg

SEQ ID NO: 148720 - DNA, 314 bp, Homo Sapiens
aggaagtggtggttttggacttcacctctgtcctcaagaccacattgcttcccttggggaaatcagctcttcccataccatgcattcctagccccacagaaatccactagtctgggctttctctgcgattggctgaggcagcaactggtgaggcacctgggctgtgcaggagcccttggggatcagatggtggatgtggcctgcccaaggtgcatacagtcccttccttagtgtgggtacgggaaggctgtagataggccagaggtcatctcctgcaggaagaggtacaatcagccaggcatggtggctcctag

SEQ ID NO: 148721 - DNA, 465 bp, Homo Sapiens
aggggcggcggggcgcagtgggcgcctggtggcagcgccgcccccagctccctgccgggccggcgcgcccctgattttctcgtaaggacgggctgaaagaggaggggagacagaaggagacactccggcccgaggaccaccactgccactagtaacgccccctacacactctagaagtgctcaggcgaatgacgaagcggctggtgacaaaggcggcggcgagtgcagcgcgtgcacagcccgcggagccgcgcgaccgcaaatatgacaagcatttgagctatttggcaacgtggggccggtcagcggggcgggcagggtccccgcggggggcgaggggcagagagctggcccgggcgcccgtctcgctgcctgcaggggttcctgggcgggggtccgctgcgggacactcctccgaggcccgcactggtccgaacggcaggatgggggctccagccgtgagcc

SEQ ID NO: 148722 - DNA, 930 bp, Homo Sapiens
tttgctcttaagtgtgtttcttaagatgacatcaaaaacctctagatagcatggaaatttcccggtttaaggctttccaataggtttgtagcaagcatcaggttgccagaggcgaatatcaacaagaacttgattgagtttttgcatccagagatcccgctcttctttagtatctgcagacagccagttcttggtaacacagagtgtgtccctgcattggctgacaagagtctctcggtcatcttctctttgtggtcggacagtaattaattcaaaagtgttgcgtcttgcacaaaattctctgttggctggttctatctgacgactggtacaattagccagatttatccttcctatgggattcttgccgtttctcatcatctggataagtccaataagatatacagtttccagaaagaacacaccatcttcgatgccaggcaccaaaaccactaacatcttcaaatatggttagaaaacctctttcttcaacactggaattcacttgacattttatttttaaataaatatgaccttccaaagaagataaaaaggggcccttgtccagaacaaacttagtatttcctactgaagacaatgataatgtgtaagatccaacaagggcgaagttgctggttcgcacagcactaagacctcctggactggccatgactgaagaatgaatgttgctttttgtggttatagatgtgaggagtcgctttggagtaatagccttggacttggatgtttttttcttcttatcaaggcctgagggatctttcttttgcaccaagctgtaaacttcaatatttatttcaaagtcattggatacatccggacgcgtgggtcgacgatatcccggaaattccggaccggtaccagcctctccctcacgggggtcggggtggggggcaagggaagggcggcggg

SEQ ID NO: 148723 - DNA, 310 bp, Homo Sapiens
gagacagggtctcactctgtcatacaggcaggtgggtggtgacagcgaccatgaccacgggtcaacctgggcctcagacactggggaaaggtggccatgtccagttttctcaggaaattaggaggcaggtcatccgaggagagagggtgtgtctggggtagggtggagtagctttcagaaaagtgtaagtctggcaaaagcactcaggaaaatgggacagaaaatgagccaagcgctggatggcagcgttcattcagcccagctgagcttggaggccatgaaatgctggcagccccacactgcaagactg

SEQ ID NO: 148724 - DNA, 553 bp, Homo Sapiens
  misc_feature (129)..(137): n is a, c, g, or t
  misc_feature (484)..(484): n is a, c, g, or t
tttacattaaccaaatatttttatcttcaaaacaattgttacaaaacagaaatttcacacaatactagtgaggacagcctaagacagcttaatcattcacatttcctctatgggcttggggtttttggnnnnnnnnntcgtagctgcataaacttggtgtaaaatttgaaagagccactcatgccacaatcctcgtttccctctgctaatgtgatccagatgggaacgctgaacgacgtaactgccccatctgcaccttagatttcattagggtcctgttcactctgcaattagttaagtgtgctgaccatcaaatatttaccaggagacaacatgtccaggtcaaagaaaggggcgtgagaataacattttagaaaagagttgcactgcagccaagactaactctgggcttgcggtccacactcgccccagccgactcctctcatttcctctctcccctctccagtgagccattccttcttgnagtcaagaacggtgccacagggcaaggtcctacccttggtctgcacacttttatcgaaccttggcattt

SEQ ID NO: 148725 - DNA, 465 bp, Homo Sapiens
  misc_feature (324)..(324): n is a, c, g, or t
  misc_feature (396)..(396): n is a, c, g, or t
ggaatatgaatgttcacttttaataaattcaaacagatcccgacataaacatcttcaaacttgatgggttttacgtgacccatcatttcatagatccttggcaccaaatctctggacattatataacccaacccactgcagtatggagggaacaccttgaaaggatactcctggtaagaaatatgggttttttggtaaaatcctctataggaataattatcaattagaggataacctgtgaaaaacttctctgagtggtttaggtttaaaagatacttcactaaattgccagtattgatgaaaacatcagtgtctgtcttcatntacgtacttggcattggggcaaacctcagttacccacctgaatgccataatggttttcaaggtcaggttatntatatgtgtcaaaaaatcttgtcggattatgtcaccataaagaaggtgttcatccctaaggacaatgcc

SEQ ID NO: 148726 - DNA, 687 bp, Homo Sapiens
  misc_feature (30)..(31): n is a, c, g, or t
  misc_feature (142)..(162): n is a, c, g, or t
  misc_feature (280)..(280): n is a, c, g, or t
ccccaccagccctgccccttcacttttaanncagggttccccccggcgaagggcatctgtgtggagtgaatttgtctggttcctcctttttggtcagaaaaggaagtgcccagcatcagcatctgcgttgtagcagtcagtnnnnnnnnnnnnnnnnnnnnnagacagtaagtgacttgttgctaaaaggcttttccccaaccccctttatcgatcccccaagctcagtccctctggggtgagacaaagaagacatgtggaagccacggaaagcaggtcnttatgtcctctcttctgtggctggcaaggctcacctggccttatccaccccacttatggaccctcaggagaggagggctcctcctaaaggcatgcagcttgcagcccctctttctcacacgtgtgatcctagcgtgagaggtcatcctgcccttgctgaagttagtagtactgtactaagagctctgccctcatgtgaattcctgccctggcgcctcttccctggggctgaatcaggccctgctgcaaaactccaggcttcccagggttggggaggctgtgggaccaaggtccatgttggtccttccactgggtgcagcaggagctgggtcccgagagcctggcaggtgaaactctgcaggccttccgcctgattattatttattcactcctttcctcacccccaaa

SEQ ID NO: 148727 - DNA, 471 bp, Homo Sapiens
tttttttaattacctcagcaaggccatttttacttcctgcagaaagggtacactcgccagcagctttgccatgagagtacaccgaacaaaggagacaggctcatttataacctgatgcgtaacaatcgcttttatttaaagtgcgaacggaatatttaatccatttcagccagggatttgcatcttgatactctctcgatggctaaggtctgttttagatctcttatttttacaatagacaccctagttttattattagatgtagaagcaaccggtgtgagatctataactgaggctactgaagaagggggagatgggggaataatgcgtatttaaaaaatacctagggggtcttttccatttatgtcaatccccataccacagaagcgactgagggcaggtctagagttagttaaggtggaggtggtgatagagaaggacagggttacactgataaggctgacagttcga

SEQ ID NO: 148728 - DNA, 448 bp, Homo Sapiens
ttttaacagctattttatctttaaaatagagaatcaagatggaaatcaagaaaatacagagggatttctttgcactaagactcagtttccagaagcagaagagactcagtttcagaaagcattatgactcgtttttagggagtcaagaaacttctctttcttacgtttaggttcatagtcaaagaaaggctggatccagggctcatctggaaggcccatttgagtataacagggatgctttctggagatcaggttgttccaggtcagctggcaccggattcctgctgcagggctcctcctcttagcaacaggcacatcttttagcctgcagagatggtccagagttgcagagactcaaagcacaaatgtcctgagagacagttacccggcagtcagtgtcactttgtattcccgcagcctccaactgcaactccggcgtcgcccgggc

SEQ ID NO: 148729 - DNA, 443 bp, Homo Sapiens
tttgcaacttggtcatttatttgatttgtggtgattttattatggatacagagcatattcttcttacattgaacactttattgaagctaaggggtgccgcacattgcttgaaaaggttagcctatcccaatgagcaaataggcatgtactatgtcaagaggaggacttgaactttctgacagcctttccagcatgagaaggaagagcttcaagatgtctcacctaacacacttctcagcgggtgtgaccttgagtaccgttgttttacttttttgtgactcacatttctcaaaagtaaacttttaagatagttcaattttttgaggcgcgagaatgtcctctatttcattatgtttatttttggtctctcatgatgaagcgagttgaagctggcgtgcctggatatgctgcataggcgtagattacatgcacattctcacact

SEQ ID NO: 148730 - DNA, 610 bp, Homo Sapiens
  misc_feature (94)..(120): n is a, c, g, or t
  misc_feature (586)..(586): n is a, c, g, or t
  misc_feature (594)..(594): n is a, c, g, or t
cctggctgcggggcgagccgggcgtctgctgcagcggccgcggtggctgaggaggcccgagaggagtcggtggcagcggcggcggcgggaccgnnnnnnnnnnnnnnnnnnnnnnnnnnnaccactagcctcctgccccgcggcgctgccgcacgagccccacgagccgctcaccccgccgttctcagcgctgcccgaccccgctggcgcgccctcccgccgccagtcccggcagcgccctcagttgtcctccgactcgccctcggccttccgcgccagccgcagcgacagccgcaacgccacccgcagccacagccacagccacagccccaggcatagccttcggcacagccccggctccggctcctgcggcagctcctctgggcaccgtccctgcgccgacatcctggaggttgggatgctcttgtccaaaatcaactcgcttgcccacctgcgcgccgcgccctgcaacgacctgcacgccaccaagctggcgcccggcaaggagaaggagcccctggagtcgcagtaccaggtgggcccgctactgggcagcggcggcttctgctcggtctactcatgcatncgcgtctncgacaacttgccggtg

SEQ ID NO: 148731 - DNA, 547 bp, Homo Sapiens
ttttttctttttattgctctttatttctgtgctgtctaaatgtcaggatcactaggaaagatgattctagcctcttcatcctcccatttccagatggaggcctccctagggtagggagctatgatgggaaataggagcctctcattgggtggaaatggtagtcactgtgaaaactgcttctctaaacacaggtctagcctgactctcagtaatcccccaccctacaaagtgaaaggcatggccccagggacttcttctttgtttgacttcttctgctctcatttgcttggcctggactcattttgtgggctatggggctgctgctgggtttgacagcccttgtcctgagtttgcggtgagttgggctcagactccatgttaaggggtgagacttcaggcttggtctccaaaccacagcacctggcctgaatgcagcatgggggttttggctggcagcagtgattgtgttttggtgggcagcattgactgccttttggctggcagcacttgttctgttttgtgggcagcattgattgcctttgactgg

SEQ ID NO: 148732 - DNA, 497 bp, Homo Sapiens
tttttttaagcttttgttcttttaatcatgtgttttagtgtatttgttaaaagtgtatacaggtacaacacaaaatttacatctgcagcttaggtattggcaattatattttttaaaacataatcaattttactaatgattacatgagaaattgcctgatgttttaaggtagttggaacaagcttcatatttctgagactttaaagagttgtctttaacctacaagttgtcagaattgtctttaatttccaaatgtattgggtttttctctttcttgttggtgatttctaacttgattgcattgtgatcagggagcctaattaaaatcaatactgtacctggaaatttgttgaggctaactttattcccagcatacagtcagcttttatgtttcaccctggtcttgaaagagttctaggttgacagcattttctcctagtacaatgaaggtattcttcctttgttttctactggctttgacatttgctgctgggaag

SEQ ID NO: 148733 - DNA, 416 bp, Homo Sapiens
tttgagatttcatggcacatgaccttttacatcttgtacacacttaaccgacctcttgtttaccattttagggccaaaattctatccaggacagagagttgatctgaaagcccagagaagcttcctgttccttcaacagtctttggggtcaaaagatcttatgcgcctacagaaagttcttagagctcaaaacaacatcttacaggtttttggcttctacaaaatgcttcacaaatagatattgtctttgactcacaacaaccccatgacagaagtggcccacgtaacattgaggctcaaatgaattaattggccaaggccacacattgtgtaagtgggtgaaatgggatttcttgatcatttttccataacagaccttgggattcttagagagtgagtaggtgctgtctgacccc

SEQ ID NO: 148734 - DNA, 452 bp, Homo Sapiens
agacccgtgttttgtgctttttgggtttcagtatagggttttttcctacagggctagagggaaagtaccccagcatttccaaccagtggggtgcaaaattatttgggtctacagctttacctattcctttcaagaacatttttgaaaaaacacatctgttaagttgaaccatgtgtaactgctgaatgctgatgtttggccgttttctacttaaaaaaataggccagcagtttgtaaattcaagctaatatatgaactttttgaaaaagttgttcttggacactaaaaggtaagacggacgccagatttccagagcaaggggaggagagacccgagcaacatcacttccctgaagacctagctcctgcgcgcggccggggactgtgactccacatgccggcgttacttacccgggcccgcgcctgactcgccacacctcattttgcggccgc

SEQ ID NO: 148735 - DNA, 669 bp, Homo Sapiens
tttgtctcctggtattcctcagttctttatttggtggttaaattatacatattgctttagagagcaggtaggtggccatgtgttcagcagtgtgtccttaagaaaataccatctttctaagccactggaatttttactttactatttttaacattaatggatgtcaggtcatcaacctcaagtctttacatatccatgtatattccatatatattgtttatataggcccaagtttctccttaattgggatctatatactaccagcacaacatcaaaaacatgtaattgaatacatcagagctatatatgtaaggaaatgactggtgaccccattatcatcattgttgaattcatgttaagtagaccctctaggggaccataaggcaattgagcacataacgaaaaatgatgcaataagaatgtatgcactctctttgccaaatgcatgtgcttttgtgtaacgtggatgtaaacagaattgcagtgctgccgaaattcttgatcttggctaagagagtatttttccccttgtaattatgactctgagataaaattgccattttgaaatttccaaagtaacaactttttttattttatgaataaacttgggattgcaatttctctgatctgacaatcaataactttaacaaagatctaaataagtgtttc

SEQ ID NO: 148736 - DNA, 1043 bp, Homo Sapiens
  misc_feature (159)..(209): n is a, c, g, or t
aaatttataagtttttaaaaccaggaccccaaaaggggggtattccttccccaacctgtagggaggggtgggctctcccttccacacagtttttgccaggggttccttgccccctggggggggtccaggccccaagatgtcccggccctggcccataannnnnnnnnnnnnnnnnnnnnnnnnnnnnnnnnnnnnnnnnnnnnnnnnnncacgacagttttctcatccacaatctcacagtgggggttgtggaaggcagacaagggcagaagtgattcgctgcatctccctctcacatactttctgatcatgctgttctgtcaaatccttccccctcttgtaggagtagcccaagatgatgccagctccgatggcaatgatgatcaccatcatggtaatgcccagcacgtagcccagagttcccaggtcctttttctccttggagttcatccgcacccgctggctgatcccaatcactggctgcacagctgccgcctcactccgagcgggcagggcgttggcaggagcgaacacctgcacctcatctgcacctggcccttcagacgcttcctggatttctgtcgtgaaggctggcagggcctgggaggtggtctctggacagcgcaggtcctcgcaaggccgtttctcagggacgccggcctcgccactgacgtagcaccagggcccgcgcgggtcctcgtccgggtttcggcagtaactgtgattgccggcccccgacacgggggccgaggccagcccgctctgcgcgtccagccagttgaggcagcggaggcccggcgcgggggaggtctggtcctcccggtacaggtggccgttgtcccagaaacagcctccagatccataggcttctgctaggagcatgttgctgacgaggaatgcttgtacccaggccaacagcatccttgcctccttcgtcttgcaggtgattgaacgaccagtgtttaaccgaggcccccttggcggcggctctgcctcccagtcccagccttgcagtcagacctgccctttgttatgctgttctg

SEQ ID NO: 148737 - DNA, 484 bp, Homo Sapiens
ggtacgaaatcacttttattcacaatcacagcgacccaagtgcacaagggaagcagcagccacccctgcactgacagaggtaatgagatgatggcttcctctccccaaccctcagcctctgggatccctggctggggggcccgctagccagcccccgctccctcccacacagaaggggtctcccagggtcagtgactgggtagtggagacccatagtgggacagtgacttccccacacacccactgcaaggccagcacaaaggcccagcctgaggtcctggcacaccaccccctggcagccctcacggaagaactcccgagtcacacagaaagcctgcccctctctcccgaaacaaccattttatagaaatggaagctgggctccagggggctacgactcggccagggccacacagctggtcagtggccaggactaaaacccatgccctgcctgccacacagaggtgcagtctctgatggatgc

SEQ ID NO: 148738 - DNA, 353 bp, Homo Sapiens
gctgcccaactagatctgtcctcctggttttagggggcccttcttgatcccctctgagtgactgagggaggttacattgtaaaatatgtccatgagccaaacaggcttatggaaagttcttctacacacaaaagaatcaaagctctcctctccccatccccaaccactgctagaaaattggccataatgaagctgacttgacaggttaaaagaccctgtcctagatgcccaggaatcaggtagtcacacattttatggacttcatggcagcgatgagtaatctgtgatgatactaaatagaagcaataataactaactccattaaatgtcacgctgattgtctgtttttatag

SEQ ID NO: 148739 - DNA, 421 bp, Homo Sapiens
aatgctaagctctgtttggccaggcctgggcagcctgcctctggagtaggggtggagagccatcctgcaacacgaggttaccaggagaaggagttttggttgggcacagacatccagtgtccactccaggatgtttgggagacaccttgagaactcttcctaaaagctgcacttaaccaagctcctggtggttctgtgatcccttacattttctccagaggcagagagttggctgactgacttttgcccttgggcagattgtgaggctctacccagcatgctggtatattatgttccctcagatgggggtgagacccttggcctgggggctgtaaaatgatctgtttctgtgaggagactttccatggtgagattgctagtgtctcagagaataaaggacagaaccagtccaagtcaaagc

SEQ ID NO: 148740 - DNA, 474 bp, Homo Sapiens
ttttaggtgaaaaacagtgcaggcgtttttttattggggtccatcaagaaacagagaggcactgaactcgtcctgtgcctgggaagaggggtgttctaattcatcagtggagaaggtcagtaagatcatgagcatgctggaatgcacacttcaactccccccaccacagtgatcttgactttaatggtggcgcttgcagcagagtgattggagctcttgtcttgcctcgaggccagcggacatcccagcactcttggagcagggtcggtgggagcagctgctctggggggctaacagttcccttggatttcatatcccatcacagctattcgtaagggagtgagcagcaaagccagccagtatactgcgcccaggttgtaatcgcttcatcctgtatgttccacactttggcctgttctcttcaggaactggtggaggctggcaggacaagctcaatgatgaagcaaaaccccg

SEQ ID NO: 148741 - DNA, 520 bp, Homo Sapiens
tttacaaaagagaacaaaagacatacatagctttaatgctttcagtgaggtttgtttcaaaggagaggaactgttttcctctttttgtgaagcctctaatctcagatgctgcagcaataaaaattttctcctgaggtgtgttgataacccctcccagttccagccttgcaatcttcggcccgggtaaagtcttgaacactgctgctgcttctcctttcttcatgccaaagcacataactaccccatcatgatctccaataaccaccttttgtgtagctctgtgtcttgaggcaggaattagcttcatagtcttctgagatgttactcccacctgcagataatccattcggtttaaaatcagatccatgatgactacgcggaggggctaagcagcgccggacaagaacaggagggacagaggcttcgggcccgcaggcctccgacccagtcagaaggcttcccgcgcccctcaaaagccagccccagctaccgcgcctaggtcctgggctgcacaggcccc

SEQ ID NO: 148742 - DNA, 646 bp, Homo Sapiens
ggctgtcccggttgggaggggttcgtgatctataatattgggccccgcgccccccagcgcaagggttttggtgagtgttctgagggggtgaggctggcctgctatgtgcggtgtatggtccgtgtgctttttgagttccaagccattcggattagagccaagctttttgttccaggatccaagaccttgtcgattattgttattgttctctcgcttcttccacatgcttctttgtatatttgcaatctggttccagtttcttcaccctcctctaactgaaatgcccgcttctttggttttctaagagataaattaatgtcaccattactgatgactacagaattctcagcaactcctctctcttctaatttagctctgaggcagtcgttgtctctcacaaggcgcgcgctctcggcggggggcaagagccccccctccaggtagaggcctaggaaggccccagaactgaagccgaagcgctggcggatgagactaatgagatctgtgacgactcggcatctgttcaagtcgaccagaagccagaaggccgtacagtgcggggtagctggcggcgggtaatcaaattgaagccgtagcctaaccgtctcggaagctgccatcttgcttggtgctcaacggaagcccc

SEQ ID NO: 148743 - DNA, 544 bp, Homo Sapiens
tttgagtccgttttatttaatacagttacctcatgtcacagataaagaacagaaatgacttgaccaagttcacattgttgtttaacggcaggaaaagcactaaagatggatagtcctgccttcctaatttgaatgctcttattctctacaggttagggtcaagttattcagtaaaacaggctatcaggaggttaagcccaaacagtgaggaaacaaattttatgatgcttgtttgactaaatgcatgcagtttacctcaagattaagggatttaaaaaaggttagaaaacagtgtaaccctatctcctggatatatctacagacttgtatttaggaattatgccaggctgttatttctaacagagctgatgatcatagatgtggcctttaaggcaggactgggtatttggttcttaaaaatgattctgtgcctgccaatcttaggaataaataatgctttcaatgatctacattctctgtctacctaaaaagtacaaagaaaaagaatatatttaatcaaagagagatgtgtcccaggtagatg

SEQ ID NO: 148744 - DNA, 532 bp, Homo Sapiens
  misc_feature (482)..(482): n is a, c, g, or t
  misc_feature (514)..(514): n is a, c, g, or t
ttttttttaaagtttttgtatgattgtttatttaaaatattatgactctggatgtaaatacatatgggcttacataatgtatgattatccatataaatgctcaattaaaatatttagttcatccttaaacaccttttgttctaataagcataatagtaaatattttatctcattggaagtgtttaaagctgtttgaatcttgatttgtgaagaaattactgaaaaataacttaaggttaactacatcaaacaatactattgtttgcaatgctgtcagatttctccatggcaaaatagtcgcatatggttattgcacgatttataggtacaggttattatgtgcatataaactctctacataatgacagtgtttgcactgcaacttgctcaacacatttaacattgttgaaatacaatttacaaaatctttaacaacatacttttaagataaaagtatcctgaggatattacaaaattcattntaccagcccttcatttctttgctttgactctntaatttccaagataatcg

SEQ ID NO: 148745 - DNA, 409 bp, Homo Sapiens
tttcaatacagtagatgtttatttcctgcttacaaggcagtcttcagcatgtgtatgtccatgtggtcattcagggatccaggctccttgtgttttctggctccacctcaccctagttcctaatcatcatccatatccacctgatggaatagaaaatagcgtgaggtgtgttcccaggaggctttgcatgggttagacctggaaggcaaacacatcacgtctgcttatgttccatctggaaaaacatttgagttgccacagcaaattgctagtgagaatgagagatggagttccctgtgtctccaagaagggtatgactttggcagagcagctcttctgttccctgacttctctttctcctgccagaacccagcaccgagagggaccatcagaggatgttccatgagaa

SEQ ID NO: 148746 - DNA, 238 bp, Homo Sapiens
aggctacggctggcaaagatgaggtaggctgaagcggcccaggggcaggcaggagattagacgtatcttgacatcttccgcgacttgtccctcatggcgtcagacgacccggataagctgagccgtcgcagtcatgacctccacacgctgtgacccgaggcccacggggcccgcgcctgcctcccttccccgccaccgggccctctgccattaaagcctccgtgcttcgctcttcaaa

SEQ ID NO: 148747 - DNA, 151 bp, Homo Sapiens
tttattgtcatgatggattcgtattttatttttattttcagtattgtatgcagtttacttaaaaaagatttgtgaaaaaaagagatagcacttttagctattgctaaatgagatcaggaaattgtcttccaaataggcaagcacaaagctg

SEQ ID NO: 148748 - DNA, 454 bp, Homo Sapiens
ggattttattttttcctaggtcaagctgtgtaaaagtcatttatgttatttaaatgatgtactgtactgctgtttacatggacgttttgtgcgggtgctttgaagtgccttgcatcagggattaggagcaattaaattattttttcacgggactgtgtaaagcatgtaactaggtattgctttggtatataactattgtagctttacaagagattgttttatttgaatggggaaaataccctttaaattatgacggacatccactagagatgggtttgaggattttccaagcgtgtaataatgatgtttttcctaacatgacagatgagtagtaaatgttgatatatcctatacatgacagtgtgagactttttcattaaataatattgaaagattttaaaattcatttgaaagtctgatggcttttacaataaaagatattaagaattgttaa

SEQ ID NO: 148749 - DNA, 448 bp, Homo Sapiens
  misc_feature (68)..(128): n is a, c, g, or t
aaatcccaaacatccttcggcagttcttgccccgagtctcccggaacgcagctcagtagctgtacatnnnnnnnnnnnnnnnnnnnnnnnnnnnnnnnnnnnnnnnnnnnnnnnnnnnnnnnnnnnnnggctgcgggggtggcaagacgtcagtctggggcactgcccgccacgtgagcgggtgctggtcactaagctggctccccaggggcgtgatggagttgaccagggtcgtcaggttgatgaaatgggccacagactgtgggttcgaggcttccggctgggggtggatgtggacgtcattttggcggttgtgcaacatggcagagccgctgacggtatcaaaggtcacggtcaggattgagttgtccagctgtaactggcgttcaggggtggtaaggtgccccacggccaccggctggagattggtaaagtgagtcgcggccgc

SEQ ID NO: 148750 - DNA, 646 bp, Homo Sapiens
cgtagtatgccactgcagaatgcccacttctacatcatggatcaacggcactatcgtgaaacaacagccaccacttcatgcaggcactggcaggtagtatcagtccatcttctgtaactgctcccataagtacttggtgatgatctgagtccattccatgaaagggtcaacatgtctcttcttaaccttggtctcagagattgctgcatagtaggcacaggtcatcttaatgagccaggcagcccgcatcacaggcactgtgtatttggctaagtacccaaacacctcttccttcttactgaaaatggggacctttttggctagttgcgtgagtggcttggtgccagccaagtcagtgaaccaagtgttaatggcactctgggatcgtgcagtcaccagccagaagttatccttctggttcacttggggcttcctgcgaccagtgtcaggaagggtattacaacgtaatttctctgcaataatgctgctgaagttggaactgatcttggcaggattgaagctgacgttcttggcactgccatgctcatccccagagacagcaggctggttattgaaaccttgttttacattcaaggccgtcagttcatcctccttctgtttggggtcctgagggtaaacatcggga

SEQ ID NO: 148751 - DNA, 1155 bp, Homo Sapiens
  misc_feature (127)..(127): n is a, c, g, or t
ccccggtaacaggatggtcctggcgccattaaaggcaggccacagatccccggacagaggtctcccccactttaccagagaaggccactttttgaggaatatgatgacttccttttaccaaaagccntgaataggccaggtaataacttctagcatgcaagatggtttcaaaaataaaatcctctggcaagtgaaatgtaacttcaggtggattctggaggcgatgagaagctcaagcaaatccaggaaacacatcaggatgtttactattttagaagtatcccggcagttttcaaaatgctgagagaataaggaattgtaaaacacttcaaaaatggtgtcgaaatgagtcaggaactgctttagaatttctgttttctgtgaacatgaatctgttaaagatttcggttttattattgctgtaagagtccagaggcagtatattgctttattactctcagagtattcagaaagatttttctggcaaaaagcaattccaggaattacttaaggttatcttttctctcaattggaaatatagaagcaatgcaaggcactgtgcagccatgtgagataacaatttatctgaattttggaacatgcagattaatttagaatcgactttggctgattctaagagaattttaattacatctctgtactgctcctttgcatggaactcggttttgacagacaatatccgggttgtcatcactttgatcactgttaactgaaggagcattacttctctggaaccgctcatctgagagttggtcttcaaacacacaggtgctacagcaatgggagccacaccaacagagatgggctgatgcctgccctggataccacaggtgtttgcccattctaaggaggtggctgtagaacaatcttgatctgaaactgctgggttgagataaaagatgtaatcatggctgtcattttcaagtgtggctccaagaagtaccttcttgtataactcttctaaaacttcacagaaaactttcattttgacttccaaaatgtatcttataagaaggtcgacaactccaagttgtaaacattaaatctcagaagtgccatgaatctctaagaagtttcttcagtgaaacctgggatctggctcaggcgaactctcttcacaccgccatttgaggg

SEQ ID NO: 148752 - DNA, 482 bp, Homo Sapiens
ttttctttgtaaatacgggcttttattcactgccagctccaggatggaaggagggggtgaatcatgcacagccttggtctaccctccaacactaggcagtgctggacaggggactcagaaagggaagcagagtgggctgttgatgtctggaaagctccctcaccagagtgcccagtgggtcacacagcatcatgggggatgagctggggctggagtcggctgtatctgacaccagaccctccattcaagctcccttgatgacaacgcccacaacagggtctggctgatgctccgttctgccacgactcctgctgggtgatcgtgggacaggtctccgcccctcgctggggtctcagctgctttgtctgtaaaatggaggtgatgacaccacctccagccttctcaaggctggctgagggagaagccacgtaaaagcgcttggcacacagtaggtgcttaataaacagtcaatggattagtct

SEQ ID NO: 148753 - DNA, 285 bp, Homo Sapiens
acactcacctgtgatggtcctctggccctgctttgtgagtcacagcactgagtgagccatcacagagggcaagaggagtactcctgggagccgttcctgcactggaagagctggtaatgacttcactagacacggatgtgtctatgaaccacacaaatattcacaactcaacttctcctttatttgagtccaaaaatgtccagagccactcccagaaccagccatataactcacggggcccagtgcaaaatgaaaatatgggtccctgctgggggtagtggctca

SEQ ID NO: 148754 - DNA, 607 bp, Homo Sapiens
gcggccgcgggagctgaccctgcggggtcccggggggggatggggtgccgcgaagcccccactgaggccgccgctgccgggcctcccctcccccccgggcgggcgccatgcgggggagcccgggcgacgcggagcggcggcagcgctggggtcgcctgttcgaggagctggacagtaacaaggatggccgcgtggacgtgcacgagttgcgccaggggctggccaggctgggcgggggcaacccagaccccggcgcccaacagggtatctcctctgagggtgatgctgacccagatggcgggctcgacctggaggaattttcccgctatctgcaggagcgggaacagcgtctgctgctcatgtttcacagtcttgaccggaaccaggatggtcacattgatgtctctgagatccaacagagtttccgagctctgggcatttccatctcgctggagcaggctgagaaaattttgcacagcatggaccgatacggcacaatgaccattgactggcaataatggtgcgaccacttccttgttgcattcgctggcaaatgtggaggacgtgctgtatttctggaatccatttccacggtcctggacattgg

SEQ ID NO: 148755 - DNA, 470 bp, Homo Sapiens
  misc_feature (408)..(408): n is a, c, g, or t
ttttttttctatttgtatgaactttattaaaaaaaatcagaagcgattccagggacagatgacaggcgcctctctgggtcccgttgaccctggggtcccagacccaaggcagacaactcgtagcattcaagtcctgctcggcagtgtggacttgcaccctgtggggctctccctgagctaatccttgcaaaatgtcctcaaaacggcagctgaagagtgacctgaggatgccagagagtggctcagccctcttcctcctcctcctccctctgctcaagtccaccactgccctgtggctggcaaggctgatattccaacccctcaagagggctcaaatacgttaatacgcatttccatccacttgttgcaaagatagattttgttccaatgtagaacaacagcacagangccttttgggtgggcatgcacacacggcttttttcctcttattctttgaacagctctgctgt

SEQ ID NO: 148756 - DNA, 435 bp, Homo Sapiens
caatcaatagttatttgcataccttacgcatttgtatctactcaactgagtgtgttttatgtccagaaatcagatgcctaagaaacatcttccttaggtggaagttcagcccttcatctctcatttcatttttagtttatgaaattaacttttgtctactgttcctcaaactagttctttgccaaaggaaaaagccgcctaacttttttcaatttaccagtccttaccccacccacctcctttccttccaccctgtgttctgcaacctttctttgatttttctttatttcaccttttataattttgttttcatttctgaccctctccccataacacacaagaccctttagatgagcctaaataaatacagaaatagacttaaagcattaaatgcttttttaagaaaaagttttgatgtgtcatcctccatagtta

SEQ ID NO: 148757 - DNA, 960 bp, Homo Sapiens
ggaccgatttgaagtaaccacattctaagtcaacacaatgtttgttaaaaaaaatcaaatgtgcaagtggcagtgactgtccagttttgagaagcgtctagcaagtccgaggcgtgttcaattgttctgttagcaactgctgctgtcttgcctgcaatttttccttttccagcaaaagctggtgctcctcggcctggagggagtggacatactcagtggcctttttcaaaatgaccaccttggcggccttctcattctttaccaactccggcacgtggtccctgagcagtgagaaagctggaccgaaggatcgttgcggcgctggcgctccaggatgttgtggtttcatgcagacgctcacatgtccatcacgagatcagagtttcgggggctcaagctcttagcctttggggggatgacactcttcgacgcggacgtgggcgacagcctcagctctcttatcttcttctgtgggggtgcatcctcaacatctccacgtagggagagggggcggcatagttgtgctgctggtggatgggaaggcatcgtttgaggatcagctcgctggatctgagccctcccgggacccagggctgcgttcttgggacagcacagtgatggtgaatgtggtgacagccttggtgttggaggaggaacgccgcttctccacagtgaccacgtcgatttcttcctcttcatcttcctcttcatcatcttcatcatctgaatcgctcagggtgtcctctccggaggtactgagggccttgtggtcgccgccgctggtctggcggccgcctgggcgcggaggggtgacccccggggccccggctggggcggcaatatccgcccccgaggcgaccgcagggcccgccgccggggcactggccggggctgcgggcacgggcgctggctcgcgcttgttcacgggaaaggggaagaccactgaggtatccacacact

SEQ ID NO: 148758 - DNA, 807 bp, Homo Sapiens
atgtatccttgtatctttcatacccataccaggctagtatagatgcttaggggtatttgagagcataatagagtggaaatgaatatagttttattttcattgagacaaaaatcaaatactttcttaacaatgctgtaggggctctgactgatctgggagtcaaaaattactttaaaagcaaaaggaacattttgtatgtgtgtgtgactgaacataactgtaggctgaaaatattttctgaaccatttcttccttgataaattggatggggtggatattgactaggagagtttaaaacactgtttacaaaggactgctgttaaccagtcaggttacagggcacacacagattaggaaaaaaggtgggctcctaactagctgaatcttccaatcttccaattgtagagaaattattttaggaaggaacttttttccttctaaaacatctgcaaatgttgtgaaagcattatcaatttcaaaccctagtttcatatttactacctgaattccacactactcataatgctactgtcattcgcacctgtaaaatgccctgttgtggccagagctgtaagtgcttgaatagatgactcaaggcagagacactttttgtgtgacaaagcgtaaggagggggtttgggggcagctgacctggagggaacatatactctttgagtaaaaagcttttgaagtgaagtaaaaggagaaaactatcttccataagtaacacaactaattttggggggttggggtgatggctaaaggagatttcagagcagcttcatttttgtagtcttctgatctatg

SEQ ID NO: 148759 - DNA, 481 bp, Homo Sapiens
gatgacaataagaccttccagggaaccaggcagaaaggtgggcaggtacagtggccaatttcccagagaagatcctcaatatctgacttttgagagaatttaaatattcattcttcaaattaaggaatacaagtgaacaacctgaaaagatttttagaagctcattagctgtgtgttatttgaacgcaaaaatgaggaagagatttgagcgggaaacaggagagtataggaaggcaggccagggtgcagccaggccccagcaggggcagagcgggaagcagcgagcggaaagcaggggagagacaccgagaagctgcagtgtagacaaccaaaccctttattgtctaagttacattagacgcaacactgtaaaaaatcctgttaagaaacaaggaaacagcagatcgggagaggtagtagaaagtctgtaacagtcagaagacaacgtacagaagtgtatcatgcagaaattaccattcgg

SEQ ID NO: 148760 - DNA, 696 bp, Homo Sapiens
  misc_feature (66)..(185): n is a, c, g, or t
tttacaagtaaaatgtttatttagaaacagaatgcttgctcctaggtactgcaaggaaaaaccagnnnnnnnnnnnnnnnnnnnnnnnnnnnnnnnnnnnnnnnnnnnnnnnnnnnnnnnnnnnnnnnnnnnnnnnnnnnnnnnnnnnnnnnnnnnnnnnnnnnnnnnnnnnnnnnnnnnnnnnntatgcagcttgtgtcctgtctccattggctggagctggacctcacaatttaaattaaacccgactggctaataacttaaaactttcctatatagggaaaggcaacagagaacaaaggaaaagaagaagttgcttgcaaaaagacttagaaaagtaataatatttccaaataaggaaggggcataggctgccagctggaacgtgcctgtgagcatgtccagcacaaatatcttggctaaagtacaaggacatagaatatacttattcccttatatctaacagctacataggatagggcttaacgaagagttattagcacagagcagagaaggcttgaaggaagttagtctttaaaagaaactattatttctaacacttatgatttattctttaacaagaaaggaaatttcgaaaaggaaactttttactttctacaggctgatgagtgcagctaatcctcattattataagcatcactattatcatcacttgcaagagccatgtgacaatat

SEQ ID NO: 148761 - DNA, 255 bp, Homo Sapiens
taggtactgcaaggaaaaaccagcatttagacaaaaagttttttcagcaaggcaattttactttctgcagaaagggtgctcctcacagatgaaacaatggtgacagcacacccgaacaaaggagggaagcagtttttatcccttatgcagcttgtgtcctgtctccattggctggagctggacctcacaatttaaattaaacccgactggctaataacttaaaactttcctatatagggaaaggcaatagagaac

SEQ ID NO: 148762 - DNA, 464 bp, Homo Sapiens
tttcattcatcagacattttaatgagacccaatctgatatgaccccttcttgggggtagctcatcatccaaggagaaacaaacagttacaatgttacaatgcaacttgctaaatattgaacagaggtaattacataaagctgtgttcccccagctgctcccctgcttgtgctgagatcaggagagctgtaggaaggagccacaggggtaaaggatgacccactccagctgttggaatatgagatgagtcacatctggaaattctaatttggtgcagctgcccaaggcaaagtggtaggccttgttcacatttaactcggtaaagctttatgaagcacctacccagtgggtgccattgaggtggatcagattgagccacgctgctgccacctctgtggagggaggctggcatggatacaacttgatgactatagactcttcctctctggattcagttccctcttt

SEQ ID NO: 148763 - DNA, 864 bp, Homo Sapiens
tggaccggtccggaattcccgggatatcgtcgacccacgcgtccgaaatgctttaggaggaaaggtaggcttaggttgcttttcctctgagggttgattgaaatttcttcagtgaggaatagagaaagggcaggaccctcctcatcacacagctggtgtttcaggctgtgaccaatgcagggtgggatttcctaactgtggatgaggggatgaggtgtctctgagggatgaggtgtctcagagaattgagtccatggggcagtcagaatagccttaagagaaaatcatgaaggagaagaggtcctcctttagctgcctctacttggtatcttagagagggcttagagggctctcagtcttctgcccatgaaaagacttctttgagcctctgccttcatggctcttagggttctgatcttgatatcagcagccccaaccactttctttctgaatgtctagtcagtatttttccccttttggtgttttatgaagccatgtggtaacgaatgaatctgtatcatttttcctacctgagtggcccaaagccagcaccaaaccctgggagtccctgaagcctaacagaacaggtagaacttgcaaaaggaatttggctgagagctcacttctaatcctgtactcactgtgtctttgtagatagaaacaagctagctttaccaaagagaaatagtgtcatagaagaacaaaacttcatatagaaagttctaggcaagtatttgatggtttccttaaggatttgagctttgtatttccacctagccttgtaaaatgttcctgtggtattttgtgtcacacatcctacctttgatgagtctcacatcccaccttcctataaacagctaaatt

SEQ ID NO: 148764 - DNA, 478 bp, Homo Sapiens
tttcattctttagatttctttatcacatttttcaaaaataaacaaatcgaaccatatttgtagcaactcaaagtgcagcatagatttaaatgatgtatttgttcagctcactgatagggggcaaatactacattaatatattttcttcctgtcaagagttatttacatatgtacagtatttcagttaaaaatataacaccataaactatattttataggaaatcataagggaaggaaatatgcaggtctattaaagacttaagagcttctaataaactactttacttggagagggttggggggacttcagatcatacagtctgccatggagaaaagaacttgctggcagacagcctgatggttcagaggctccagtgcccagttagccacctggtctgcaatctttccacagacttactgatcaggcttgatcaggatggcccagccatccagaaaaagcccccatcaggttcagtcc

SEQ ID NO: 148765 - DNA, 532 bp, Homo Sapiens
tatctaccattgataatgactcacttgtgacacaactcacaaatgttgggacagcatgtttaagaaatatttttaaaaacaaaaataaatttgaagatacattgctaagcttcccagacagaccagcactctctgcctctggtatcatcagccaaggcatggtgggctgggttgactcccccagctcatacattcacatttagagtatctgggacaagggtcttaggaacatcaccagagacatttggactcttaagataggacaggagaaataaaagacctttgtctgcaaagcaatcggtgagttagagtccaaacattctcacctctctaactggcaacagggaaccccacttggactggtgcttggataatgctaagtcaagtcctgcccagcagcaaaaaccaagaaggagcccatgtaatccacgatctctgttccgtgaattgatccagaagatgcagaaaccgaaccccagtgctttccctgttacctcctcatttaggatgatctgtttcttttccactgcat

SEQ ID NO: 148766 - DNA, 482 bp, Homo Sapiens
  misc_feature (451)..(451): n is a, c, g, or t
tttccctatctggatgccttttatttttcccttgcctgattgctctggctaggactttcagttctgtgttgaataagagtgttaagagtagacattcttgtcttgttccagttctcaaggagaaaggttctagcttttgcccactcagtatgatgttggctatgagtctggcatagatgactcattattttgaggtatgttcctttgatgcctagtttggtgagggtttttgtcatgaagggatactggattttatctaaagctttttctgtctcgattgagatgatcatgtggattttgcttttgattctgttcatgcagtgaatcacattttttgatttatgtatgttggaacaaccttgcatcccaggaaagaaggctacttaatcatcgtaaattaactttttgatatgctgctgaattagatttgctagtattttgccgaggattntcgtgtctatgttcatcaatatgttcaggat

SEQ ID NO: 148767 - DNA, 416 bp, Homo Sapiens
ttttttacaaaagcaggcattggccttattcagctgtgggctgtaacttgatgacctgtcctggattcatctagaagttgctccttatttctaaataaccagcagaaactatacctccattaaatgtaggtagaactttacaacaaatacataaataaacacccagccgggagcggtggctcagccactgaatacatttttaaaagagatattttcttcagtgtggttagggtgtgtgatactgttagtctggtcttcagatatagcacagggtaaaatactatctttcatggcctggcttgggaatctaaccaccagggatactatgaaaaatccttaataaccagtagggtacaggagccaaaacaaccagtgtgctccttcttctctatcttacaaccaaatatcatcaaatg

SEQ ID NO: 148768 - DNA, 481 bp, Homo Sapiens
ttttaattagctaggcatggtggcgcatctgtagtcccagcaatgaactgtgatcaagccacttcacttcggcctgaactgagacttcatttttagaaagtcttttggggtttaaagtctgctcacagattcctctgccccactggcaccatctgtgggctgcggagtagctgtcttcagtaaaaaaggatttatgtcctacctttaggcaaacaaaggagaggtagagagagcccctgcactctgtcttcagctcaacaatacccagtatttgagagagcaatattttagtttcctttagtagaaaagatgacaaatgggtatcccaaatggtcaagagtcataaataatttcaagtaaattcaaattaattcctattagtggttatcctaagctaaaggtatccattgaggaaagaaatctgtagtggctctaaggaactgtaactttgtttcaaatccagtctcagcgggaatgctgc

SEQ ID NO: 148769 - DNA, 1461 bp, Homo Sapiens
ctgagttttagctgaccaaactacttctctgttgtggcaaaggcctgtgcaaatggccatttaacactgttgttctgtcatcttccccatctcaacctgcttttgttgtttcctatcaagatacacttagcaaaacccccaaagacatccagagcttctgaggtacctctgtgtacctcagtttttctccctgtgctgtgagagccatgctgtctgccactctgtgggctcacaagtataacttactactgtaagtataagtagtactatgttccatacaatgagaagacttggaaataaatagaaaatgtgatcacggctcacacctagaaatttacataaagtgctcagacttcaacaagtggccctggggagggagaaggctgagaggtaggaagagatggtgttgggctgggctagagtctctgaaggtagggattttcattctgtcctttggcttcatctcttccactgaagcagcagcactggccgggggtaagggaatgagcttcgctgggctgagtcttcacatccaggcctcacagtgctcagcccggggcctgggtctcccccagtcccactctactgcttgttccccactccatcaaggtcccagaaagtctgtttgtcaatcagcaagggatcccagtcccaaagtgattttaagatcaaatctaagatcaaagtacccagttatccaagcagcagtgtgattacacctttcaatctgtggaaaggggtcacgttgatcacttcttgataggagctcatgggtgcccttgggtagctcccaaatgaaaacttggctgaagtgactttacaaatggccagttgtgcctacaggctggacagatggtggggggcccctggggtgagcgacggtccaatgccttcaataaggttgttccattgattatagtcttctttcaggtcgaggtgcttctgcaggaaggccaacatggcccgtaccataacctcctgcccttcataggggtccaggctcccacgggtttcagtggagaagaatttaccaatcaagttgccagtcacaaaagcaaagtcagtttgactccgatgaacagaaccaagaccggttatgatcctagactgttcatgctgggcacatatcttcttcatcaaattgacactctccattgtctggaatttctcagtattgataaagaacacaggtcctcgggccttggggtaaaagtcacgttccagaggaaacatccaagcatccagagccaccgcacaccgaaattgggtctccttggccaaagccagaatagctgtggcccctccaaatgaatgtcccatcacagccacacggctcatgtcaatgttgcccttcaaagtcatcagatccaagccaccaggcaagatgtgaagacagtctgcccagcagtgacctcttgcagcctcgtgccgaattcggcgcgccgtcgacttcatactctc

SEQ ID NO: 148770 - DNA, 406 bp, Homo Sapiens
gatcttgtagctgggcatggcccttgcacagaatggggagctatgcccagagcgtgtttcaagagctttggctcctgtggggcgtgaggctcttctaccaggatagcttccactcctacctctctgcacctgaacagactcccacgtgcactgctgcaagggtgcctgcagaaggcgacttgtcctccatcctctgaacagacccagtgccctatgtggcccacggtcatctgtgagtctgaatgttcacaacctaagaaggtgacttgttggcagacggggcaataacatttcaacttcagaggactgttgtgagagtaaatgaggtaattggcctgtcatgtaccaagtggctcaaaatgcagaagctgttattaattacataaagcattattatatcgttaaa

SEQ ID NO: 148771 - DNA, 475 bp, Homo Sapiens
tttagctttaaacattcaatttatttgtggcatttgtacatgaaaattatatgacgataacattgctttctattctaagctagtaaattgtttctaagaaataatagattgataaaattgcaagtcttaatacaaaggtaggttatgaaaatgtatattaatttgagatatagaaaagttttcaaataataatgttttcagggttatatgcaaatagacactaaataagacaaggtttctgcaaacatgatgtaacaataatgactggaactctgaatgtgagaaattcagaaaatgaaccagctacttaaaaagcaaaaatgtgctaagtaaatttgtattttcatggttattctaaggagaggaggaataatctgttgaggttagtgccctcaagcagaccccataactttgctacaccgcatttaacttctctgtgctgttttcttttaattttcaaaatggaaattagctg

SEQ ID NO: 148772 - DNA, 477 bp, Homo Sapiens
  misc_feature (280)..(282): n is a, c, g, or t
  misc_feature (290)..(291): n is a, c, g, or t
  misc_feature (309)..(311): n is a, c, g, or t
  misc_feature (336)..(337): n is a, c, g, or t
  misc_feature (412)..(413): n is a, c, g, or t
ccacgtgtcctccaacgaatgcagaatcctgatacactatcagcaatgtcaaaccctagagcaatgcaggccttgttacagattcagcaggttttacagacattagcaacggaagccccggtcctcatcccagggtttactcctggcttgggggcattaggaagcactggaggctcttcgggaactaatggatctaacgccacagcctagtgaaaacacagagtcccacaagcagggaacgcactgaacgcgtggacagtcagccagtgttatgtcagcnnnagatgctnngcaggcttttcttgctgnnngaagtaaagtgcgctcagcgtaccnnggaatgcgcagaaaaggtgcagattgtcaaaagcaaccgagacgtggaacgagacgtgcaagtggcaagtgggannttgttttgaacgcggtgaaaagccgaaagctgtgccaaagcgttctaaaataaagcgaaccgag

SEQ ID NO: 148773 - DNA, 473 bp, Homo Sapiens
tttaagttttgccatatatttaataactttattgaatgaagaaaaagatcacaccaaaaatggaggaatacatcaaccctggtggtcttagtagaccgagccaaattaaactatatgataaagcaatttctcttttttcatccaccactaaatgagagttcatttttatctaaagaaggctcatcttagcaaatattgccatgacaataagactgttaggcaaaccaataaatttaggttctggcctgggttaagatgactgtatttagtgtcctttctcaagttctacttgaaggaatttctgtttaatcaaaaaaagctcccccaaccactaccaccccaccttggcacttaaatgtttatttgactaatatttattgcacctacaatattgtcagggattgttttcaaacttcagatatattagtagacaagtatccataaggcctaatctggaattcatacaactaaga

SEQ ID NO: 148774 - DNA, 237 bp, Homo Sapiens
ttttttttaaagctcattcattttaatagttgagcacagttttaagaattccccgtaggaattatctcccaggtcccccgctagaattattcacatacaaagcctgcaagtattcaaatttcacaaacacaattgcaaaagcagaagaactaagaaaaaccttcatagtcttaagattaaaaacaatgcttcatcattcttagagtacctgttaataaatgctaaatactaagtgct

SEQ ID NO: 148775 - DNA, 466 bp, Homo Sapiens
tttggagtgggtataccattttgtaattccacttgataatggcatctgattatttgatcatgacatcattatttgtatacaatgcagcaagaattttgtttttaatgtaggcttttaaatgggctttgatggaacttggttccatagaaggaatcccagataaggctttttaaaagccgagcccagccatggattcataccatcaaatacctatgagttaggtgaattcctctcgaggttccaagaatctatacaaagaatgtgtttattttgtatgggttcagcacaactcagttcctctttctcattttctgaaacttgaactgctctagtcttacccgtgtgtatagacctggactttgaggttggacagacatgcaaaggtagggatataggtggagtggtacagattgtttggacagatagaattctgggacttgggaaaactaagttttgtagtttttgg

SEQ ID NO: 148776 - DNA, 469 bp, Homo Sapiens
ttttttgcattttcaaagcagaagattttaatgtattgttattcttgaggataaatctttcaggatattaccttccagaatttctgatgtaacaggaaagagtaagatcagtatctgaagcagtttccacagataagactagatcattatattttttaaagatatgtacatggacatcagcttgttctgggctctcgcatatatctactacagtgtcagacacctaccaagtgcttaataagtatgaattcttagcttttccttcagggttttgggtaagcctttgcaattcccaagtcgaaagtcagcaaaacgttatatatcaaacaaaagaaaccacctcacctacaacaatgggcctgagactcagcaggatgagaaatatctttttatgaatacagtttttaaaatatggagccaccccacataataaacagcaggacaggtcaagtattagacacaatgaatg

SEQ ID NO: 148777 - DNA, 439 bp, Homo Sapiens
tttggtagaataagcaaatagactccttttcttcagttaggttcactgatttgatttaggctctctataaagtcttctgtctcaacagaagtagaaagagatttgtcacaagagtagcaagaactattcttaaagtataaaacactttacccatgtgcactgagggcctgttgatcttaaatgagaattctataagccaaaggcgaatactgtatatgaaagaaaacccagaacataaataggaaaataatttcaagttagctctgttaatctaatgatcgtaagttggaaaacaaaatatatcactatcttgtctttaaaatattaattccttgtgttagcccctctgacattacaaacttattatatatttcatcagtaggcaaagaactgtacaacttacctgtaatgaaccaataggattaagctggttctttgg

SEQ ID NO: 148778 - DNA, 499 bp, Homo Sapiens
tccaattaatacatgagcaaatgatctgaagagacatttctcaaaggaagacacacagtcaacaaatacatgaaaaggtactcaacattactaatcatcaggcaaatgcaaattaaaaccacaataaagtatcatctcaccccacttaggaaggccattatcaaaaagacaaaaaatagcaaatgctggtgaggatgtggaaaaaaaggaacttttgtacactattggtgagaacgtaaactaatatagctgctgtggagaacagtacaaaggttcctcaaaaaactacaaatagaaccacaatatagtccagtagtctcactatagggcctttatccaaagcaaagagaagttattatatcagagagatctgcacccccatgttgactgcagcactgttcacagtagccaatgtatcagtctaggtgcctatcaacagatgaatagataaagaaaatgtagtatgtatgtacacagtggagtaccgtccagccataaa

SEQ ID NO: 148779 - DNA, 531 bp, Homo Sapiens
  misc_feature (39)..(39): n is a, c, g, or t
tgatggcacatcccccccgttttttggcacagcagaacnagaacactcacttggccactctttcattacctgggggagggagagtgctcccatggcaccacccgaacgctcactacctgagagcaaggacaggagggaggtgtgctctctatcctggggaaggtatgtcctgggtgggggcgctgatcagtaccaaggtgagggggcagcaccagccagggtgaggccgccccaggcggagaggctcagtaggagttcagagcctgcttggaacggcgcttcatgtgcaggcgctcgtggcggaggaggtcatagttctgcgtgaagctcttgacgcagtaccggcactggaagggccgggctttgtccttcaggtgaaagtggctgcggtgccgagccaggtggtcgtgccgctggaaggccttcccacactcacagcactggaagctcagtttggccttgccgttttccagcggctctttgggacccttgtccgcgtcctcggatgcacgctgctctctcttctcgtgc

SEQ ID NO: 148780 - DNA, 386 bp, Homo Sapiens
ttttttgcccttggtcgtggattttactggtcttactatattagccatcatcctgaagccgctggcttggtagaacaatgcaatggcattttgaagactccatcacagttccagatgggtaggaataccttgcagggctggggcaaggtattgccttctctggaaggctgtgcattctcttcatcaaagtccagtatgtgatgcttttcctcccataaccaagattcacaggtccaggaatcttcaagagacaatgatttcctcttgaatttcttcttagtcatcctcagtgagtgccttatcaagcttattacttcatggtgacaagagggctgcgcttgatccaacatcactcagatttgagttgaatcagccacagaaggatc

SEQ ID NO: 148781 - DNA, 511 bp, Homo Sapiens
  misc_feature (56)..(100): n is a, c, g, or t
  misc_feature (342)..(350): n is a, c, g, or t
tttaagagatttggtctcacaattttgcccaggctgggttcaaacccctggccttnnnnnnnnnnnnnnnnnnnnnnnnnnnnnnnnnnnnnnnnnnnnnatgagccactgcacttggcctggaatatttttgtaattggcaagtgagatgagggacctaatttgttttctgctgagtgaccagttgtggcaacactaatttttttaggtaaaccattcttttctttctgtaggtgtaattaaatgatgctgtacatgtagtatcacttggttttgaatgtgtatcatagttatctcatgtatccagaagttaccagagaagtgaaagcatatccgccctannnnnnnnnatcccttaatctttcatctctctttcaaggaaagacggattctaaaatactcctttcctttgattagagataatgtaataattgtagcaatgtctaggctagtactatgtttcttctatctgagagtcttccaggaggagtgaaagtgtatctgccttctg

SEQ ID NO: 148782 - DNA, 403 bp, Homo Sapiens
ggagtcgcgtggatttgtgtgctacaattttgttgtggaaaattgtactgtaatacttctcttggtactgtaagaatttttaatgtagaaattatgctctgtaatgttgtttttggaaataaaactgtttaaactctttgggttgtttaaccttttaaagtgaaatagctgtgacagtgaaatgttacttttgagagtagtgtcttaaatctaactttacagataagccaagtgtatgtagtagctcagattgtctagttgggcactgactttcagcacattgtctcatgagacactacctcttaatttattttacttgtatcaactttagagtagcatggccatttgtttattttttaataagtgatttgtttttaaaaattaaagtacttgtgactgcaga

SEQ ID NO: 148783 - DNA, 403 bp, Homo Sapiens
cccacccttcaggaagtggacgtttcgttatcttctgatccttgcaccttcttttggggcaaacggggcccttctgcccagatcccctctcttttctcggaaaacaaactactaagtcggcatccggggtaactacagtggagagggtttccgcggagacgcgccgccggaccctcctctgcactttggggaggcgtgctccctccagaaccggcgttctccgcgcgcaaatcccggcgacgcggggtcgcggggtggccgccggggcagcctcgtctagcgcgcgccgcgcagacgcccccggagtcgccagctaccgcagccctcgccgcccagtgcccttcggcctcgggggcgggcgcctgcgtcggtctccgcgaagcgggaaagcgcggcggccgca

SEQ ID NO: 148784 - DNA, 308 bp, Homo Sapiens
  misc_feature (308)..(308): n is a, c, g, or t
aatgtagtggctttggtggtaataagtgtattactttagtatttcttcttagtcctagaaaccttagtagttttcattctacaagtgcctaaatgattattatgaaccctccattgatgacaaattgcatcctttatttctattaattttgcatataaatggatgtgaaaggtgattaatataaaaaccaagtagcaaacacaaacctaagtgtatggagaggacagtcttggctctgttagatgaagcctccccgggggagaccagctgaatgagggttgtggtataggctgggcatggtggctcan

SEQ ID NO: 148785 - DNA, 529 bp, Homo Sapiens
  misc_feature (388)..(388): n is a, c, g, or t
cataaaaaccatcagagccaatctttgtgaaaggagaagggggcacctggaagattacaccaagaaaacaaggcttggtgcctccgcctaaagaacaaacttcagctgtgtcgtgtggccctgccggcctagccgcttagggtggtgcactcagggtttgcagagcaggagtattggctggtcctgccttcttggagagggagaggaaaccctttgaaacaagcatccatcatggagtctattgatctggtcttccttaggacaggtggtacatgccatatcccactggcgtggcatagagtcccacgggcgggatgggaagcacaggtctatggaacgggtaggatgctccatatatggacgctgcctgcagtggcgagctgatggngatagggagactgaagcttgatggcagcatatcgtttgcagccattgtcagctattccagttctgcctcctgcagctcttcgcctagtccttcgttctggtacagattttgacctgggtcttgtggggtaaagagctgaga

SEQ ID NO: 148786 - DNA, 281 bp, Homo Sapiens
ttttaatctggatcaaacagatttgtgtatatttcaattttaaattagtgcaactgcctttgggataagtagaactttctcattaacaacctgactcagcttccgtcgaggcaggaaaagggcacctaggctgaatgcagttcttcaagtgggggtatgtcaacacataacagcaaaacctatagtcccttgggaactctaggtgtgaggagtggccagagtctcgcaggattgggtagaaggtgggacaggcgagggatggaggagggggagcttgagtc

SEQ ID NO: 148787 - DNA, 683 bp, Homo Sapiens
tgccaagctccttctgcacatgctgcgggagtcccagcacagtgctccgccgctcccgccgacgccgccctgactttccagatttgggaaatgagtcatggggtcggaaggtggagcctttgcgctggatcatctccgagcggatggagagcgcgtcctctgctgtggagctctcagccacgtaggatgtggtctgactgcagaaggagatgttgtcttcatccggccccgtccgggaggactggatactctgggtgtctccatggtcccagccacccttgttcagtttctgtttctcttggtgttgtagggagcggagcccctcctgggcctgagtgtgcagctcttccaggtgggggggtcgcccactgggaaagaagacgttgtcctggtgctcatccactgcagaccctggcccctggccaggccctacacttagatgtttgtcattctcagccttggcagagcctcggcctttgcccttggccctcttggccttgtcctccgccttcttggcccggggggcggccggttcggcgccctcggcccccgccgccttcttcttgcgccgcttgccccgcagccagctgaaggcgcggcggaggccggacgcgccggagcgggacttcttcctgcgcggggggccgcccgggttccccggctcctcggccgcaggtgcggcg

SEQ ID NO: 148788 - DNA, 451 bp, Homo Sapiens
gacttatgaataattttatttattagatttgaatccattacacttatgatttattttggtgctcagattgtcccaggtttggccagtgggagctcctgggtcctttggacatgttgtcgggattctttgaacatttcattacttttgtggcacaaaaagatagttcagacatgtcttgtacttcttctgccccgatcttggattcagccatttctcaaaagagcctctcaagtgacctgcacattccccttctcctgcaggcgcttaaagagggttgctgggccccagatgtgggtgttctctgctgctgctcttcagcctgggtggagagtcactcactcgttcaccccgcagttttgagtggctcgcctggtccctggcccagtgaacaccataaaaaaatcctgccctcagagagcttttgttctttctatcgtggaggcgtggggag

SEQ ID NO: 148789 - DNA, 378 bp, Homo Sapiens
ttgacatttatttgtagaagctgtcatcttctctgtgtgagcattttgtagatcttttggcctccattcctgttctcttagtcaagctaaatggtccagggactgaagatcccagtttagccacagcttggctcttttgcaaggtgaggggatctcctgcaggttgggcaaagcttcattttctcttctgtacaatgcgggtgaaaaaaatctccgctgtgtctacctctcagggctgctcttcatctgcttgttttgtgccaggagagaggattctgctgggaacaacttgttgggaaagatgacattcgcacgcccgccggccgccccggcctccggagctcttctctggccggcacccacgaaggcatcacggga

SEQ ID NO: 148790 - DNA, 458 bp, Homo Sapiens
  misc_feature (88)..(88): n is a, c, g, or t
  misc_feature (106)..(106): n is a, c, g, or t
ttgagcaatttcaaacttaaacacaatcatgtgtttcagcagcagacactcaacaatgcaggtgggcccttccccttgagatttaaanttcagcattagcaacaantgagaacaacccatacattttccccaccggacccctgtgctggtcaaacacgtaacaacacaaccaggacagggcgcctgcaccaccattcgggcacagagtcagctcaacaacagcgtgggactactcatctgatgactttactcagcagtgcttggggctgtcgggttaaaagtcttgacacgtctggggtcccaaccaaaacacaaaacgaaaaattctttttttggaaaaacgctttcagacagagcattattccctggaacaagccttggtcattcgtgtgttttaaaaataaaaagcgcagcgagaacagaggtaggacttaatgttgccatccgagagttttctg

SEQ ID NO: 148791 - DNA, 357 bp, Homo Sapiens
  misc_feature (101)..(110): n is a, c, g, or t
atagaaattccaaagaacagcacatcagaatgctcctctcttttcagtaattgttttagttcagagatcttcccgctcagcctccataaatctaatgtcannnnnnnnnnaataagtcctaggagctgggcttcattcctccagcgggagtccagtcagggtcctgaagtttgctggttcaggaaagaacaggaaagagaaaagccttctgtgcccaggctaaagctgttacatttccacagtgtggatgcagtcagaatccctgcacattctggtcataaggattagagtcaccagatgaggctctaaacagatcgcatcccttggaattagaaagcagtggagaccgggcgcagt

SEQ ID NO: 148792 - DNA, 466 bp, Homo Sapiens
  misc_feature (138)..(138): n is a, c, g, or t
  misc_feature (419)..(419): n is a, c, g, or t
aaaaattttggccaccgttctccgtacgggggctttttctgtctgtctgtctggctggcaggctggctttccccctctttcccacggagcccgagccgggcgcccggtggggagtggggagtgggtggggggagccancaaagttccattttggaacgcccgtgccgcgtctccgcgttcccagcccgggtccccgcgttcacagccccagcgcaggtctggatgtaccgactgcttttggaataaaaagattcccaggatgtgagcaacacgggaccgatatgatgcttcctggtgtgtttagtggttggtgccattccaattttctgtgctgaaatcattctgaaaactcaaacagtagacttcagcacacaaggaaagccaaagccatttgaggggggataaagccaaaagccctncaccttcattcttccaagaatctcaccgccccactcagactcgggcc

SEQ ID NO: 148793 - DNA, 455 bp, Homo Sapiens
cacttttaagaaccatatgtcgacattgcagtatttatttataatgaaatcagaattcatgacaagttgtcatgacctctgattaaatcacatctgccagatgcatctctgttaagcatggtctctagagttttacattttcaccccctcatcctttcctcatctttctaaatcactacctacatattaaatactgcctatgaatacaagggaaatctgcataatgtcagatatagctcacagtgggaggagcaatatgcaaatcactttttccattttcagaagatagtgccagtgccacttaaaagtactcttcctgaaaccagagttcaaatctacaactggaataatgcccaaagtcactatgtacacaatgctgaactttgtcattttaggtgtaggcaaaggtttctatttgaggatgaatggccaggctatttttagtcccccaagaa

SEQ ID NO: 148794 - DNA, 450 bp, Homo Sapiens
tagtggttcaaccactaaaacattcccgctttggattcaagagcaaacttgaattacagaaactcaagtctgaggaatggtggaccttgtatgccatagaaatatccagctgccatgctgtgagctgctttattaagatgcccaagtggcaaggcactgatgtctgtagccaaaagccagcaacccaaggcctgccaaaagccacgtgcatgaacttggaagtggatcttttctcaattgggccctgagatgatgacagcaccagctaacaccttgatgacagccttatgagataccctgagccaaaggtacccagctaagtcatgtttggattactaatcaacagaaacgttgggaaaataaatgtttttgttttaagctgttaaattttgggctagatagataactaatatgttgtataactacaatacaggattatttttatctatt

SEQ ID NO: 148795 - DNA, 400 bp, Homo Sapiens
ttttaacacatgaaaatactctattttatactaaattccaggttcaaatgaactacaatacaacattttgccttgtctgtagagtgaggattgttccaaatggggcatatgtttggctgcccctgcagtgactcactactgtcagacaagtccaaatcggtcccctagttggggaaggagcaaggtttggactgagagtttctagccagttgggttacacatccactcctttgatgagtgatccttctaggactatggtgaagtcctgaatggtctgcagaattcggataagggagttgacagtcatgcggtctcgcaggagagcgctctcttcatacattcgagtgatggcaggacactcagctaacaatggaatccactgtgggagcaggcgatccct

SEQ ID NO: 148796 - DNA, 478 bp, Homo Sapiens
  misc_feature (234)..(262): n is a, c, g, or t
aagtatcttttccttctggcaaaggaacataatattcaagattccccttatattttccctgcccaagccctggaatcaaccatttctcaaaggagctctgcttccctttagtggggaatggtattagagaccattatctggatacaaggcatgtcattattggggtttctttgctttcaggccattcagtggacaaagctgagaaatatatgcaagtacagacacacgtatatnnnnnnnnnnnnnnnnnnnnnnnnnnnnntactttacaaagcttgaattcacaccaatgcctccaattcaaacccattgccacaggattctttctcactttgccctgttccgtacctgcgtatatcttcttctatagtgagaatcttggctcccaagaacattgagacatttactcatttcctcaatcctacaagagtttctgaactgttttgcatatacaactatgaaaaataatcctaataaa

SEQ ID NO: 148797 - DNA, 914 bp, Homo Sapiens
  misc_feature (126)..(126): n is a, c, g, or t
  misc_feature (129)..(129): n is a, c, g, or t
  misc_feature (145)..(145): n is a, c, g, or t
  misc_feature (159)..(159): n is a, c, g, or t
ggaatggtccatatttaggctttccaaaggccgctgcccaaaactttcagggagaaaaattagatggttttgaaggaagtgaaatgccaggttacctcatccagtagtccattatcccagtcattntgntgacagaaatctgagnatccccaccactcntgacgacactgttcccgcaggcccagcttgctcagaggtggctgtggacatctgctgggactcctgccctcgcgcgtagccaggctcactgtttcctctggcacagggaggcagcactgctggaggccggtcagataaactgaaaattgatggtaacgccagttcaccatcaggagtacttttatctttttcagaaattaaaaatgaaagtgggcaatctgcagctgagtacttggcgagtatctgtatttgttcttgactcagagctgcttctttacaaactttctggcaaagtccagttaggttctgctttgtctcgcccagagttgacaaaatgtgatctctttccttcaacaagctctccttttcactttgcagcttctcaatttctgattcaagattctgtatacagtcaagttttctcttgcgacagcgctgtgcagcaattctgtttttacttcttcttcgaatatcatggatacaatccagctgttctggagtaagcttgtgcattttcaacaaggactgaaaatcatttcgagacagtgaaattatccgttgtgcattgaatggcagttttacctcacattcttgttctctggctgaacaggattcactgtctccttcggtgtccgtctcagagtcgtctcccaagctaatgacacaagcatatgggcaaggttcttgctggggttctgaaacataatcatcgcggacgcgtgggcggacgcgtgggtcgacgatatcccgggaat

SEQ ID NO: 148798 - DNA, 424 bp, Homo Sapiens
  misc_feature (44)..(44): n is a, c, g, or t
agcttctttaaaatctcacttactctccttctctacttccattntaccctgagaataaagaagaataaaggggtgggaaaggcctatcctcattcctcttgctctttccacagaggacaatgaggcaggactgagcagtgtcttcatccctcacggaattccaaggtggacgccatctgtgaagcgacttcgtgttggcctgaacttgctaggagcttttagccactcatttggttgtaatccaacacatgacgtaatagtcggccgtctggattaatcagtcccagctgttggacgctctgctctgtgtgggggttcaagcctctccatctgttcctggggcctctccacttatcccttctctgcttgagcctccagccatgacagatggctctttctcagtattacagataatttttctctg

SEQ ID NO: 148799 - DNA, 542 bp, Homo Sapiens
agccagggctccagtcctgtgactgtccacacactgccttctggccctcagctcttccgctatgccacagtggtctcctctgccaagagcagctcaccagacacagtgaccattcacccttcatctagcttggcgctgctgagctctactgccatgcaggatgggagtacactgggcaacatgaccaccatggttagccctgtggaattggtggccatggagtccggcctaacctcggcaattcaggctgttgaaagcacctcagaggatgggcagaccatcattgagattgatccagccccggacccagaagctgaagatactgagggcaaagcagtcatcttggagacagagctgaggactgaggagaaagttgtggctgagatggaagaacaccagcatcaagttcacaatgtggagattgtggtcttagaggattaactggggatctcagggccaggagttatgttttgatttggaattttaattatttgtttatttttatcattgtcccactcatttccacataggaccctttttta

SEQ ID NO: 148800 - DNA, 502 bp, Homo Sapiens
ttttcccaaatggagtaggtctttagattcttagggagccggggtccagatttctgggaaattgaaggaggcaggagttgggctggctagtaggtgagaccaaccctgtgacattatacaggtaaccacatcctagtgacctaatcctgggtcccttggccctgtggccttcttaaggcatggttctggtctgggcctcagttttcctacccatgcagtgggttgagggggattctcagtagagccagaataggtagacactgattttctccacattcactcatacgataccagggtcggccagctttggttcctttgagtgggctaggcttaggtttgctgccactgtctgttggagtctgacctcagttttcccaaatcctctcacccaggtagccaggactgttttcctaagagcaatggcacaggcacagtggcatactttgggatgctgaggcaggaggatcccttgagtccaggagtgagacctcatctccacaaa

SEQ ID NO: 148801 - DNA, 461 bp, Homo Sapiens
  misc_feature (25)..(25): n is a, c, g, or t
ttcatggcattgtctgctttatatnaagccagtcttcataccctgtttgatagccgtccagtaatgcaaagaagagtggaagtccgcttgtcactggacttgtgggtgtatcaataatcacctgcaccagacatatgataaggatataacagttggctactcttctgaattgttcaaataaattcttgggtataaagttccaaaatgtgtacttggacgagacgatcctgttgtctgggtatctctgtgggatgtaggcctctgcgcccggaggtggctccctgtgtcccacgtagatggtcctgctgtccacccaattctcttctcctgcacagtatctgtgcacgagcgtccgcacgaggctgcagtccatggctcctccggccgctcccgctccgccgttcagcgcccccgcgcccggctcggcgcgcccatgggctccggggtactagtgcggccgc

SEQ ID NO: 148802 - DNA, 394 bp, Homo Sapiens
gagcagcagcaagcatttattgtgaagagcgaaagaacaaagcttacacagggtggaaggggacccgagtgggttgccccaaacaattgactttttaagagtcaaaggcacctttgaaaatatgattacaggccgggcgcgtacataaatattaaagaagtaagcagttcgtataggttaataaactcaaagacacacctactaaacatcaaatatattttgtatgctgatagcaatctgtcttaaataagcagcagttgatacaattcagtactgtatataaaacatttataattttgtacacatacaatttttattttgtatgttaatcttatagttacgaaacggtctttaaattttagaaatgcaatctgaagactttatgcctttaacg

SEQ ID NO: 148803 - DNA, 539 bp, Homo Sapiens
ttttttataagatcaattttattatttcaccgaaatagctcaaggcaaaaagaaataacagccaactggctcgaatcatagtgtctgataaaagtaggttcattcttactttgcctattggcttctcaatcagagggcttggaaagcaaactggagttatgctgctgtacatggaaggtttccattgctgttcctttttgcagtcagataaggacttctcactggccaatgtgctgaaaatggtggtcttttgcttggtgcttgatttcaggccaactcgggaatgacttttagactcaaacatgggagaggcgcccttgctcggcaacgtgcagcccaggagctcggcgagaaactttgccatatacaagcggtgaggcagggtccctcccgatgcgccgtttctgtcctttccccttgccagagcccgagcgccaggatcctgcccgcagcccgcccgccagccggggccgtggctcggggctgccccgcggctgcggcggaggggctgggccgggcggggagagctcggcggccgc

SEQ ID NO: 148804 - DNA, 498 bp, Homo Sapiens
gaaagcaaactggagttatgctgctgtacatggaaggtttccattgctgttccaagtgtcctctccacacagccacctgccatactcgagtctccttttcctcatgcttcttcagcccattggctcaccccacgtgacagggaacacagcctctttttgcagtcagataaggacttctcactggccaatgtgctgaaaatggtggtcttttgcttggtgcttgatttcaggccaactcgggaatgacttttagactcaaacatgggagaggcgcccttgctcggcaacgtgcagcccaggagctcggcgagaaactttgccatatacaagcggtgaggcagggtccctcccgatgcgccgtttctgtcctttccccttgccagagcccgagcgccaggatcctgcccgcagcccgcccgccagccggggccgtggctcggggctgccccgcggctgcggcggaggggctgggccgggcggggagagctcggcggccgc

SEQ ID NO: 148805 - DNA, 674 bp, Homo Sapiens
ttccgccatggccctttttctttactcatacaaacaagttacaaaggtttcaaacaacagatcattctttaggctaaggaaacaccatacaagcaccaacttcattttatgattcaaagctcaccatccccacaaaaagaatgctattcctcatctcagagaaacaggcaggaaggacagaaggggttagttacagtgatcaattttagcgtttgctaaaactcacaaattctagtctttttatgttcaagttttggtacagaagtatacattcaactatgagtgccacgttttcccatcaaacattggtctggcaacaaactgttttgttggcttctgaacataatacttcttcagagggaggggctggtgagatgctgaagcctaaattatgttggtaagaaacaaagtaccttcagttgaaggttttttttatcatcttggcttagattatttaaatgaaatcccaagcctccccattttcctttggttgtctttttcatcaaatcccattctatcacaaaacctaaacagccttcttcgtggggggaagagagactgccaaagcaaaacacaactcccagcagagccatgcccctgctgcactctcaagagttagattttaaaaagacatggtctcttcagaggcttccaaatacaaccccacccgctcc

SEQ ID NO: 148806 - DNA, 361 bp, Homo Sapiens
attagccttttcctcacataaccagccagtgttaaaatagatttgatgtcatgaaggttgcagcttttaggcagtataattttttttcctggcatgcataattctgtattatgtacatggtttcattcatccttttatccagatgtctgaattgatgtaacccagctggattttattggagtttagacctgtagccagtgtcttgatgacattttggggttcctcctgacatcctcggagataaatgactctaggacatagccggaagttcatgatcactatggctgccaaagccatggactcaggtgccggagagtgggaaagtattacagacaatttcatttttaaatatgagagccaa

SEQ ID NO: 148807 - DNA, 958 bp, Homo Sapiens
  misc_feature (765)..(765): n is a, c, g, or t
tatagaggctccccgagcgggtgatgcggttgcagtgggacaggtggcggcgaccggcggcgtccgaggagatttaatccagagactggcttcactatataacccaccgttgtatcaatggttggggaaagatagtggcaacatgctgaggagacacagctctgtcatacagagaacatgagtatgctgaagccaagtgggcttaaggcccccaccactgatcctgaagcctggaagcacagctctgaagacacctactggtgttgttgctccagtatatatacccatatccagtgaaaaagcatcaagcactccatcatctgagactcatgatgaatttgtggatgactttcgagttggggagcgagtttgggtgaatggaactaagcctggatttatccagtttcttggagaatcccagtttgcaccaggcccgagtgctggaattgccatagatgaacccataagcgagaacgatgggttgggggcaagacgtccgtatttccagtgtgaacccttaaaggcatatttacccgaccttcaaagtaacaagggaggtgcaagcagaagatgaagctaatggcctgcagacaacgcccgcctcccgagctacttcaccgctgtgcacttctacgggcagcatggtgtcttccttcccctccaccccttcaacagtcctcagaaaccatcacagccagcagcaaaggaactttcagctacgccttcgatcagcaaccttacaaaaactgccagtgaatctatctncaacctttcagagctggctccaatcaagaaggagaacgagagctcaaaatccgagacggagtattggttgtggcacttaaggctgcgtaatccgcttcttggggagaccgaccttgccaaggggggaatgctgtgcctgcaatagaagagcaatttggaagaattgatgcgctgtgcctggaacagggtattt

SEQ ID NO: 148808 - DNA, 446 bp, Homo Sapiens
tgacaggttaggaagttttcatttcagtttcaaattcaaattcatactgtaaagtggtgatgaacacatcccatccgcaggtacttaacctccatacaaataagaactacctctcatatgggcaaaaagatcaaaattctacagaagaatctgatggctaaatggctaatttgcaaaacacaatgccctgtacattttgaggacatcctaaaacatgtgtaaacttttcagaattcagtttaccaaagttatcaaacttaaaaatgattaaaatttatttgctactgcaaagaattcaaccaatttctccaatgactactccatattcattttgaaaaacagtaccggatttaaagcttacacaacaaaattcacaaaagtgttatatgtgcctatatgacatataggcacaaataactgcagacattctgaagctaacactgctc

SEQ ID NO: 148809 - DNA, 377 bp, Homo Sapiens
  misc_feature (139)..(153): n is a, c, g, or t
agtgtgagaccactgttgagcttatctctggtttggtggcttggtcaccccactgtggggcccatacagaagtagttcactcaataccttgttagtaagttgcagactcatctggtcactggcaaagaacaacatcagnnnnnnnnnnnnnnntcgccaccatttaataatagtcggtggggggcggaggcgggtatggtgttgacaatgtaaaagaagtatactaatgccttctctgtttggtcctttaagaggagctgttcagctcagaacacaccctgcacatcctgccaaggcacaaagtgacaaggccatctaacctacaagaagcaaaaaatgatggtatgttttcaaggatcacaggttaatataagccc

SEQ ID NO: 148810 - DNA, 496 bp, Homo Sapiens
ttttttttggctgaaaacaagacaagtttattttcttacagtcctggaagtcagaaatctgaaatggctcactgacaaggggttggcaggaccgcatcccttctggaggctccaggggagaatccattttcttgcttttttcagctcccagagcctgcctgcattccctggctcatgaccgtcttccgtattcaaagccggtgatggctggttaagtctttcagtcattgcatcactctgcctctgactcagccacctcactattccacagttaaggacccttgtgattacattgggtccacccagataatccaggatcatctccttatcttaaggtcagcccattagcaaccttactgccatctgcaaccttacttctccctggtcatgtaatataacatattcgcaggtttccggggtgacattatgaacattttggggggggaatgtcttttaaattctctcattctggaaccagtccttacagcagagagag

SEQ ID NO: 148811 - DNA, 490 bp, Homo Sapiens
tttatctcattttttaaattttatttcgcatattttcacaatgcacttgatgtattactgaggaatttaattaaataatcattcgaaccatgggctcgaattgtttactgataaagcccgacgaccaaaacagcctagcgactgctgtttggagcccctcggcccagggcccgtggctgttctctccaagggaccatctcgcccctcagccaagtcgcccggaaaacgagcgctcgaccgcctctgccccgctctcggtctgcacacagcaacggtctggtcgctcagccacttcctccttccagcctcatctggttcccaggccgctggggactcccaacgccactgtccaagactctagggtcagcaagcgccccgggcggagaagggcgaggacgaagagcgccgggccgcgaccaggagcccacccgcgccctccgactgcagacatggggaagagacgcgggaactccaaagtcgctgggtctgc

SEQ ID NO: 148812 - DNA, 598 bp, Homo Sapiens
tttgggaggcagtggacatgttgagttttcaattgaatattttgctgcaaacaacttaggaggagaggaaaaaagaaaacgcaaagccaaacaaagctggtatttttcaagtgctcattaatttcaaaaccacggtgtctttcattgattttttaccattaaaaaggacagcaatgcccatctgctcaaaattccatccagaaatgaaattatgaattaaagctgtgttacacatgcacaattgagacatcctctgtttgggcctgccagatgacacactgaaacagcctggggtctgcacttggggtgctgccaaggaagcagatacacggctgatgaaaatcatccatcatttcaaatcagaggtgccatattcctgcagactcctgttatgaacaatctcatttgatcttacattggaacaagctgtcttcaacactcaggcctggccccaggcacaacgaggcagatggaataggaatctctcattccatgcctgcatttgccggaattctaggattttgtcagaagttttcttgtgtgaacctagcctgacaggattaacttcactgagttgtgcttcaatatcagttcttac

SEQ ID NO: 148813 - DNA, 211 bp, Homo Sapiens
tcaagatctttgttttgggagcccccctggcagcagggtcatggaaggaggaaggtcagaggaggggagggctcaggcagcaggggatgggccggggctgtcccatgcctttccacaggtgtcagcggggggcatgcccaggtaaggctccataaccagtgagttgtgaacgctgtgctccagcctgagcaacagagggagactctgtctc

SEQ ID NO: 148814 - DNA, 406 bp, Homo Sapiens
tttgcagtacatgtcaaattttattgtgaaaattttaaggtagatattacatctaaacacttttcaaatagcatcaacaagtatgaaattactttgaaaacaattccttttcctttgaatacctcaaaaaattcatggaggaagttagtatctacctctctccacaaaaccaacatgtttctttcagtaatatgcaggtaacaatgcagaaataacatttcaatttttgatttgcaaacaaggattggtatgcaataactattattttcaatgcttgctttaatatctgctcgagtctcctttttcagatcgactctccccaccatctactatagatgccacataacttgagctaccacatgcttcacgaggatcagggagcaccctacccagagaaggcggattc

SEQ ID NO: 148815 - DNA, 263 bp, Homo Sapiens
catccaataaatatttattactgtctacagttcattgagggtttagaatacagagatgaacgacccatgtcatgaataggactatggaggatacagaatctgggggaaaaaaggaaacccaagataaatttttagattatgaattaatgatgcctctgaaacatttcttcccagttttgagaactaaatagttcttgtagatatggaaagccatctaaaaaccacagtctgttaatttggctagtttatatgcagctaccttc

SEQ ID NO: 148816 - DNA, 426 bp, Homo Sapiens
tttgtcttatgtctctaatctgcactgttcagctcttttaggcactgcaaagttgtcttgaattaggaaagaggtgctagaatgtgggcgtgggtgttgacctacatctgaacaatttacatatgattcaccacaattaaacaatttggtttgaaatagctataattaagttattatcagagaagtatttactagtctagaaattctaaatttatcttcacatacaccctaactgagaaaagggccacattttctgcactctattaagtaaagcaaatgctgaactaaatgcctccatgttaacatttatattgttaagttactgacagcatattctatgaatgattacgttagtcgcttctttaaaaattataggtttgaaatagcaagaaaaatatgaaatgatggtagacaaaaaagagtttc

SEQ ID NO: 148817 - DNA, 386 bp, Homo Sapiens
tttaatttaaaaactgtcacatggctttctatgtgaaatgtgattcttgaaaataacagatacgcaaatatcaaaggattatcaaacgcagacacactcgcctttctcaggtggaaaggcccatttccccgcactgcatcctacctctccccactgccaacctcatcccgtgccagtctacttgcccatcacaagctcaacctgggaggcccattcacctctgctctctgcaatgcaggcctcccacctcctaagactggatcgcccccaggctcgccaggatacatcacagccctcctgcccggaggaaggcaacagagagagacttgacttagaatcagaagcttctctttaacttcaactcagactcatgtcttccaacggtt

SEQ ID NO: 148818 - DNA, 367 bp, Homo Sapiens
tttttttcacgtaggactgcagctttattaagtgttgagttcatgttgtgtttgggaggatgcagcacttggaaaagatggtcaaaataagacactgatctcagtcactcatttctctgtttccactcctcagatgcctcccttttttcataacaatacttctccataaaagtaactgtggctttaaaaacaaagtgcctagtggtcctcaaggttggggaagagtgccagtttgaaaagggaggatgctttgcttcattctggggctttgagagtacacaggagggacaactctgaaaacaaccgctgtgaggtttttgaaccaggcctttcacagtagctgcccaccactcccggaggagatctg

SEQ ID NO: 148819 - DNA, 362 bp, Homo Sapiens
ttggcatggggtcagcaccagctgcagagacatggctgcatttattgttcccagcccggcgagaaggtgttcccagaaaggttccttgggtcacctgcccacccagccttggctctgggctgccatgtccccacgggggcaggagagaggcacaagtcacagtcaggcaagggagcctcagcgtcctgggcggtggctgttggggtccctccagtcttcacctgggaccctcggccaggctgggacagcatccaggaggcgaggctgcatggtccagcggtgggtgcaggtggcaacaggtcggcgggctgtgcaggttccaaaaggagctctcgggttggcactgggtgagaccagccccg

SEQ ID NO: 148820 - DNA, 378 bp, Homo Sapiens
actgtatatcctttattaaattttgccttaaaaattttaaatgctgcatttttataattcacaatagcaacaaaacatgacaattatttgtgtgaaatacagtctaagctctaaaggttcatagattacattcattttataccaggtttgttcatatatatagattaattcatcacagtatacttatttcttaatatacttgcattttatcaagtaaaagaattaaatattaaaagtagcttgacaaaatacagaaatattctgtgcaataaatttgttgtcaactgattcatgactggttcatgaatcatgactgatgtaatctttttatctttctgcccagcttctcttacatgatccttgggaaatagccagttg

SEQ ID NO: 148821 - DNA, 1014 bp, Homo Sapiens
cgtgctgttgtccgcgcctgggtctgcctgtggcgctgggacgtggggtcgtttggagggggctgtgcttgatccgttgtggctgaggcgcgtgtgcttgcggtcgctccggttgctgtctcgcgtgggtgggcccatggtggtcgcgggctggggtcgtcagtggagcagcatcggggggcgggcgtggatcctgacttggcctggagggcgtctgtcttgccttacacctccccgttcgtgtgtgggggcccgtagcgaagggcacctgcaacgcatgcacccctcggcaccccagaatgttggctcgatcttggggcgaaatgtcagccgtatcaggatcttccgctccgtggagagaaccagatggggggacacaggggacaccataggaagggcaagagggcccactcggacagggagggcccaggggccccgagcccgggaaggcgcgtcgggtgcgacgccctacgtctgacgacctccgtatgctgtccgtgtaggttgcagcacatgatgcgacgattgagcggccgcctattaatacggcctcacagtcacggccaggagtgatagtgactgcatcgggtggccacacgtgtgatcccgcgtgatgagaagaatgcagttccctagtgccatgatccgagcagtgccagggctcccggataggggctcgcattcacagctgggagaggacacgggcctgggagtggacggggctccacttttctcttccagaagtggggctgtggggcccccaggataaggagggggaggctcgctggacatcttcgctgcttctcctcaaatccgtgctactcagagaagggaggcaggtgaggctccttcagctgctggcctggatggacagggaacaggcagggctccgggagcgtccccgcagcctggggcagcggccgcaacagcaggaccgaaccgcctcggcagctggcagcctcgtgccgaattcgccacccaggcctcgctacctataaccctaggagtactgct

SEQ ID NO: 148822 - DNA, 1057 bp, Homo Sapiens
tgggccttaaatccccaagcaggaatttttgcccgaaagagtcagcggggtcaggtaggggccagggtgaagagggccaggactttctaggggaatggtggccacggctcccagcccccagttgggagcggaaaagtgaccactgagcgcagggagcaaagcaccagggggccagaactgccagggcgggggagtcccgagtcccaggctccgttagcacagggcgcttgtacgtgtagatgtaggctttgcagctgggggcatgtgtgcgtcacatccttgaagtcattgatgaggcaggggatcaggcagcagcccagatcacatcccatgaagcaacagaagaaacccagcacgaaattcatcaagccaatctcgtaggagatcttggtggtgatggcctgctggcagtggggacacaccgtctgcacaggcgctccctcaaagatctctccctgcagcactgtcaccgtggtggcagctcctgaagggaccaggactgtggctgtgtggcccccagggccagggtagggccctggcgtgtagggccctggggggtagtagcccatgggtgggtgggggcctggaggagggtagaaacccggaggcatgtaggtgccatctgcactcatgtgtggtgggatgaagccaggctggggcattgggtgacccggcggctcatagggtggggggccaatgtccgcagggggcagtggcatgcctggagggggctgcatcacagctggggaggaacggcctggggtgggcggggctccacttttctcttccagaagtggggctgtggggcccccaggataaggagggggaggctcgctggacatcttcgctgcttctcctcaaatccgtgctactcagagaagggaggcaggtgaggctccttcagctgctggcctggatggacagggaacaggcagggctccgggagctccagaagcccggtgcccgaggccggccgaaagcggagaggggcccgggtccggacaggcgcctggcagaacaagaccctcaatcccgggaattccggaccggtccagcc

SEQ ID NO: 148823 - DNA, 476 bp, Homo Sapiens
  misc_feature (141)..(171): n is a, c, g, or t
  misc_feature (364)..(414): n is a, c, g, or t
ttctctaaattttttatatttatttattgcagaaaaatatacaaagatatttacaaaacaatcataaaaatatgaatgcatttagacaccggatctatttgcattttaccatgggtcctcaataaataaatagaatgttgnnnnnnnnnnnnnnnnnnnnnnnnnnnnnnncccctcagaggaaggatgaaaaaaagaattaactgactatggttttgcaggccagtttgatcccagtatttttatttctaaaggtgttcttatagttcctctgattgttaccattttaaaatagagaaagtccatagtgatgcctttcctttcagtggctgattggcacgacctcttgagaatgcatgcatgnnnnnnnnnnnnnnnnnnnnnnnnnnnnnnnnnnnnnnnnnnnnnnnnnnncacaaacaactgttcagacttctatcagaatgcagaggtgtgaggatggtgccgctgccccc

SEQ ID NO: 148824 - DNA, 375 bp, Homo Sapiens
tttttcagcctatatatattgtatttcgattttagcccaagccaggtctccctgaagtcccatctcctggaacctccgcccgcctgcagccctgggaagccgccctgttagggatcacccgcccgagaagcgccccgcgtccccgaagccctgcctgctcgcggccgggagtgggggcgctcagcagttgaggctgagcacgcggcaggagcaggcgctgcggaagaagcggcactggcaggaggcgcacgggtcgcagcaggcgggtgccggcggcttgcagctgttgggggtggccacgcagggcgcaaataggggggtccggggccgcaccactttcttcatcgaagcctccttcttaaaagatcttttctt

SEQ ID NO: 148825 - DNA, 571 bp, Homo Sapiens
  misc_feature (400)..(400): n is a, c, g, or t
tttgtctttaatgtctttgtttagttattctcttctcctgtctctcctgcacgctcctccctttccacttctttcttctctcttcggtcctccccgtgggaacctaatgtatacgaaaatctagtggtgcctccagttgtattttcccatgaatgctttattgactttgcttcaagcctttcaaatggcatctggtgcttacctgtgagacatcccacctgacctgccagataaagacgattaaccctattttgaaactgagataaacctggcttggaaaagtttacctaccccaaggtctcagcactaagtaatttaactaggactcgaacccaggcagcgactcctgactgcttaagacggcatggtaagaagcaggtccagaagtcgagagacctgngtgtgcaagttcctaggggatgccaagaacgagagaagggggagcaagtgtctctgtgaagggagtgtaaagacacagaagtgaaccggagccgcagagccctgtgagagaaggcatgaaaatgtgtccttgtgtccatgagccgaaaacatgacaaggattaagccacag

SEQ ID NO: 148826 - DNA, 381 bp, Homo Sapiens
cttcccattcatggaaaaactgtctttcacaaagccagtccctggtgccaaaaaggttggtgactgcttaattagaaagtgagcatagaacttatcccaatcagatttgatggatgaatgaaaggaagaaaactgactgttcttagtgtttgctggaaagaggaaaaccatgagcaatgggataaattaaacatttcagttgaataaatgtttaccaaattgctaataaagaataggctctgtacttggccttgggcaaacaatagtgtaaaatatacagtctgccctctagttgcttattggagtgagcatagtacattctgataaatgtacaagagctagaatccagaacatagaattttccttgtggatttgtttaaa

SEQ ID NO: 148827 - DNA, 311 bp, Homo Sapiens
acctatttattataactgctaatattttgtgtttttccttaaaaatgcagtgtttttaggaattaaagttcagagcagcaaaagtcaaacaaaaaccaagtctgagcaatagagctactacagtgcccatcacagtgtctgctcaggtgacttcttaaggtcatgtccagctctatgtttctgtgaccacaaatagcatctttggcaagtctagtttcagttggtctttgtccagctcctggattcctccatgcagggcctgagaagccctgagggataaaagattaatccggttcagtggactctgtggt

SEQ ID NO: 148828 - DNA, 398 bp, Homo Sapiens
ttttcaataaaccaaaaatatttatcccagcattacttatgagagcaaaacttggaataaagcaaattgcttaacaatagggaaaggttaagtgagctgtgatacccggctttgatggaataggatgcagtcactggggactacactgggggtattctactctctggaggagaggttagagataacttgactttctggcctcttactttttgccaaaacagtctccaaatcccagcagtgggggccagtttggagatgcatgtaggctgcaagtactctcagcagccacagcaggctagacttagagacagggcagcttcctctgtttagtctggtggaatttctgaagaaagagatgttagcacgaggccaggcagtgatggctccaggcgggatgg

SEQ ID NO: 148829 - DNA, 477 bp, Homo Sapiens
  misc_feature (402)..(402): n is a, c, g, or t
  misc_feature (445)..(445): n is a, c, g, or t
tttttagaagcttaaaagaataacatttattatcttacagttacagtgggttaggaaactgagcatagcttagtgcggtcttccagttcagggactcttgcaaatcttcaaggtgcagacaagagctgcagtcatctcaagttctactgtacagtatgtgctcataagttctttgtttttgataggattctttcaattctgagattgcaggatcattcaagttcattgcaggactttggatggggtacatccattcttctctgacgattgcttgtctcagttgcttgccagttgggcccttccatgaggcagctcagagaatagcagctggtttgctgttctgctgaagagctcgagatttatcatccaaggagactgttgttttggtaatttgccctctgncaggtctgacattggaataatgcagaacacttgattcaggtcntagaagaagcaacactttgggcacagcacaac

SEQ ID NO: 148830 - DNA, 728 bp, Homo Sapiens
  misc_feature (503)..(603): n is a, c, g, or t
tttttttattctcagtccaacgtgctttgcatcatcaacaaaatgacaagtcaaagtattttgcagggatcagatatcaatcaacctccataacaagttaggtatatcaaatactgctgtaaaacccatccagcaaaaactgattattgtggatttcagtacaaatttccaagttgtcacacattactgatgatgatcagggcaggcatggaattctgctgacttgtttcaaacactgtaacttggtccgataacttggcaaataccctaggagttccaaggttataaacacctgtatgaacaaagcatgctttcagctgcagactgtgaatctcctggcttttaagttgaagtttatactgtgtttgtccaagccatgtgaatgatccatggatttccagtgcttctggacttgttgttttaagcacgaagatcaactatgacatatacatcagccttagaacaattggaaagtaaaagagtgactggtactaaacaaaggnnnnnnnnnnnnnnnnnnnnnnnnnnnnnnnnnnnnnnnnnnnnnnnnnnnnnnnnnnnnnnnnnnnnnnnnnnnnnnnnnnnnnnnnnnnnnnnnnnnnncgtgtactaaattttaatgcgaaaagttatactttacataaatgcatttcataatgtataaagctactctagtaatgtaccaaattataaactgatttcgtcttgctggtggaagggaccgagct

SEQ ID NO: 148831 - DNA, 750 bp, Homo Sapiens
aacagcttgttttgagtttgtgtctgagcaccggctcaactgccccagggagctccttgcctaaagccaaaggagaaaacctctttaaggatgtaaactcggtggtgtaccccatcgtggacttccctctgcgagacatctctcttgcctcccagaggggcattgcagagcacagcgctgccttggcctcccgtgcccgcgtcctgcagcaaggtgatgccagggcggaggggccatctggctctgacgtctcttcctgggctgctgagccctctttcctgagaacgtcggagcggaaggatgaggacgtagagcgccagaccattgagctgatccccctcacagaagttcactattggtaccaaggaaagacttatgtctactacatctatggcactgaccaccaggtgtatgcggtggactatcctgagcggtattgctgtggctgtaccatcgtgtgacatagcatggctgtccccagagcctgccattcacgtttgccaaggaagatggccgacactctctgagtgtgttcacgtgttggctgcattggacaatcacatacaaaccctggcatgtccttccagaaaaaccagcttatcatctatcaagctccaaccccttatacagctcctctggtggaatccatgactcatatgtttaacctacaataattcagctatacacattcctgtagaacaaatgagagacataatttaaatggcaaggactttgcctctggtctccaaa

SEQ ID NO: 148832 - DNA, 371 bp, Homo Sapiens
  misc_feature (87)..(107): n is a, c, g, or t
  misc_feature (331)..(331): n is a, c, g, or t
  misc_feature (354)..(354): n is a, c, g, or t
ttcggggtgaaaatgtttttattataactttggtcagacggggcacagccgggcgggggctctgagggtgctgggaagctatccagnnnnnnnnnnnnnnnnnnnnngggcgcgccaccccggagggagcggagggcagctcatctcagagcgcaggaagcaaacccgccgccgcgacctctccccaggctggggtgggctggcaggcggaggtgggcagtaaacagtcctattgtacaaaatatatagcgcgggctgggcgggggcggtcaaccccggttccctggcacggggacagggcgcgctgggcccggctctgcagcgagccggngggagggcctagctgtggcccangcggtgttgcctcgtgc

SEQ ID NO: 148833 - DNA, 380 bp, Homo Sapiens
agctagttaggtcagtttattaactctccctcttggtccccaaattgcctttcagggtgttgagcagctgcacacatcaccccttcctcatgaggtccccttggccctttacctccagctgagtaagtcaaaggaggacatatgatcaaaccaggtagtccaccggctgacctctgacctacagcctagaacaaaaaagaggacctgggccaatccaattatctctcaggaacgcaaaaggaggtaggaaacgaacaggcaattggcctcagaagccaaagcacagaggatgctctgaggaacacaaaggccacgagaggtcttgacaaaccaaacttcgatgcaaattggtctataaacttcttaagtctctttgcctg

SEQ ID NO: 148834 - DNA, 402 bp, Homo Sapiens
aggtgagaaggtgagaagagacaaagtagaaaccaaacagacggctaaaggcagaggattatgagggtctgactgaagcagcaggggatgaattcaggaaaccattcacagaaaggtagaatcaggaggacttgataacttactgactttgaagaaaagaagtcaaagatgaccgagttcctatcctgaagcctaggaagatggtaatgctgagataaggcatacagaaagaatggagaagacaccctgggctacttacccaacctgattaagacagtataaccaaatctgccagaaagaactaaagatatataatgaaaggccatcttctgaacacttgaccattttctactgcctctaagaatctccttcctccttgtcattaagttagatgttaatgct

SEQ ID NO: 148835 - DNA, 994 bp, Homo Sapiens
  misc_feature (48)..(48): n is a, c, g, or t
  misc_feature (553)..(567): n is a, c, g, or t
gatctgtccaacgcctgcagcgtggatgtggaggcggactaatcaacnagtgctctgttattatttctacccatcccttttctccatgctaatttgcttagaactttaacattgaatggacagcaaatgtcatgttctgtttaattatcactccttgaccattatgttaatttctttccctaacaaggtgacgcattgttttaagtaacaatgaccaactcatctactcttcttccaaattgtgtaaattgaagggtaaaatgtgggaaaacgctaaatttgaatgctaaatttgaacatttcacacaacaataatttgaaatgcttctttgcaatattatggcgtttcggaacagataaaaatacttcattttcagacatttggtcaacaaatacttcttggacgtttatatgcaaagcaatgcatgtaacattttcattactttgcaagtgtgcttatcagtaaaagaattttgttttaaattctagccttcgtttaaatgtattttagttaccacattgggaagaaaataaaatattactatgtacgggnnnnnnnnnnnnnnngagggcggccgctctaaagttatcccttcgaaggggcccaagctttacgcgttacccaagtttttctgtgttcacaagaggggtcccttataggtgagtctcgattttataagccataggcacgggccggtcgttttaacaacggtcgtggactggggaaaactggctaagcttggggatctttggtggaagggaaccttaacttctggtgggtggtggacattattgggacaaattacttacgagagtatttaaaggtctcctaaagggtcacatattatcacacaattcttaaaggtggtcatcaagtggtggttcaaatctaagctggcatatggctggcctggcttggaagaagtttggttaactggaggtatggatttcatggacacatttatttatacaccagggagcaatttggaataaa

SEQ ID NO: 148836 - DNA, 635 bp, Homo Sapiens
  misc_feature (184)..(208): n is a, c, g, or t
  misc_feature (235)..(291): n is a, c, g, or t
agttacagaagcagttgtgttaatatttagaagaagatgtatatcttccagattttgttatatatttggcataaaatacggcttacgttgcttaagattctcagggataaacttccttttgctaaatgcattctttctgcttttagaaatgtagacataaacactccccggagcccactcaccnnnnnnnnnnnnnnnnnnnnnnnnnaactttattccttgagggaagcattgnnnnnnnnnnnnnnnnnnnnnnnnnnnnnnnnnnnnnnnnnnnnnnnnnnnnnnnnnactctctcgaagaagaggaccttcccacatccacgaggtgggttttgagcaagggaaggtagcctggatgagctgagtggagccaggctggcccagagctgagatgggagtgcggtacaatctggagcccacagctgtcggtcagaacctcctgtgagacagatggaaccttcacaagggcgcctttggttctctgaacatctcctttctcttcttgcttcaattgcatacccactgcctgcccagactttctatccagcctcactgagctgcccactactggaagggaactggcctcggtgccgggccgctacctgtgacgcacagcaccctcaaaaccccat

SEQ ID NO: 148837 - DNA, 353 bp, Homo Sapiens
aaagctagaaaaattcttttaaaataaactaaaaaggcagtccataagcttctgttgaatggatgaaaatctctaccataaataaaaacataatatgcaaaggtattaataagatttggaagaaaacctaagagagtattaacagtagtgactactggggatcaccgagatacagggtattagggatggaaggtttacttttcaatggatctttgggaagtttcaaaacatacatgctcaacctttaaaaatttctctaggggaaatcccttctccacatcctataggtgtgcttccttcttcctctccacacacttcactatcaaaacctacattacttccaacagtcgact

SEQ ID NO: 148838 - DNA, 351 bp, Homo Sapiens
ttttttcacttttcaataatttatttttaaaagttattttattcctaaacagtagagttcacatctttttctgctaagttcttccacaagctggcaaaggatccaagatgtagcctggcatttatctttgttctctttgccactctcatggaaatatggtgaatgcagtccgttcttaacggtcgtatttagcctcggttctgtgaattcgattttcttttcctttttaaaggcgatagagtgggatccaatagacgttggagctgactctgagcttttttgacttgtacgtgtcacatctgaaggcaagttccctcgtgctggatgaaagctaaaaggctgggtgcccgg

SEQ ID NO: 148839 - DNA, 868 bp, Homo Sapiens
aagttcaacagctatcattagtgttactgtattttatgtgtgacccaagacaattcttccaatgtggcccagggaagccaaaagattgaacagtcctggaagctaaattctctaacagctttcaaatcctatgactcttctacttctcaaggtgtgtggtcttccactggcttgagtcatctcttcccaggaaagggtggtgccgtccagccagcacatccccagtggtgttactggatgcagcaggacttggatgtagttgcaccccctgggctggggtttccccccggctgatttcctgcggctgctgacttggccgactgctgtttctgcttcttctcctcctgcaccttcatcttggcatcgtactcatcagcaagcgccttccactccttgcgattgttggtgatcccgtccaaattggggtgatctcctgctggaaacgggagaattccttgtagacgaaggtgcaacaaagtcaatgaagccacttgaagcttagggacgtcatctgccttgtttctgtccatcatgggaaatgggattctgtgcagcaccgtgcgcttcaggtcacctttgtccccagaattcagcagccaccagcagagctacttggctctgcacctcccaggggtttgtgatggctgaaagatcacagccgtcatcatcatggccataacgatttccttccgtgctggctcagcatcatggactgggtccaatcctgtcacatctatattgcttaaactgaacccacatctttgggaacatcggccttttcttgaaaacagggggaaggctggggcatgattggaatgtccctcattggatggcatgctcatctggcaccaaatgggttttgaaggat

SEQ ID NO: 148840 - DNA, 448 bp, Homo Sapiens
tattcaatttaaaaaataatacatctttttcattgtgcttggcaactggacatgacaatttaaacacacaatggagaaaatatatacataactgctaaaggattttgacattgtttaaattaattattttattattttggttcaacagttatcaatcacagtaaatataaataacaaaataatatcattcatcatacgatcatgtttttaaaaagtgaattgttgaggcacaaaaacattacgtgacttgcccaaggtcatgaagggaatgaggggcagacaacagcatgttttttctaacttaaacaactatactaacccctagcttataccatctttcaaaatcagctcagggcgacagatacagaaatttaacgcattatccaggaatgtttgtttaacctaaactgctgttattaataaacttaagaatctatatgtttagcat

SEQ ID NO: 148841 - DNA, 1076 bp, Homo Sapiens
agaaaaaggctgacttttattttcctgcagagcatcttcctcgggagagcagggagccccaagtcatcgagttaagagcaggagaatccccttgactaggttggggtctgagcccagaggcagggcctaaggaggtgcagagactagggccgggagtggtgaggcaaggttggggcctggagggacagctatgaccgttgaacttgcagaccctggtccaccttcttggagtggaagccagcggtgcagaaggggacccctgaggcgcagaggcaagtaacagtgccaggggagtggtcagggcagatcctttccttctcaggaggctgttgagggggagagtgtcatgctctaaacagtgaagggacagatgacttccataccccactcttccttgctgttgagaagtggaccttggagttcagtggctgaaactcagaatttagggtatggagctggacccagagaataaagtctcaagtagtagaaggggcatctcctatcagtccatggatttgggcctcatggcatgaacgcagccaagggcctggatgtctaaggatttagaacttcagtgggagaggaagaacagggcttggtaaccagagtgagctccatcactcgtgcctccccatcctggggccgagagagcaggtggagttttctttgtagctgggcccggaggtagcggaggtcttgctgatcaagccctgtgagaccaggcccaggtagagggctaaggaggaaagcaaggaggagacggtccgtgcccagggtaggcaccacccacagcactgtcagcagctccacacacactgggtggcgcaggtgggagaagagtctgagagcccggggagacttcagggccagaggctcgcccagccccagcacatgcgtagtatacccggaccaccagactccgggatccctccaagaagtggacgcgaagggaggtaaagcgcacgaactccactccggtgccaaaggccaggatgaaagaggcgagggcagcagggatcaggagcagtgcagggcctcgtgccagattcacacacccagccctcgtacctagccta

SEQ ID NO: 148842 - DNA, 1109 bp, Homo Sapiens
caaggaggctttttaagggggaagaattttcatttcttctaaccagggaaaggggaccagaaggctttcccattccccccattttttccttgaatggggaagaagttggaccctggaagttccagtggcctgaaacctcagaaatttagggtaagggagctggaccccagaggaataaagttttcaagtagtagaaggggcatttcctttcagtccatggatttggggcttctggcatgaagcaagccaggggcctggatgttaaggatttagatttcagtgggagaggaagaacaggggcttgtaaccagagtggagctcctcactctgcctccccatcctggggccgagagagcaggtggagttttctttgtagctgggcccggaggtagcggaggtcttgctgatcaagcccgtgagccaggcccaggtagagggtaaggaggaaagcaaggaggagacggtccgtgcccagggtaggcaccacccacagcactgtcagcagctccacacacactgggtggcgcaggtgggagaagagtctgagagcccggggagacttcagggccagaggctcgcccagccccagcacatggtagtatacctgtttgaggcccatgagctcagcatagtcaaagacgagaaggatgctaaagatgaggagccaggagatgacatggagcacaaagcagaggagcggcacccaggtggcccatggctcagcccgagcctcccacaacacagggcctttgggtatgggctcccagtaccgcatcaccagctgcaaggccagggcagtgcaggccacatacagtgacctctgaaggaccccaaagtaccgggatgtccatgccttcactctttcagctgccatgaggctgtgctgcccaacaaatagaagcaggagccccagatcccatgccaggggggcaaggatgctgcggtcctgcagggcagccagccatccctggcgggcatccggaccaccagactccgggatccctccaagaagtggccgaagggaggtaaagcgcacgaactccactccggtgccaaaggccaggatgaaagaggcgagggcagccctcgtgccgaattcgccacccagg

SEQ ID NO: 148843 - DNA, 751 bp, Homo Sapiens
tttcaatttgaaataacttttattcaatggaagaagcattttctattggcaaaactagaggtttctccctaattttctgtctgtatttttataaataaaatgcattatttggctgaaattttaaaaatatttttttcactagacgttagagcaatcttagattttaaataaattgttaagtatcttgaacatgttatttatgatttaaaatatagctaagatttgctttacattgtggcaaatatttacattttagaaaacaaactttgtatttagtcaacataatttttaaaataactaggttgtggatacacataattttctgcagtaattgacgacagatgaaactacatttataggttcccttttatacgttacggtaaaattcattttaaaaactttatgtgtagaaataaattgtgccaagtaatatacatgtaacatttacatttttaagagctgaaaagtacaaagttctgtgtcatttagaattggcgagtgtctctcttcagtcaataggcttgatcatcatctgaactgctcttaaggagtatgacccgcctctgtattcggcccagaaaattccatcttggtgcttgcttctgtaatggcatcctctgtaccatactccatttaggttagaatgtgcacaggcattgtaccaccagcctcctttatgaaagtgggcgcagtatactgcatacatatctttatctctgtccagtgtggtgaattgtttaccatatatgcc

SEQ ID NO: 148844 - DNA, 560 bp, Homo Sapiens
  misc_feature (49)..(50): n is a, c, g, or t
  misc_feature (433)..(496): n is a, c, g, or t
aaatctctgataagagcaactggtacacaagtctgaccattcactgttnngatgatatctttacataatagtatctgagggctcggctgagtttgtcataattcatgttaggcttgtcttgcgaatcccccagagacgagccacctcttctgcctgcaagagcttaacgtgcccatcattagaggtccaacagatcatgtgcttgttctgaggcttctgcaggagctgaagaaggaactgcccccagggtgatagcactgtccatagcaatgagcgacgccgcgcgcggggctccccctcggtctccgcctcgaacacgatgcgcctctccgccctcagcctcctcctcacgctggaaactcgaggacggcgcggcagccgctgcgacccccgcggcggagccgtagaaggcggcggcggccaagccgagccnnnnnnnnnnnnnnnnnnnnnnnnnnnnnnnnnnnnnnnnnnnnnnnnnnnnnnnnnnnnnnnncccccgcacgcggcagcggcggcgcgggtcttggggccgctacacgccgggcgcgcgcgttcgg

SEQ ID NO: 148845 - DNA, 360 bp, Homo Sapiens
ggactcagtattacatttctgaaattcatccatgatgatgtggactgtggttcatgcatttttcactattatgtggcattaccacgatttgcccactttccttttggtgtgtatttggattgttttcaggtttttccgtgcaaataatgcttggaacatcctggcaggtgcttcctggtgcacagttgggagagcgtcttcggtgaatacctgggagtggaattgctaggtcatgggcacgtgcatcaactctacttggtcttagcaaatcattttgcaaatgtaaagcctatgaggagaggctctgtcatcggaactgttttgattaggcattgagtgaagggctggcacctctatatg

SEQ ID NO: 148846 - DNA, 596 bp, Homo Sapiens
  misc_feature (432)..(490): n is a, c, g, or t
  misc_feature (564)..(564): n is a, c, g, or t
gtatgagccactgcgcctggcctttttgccttttgaaagtatctgttgttaacaatattcaattgggttgaatcttgctagggaccaaggtgaatttgcataaattagtctatgccaatttgcatactatcagcaaatttgtagtgtacagaattttggaaatagaaggaagctaagaggggtgtcaaatgcagcttcttctttttttacctgaaaagataccaaagtccagctcagggaaggtcacacagctaattcttatcatggggagacagacccagggacatcatggtgcctccgagattagtacggcccctcaaacatccccattttctgtccctagcccattggaaccccttaaagttggtccctcgagctcgggtgatagcacacatgatggaaagtaggcaggcttgccattgaagctccaannnnnnnnnnnnnnnnnnnnnnnnnnnnnnnnnnnnnnnnnnnnnnnnnnnnnnnnnnnatggcatttgtaaatgtcaaggtagcaacgccctctttactgccctgttgtgacaaataagatatattccatanatatgatccatgtagtattaaactaccattta

SEQ ID NO: 148847 - DNA, 499 bp, Homo Sapiens
ctgttccctgccaaggcatcaagcaaacagccccacttgtgtttggggtagctgtatgtagccaggtagggagagtgaataccccttgcccacctttccatttccagttgttctattgaggttcttgaagactaagaagtcaagtacagtactgtaaatctgagggcccaacaatgggagaagagaagtgatacacctatctcatcaaggcttttgtggaagcaccgcctcttttggagaaggctgacagtcagatatgggcagaaatggtcttagtcaggatcagtgtatgcccagtcaacctggatgtgaatgttgggcattgatttcttctgagaaaacatcacggggctctgtgctacacacttagtaggcaattgtggatttttttatactgccctagtggctcttgagccccacaacccccactccaccagctttcttgagaccaggagaatgtgatagaaaaggtaagatggcaattagaaggctccaattc

SEQ ID NO: 148848 - DNA, 1227 bp, Homo Sapiens
caatatataaattttaagcctataaacattattatcaagttagatagtcatatagataacaaatctagaatttgatggcatcacagttagataaggcaccagggtgaagagcagtgggatgcacggccaggggcacgatgggagacctactcagacaggcagggtcagtctccagccggtgctcattctgatgaggcacggcttggacttttcttgaggatctctcgcagtgtgtcgatgggcgaaccattgacggaccactcggtcacacccatctgccgcaggtgtgagcgcgcgtgactcgacaggcccttgcggttctcgaagaactcgccgcagaactcacagcggatgtcgcgcaccggctctgcccgggacgacaggttcaggggtgtccatttctttccgtggtgccccccagggaccctcagatgggtgcagttccccatgaggggcccccggcagcatctcccgcttgatctccacccgtatttgttcaggcttcagcttcttgggcaaggagggtgcagccaggcctgggaacatctttcgggccgtaggaggaggagaggcagttggtgagtggcccagggggctgcccggtggtggtggcaacttcttggccaagggtgagatgtgaaggtccgaggggctgcgggcttccagtgagctgccaggacctgcgccgcccatcatcttggccagggcttttgggcttggccctggtgggttgggaggtccaccaggccgagactgggtccgtctcttcaggatctcccgcagcgtgtcgatgggcgagccattgacgtaccactcggtcacgcccatttgccgcagatgggagcgcgcgtggctcgagaggcccttgcggttctcgaagaactcaccacagaactcgcagcggatgtctcgtgctggctctgggcctgaggagaggttcaagggcccctcatcctcagactgaggccactgtgcctttggggaggccggccgggggctcagggacagctgggggctcttgtcctcaggattcttaggggtaggggagcccgccagggccagtggtgtctttttgaggagtggagagctgggcgggtggcccaggcccttggccgagaagccgggaggcgacttgatggctttgttgacagcaggggcatccaagggcttggccaggctgagcaagccgggccggggggccccggcgaccacctccttcagtgagct

SEQ ID NO: 148849 - DNA, 389 bp, Homo Sapiens
ttttggggttgaaacattttattggcaacttctgatgtcatatttaggaaccatagacttttgtcagactgtgttagcttcagtgagaagtattagtggtcaatgatatttgaaatattgttaaagtacccataaataataggcattaaaattcatttcgttcactgcaagaaacctctaaagatttcatgtcttcagtggaactggcatactgtaattgctatgtggaacttaatataacctcaacagcagcagagagaatacagtcctctcattatgcacatgctctaggatcatttattttaatgctttcaaataaatacgttccatgcagcacactacaataaataaggagcagcaatgttcttctagtaaatccattcataatg

SEQ ID NO: 148850 - DNA, 579 bp, Homo Sapiens
  misc_feature (18)..(18): n is a, c, g, or t
catctaccctgcaaagtnttggttttaatgccttgtgccggttgcaaggaccgttttcaaagcaaacacagatcccagactatgctgagcttatttgttaagtttcttgatgccttgattgacacgtacctgcctggaattgatgaagaaaccagtgaagaatccctcctgactcccacatctccttaccctcctgcactgcagagccagcttagtatcactgccaaccttaacctttctaattccatgacctcacttgcaacttcccagcattccccaggaatcgacaaggagaacgttgaactctcccctaccactggccactgtaacagtggacgaactcgccacggatccgcaagccaagtgcagaagcaaagaagcgctggcagtttcaaacgtaatagcattaagaagatcgtgtgaagcttgcttgctttcttttttaaaatcaacttaacatgggctcttcactagtgaccccttccctgtccttgccctttccccccatgttgtaatgctgcacttcctgttttataatgaacccatccggtttgccatgttgccagatgatcaacaaaa

SEQ ID NO: 148851 - DNA, 439 bp, Homo Sapiens
tttattgacataaaacattagccttttattatctcacagttacaaggagtcaggaatccaggcatagtgtggctggggtctctgctcagagtcttacagactgaaatccgggtgtttgctgggctgaattccttctggagcttggggttgtgggcagaaaccagttccttgtagctgtagaaatgacatcctattttgtctttgctggttggtgagagtcactcttagcctttgaagggggccatgcggctaggacctgaggtaagtagttcataacaaggccatttgcttctttggggccagctgtgaattactagacagtctgctcagatggagtctcatataacagcacctaatcaagggagcagtgatcccattatagtcacagatcccacccacaaaaatggataggggtgccaaagacgggaatcttgagggc

SEQ ID NO: 148852 - DNA, 437 bp, Homo Sapiens
tccttcatcgatttattccttgtgtattctctgcattttctcatttagctgatcaattaatctctgatataactcataggcagcagttgaaaataatgtagccattgatattttctcagcaacagcagtgatggagttccatgtgtctgtataaccaaagtggagttcattctcaagtgtatccaggaagccttctcaggagaattaagtgtgaggagtagattactttgctgaaagcccatgaaggcaaggactgtagctggattagtttacctctgtagcaccatctctccacacagtgcctggcatgaaggagatgctaaaaaaaaggtggactgatttaaacggaagcctcaatagaagaagtggcatgggatttcggctatcgtgttcctgctgaaagtttcaggctgctgaaagcagagcatctgataaat

SEQ ID NO: 148853 - DNA, 1333 bp, Homo Sapiens
  misc_feature (24)..(24): n is a, c, g, or t
  misc_feature (59)..(59): n is a, c, g, or t
gaatcacagaatggcttgtcattntccagtgtgaaagtccaagagaaatctacgtgganaatgtgcattagctccacagggaatgcagggcaggtccctgcagtgggcggcataaagtttttctctgacacatgggcagataccaccactgaattggaacggataaagagcaagaacctgaaaaataacgtgctgcagctacctctgtgcgaaaagaccatctctgtgaacatccagcggaaccctaaggaggggctgctgtgcgcatccagcccagccagctgttgccatgtcatctgactgtggccccatctggccgctagcacgcttcctgctcagagcagtgaagaccggctcacttcactgttccatttggttttactattttaaagtgggcgttaggagcaattatttattacctttccatttgttcgcctgatgatgtgacaatgcatggtctttgtgcatgctgctagacacttttctttcccagccgaaaagcctattatgtaatttttacattcataattttaatgtggatgatcaggattaaatcaagatatatatctggaacctcttataaatggagcacttagaaatttgttgttctgcacttaacctagagagagaaaaaatgctttttctttgtgaaaaatctgaattcctgtcctgaccttctgtgatgtggaaaccctaggctctgagacacactctctggtgtctgagacagaaccaaagcaataacgttgtgatgcccacaggcctggagccagctagcgaccttgtgccgcccagctgtccatggcccgtgcagagcagaggacagtgagtgtctgcactgagaaccttaaaccacagttgaacatacccacacctgtttgtcttaagctatagtgtaaaaacaaagtttgggctctgaaaatttaactgaaaaagatttccttgtttttgtaataggtgagataaagtacttagatttataaggcagcttcccctgtagtgataaattacaagcagacaatcttattttgttatgtgatgaagtgatgatgtcttaactctacttagagagtgtatgtctgtctaacagaacaaaaagatgctcctgtgtaaattccttcctgtagggcacactgcaggatttccatgtagatagaagaactatagggcctagtacagaaggtgcacaaccaatgttggcaaagtcaaaacccatgatttaaaacctactgcaattggttcaggagtcggtaatccagattatctcttttgtgatttgcattcagttatctccttggtcagctaccttgaaactggctgatgaaaaatctca

SEQ ID NO: 148854 - DNA, 505 bp, Homo Sapiens
cttgatgtatcatagtgggattaagaataaagaattactctagtaactgccaacacggtacacgtttctctatttattttaagttagtttctccttgttgatttaaaggaattattgaaagttgcttacatggagattccttggagctctatcaacatggacaattatcaccagaggtgggaggttgagggtctcccttttgtgctatgtcacatggtccatactgctgtttaaatactttttccaaattactttctgtttgtgataaccgtaagtgtctttatcaaaagagttataaaagtcttttaaagttaggggcaggactcctgcaattgtaattgcaaggctcacttaatttgcataaccccgtggtttctttcctgttccgatgttccctgaagatgttcggctaaatgttgtaactccaccaaaggagtaacttcctattctagtgtatgattcttcaataaatcacttatctctgtatgcaatctattaacaaaaa

SEQ ID NO: 148855 - DNA, 502 bp, Homo Sapiens
atatatatataatttatataaatatttctctatgtacaaggaatacgagtggctttcatggagggagggaagctgggggccgcaaggcatcaacgctgttggagttgtccaattcagtgctgtcacagtctgagtcctcagaattgggagggccccgctctctgagaagttcctggtgtggaatgggcagggagctgggttcagggccagggatgacctctgaaggaggtgggtccagtgggatttctgagccctgggagcacatgtcatcagaccgctcatctggccgctcatcagtgttggtgctgccaacttcaggtgtgccactgggggaaggttcactagctgtgccttcctccccatctgatggattctctgagctgaaggtagatagtgactggcgcatgttcaggctctgaggccacctctggcttgatgtcagctctacttcactgtctacctctccttcctcctcttccgatgagatgccacgtttctgcag

SEQ ID NO: 148856 - DNA, 463 bp, Homo Sapiens
gcggccgccgagcggttcgcgggaggtggcctcgggtgtcgtagctactcaccggcggggcgctccgagtccatctgccccgtagcccggcagccggggcgggagggctgcgagcccggggcgcggtccgcctgaggcctgagacccggggccgcctgcgctcagggccgtggtgccggccgcgcgggagcctggcggggacggcgcggtcagtgttcggctcctccgcagtgactcaccagcgtcctgaagcttttgatcaccattggctgggaaggaaaaacagaatcagctgttccctgcgaaaggtatcatatgtttcttacaaagtggaggtttgtggcagccctgcatggagcaagtctgtcagcaccatctttctaacagtatgtgctcacttcatgtctctctcacattttggtaattcttggaatgtttccgttattaaatcagttatagtgaa

SEQ ID NO: 148857 - DNA, 512 bp, Homo Sapiens
ttgaccaaaataatcatattgtatttttcctattcagagggccttgaacaataaactgaatgagtgtgggggcagaccctgtactttcctagaatgttgtgcgcaagatggtgagcattgaatactggcatgttaatagagtagtgaaagaatagagtagaagcctatctatgttctctggcgaccttcctataagcaggccactttctgaataaaagaggagcaagtgacagaaaaatctaatgcatgcataagacagaaccataagacaaataactaccaacaacagcaaaaacaaaccaatttcaaggagccagagcaattttgcataaaggatggagctgcaagcaggaggataagcatcatagatagaaaaatattttgagctaaccaagacatttgaaggatcccaagatccatagctaaaaaagaatcaatgggcaatcagggcccaagaattgtactaaaaatctataaaaatggaaagagctcacctatcaaactgacattta

SEQ ID NO: 148858 - DNA, 454 bp, Homo Sapiens
  misc_feature (68)..(68): n is a, c, g, or t
  misc_feature (154)..(222): n is a, c, g, or t
tgatcctcccccgactctaaccccaagccactttccctcaagtccaaacagatgggctcgggcccccntcacccaaactcctacactacaacctcccccagttgatgccctccagtttatcctcctcaagctcccaaagggatttttttgttannnnnnnnnnnnnnnnnnnnnnnnnnnnnnnnnnnnnnnnnnnnnnnnnnnnnnnnnnnnnnnnnnnnnggggggtttctaaagtgtagatctgattatatactgcttaaaaccttccatgatgctttattgcccttaagattatacatagaatctcgttcttcctagaatgttttcctgtctaacccatatactgcataattccctgatttttctccacaggttatgcccctgatgaatggggactaaagctcagatgtgtggtcatttgcaacccctgagttcacttttttaagacagc

SEQ ID NO: 148859 - DNA, 383 bp, Homo Sapiens
gaaatacaccatttttatgtaagagacttgaacatcttagaaaatccagagtctgggaaccaatcccacggatatagagacaactgtactaactacagtaatggcatatggtagctgaatctacctctctttccatcccagtccggaatccaaaggctccttcttgccatgttgtcctcgggcgttggctgcttcctcccatttgttactttggaagtgtcttctttcctcagtgtttcttctgcgtgggccttaccggtctttactgcactcacttacctaagaggcaaaacaatggctgccattcaagaaaatctcacttcagcccagaatcgaagaactggggcttattttgtcttctttctactctggggcttctctga

SEQ ID NO: 148860 - DNA, 563 bp, Homo Sapiens
  misc_feature (444)..(490): n is a, c, g, or t
tttgttttcttgatgtcttctttattttaacccggctagacttgtatttggaagatggctacccaccatccaggggacccgtttttttgaggacatgcagaaagaatgggttacctctgaagcgctctcagaaaatgaaagaaaaacttttcccaacaaagaccaggaaattgctcctctcattggcccaaatatgttacgctcattgccagccaataactgtggcagggaatgggattctgctgatttaggttggaattatgctacgttgcttagattgggaccacatgcccctgtaagtaggcagagcagggatgtgactcagaactgggcttgtttaccaagataaggaagagtggatactggggagtctaggccaccataagtttcaggtacagccaatgcaaagccttggaaatccacctgacagctccggttgtaccnnnnnnnnnnnnnnnnnnnnnnnnnnnnnnnnnnnnnnnnnnnnnnntctctttccatcccagtccggaatccaaaggctccttcttgccatgttgtcctcgggcgttggctgcttcctc

SEQ ID NO: 148861 - DNA, 530 bp, Homo Sapiens
  misc_feature (438)..(483): n is a, c, g, or t
ttcttgatgtcttctttattttaacccggctagacttgtatttggaagatggctacccaccatccaggggacccgtttttttgaggacatgcagaaagaatgggttacctctgaagcgctctcagaaaatgaaagaaaaacttttcccaacaaagaccaggaaattgctcctctcattggcccaaatatgttacgctcattgccagccaataactgtggcagggaatgggattctgctgatttaggttggaattatgctacgttgcttagattgggaccacatgcccctgtaagtaggcagagcagggatgtgactcagaactgggcttgtttaccaagataaggaagagtggatactggggagtctaggccaccataagtttcaggtacagccaatgcaaagccttggaaatccacctgacagctccggttgtaccnnnnnnnnnnnnnnnnnnnnnnnnnnnnnnnnnnnnnnnnnnnnnntctctttccatcccagtccggaatccaaaggctccttcttgccatgt

SEQ ID NO: 148862 - DNA, 408 bp, Homo Sapiens
ggctagggattgcttttgtcgccatctgctggtttccaccggtttcttcacttcatcctgtgtggaccatcttttggtcagcaggactgtgaccagaagacaagtcctgccagtctcctacctcatttccaagagacaaaaagataggatgtgcagcggaatagaaaaaagacttagaaaacatattttaaacatctaatgaacatgttgtcagacacccagaaggaggagtgagagaatgggcagtgacaaaattgaagatggagtggctggaaagaggaccttcacagcaccacccacgagtaaggggctgctgtaaagagacagaggtggtcgccatgctcctgcagcccagtgggttcctttttggaatcagagaatcaaaataaaagggccgaaaccccaaaa

SEQ ID NO: 148863 - DNA, 493 bp, Homo Sapiens
  misc_feature (73)..(128): n is a, c, g, or t
  misc_feature (192)..(192): n is a, c, g, or t
gctctatggaggtggcagcgggtaccgagtggcggctgcagcagcgactcctctgagctgagtttgaggccgnnnnnnnnnnnnnnnnnnnnnnnnnnnnnnnnnnnnnnnnnnnnnnnnnnnnnnnntcccctcccttccctatccccgacgaccggatcctgaggaggcagctgcggtggcagctgctgnagttctcggtgaaggtatttcatttctcctgtcccctcccctccccaccccatctattaatattattcttttgaagattcttcgttgtcaagccgccaagtggagagtgcgattgcagaaggagatgacaactccgcagcaaacaactccgcaaacgaaaaagaacgacatgatgcaatcttcaggaaagtaagaggcatactaaataagcttactcctgaaaagtttgacaagctatgccttgagctcctcaatgtggtgtagatctaaactcatccttaaagggtcatactgctgattg

SEQ ID NO: 148864 - DNA, 950 bp, Homo Sapiens
  misc_feature (44)..(44): n is a, c, g, or t
  misc_feature (53)..(53): n is a, c, g, or t
  misc_feature (734)..(795): n is a, c, g, or t
atgcgaagatttagcatctgcgtaaagttgaaaaattaggaganggcgttgcnagaaacggggggagcttaggattcggatacaaggggatgaccccttacggggtggtgggggccattcaaaggtttggggtacgttcttgatcaccaattgcgcaagcatgagatgaggcataccagggagatggtaactgtgagtttttgggaaggggttgggttccgccaattcagccgtagtggcccccctttaaggggacgaaggttagacttctgccccccacattgaggagctcaaagggcatagctggtcaaaactttcaaggaggtaaggttatttgggatgcgtcttactttcgtgaagatgcagtcatggtcgttctttttcgttgggggagttgtttgctggggagttgtcatctcgtctagtgcttcgtgcaggaatccatttctgaccgttttgccctggggttttccccaggaactcgctgttgccagcagtcttgggatagtgctgaggtgcacccctacttcctcctccgcccgaagaagcactgaaacgagaagcacccccttctgcaatcgcactctccactttggcggcttgacaacgaagaatcttcaaaagaataatattaatagatggggtggggaggggaggggacaggagaaatgaaataccttcaccgagaactcagcagctgccaccgcagctgcctcctcaggatccggtcgtcnnnnnnnnnnnnnnnnnnnnnnnnnnnnnnnnnnnnnnnnnnnnnnnnnnnnnnnnnnnnnnggaaggagtcggggacggcctcaaactcagctcagaggagtcgctgctgcagccgccactcggtacccgctgccacctccatagagctccgactcactgctggcccccggccgtaatggccgaattcccgggcatatgtccggtaccgtcgactg

SEQ ID NO: 148865 - DNA, 323 bp, Homo Sapiens
tttatgttttctcataaaatactaattagcatttaatgataggaaactgatgctgcagagaaattacggatagcaaagaataatttagagatattaaatgagaagatgacagttcaactagaagagactggtaagagattgcagtttgcagaaagcagaggtccacagcttgaaggtgacagtaagagctggaaatccattgtggttacaaggtaggaacagagttttaaacttgtacaaagtttaatcatttcaaattttggcattgttttaaaagacaacactattctggataacctggtttcttcctgatgaacagtttg

SEQ ID NO: 148866 - DNA, 397 bp, Homo Sapiens
tttacaatgtaacaaccttttatttttttgaggtttatcagttttaaatggcattataaaaagatatgtagatatgttaaatatatttttctgactttttattgtgataaaatacaaaatttaccattatgagatgaaacaatcttaaaaagtaatgggaagacaaagataaagtaggcaaatattttacattactcaaattaccaaaacggacaaacaaaaacagaacatctgaatagcctatatttatgaaaaaaacctgaatcttcctacagaataagcaatggaataacaaatcttaaagtggccatgtatgcaagggaggcagcataggaatgggaaaggaaagaaacacatcaacagatgcaggaagcaggtcatgttcttgtacttggcg

SEQ ID NO: 148867 - DNA, 717 bp, Homo Sapiens
  misc_feature (264)..(353): n is a, c, g, or t
  misc_feature (474)..(524): n is a, c, g, or t
ttacatttttctccaaataatttattaaaaattacacttgatattcatgtggaaattaagaccaaactgcaatgttttccatttccaatgtacaaaaagttttgttcctgagaatggcaaattctaaatgataagtaaaataaatatggcatttatttaagtagactgagccacaggttaatcttaagtggtgtttggttgatgggagagaaaatcctccatcagaattgttgtaagaactttccaatgtgcttgacatgcatnnnnnnnnnnnnnnnnnnnnnnnnnnnnnnnnnnnnnnnnnnnnnnnnnnnnnnnnnnnnnnnnnnnnnnnnnnnnnnnnnnnnnnnnnnttattattttgaaaggttattctgcttttactgaaatgcaacaaacagttattgagcacctgctatattattatatagtccattcctactaggctaccgcagccattgatgatcttccttnnnnnnnnnnnnnnnnnnnnnnnnnnnnnnnnnnnnnnnnnnnnnnnnnnnatatttacagtttctcggttagtgtgcttgtgaagcagcttggagatctctcatctactttttatcagttggttggttatagaaagtatctcagagagtgcacccagaactcgcatatctgccattaatatatattctttgaagatactttggagatacattttcttgagtggcactgccatgctcatacagt

SEQ ID NO: 148868 - DNA, 573 bp, Homo Sapiens
atgctgcacgtctgactgagaactgagcaccagataaagaagcattggtccttgtcagcctctctgacttttgcagttagggctgcatccattttaaatactgtagaaaaataagccatctctcggacgctaggagacccgccagagtctgccccgcgtggagagggataaacagctcctctgaagtagctgcagacggctcttccaaccccgccccaacaggccccggggcctcagaggatgctgcgccaggctgcgaagctgaggggctgggagagctggcagcagagatcccaccgctgtatctttgggtcgcatcaacagtccttctgcaggcatgcctccagcatcccacgttctgttgccatgacacctgggaccctggtgctcgctgggccagctttggaccctccagcctcaccctcggtctcatgcccacggccaagtatacacaggcagaactccccagcactgtttccaggtccctgggggggcccaggtgggcactgaagcagggcctagtccaggggttcctgcttgattcgaacagcagtgggggtgggctgcggccgc

SEQ ID NO: 148869 - DNA, 952 bp, Homo Sapiens
  misc_feature (68)..(125): n is a, c, g, or t
  misc_feature (924)..(924): n is a, c, g, or t
cgcggcggtgtggaccgtgcggccgaagagcgcggcgcccagagcgcgggccgctcgcggagccacannnnnnnnnnnnnnnnnnnnnnnnnnnnnnnnnnnnnnnnnnnnnnnnnnnnnnnnnngcccggtgcccgcagccatgccggccggccgcgccgcgcgcacctgtgcgctgctcgccctctgcctcctgggcgccggggcccaggatttcgggccgacgcgcttcatctgcacctcggtgcccgtggacgccgacatgtgcgccgcgtccgtggccgccggcggcgccgaggagctccggagcagcgtgctgcagctccgcgagacggtgctgcagcagaaggagaccatcctgagccagaaggagaccatccgcgagctgaccgccaagctgggccgctgcgagagccagagcacgctggaccccggagccggcgaggcccgggcgggcggcggccgcaagcagcccggctcgggcaagaacaccatgggcgacctgtcccggacaccggccgccgagacgctcagccaactcgggcaaactttgcaatcgctcaaaacccgcctggagaacctcgagcagtacagccgcctcaattcctccagccagaccaacagcctcaaggatctgctgcagagcaggatcgatgagctggagaggcaggtgctgtcccgggtgaacaccctggaggagggcaaggggggccccaggaacgacaccgaggagagggtcaagatcgagaccgccctgacctccctgcaccagcggatcagcgagctcgagaaaggtcagaaagacaaccgccctggagacaagttccagctcacattcccactgcggaccaactatatgtatgccaaggtgaagaagagcctgccagagatgtacgccttcactggtctgcatgtgctcaagtncagcgccacccccagtgtgggcacgcct

SEQ ID NO: 148870 - DNA, 1151 bp, Homo Sapiens
ccccccccttaaagaggtaaattcttggaagttggaaaccttcttagaatgaaaccttttgttacaaaaaataggccttttccttttctttgtgaaaaatattttttcccgggcgccataattccccacctcaaaagttgaagtaatgtcccaaaaggttccagtttattaaaagcccctttttttatagttctttctaaccccagttttttcttaaaaaagggcttactaaattcccccaaatgccggctggttataagggaccaccatgcaaatttaaaaacaggttttggttaaatccaataggcatgaattaagtcaaagttgccattttttaaatattaggaaattggaataccattcaaaaatgattttttatatcatttatccccggattcgctttataaatttgcctaagagtacaaacccttatgggatatgcatatagttttacaaaaactgagtgcatccatgtgtaatgcaaatagcttcttttaaattccatcttgttttgtctttttcctatttactacacatttaaaactttttctcttagttgatctaccttgccaattgccatgaagttcctttataccactattggtgtgagacttgtagtatttttctttttatacttaacattttaattcatttggaatatcacatgtaaagtggatctaatctttccacactgacatctagctagtctttccaccagcagttattaatatttctttctttccattggcttattaatttcagttaaactttctacttggcaccacagaatattcagaaaggttgcttaataggatgttttaaggatttggagagcaaggctcccattttttccccctaaattaaaaaaacttacatctttgcttgctttcctaaataatttattacaattatgccatattccacacagcaaccagttggaatgttaaatggaactgtagtaaatttcatactaatgtcacatattggcatttctttggatgtagctttatattttaaaacacattatctaacttaatccccacaataattctgtgaagtatttctcttctgtagatggtgaaatagatactaggagtgactttcccaagagtatacaactggtaagtagtgaaatgagaactgtaattctg

SEQ ID NO: 148871 - DNA, 371 bp, Homo Sapiens
agaggggaatgcacatcttttgcgccactattaaggcacctgtcaccttacatctcaatctggaatcaaagtgccctgggttgagaagcagacctgggctctggtcacactttggtcactcattagctctaggaccagtcactaatctctgagactccattttctccagggaaacgaggcttgcccagatagactaacaaccctttagtgctccaagaagtgagaatttccgaaaaagatctgccggcccagagcactccctcttgccctaatcctggcagggtctggatgtatttacccaactctgatcttgcgtgcagggatgcttgctgatggatgaaagaccacaataaaacaagattagcagcaaa

SEQ ID NO: 148872 - DNA, 500 bp, Homo Sapiens
ttttaatatttaaaatgtttatttcataagcactgttatttgctgctatggaaccttctgtaaatccatggttctatttttgctttccatgtaaacatacccttattttgtatgtaaagatgagcttagagttgggctggaaagccagacttccttccagacagcaggaggaaatgggaactggcatcctctatttcaaatctctacttctgtttcgacaggtaataatgttgccagatgccaggggttcgggccaggtccagttgtcactgtaggaacaggtgatccttcgccagggagctctagccgggccacgtgcgggcgtggcggttcaggataatgccactggagggcccccggctacggacccgcttgccccttctcctgcaattacggaaagagctgggggctctcagggtctcctgggctccgacatcccgggtagagggggccgcgccgttttcggtgagctagctgaagctcagtagaggtccttggag

SEQ ID NO: 148873 - DNA, 434 bp, Homo Sapiens
  misc_feature (411)..(411): n is a, c, g, or t
tttttttggtattatttagcctttattgcatagaaggccttccatttgaatatgctacatacagaactccaaactctgagctttttattcacagaaaatgtgctctcatacatctttgtgtcccctgcccttaatactatgcccgacccagagtcagggatcaaaagatatttttggtatgaataggcaaaaagacacacataggaccttgaatgacagtggcaatgtattacaatttattaaagatgtctgatgagtccagagtactccaaatattgaacccaaattctcaaaaggcatgtgatagaatggggttacccttgataaactataaagttagaaagattattttagagacaccatcagagtaggtgtcagaaaatctgagttcctgtctagcacattccacanataaagtttataacattgcacca

SEQ ID NO: 148874 - DNA, 166 bp, Homo Sapiens
agttcatacatttgacagttttactaccatagtcaatacattttggaccaatgcactcgcagcaggcattatgaaaccagcgatatttggatgctcccatggactcacaggatattttacactgatgtatggacatgcagtcatcaaaataaaccacagtacacat

SEQ ID NO: 148875 - DNA, 668 bp, Homo Sapiens
tttttcctcctgccctggaatccactagttctggttcattctattgcatttagctctgcgatatggcttcccaatgcaggaataaagtaggctgagacagatttccacagaggaagctttcttggtataaaccaattttcccatgtctgatgctttgagggatagaagatacgaaaataactatttctgctccttctaagtataactgatggaggtgccacacattcttagctggggagaaggggacagaggaaaagtgattctaaattgtgattcggtcttttctaactgtgagtgtgatactgggtacgtaactcagctctaactcagagcaagagtcgggtggggattaggtaagggcccagaaagccctgtctgcatgtggcaaacctaagcctctgtgctttgtggccatatatgcttctctctaaggggtttcaaagggctggaccaatgcaaaatgcatgccgggaaggaagcagtggtttaagaaggttctccactggatgagcctcagtctggccttggggccactgaagggtggctagatccctgtggggcaggactgggcactgtggtcagatgtccaggggactcacaatggtgaagccagagtccttgctgctgtcgtcatcatgactggagctggggttgctggacgaagctga

SEQ ID NO: 148876 - DNA, 340 bp, Homo Sapiens
agtttttcctttatctctcctatggttaatggtttctgcagaaaggaccaattaatttctttctaaaacgtgcttcaggggtgtagggtcctttataggtcatgtttcaacttacagaaaatttttatagttcaaatataaattacgttcaatgtggactttgtaatagaatttaaggttaagtaaagtttctgctttccttaggctgtttgcagtgcccagcaggccccatgatattgagatggaagttatgttaaaggaggaggttggtcagggttgggcagaataaggactatgggcagctcaggctaatgatacaatgattgaggtgtagaaagag

SEQ ID NO: 148877 - DNA, 490 bp, Homo Sapiens
tgatggctttcatgtgggcagaaatttctcagcatgtgaggctttattcacaatccgtgctccaggccctctgcactgggacaggaccacagggctaagcccaggctgggggttcaggcaagagtcctgcccctagtcctgggctggagggcaggtcagctgcacggaggtgggcagggctcctggcccagctcacacgtgctgcttccggtggcgcagcacctctgtgggtgtaaagaggaagtccttcccgcaggcctcgcagtggtagggcctctgcaggacagatgtcttctggagggtttcgagggcagcttcctcagcccctgggggcccatcctgtggggcctgggggcaggtgttctcatgggctatgcgctccaggggtgtgaggggcgcatgcaggccacagtgggggcaggtccagaaggttcggagacagtcgctgtacaggtctgtgtcattcgtgaggcagttgtaggtgaggacc

SEQ ID NO: 148878 - DNA, 378 bp, Homo Sapiens
tttttacacatgtcatggctttttattgagactggggaagggccgtggtagcaggtgcactcactgtccaagtttgtccagactttttgctgcatgggtgatggcatttgtgactgtgttggtcactgtctcggtgatttccttcatctttttgtcccctgactcctgggctttctttatggcttcagcaatggctttctctccagtctccttggcatgtcccaccacctccttcaccacttcctccacggcatgaacttccacctcttggttccctcatctttagaatgggaatctgttgggatgatgagacccaacaccaggtcacgggggcggcaagtccagcggagtcaaaggaatgagaaagagacagttcga

SEQ ID NO: 148879 - DNA, 315 bp, Homo Sapiens
tttggtgacagagtttcactcttgttgctgaataatattccattgtatgaatagaccagattctacttagccatccattagatcatagatgtgtgggttatctccactttttggctatttagctattaaaccatgctgctacaaacttgagtgtacaagtttctgtatggacatgttttcaactctcttgggtagacactaggagtagaattgctaggttacatggcgattctattttttacattttaagcaactgataaattgttttccaaagtggctgcatcattttacaatcgaacaatggataacgtggca

SEQ ID NO: 148880 - DNA, 385 bp, Homo Sapiens
cgacagcagtagaatgccatagaatgttttattttaaacttactgtaaaactttcaaatacaacacatgtggcaaagaaacaacagttcacacacaacatctgccacaattctctttgaactgccatttctatattatgtgatattttacaatttctttcaatttcttacattcatggtattcttaaaggcagcaatgtcaatttttctgctttgaaaatagttcagttaatgttctgaaattgcttaacatgacattttccttttagtattctactgctgcccacactgacataattcaacatattatttataaactgttgagaggtatactgtacttaataaatcaactcccaactctaagttaacctcaatctaaaacaagc

SEQ ID NO: 148881 - DNA, 590 bp, Homo Sapiens
gcggccgctcctgtactcccagagcctcagggtgccgtccccagaggaggacagaagcagcccgggctgagttggcaccacggagattcggctcacaaactctgtgtgccccaagcagaaggactcgatgctatggggcgccgcggcccagctgactcggatcttctcgtcccggtcggcagtgaggatgaagcggtcatcaggactcacagccacatctaacagcatagacaggtgccccagctctagacggccacacccgtgtggctccagcaccgaaaaggagtagacgtctccagacttgtcggccaccaagaccttctcctccgaggctatgaaagtcagggctgtacacctccttgccacggtctgtcatcggttaaagcaaaatagctgccagagttggagaaggtggacgccagaatcgcaccgctcccctggtccaagggcgcgtcctcccctttattttcttgtgacttcttttctgcagcactgcagtcatagatgaagaggctgtcatcatcacgccatacacatgtgccagcccagagcctcttcctgtccgcaccggtcggtgacgccctcgtgcc

SEQ ID NO: 148882 - DNA, 752 bp, Homo Sapiens
gtccccagatgatgacagaagcagcccgggctgagttggcgccacggagatacggctcacaaactctgtgtgccccaagcagaaggactcgatgctatggggcgccgcggcccagctgactcggatcttctcgtcccggtcggcagtgaggatgaagcggtcatcaggactcacagccacatctaacagcatagacaggtgccccagctctagacggccacacccgtgtggctccagcaccgaaaaggagtagacgtctccagacttgtcggccaccaagaccttctcctccgaggctatgaaagtcagggctgtacacctccttgccacggtcctgacactcagacattgccatggttttgtacggaaaagaatcagacgcttactgtcatcggttaaagcaaaatagctgccagacttggagaaggtggacgccagaatcgcaccgctcccctggtccaagggcgcgtcctcccctttattttcttgtgacttcttttctgcagcactgcagtcatagatgaagaggctgtcatcatcactgcttgctatggaggtggccaggaatcggcatgccgccccgcacacaccaacgtctgcccgcacagcgccagtcccacagagcccgccatgtacccgcccctcgtgccgaattcgccacccagcctcgctaccttaggaccgttatagttactgcctcgttttaacacctgcttgttgtacacagcctccttttttgttttgggtggtgg

SEQ ID NO: 148883 - DNA, 387 bp, Homo Sapiens
acaattccaaaatattctttatcctccaaattttcaagattttcattcttcactatcaaagtctgacagcttattcgggttacaccactatttacaggtaagtcatttacatacacctgtccactctcataggttatgttaagaacaacctgctgtttagatatgtccccatcatctttcagtgtagttacattaattctgatgccgtcctgtggggctccggacagcggcggcggctcgggggcgcccgtcgtcagccagccggaggcgggtagcgccacgaacagcaggagccggagggcgagcgaccccggtggagcgccctccatcttggacaacccgggcagagggcagccgcggccgggaggtgagggcggagccggcccg

SEQ ID NO: 148884 - DNA, 736 bp, Homo Sapiens
  misc_feature (13)..(25): n is a, c, g, or t
  misc_feature (458)..(458): n is a, c, g, or t
  misc_feature (464)..(464): n is a, c, g, or t
  misc_feature (469)..(469): n is a, c, g, or t
cataaaatattgnnnnnnnnnnnnnaattagtaaataaggtcatgacagattttactcagagtgaaggcctactatgctgacaattatccctaaccatctttctctgccaaattctttactttccttaacccaaaaacaagctcctcccttttccaaccagctgctataagatttggttgtggaaaggaggaaacagaaagcaaaaaggggagtggggtaaaggatgctggggaaagggggagcagacagaaccctttgtgccagctcagaaactgggaaaggacattacattcaccaatggcagattctcagcctcacccccccgttcatcctcctgaactctaggttttgaggagacacagaattgggtcttctttaacatcacctcttctctaataggtctttttcatcagacatcagaaggagacttggacgatttggctcaggatttaaaggncttgtnccatnccccatcttttctgaacttttatccccttggtgaagatattgacattatttttaacttgaaaagcaccttcacagaacctgtcctgtggaggaaggaccaacaccatcaccgcgtggagcagctgaccctgaatggcctcctgcaggctcttcagagcccctgcatcattgaaggggaatctggcaaaggcaagtccactctgctgcagcgaattgccatgctctggggctccggaaagtgcaaggctctgaccaagttcaaattcg

SEQ ID NO: 148885 - DNA, 569 bp, Homo Sapiens
  misc_feature (352)..(371): n is a, c, g, or t
attgaaacggtgtccacactcccatatttaacgcaaccccatttactatagctaaggcttgtgtccatcaacagatgaatggataaagaatatgtgctacatacacaacggagtactattcagccacaaaaaagaatgagatcctgtcatttgcaaacacgtggatggaactggggtcatgatgttaagtgaaataagcatacaaagacaaacatcacatgttctctctcacttgtgggatctaaaaatcagaacaattgagctcatggacacagagtagaacgacggttaccagaggctgggaagggttgtggggggctggcagggaggtagaagtggttaatgggtaccnnnnnnnnnnnnnnnnnnnngaatggataagacctactatctatctgacagcacaatagggtaactgtagtcaatagtaactgcattgtgtattttaaaataacatataagagcgttaactggattgtttgtaactcaagggctaaatgcttgaggggatggacacccattggagaaataaagagggaagtaatgcttccttggaaggtgttagaggc

SEQ ID NO: 148886 - DNA, 562 bp, Homo Sapiens
ttttttttggggggtagcagttggtttatttccttccaatcacatacagatcatatctgatgggtaaagaatattccatactgtcaacagaccacactgtcttctaaaatcgcttcagcagtgaggatcctctggaatagatcttgttaatcctgaggaattattctcccagcggtgagctatgagaagtggaatcaccagatgtagtaattcctgacagaactgccgcctgcttgtgtggctgagatgctgacctaggtatcaggctggtcgcgccggaacccagcacccacgctgagtctttctgagctccactctgctcctgttagatattaaccacctgaggtagctgtccagattcaaggcggtagtgattttgtgtgtctgtgtatttatcacggggtccgcggcgggaacgcaggggctgtgtcccacgtccccaaacctctagtagggtacggcgcgatgaacatcttccataaaccttaaacctcccggcgctcagtcactggttcttatttcagccctcttagccccgtaggtcggcgcgctgaaaaccttt

SEQ ID NO: 148887 - DNA, 443 bp, Homo Sapiens
gccctctccttcctgagcagcctggaaccccaggctcagggctaagccctgagcacatcggagcctcaggaagtgccactgggatgttagctgcaaaatacttctcctgtgagctgaacatctgtcttgggtggaccagagatcacgcgccatttggctgtgcattcaaatgccctgctggcggcagcctccacttcctggtgatttctgctttcttttttgccaagtcacatctgtttgccatctgtaggtagctgatcacatttcaaaaagctggctggggttttatgcatatttcatccactgggagattttggagaaggaaagctctctttaagatcaaaatgagctgaagaggtgctcagctgggtcacccagacagtgaagattagaaaggccctaattccagcctgggcaacatagtgagactttgtctctactta

SEQ ID NO: 148888 - DNA, 492 bp, Homo Sapiens
gatgattttgtttttttattctatacaagaggggagagagtccctggggatagagggacagagatccaccctcctgggggaggagataagcccccacccagaagctctctgcagagagaggtatcgaggcaggcactgacagcctccgtctctccaggtggctccctctgttctagtccctgcctccagctcccccatgcctggtcctgccgtcttgcccctgtaggacaggggctggcagggggccctggggactgggggtggataggggtctgagtccttgcgaggcacatgtcgagggctgaggagggtgttgtggcagttgtcagtctgttcctggctcactggttcctgtggggtcaggaggccgtcttctatcaggttccagcttgtcacaggactgtgcccgccgtgtcctcttgggcttcagggggggcagtccgccggcctggatcagggggcccttggacttcgggctcctcttggtcttgc

SEQ ID NO: 148889 - DNA, 411 bp, Homo Sapiens
tttaatatgaaaccttagagcatttattccccttggctaagagggtctgaattcctttcgcagggctgccagaacaacatcccacagactgggcagcttaaacaagagattgagcgtctcgcactctgcagtctggaaggccaaggtcaaggtgtaggcggggctggttcctcagtggctctgcaggactactgtgtcccaggctacttccctttgctgatcgatggcccttggccctctgtgtcctcacagggtggcccttctgtgcacgtctgcatcctgatctcttctggtaaggaccccaatcggattggaagagggcccaccctaatggcctccttttggcttaatgatctctcgggagaccctgtctccaggtacagtcacattctgggtactgggagttgggct

SEQ ID NO: 148890 - DNA, 1301 bp, Homo Sapiens
gacagcactttcccaccttttattattcaacacatggaagggggtggagacacaaggatagggcaatggtgagtttcaataaataagagaaacaggatggacaggcagtgggcccatgcctgcacggccccacataaataaccaggttgctgagccagagtggaagtcagggctgggcctggcagccgcctgcactgcccagaagcactggcaccacagggacacagaaaccactgaggcccaaggtgtgctccagccccaccaagtcttctccctaaagctcctgagatcttggggctggctgggcaggctagggctctgtatcacagtcctgccgggatcaagtctattttttcagtttcattaaaaacagctgggggaggggcaggcacatgcattaagccccttccgtaggcagagcacatggatggacagccccatgggggccttgaagagcagaggccctgagaagcagcaaaaacggggactggataaagctactaatgggagggatggtagagacccagcatccccagatcccgcccacaaggccagccgcagaaggctacaaacgagctgacagaaggccctgggctactgatgacgtatctccttagcgatgcacaagacagaagaaatggacgccggcgatggccagcgagatgtgcccgagggatgagaaccccaggggacatcactccacgaccctaagaccccagaggaacataacctgagccgagacgcacgatacgccgagtgagtaggacgcaagcggggaaacagaggaagagggggaaagcgacggtactgacacagaagggcgcacagaaagaaagggacaaggggagaggacgaaatgagcaaagagaaaggggagccgaagaaggatgacagggggcaacgcaggacacaaacgaagacccagtcaatgacacaaagaccgaaagcgcgcacagaatgacaacaggaaagaaaggccagaaaggagaatacccaaagggaaacaacgaaacaagagaagaagaaacgagagaggaacaggaggcaaaaacgctgtaagggggggacgccgaagcaagggggaaaaggagggggccacaggaagcaggaggaaaacgcgacagaaacaccaagaaagaggaaggaaagcacaagaagagggcacaacacgaagcatagaagagaacggagggaagaggagaagcagagaacaacaggcacatagcccataaggaacacagacagaaagagggaagaacaggcgagcaagaaacgcacgaggaacgaagcgaggacgcagg

SEQ ID NO: 148891 - DNA, 445 bp, Homo Sapiens
tccttcctctccaccccacaagttttgctttttaaccaaggtgtctctgcttgatgaaattcacatgctagtctaaatctttttttctcccttgtaacatttatgtgccccaaactggttagtatatgggtacagcattccctttccaattgggaagcggaaaaagagagtatgggatattttagaagggagcctttgaaccttattatatttccccatcattgatagtgacaatcttaaaagggttgttttcttaccttaagtacaaaagcatggaaaaatgcgcttttccttcccgcccacatcaccaccccgacttgaagacagtatgtgcttgaatggaaagtgagtaggcatctttaatcgccctgattaaaggaaagtgttagcctgagagggcctgactgaaaagtaaccaaaggcttaatatcaaacactaattagc

SEQ ID NO: 148892 - DNA, 430 bp, Homo Sapiens
atttctcagctttacatatgtctaaaattgattagacatatgtagacatatgcaatcagttaatcacaatattaacatctccttaataaacttgagtgtattctggcaacccattcattatttatttttcctctcgtaactttctccaacttcaaactaccattatgttggaacttctgattttaaggtaatttactcttaacttaggcttgggggtttttttggcctgatttccattgtaattttaagaatatatcatgtggcttgatttgattttttaaaattatctcctcttgaaatctgagcattaatattggtaacttgtgaataataataagacacagatcacataatctttgaaaccagattgttgattactgattaggctggatcattaagggctgattaagctgacacttaacagtattta

SEQ ID NO: 148893 - DNA, 1039 bp, Homo Sapiens
  misc_feature (332)..(346): n is a, c, g, or t
  misc_feature (378)..(388): n is a, c, g, or t
  misc_feature (642)..(650): n is a, c, g, or t
  misc_feature (950)..(950): n is a, c, g, or t
  misc_feature (1020)..(1020): n is a, c, g, or t
tttccccaaagtctcaatcagatgaggcaacaaaaagaccaccagaattgcaggaaagcagcagcagtctgggatagggaggggggaggagagctctccctccgtggtcagtttgtcagaagaaaagcatggaaaaagtgagatttaagaaatctcatccacgggtgtcttcactgcacaaaagtggtgctaattcagtaaacagtgacacctgtgtgggttcaatctgtggagagttgagttccattcctttgtttttaaatttccacctccatttgtgtttcctattaacctaaactcttgtaattctctaaatcttttttcatgatatnnnnnnnnnnnnnnntcccaaaccacaatttaagatgcctttttttnnnnnnnnnnnggttctccgtgttgccacctgctccgggaaggccaggccgatgggcggccaggtttgggagcagcggcttcggctccgattgcttcctgacggtcagttccaaacacaggctctgagaaacgcctcgaaccccttggtatctggtggacgtctccgcaggcttccgtgagtctccgataggtgttttgggcttttggaaaactttcaaaatacttttcccattttttcactaggccaaacggagtggacggccnnnnnnnnngaaagaaacagcattctaaagaatgtgccttgaaaaaccaacttttttggggagatccacgagggggaactgggaccccccaggaccacgaaacaggggggcccctaaaaacctggcggcccaccccggaagcaaggatgaaccgcaagcggatgaaccttggcttccactcctgaaaagggagccttgacgctgtacttccaacgctttaggatactctcaatgggcgttccaaaaatttaaccgagaggactctctctgccagacgcctgctatagagtcttcatattaaccaacacntacttggcaacgattagcgagacatgtctggatcatctgcaatattaggccaatcgcgtactcactgggntggactgagcccccacaag

SEQ ID NO: 148894 - DNA, 426 bp, Homo Sapiens
actcacagtagttaaatctgcacaggccaggtgaacggacccatgcacgagaaggaacagaaagtacgtttctactgcaaattggactgaggataatttcctacttaaaagattctattaaggatccaagagataaccacagcctcaatttcttcctataaatattcctaaaaaggaggtaaggagtaagggaagccccagaaaagtgtgagtctgtgtgggaggacactccgagtaggggtacatttcatcacttgccagaggaacacagtcaatttcaggaagatacaaggaataacaatgtatttcccccaaatcatcattaaccagtattttggccacacttcctacgaaaacctgaaattagctaaaaccaccctgctgttttcattgcactcaacaagccccagagtagttaccatcaaa

SEQ ID NO: 148895 - DNA, 1180 bp, Homo Sapiens
  misc_feature (970)..(1052): n is a, c, g, or t
tttccaggtacaacagcaggttcttttccaattcctcaaagcgctgcatggggtgggggcagagacagaagagaatgtaaacattgggttccaccccctggagctcaagggaagacccttacccagatagggactaactggaggggtggaagggaacaaggtgaaaggtatgggtcctggtgagacaaaagcaggggggcctgagaacacagagcaaggtgggtttggagggagcacagcagggtgcaggaagggagatgggggacatttcctattccagtgcatgtccccttaaataaactgggtacaggagcattatggaaggagaaccaaaggacagaagacaaagcgagcacccccaccccaggccaacgccatcctctgtacacaattacaacacaggtccagaatgagagcccttggccaggaagttgggggagacagggagggttgaagacagggaaaaggaagccagttccccctcatggtaagggggagctatggagtgtaagaatctgaacttgctgactcccatcaccaggagtcaacccttgggatgacaacgggccattcagggacagcacctaggaggggacccagagggaactggggcaggagcgacagagaccccagctgagcctcatgggagatgagaggctccagactcatttgcagctgcccatctgtcctgcccgtgtagggatcagcagctggcgaggagatggggaaccaagccactttccccagcaagggacagcctgacaaggtgctagggggtggcaccttgggccaggcctgttcttggctgagggaaagaggggggccatgcagtccagccccagggcagaggtcagaagtaagcgtcctgccgggcctcggctgagggcctgtccccaccatcatgggggcctgggggcccatctgcctttcgacgcagcgaaagcttccggccttgagccttcttctcctnnnnnnnnnnnnnnnnnnnnnnnnnnnnnnnnnnnnnnnnnnnnnnnnnnnnnnnnnnnnnnnnnnnnnnnnnnnnnnnnnnncgctccttctcctgtttctgccgctccttctcctgtttctgccgctccttctcctgcttccgggtctccttgctggaacccaagggggtgctattgccagtgggtgagggaagcctcgtgccgaattc

SEQ ID NO: 148896 - DNA, 479 bp, Homo Sapiens
cctatttttaactgtatccagttaagagagaaaatgtatcacatttggccagaaaataaccacttgttttcccctgaaattttcttgccttcatactacagtagtcccccttatccagtttctcttttcccagtttcagttagctgcagtcaactgtggtctgaaaatattaaatggaaaattccataaataaataatttgtaaattttaaattgtgggccattttgagtatagtgatgaaatctcacaccatcttgctccatcctgctcgggacatgactcatgcttttgtccagtgtatccatgctgttgacatgatccacccattagtcgcttagtagtcacctcaattatcagatcgacagatcacaagaagggtgactatgatacaataagattattttgagagaaagagagaccacattcatacaacttttattacagtatattattatagttgttctaatttattcttattg

SEQ ID NO: 148897 - DNA, 615 bp, Homo Sapiens
cgtttcgtttctaagttctggggtatatgtgcaggatgtgcagatttgttactaaggtaaacgtgtgccatggtggtttgctgcacctgtcaacccgtcacctaggtattaagcccagcatgcagtagctgtttttcttaacgctctgcctcccgaaaggccccagtgtgtgttgttccccttcctgtgtccatgggatctcacttttcagctcccattataagtgagaaggtggcgtttggttttctttccctggattagtttgctgacgataatgaccacacatcaccactgtttttgttttttagtataaagagtagtattttattgaataagatttgctcacagaaaaataagcttacatctacaatgaatgccagaccctacagcagaaagccattttctcacttttccacacacaatggttcctactaagtgaaaaaaaagccataaaatttcattcacaaatgtactactctgtctcaaaacatcgcacataatcatgcactgtactaaagccattagatcagttcttcagtcaggttaaagaagtatccctctaataactgacttttataatgctatcaatatccactcccaatcagtctgccatcc

SEQ ID NO: 148898 - DNA, 554 bp, Homo Sapiens
  misc_feature (324)..(366): n is a, c, g, or t
tgttacagctgtttcacaaatacaggttgaatatcccttatctaaaatgtttgggactacaagtttcagatttcagatatgtttggattttggaatatttgtacatgtataatgagatactcttagagttgggacccaagtctaaacaaaattcatttatgtttcatatataccttatacacataacctgaaggtaatttatttttcccttgggaacactgaatagactatatgttgtgcacctacattttgactgtgacctatcacatgaagtcaggtgtggaattttccatttgtggcatcatgtcagtactcaaaaagttnnnnnnnnnnnnnnnnnnnnnnnnnnnnnnnnnnnnnnnnnnntaatagcaaatgttcccatgttatacacctcaacctcccattcccattggctggaacatctctgcttatattaaatgtcttttatgtgaaatctgtgttctcatagccttttgtatagttctctaccatctcatggctcacattgtattgtacttatttgattaaatatctggatcatctactgtgaa

SEQ ID NO: 148899 - DNA, 558 bp, Homo Sapiens
tttttctcgataaaagcagcagccctaattttatggtcacatttaggctggaatgggtgacagcatgcgagctcgggggtgggctcggaggcagcgattcgacagacacgtgcatctgctagggcgccgggctggcttcaggcgggcctctgcggggcgtcggggccggtttcggggtaggcgtccttggcgggggaaagcttcctttcaacttcgactcccaggaatcttttcaagttggtcctcatcttcgtggtgaccacaaacgcatcgatgcaacacacgattaccgccccccgacatagagtaaatgccttcttttcttttcttgcatggccaagatggcaactactgaaaggaacacagctgtaatgatactgttggtaagatccttcccttcttgaaaatttccacggacagagatttgagtttcccctgagaaacctctccataactaaaagggtcttccacatgttcaattaaagttgctcatatttgctttgtctgcttcctgtactcggcattctgtgggacagagagagctcagcagcctttgag

SEQ ID NO: 148900 - DNA, 745 bp, Homo Sapiens
tttttttccaggcacatgtgtaccttgatgaccccctccagcccgagcccagcccagtggggtggctgggtggcagggtagggaacacgtaagaggcgtgagtgcctggggactcccagcttccctgaagcaggcctctgtccaacttcaaccccagaagcactgagctctcagtaaagggagaggaaaggcccagagaggccatcatctctctcagctcacaactggaatcccaaagcatttgcacaaaggaccaggaccccagacggcagccaaatgcagccaaactgagcagggcaatggaggcctgacatccagccccggggcccacagatgatcagccaattatggagcaagtgcagggaaaaccgcgtggggcactgcagaaagcaggggaggcttgaggtgtgcccagaagcaaggtagacccagcaggaaaccagtaaccagtgcttttgtgaaggcctccaccaggggtcccagcaaaggccctgcctacctaaagagactgcagggcggcctgtgtctcacccagagctacttcatcataggctgaagtagtccgcagccagtcgcccgtagatgtccgtggtccagagcacatgggcacggcctgaggctagaagcagctggtgcaactcagcttctacgcgggcaaacttctcctcattgatggagcctccagcaggacagaggcaggcgcgcccctcgtgccgaattccacacccagcctcgtacctagccg

SEQ ID NO: 148901 - DNA, 331 bp, Homo Sapiens
  misc_feature (164)..(164): n is a, c, g, or t
tttttattgtaggggtatttttactacagaatgtgaaacgaccttcctggtggtccagtctcttcaatggggggtggcagtccagtagcaggcaccagcagctgctgagtttccactggaaccacttggttctgtggttggtcatttttcctggcttctggctnatgtggcatcccagcttagctcctcttagacattttgtaagctaattaatagtatggagcaaatctaaggtagattcttcagtctactgctgatcactgacacggaatgagggaccagaagtgggttactgagtgtgacagaaccttaaaacactggcactgtttag

SEQ ID NO: 148902 - DNA, 927 bp, Homo Sapiens
gttcctgtgtcttggaagagtcttgtctcccttatatgtctttattggtctatattgttaggcgtgttctcgtgctgtattgatccgcgcctatgtcatccattttagctcattgctactggactgtcagtgaatccggacctgaatagccatgttgtcattactacaatcggtggattcgttccataattatatgggaatctcgattttctatcatgggtaattctgttattcgtatactgttcaaattggatggttcatcaggtcagacactgtgtcaggtgttcccattttagataacctgacataagtgtaacatttatgtacacctcaagtgcaccgagctggagcagaagatctatggacatcttgcttcctctgtggcatttcctgcttgccgtgctggatatacccgaagtgcggtctaggagaatataatgactacgaaggtcaaatgcattttctgtgttcatgcccatggaacattttttttcctcccataagaacaggataggaacagaggttagaggcttagtctaacccaggaaagcctggttaaacccttatgtacccaattttgtgttattttatctatattttaaatcatatgggcttctgtgatcccataggaccatctaaataccctttgccatatgtcattctattagaaatgtgtttcaaggcccaaacaccaccaataaaacaaatgtctggaacaccaccctatttgcataccagaaatttcccattccactgaagggttacaagtcattctggattgctggagaattttaactttacattcaaatagcttggactaacaacagtattcattcataacctaatacaaatccaagttaggatggctattcaatcaccggacgcgtgggtcgacgatatcccggtaatccgacgcgtaccagcctg

SEQ ID NO: 148903 - DNA, 1023 bp, Homo Sapiens
  misc_feature (210)..(271): n is a, c, g, or t
gcccctctttcacccctcctgctcgcgcttcgccgtccgatcccgctccgctatgcctctcgccgcaggccgacctccgccccgctcatcgcgggtgtttcggcccgcccgggacgcacccgaccgcatcgtcgcgcccattctcctatagcgcccgccggtgcagcccgcgtggtactcgcgggagcgcccatttatcgccagtcgcannnnnnnnnnnnnnnnnnnnnnnnnnnnnnnnnnnnnnnnnnnnnnnnnnnnnnnnnnnnnnccgacagtcccggagttgccgagaagttacaaatgatcccaaaggccttcttggaaaccaaaagtgcaccaaataaagtagcaatgcctcttcctttgtcagccgactacagaagcacatcattctcccaggtttttgctctcatccaagttaagagtaaggccactgtggatccgcaatagagggatgtgaggagggggctttatcctctgccgtccccaggaccctccacctgggcaggaggccagcagctctgcaatggccagagaggctgcaacgtgcaaggcaggccctgggcccccccacacaggcagacgacgattgcggctcgcaaatgatttcggattttgaaaaaataaatataaataaatacattccaagccttctgtgaagggaataaacggcaaacataagagactttccaggtgtctaaagatgccaaaacatccacagagaaaccgctaagaaaccctggcagaggagggatgggggggctcaggcctcggcccccgtctgggcaccaggaccatctgccagagcccagggccctccagaggcacttgtggaacctgggaccagggtgggaggctggggggtccccagaggcactttgcgggaaactgggaccagggtgggaggctggggggcttgcggagtgagccaggacatcctgggtgggtgggggggcttgcctccagtggggaggaaaggcactggttacaattatggtttaggttaagcattagtggggc

SEQ ID NO: 148904 - DNA, 391 bp, Homo Sapiens
tggggactaagccatgaacaaaacagtctagatccctgccctcagaagggttacagtttatgtgattactattttcatgagtaaaagtgaagaaagccatatggaaagatttttatcttgcaagaaaaaacaattatgaaactcttttaacataaacacactgaaactgtatcaaagcaattgtccaaattgtatttatacccaagaatttctttaactaagagagcataaggcatatgtttggaaaaccaccctctttatctttgaccggcttgcagataaatatatctctccattttaaaccaagaagggcaatcatgttggtgatcgagatcactgagaaagccagtgtatccatcttttatctttgttggcaatggacttttctatg

SEQ ID NO: 148905 - DNA, 991 bp, Homo Sapiens
  misc_feature (686)..(849): n is a, c, g, or t
aaactagaaccaaatttatttatcagaattattgagttggatgaaacgggagggaagccaacagaacacttaaaaatacaagtttattttctccatattgttaagtctaattatgatttatttcaaaatcatgaaaagcagagcctagcataccaaatgctaggtcagatttgctctggaaacttactttctagattattttttggacttacttaaaaaaataattattttccattaatatagcactaaatagcttcccaattatactgcagatttcttatatgtaaccttttttaaaaaaataattcatcacctgaaaaagatatatttactacagttaagtttttaagtcaagagttttctctgggaattgatatattttatctataatgtctccacttctccatactttcatcaaagtgtcactgaagcagctaaatgcagtcgtgtggggctaggtctacaacatctgcttaggtttattttagtggacatggttccagtctaagagcaatgggccactgttctaggtcctaatgtacagccatagagccatagagatgaggtatttcgatttgaacagaaggaacattttgacccaggcactacatttaccactcatgcagacgtggtagaccgcgtgtgctaaactgaacaccaaagccatcattcagacccacacagtnnnnnnnnnnnnnnnnnnnnnnnnnnnnnnnnnnnnnnnnnnnnnnnnnnnnnnnnnnnnnnnnnnnnnnnnnnnnnnnnnnnnnnnnnnnnnnnnnnnnnnnnnnnnnnnnnnnnnnnnnnnnnnnnnnnnnnnnnnnnnnnnnnnnnnnnnnnnnnnnnnnnagatatacataaaagttgctttggcctgattcatctgacttgtgatctgtgttttcacctggcattgaagatagagctgtgggtagttcccagtagcaggatgattctagttctagaacattttcaaaggtatagaagttcc

SEQ ID NO: 148906 - DNA, 1070 bp, Homo Sapiens
  misc_feature (103)..(103): n is a, c, g, or t
  misc_feature (166)..(166): n is a, c, g, or t
  misc_feature (988)..(1007): n is a, c, g, or t
gcaaacacttgcactgtacagtcaataaatatactatattcaatattatgtatcataaacagtcttgcggggatgaatcaattcatgatatttgtagaaaacngggtcggttgcatcaaaagttgcaaaacactgtccagttgatgagaggggcaatccctcaacntcaatctcattttcttctgcatctttaaaacaataatcactaaaaagtttaaactatgaaaaagtttaggattagtctgctgcagacgacaaggcagcttcccaatatgcaaattagtgtcaggagaggaaaatgtcattaaaaaagatctgatatcagcaggggtcacataactaacaggaatatctgcatctataagacagtggtaaagattagcagtttcatcacagttataaaccaagttgaaaccaatttctaaaaggagatgtttcagcctatagacattctctgctactgttttgcgtgtggtgatattataatctgcatttttaaggtgttgtaattcatcctgtagtaaattgtcaaaaaatggtctagttttattagaagtagacatattgatccaagtaattataactgcagagtgcaagtcagagccatcaatatttggagcccgcacaacaggtaaaagacgtttcatgtcttcgtgaatgcaattgtaaagtgctttcactagacaatataaatctggctgtagatcaagacggttaactgggaaaaacgataaaaacttctttaaagtgtcctttacaacatgaataggggtgttctgtaacactgataatgttggatcagaaccagggaaataccgtttttttaactgtattagcaattcaacatatgcaggagctattaatgctgtcattaaactgttattccagtcacttcgaacaccaactccattatcatcacgccacaggttccttctggctgaatccagtgcaaagtggccattcacatgaaatggcagcccagtctccnnnnnnnnnnnnnnnnnnnngaccgcgtatgcggccgcaagcttattccctttagtgaggttatttagcatgcactgcctcgt

SEQ ID NO: 148907 - DNA, 375 bp, Homo Sapiens
  misc_feature (82)..(138): n is a, c, g, or t
  misc_feature (155)..(172): n is a, c, g, or t
aaaaataaattggccaggcatggtggcacgtgcctgtaatctcagctacttgggaagctgaaggaggatcgtctgagcccannnnnnnnnnnnnnnnnnnnnnnnnnnnnnnnnnnnnnnnnnnnnnnnnnnnnnnnngagtgataacctgtctnnnnnnnnnnnnnnnnnntgtataatcatattgcaattttctttgcattactgatgaggaaaaatctcaaagtaattgtaaaaaatcctggatatcacatagttgagaaacaaagttattttaaacttacaggactctgtagttcacagttgaacactgtggcttcctgaaatatcaaagaataatgtacattaataagccagctactatcggcatcttgt

SEQ ID NO: 148908 - DNA, 557 bp, Homo Sapiens
tttgacatccagtaatgctttaattaactgcagtattttgtgctccaacatgcaggcagaaatcacttccagatggagaaaatgaaagctatttacacaaagaagcaatccctttattttaaggaaatttatatctcccaaaggtgtagaacttcgagggtccaagaggctattctgatgaatactaaaacaggactgggaatttttatttaatatataaaatgtcatcgtacccttcatgtaggccagcatttcaggtgtccatgtttctaaggcttttgcttaaattgcccattggagctctattttatttttaggaatctgacttggagtagacgagaagtgtgagacacttgctgtcaccctcaagcaggcaggttgttctgagtgctcttcctagcgaaggaatcccatttccagcaggttattccgagtgctcttcctagggaaggaatctcatttccagcaggttattccgagtgctcttcctagggaaggaatcccatttccagcaggttattccgagtgctcttcctagcgaaggaatcccatttcca

SEQ ID NO: 148909 - DNA, 1125 bp, Homo Sapiens
cagtatgtttcttcagcacgaggagattctgtgtgacagctgtgagacagcatcggtgctgtagttcgtacattcttcgttgagtcccagagtaacaagtatctctgagccagacacatccactcccaccagtaccagagaaattggcaaatatgcagtatttctcattcttgtggccagtgtacgtcttcaggcacttccctttgctgtagtcccagagcttcagagtgttgtccagcgtggcggccaggatgtatttgccgttcggggagaacttcacaaaagacacgggggggttgtcgtcatcgatgagcgtcttcaggcactggcctgaggcggtgtcccagatgcgacagagaccatcatagctacttgaaactatcaaggatccatcacgattaaaatgaacggccgagactggatccgagtgagctggcaaagtcttgaggcacttccctgttttcacatcccatatcctcacgctttcgtcaaaggatcctgagacaataaggttggactggggattgaagttgcagcaaaagacataattactgtgtcccttcagggttttcagacacttgcccgagctcacgtcccatatcttcaaggttttgtcatctgaggcagaaacaagaaggttagaatctgacgaccaggctacatcggatattcccagcttgtgaccagatatggttttctcaaatttcccatcatacgcgccccaaattttaataagtttatcagcagatgaacttgccagccactctccattcgggctgaatttcacggaggacactgctttggtgtggccagcaagggtgaactttagagcatagtttggcttcacaggtgtaggcttgctctgagtggcggatgacgaaggggttggctgtgctctggcggcctcggtctcgggcttcttctcctccgtcgccatggctctgatgctggccgcacaggagacaagggtggagggacccggtgacagaggcagtctgccgggccgcggcggcggggccgggcgctcggggcgtcgcgtcagccgccgcctgggcgggagcgcggactaagctcgacaagccctcgtgccgaattcaaacccagcctcgacctagaccgtaattg

SEQ ID NO: 148910 - DNA, 1171 bp, Homo Sapiens
  misc_feature (43)..(105): n is a, c, g, or t
  misc_feature (150)..(159): n is a, c, g, or t
  misc_feature (170)..(335): n is a, c, g, or t
  misc_feature (345)..(354): n is a, c, g, or t
  misc_feature (379)..(393): n is a, c, g, or t
  misc_feature (402)..(568): n is a, c, g, or t
ccccccgtttttcccccgggggaaaaatttttttccacggcgnnnnnnnnnnnnnnnnnnnnnnnnnnnnnnnnnnnnnnnnnnnnnnnnnnnnnnnnnnnnnnngcagaaatttttttaaattttcccccctttcccaaaaagggcgcnnnnnnnnnnaaatttaaaannnnnnnnnnnnnnnnnnnnnnnnnnnnnnnnnnnnnnnnnnnnnnnnnnnnnnnnnnnnnnnnnnnnnnnnnnnnnnnnnnnnnnnnnnnnnnnnnnnnnnnnnnnnnnnnnnnnnnnnnnnnnnnnnnnnnnnnnnnnnnnnnnnnnnnnnnnnnnnnnnnnnnctttgggggnnnnnnnnnnaaaaaaagttttaaaaaattttttnnnnnnnnnnnnnnngccaaaaannnnnnnnnnnnnnnnnnnnnnnnnnnnnnnnnnnnnnnnnnnnnnnnnnnnnnnnnnnnnnnnnnnnnnnnnnnnnnnnnnnnnnnnnnnnnnnnnnnnnnnnnnnnnnnnnnnnnnnnnnnnnnnnnnnnnnnnnnnnnnnnnnnnnnnnnnnnnnnnnnnnnnnattgaacttcacccttctgtaataaaaaattaaaaacttttgttgactctgtttgaacacaatagactaggaactcttccctagacagtgttagaattggcaagaaatgtcaccagcaacttttaagaactttccggtggtccacaccttccgctcggccaaatcatcttcagagaggaggctcaaatcaggccctgtcctgacccccaggcgcagatctgggggaccacctccaagacaccctgtttcttgccaatccgggtcaacttcccgacagtctctcgcgggcaggagcaaagggacttagcagtcactcttccacagtttaattgttttgtcattttctagcgcagcagaggcgatgatgttttctgttgggtgacaagctgttgagatcacgacatctgtgtggccttgtagtttctgtacaatctctttcgtctgaaggttccagatgtaaacaaggttatcctctgagccagacacaatccacttcccaccagtaacagagaaattggcaaatatgcagtatttctcattcttgtggccagtgtacgtcttcaggcacttgcccttgctgtagtcccagagcttcagagtgtt

SEQ ID NO: 148911 - DNA, 172 bp, Homo Sapiens
cctttttaaaatttattttttgttatcaaagagaatgtccagaaacattgagtactaaagaatttgttcatggcattgttttacaaaattttctaatggagagtgaatattttattttctgatgtattcttcacttattaatgatgaggtcaatgaactgatgcaattattt

SEQ ID NO: 148912 - DNA, 423 bp, Homo Sapiens
tttaagctattttaatgttaaagtgccttcataaagtgggttggttcactgtgcccagcagtatgcgctttaaaaattattaccacactttgtttaagaggttttacttgtgaccaacacatgtcatataaaaatctgtaattttgaaggtgtttattgaattcggttggttcggagggctctgaattttcttctttacatgggccaaggacacaaatgagtcttctgttatcactttctcaaatgcattttctgagtcatcatctgctgtgacgatgtttaaactatgcctgtgtactttgtcctgattcttaaggtcctcagcctggctcttagtaggtgcttgagtcagtgtttgttgggtgaacaaatgaaggaagcataaccagtcaccgtgctgcccctatgggccaggcaccctct

SEQ ID NO: 148913 - DNA, 490 bp, Homo Sapiens
  misc_feature (237)..(339): n is a, c, g, or t
tcactgaataactttttatattgtttgtttcttttaaccatgtgaatgtattacctattcaaaaaattaaataagataagcatattttataagctttatgattcaatacaaatcaaacaatgcttttaattgttcccactttgtagctgaatggaaataggccaacttacaaaatgtcacaaaggttctagaatcagtctttctcgtctcaaattcttgctccacaacctagaattnnnnnnnnnnnnnnnnnnnnnnnnnnnnnnnnnnnnnnnnnnnnnnnnnnnnnnnnnnnnnnnnnnnnnnnnnnnnnnnnnnnnnnnnnnnnnnnnnnnnnnncggtgtattcttttaaagccaaactatgcatgtaaaagcccttaatacaatgccagccaatgcttgccattatgataagaaacaacctcagactacttataaatacattttctcccttctccacaggttacaatcaaattctcatgccata

SEQ ID NO: 148914 - DNA, 364 bp, Homo Sapiens
acagtgaggattggaatttttatttgtatttatttaaaacatacttattttgttctagggatgctctttataggtgataactcattcaatcatcattacccagattgctctcttttctcttcctccactctcctgaggggactcttccttggcctactggataccagagggtgagggacaccattgatgaaatccataaagatcagcctccagccatggagcagggtgaaaaatggggatcgaacttagaaagattctaaatgtatcttgtcttttttggcacattgctcaagcctgttaaggtcttcttgaattctggttccatcattcaacacagtggtcctcaagtctagtagtagcatct

SEQ ID NO: 148915 - DNA, 377 bp, Homo Sapiens
tttggtttttaaatccttaatggcttcctcctaatctgaattgattagaacacaaattgcagttttagttaaactggggacgggggacaatgcttactaggaaagccaagtttcatgtggaaaatcctccctccccacaagcacacatcaaggatggaggaaatccttcaggagaaacgagatgcatgtctgatgcttagagctgaggatggcagctctaagctggatgtctcagcaggatggcacctacaagctgaggttaagacaccaggacactggctgtgtgatgtctggcaacttacttgtctccataagccttcgtaatctctgtacctctgggagaactaagcactcacctctcgagtccccgaggtcag

SEQ ID NO: 148916 - DNA, 327 bp, Homo Sapiens
ggcatgggagttttcattcttaatgtacttcctgaaatactcagcgaaggtcttgcaaagattcaatttgtaggatcgttgtcatccagtctcttccttaggaattcattgcctttgggatcagcaacatcttctcaggattcttctcttgttttgtggccaccactgctctttcccgcacggccgtccaggagagcacgattttaatatagtggccaaaatgagccttggcctcccataattggagactcattatgacatataattggcaagtaggtggccactctcctggcatgagtttggcagctgactgtggtccttgtcccc

SEQ ID NO: 148917 - DNA, 460 bp, Homo Sapiens
ccctgtgtgaagtgctttatttgcatgatttcatttggtcttctcagcaacactctgagaagggaggtgctgttattgttcccattccacagatgaggaaactgagggccagcaagggaatgccacccagcagtgagcagcaaagccagggggtgctgagcccagggggtgccctgtctgcctgcagctgttattgaagatgtcccttttctcaccgtcaggttttactggaacagaagagaaagccagtgagatactaatcattagcaatgttaatattacctgatatttagttggctttatgcttttacaaaatgtacctccctttctgttgccaggaagattctagagcatgtagcaagaaaagcaagtaattgtctttctctgcagccctgtggaatcgtcgaaagagcacatactataccctaaaattaaacctagattgaagttctagctcaaa

SEQ ID NO: 148918 - DNA, 608 bp, Homo Sapiens
gtcagcaccctggctttactgttcctatgcactatggggccttcattttcagcccatgtttccaaatcaacatcagtctttcccagcttcctgcatccaatgcagagggtcagggcagaggggtctgtggaaatgatgttaagaatcacgtgctctggcacccagcctctgctttcagtcctagcagttgcagtgggctctgcactgcaatagcaaatacgttattagaattaatctcaaaagaagcattttccttatggaaaaatcagttcaatttataggatctaatacaacagtaagagacaatagaagtcctcatgattgcattaagaatttccatttggcttaagaattttactcagaatttatttaaccagactccaaacctctagttacttttattggagtaattaggctctaaaggtgtttttaaaaagggggcctagtggttcgctgaggaggaagagagactctaaatgtgtgttctttttaagtgtgtttctaatcctgtttttctgcaatctgctacacctcataattacttttttccttaaacagtgactatttcatcaacagacattcaaggaactacttcagtttataaaatt

SEQ ID NO: 148919 - DNA, 522 bp, Homo Sapiens
tttctactaaaggtgattttattttatatccattgatattcccctttcagataggaaattaaaccatgtttaaatgcaaaaactgtttcctaagtatggtgggtaacagccagaaaaagataagagaaatacgaagatacactgtttggggaaagattgggaaagatgcagaaagtttagagttgagccctttagatgggcaagaactgtgttaaggactaaatttagcctctctgttaaccatctcatattttctgcagcgttaccttcttcagtattttaagccagtgattgacaggcaaagctggagtgacaagggttcagtctgggacaggatgctccgctcggctctcttgaagctggcctgtgacctgaaccatgctccttgcatccagaaagctgctgaactcttctctcagtggatggaatccagtggaaaattaaagtagatgtagacttctgtcctaccctttgttcttttctctttgatgtaagagtctttgatcaagcaagacattaggt

SEQ ID NO: 148920 - DNA, 1106 bp, Homo Sapiens
aatatataatattcaactttatttcaaatataccaattttaaaatttatcaatatacccattacgattctttctgagtgacataccacacaaattcaatacggattctctaaagaatcctcttaggctacttcactcaaagtctctgcagctgcctgcactgtgaaggctgcaacataaatctgtctcttcacttctccccaggccttggaagggtccactttgctttccaatatcaaaacagagcatcataaattcctgggaatgactccccctgcattacttgttgtggctgcttggagcatagatgacatgcctataaaaaggcctgtctggtaaccttaatggatcaataaatgctctttccagaaacatgagttgatcattcatcattcttaatactattgggttgcttttgtcaaagtcctggagttctctcactgaacttggaagcaatttctgtaaaattctttactgcagaaaaaagtgaatcaaatgatacactgtatgtcttcatttcctgtggatgtttcatagaaatactgtagattttgtcagcatactttcttaaaactacagcataatctcgacaatcaaaagggagcactatggaattggctagctcaaacaccatccctcctcgaacctgggccacagtgaggtgatatttaaacattggatcataaaacttttccaccaactcatatgtttcatagacactgtgatacagtggatagccgctgaatttgtttgtttcccaatttttagtataccgtgctctgcctgaagcaattccaagtcgttggaagaacacctcaaaatcatttccagatcccaatttgcttatcctgggcatgccactgaactctggggaaggactttttttagtccaactttcataaagagatttgccttcaaagccttcatcagggcttttcagctcttttgttaggttgtgtaccaagctgtacatcagcggtgtacaatcaactctcagagtgtagtttccttctatagatgagtcagcattaatataagccacgccacgctcttgaaggagtcttgaattctcctctgcccactcagtagaaccaagaagaccaaatt

SEQ ID NO: 148921 - DNA, 726 bp, Homo Sapiens
  misc_feature (66)..(76): n is a, c, g, or t
tgcgaatgtgtcggctttgcggttaacgtgggaggcaaagaggggaaaatggggtaagccatagannnnnnnnnnntaaaagggggtggcattgtacttattttgtacagttaccttttatttatagcgaaaatgggttttttcatttacagagtaacaaagatttttctttaaataaatgtatttcaacgaaaatgaactgacttaaagaaaaaatattaaggaaataatcacaaagatggtacacacggatcattaaaagatacggatgtatagatacatatgtcacaaatgattaagacttaaaaaatgtaaccctcccaagaagtgggagcctcccaaagtggagaaggcaaatacaatttccatttggggggataaggagaccgacttgcaaagaggattagtaggttgccccagaacacacagcaaaggtgtggagccccttgtggtctgaaacattcaggaccctatggcaggaggtgagactgtccaataattcagcttttttcaaggcatagacccaagactcagacaacctcaagaaaggggagtttattttggatataaaggcaacaggaatcctgaccaaatggtcagcagccctctcagcagtaggtatttttgtattgggaacccaaggtcctgtgcttagtggctcaacgcttgtctacctttccaaggctcaacgcttgtggagccttgtccacaagcacctgctccccc

SEQ ID NO: 148922 - DNA, 364 bp, Homo Sapiens
tttagcagcttaaaacagcaaatatttattatcttatcatttctgtgggctagtaactcaggcataacttagctgggtgtgtctggcccgtgatatcttaacaaggctgcaatcgaagtgttagctggggctgcagtcatctcaagtaggagagtaggagaagatccacttccaagaacaccagcctggctgttggtaggactctttgcagcctgttggccaatgatctcagatccttgccacatgggtctttcagcagggccgctcacaatatggcattcagacctccctcagagtaagctcccggacggggcggctggccgggcggggggctgacccccccacctccctcccggacggggtg

SEQ ID NO: 148923 - DNA, 300 bp, Homo Sapiens
gccattgagtaaaataagatactctgtgataaagtatattagcattaaagtgttcaaatctgatgtttattagtaggcctcaagtgaatccttgctgacatttaaggtttatgacatttccttcacgttcgttcttgactggaaggcataaatggctgacagtaaagagcaattaataattttccaagtaaaacattttcagggacatctgcctttattgctccccagatgagagtacagcctgtttcttatgtgttccaaagatgatttccctatcagctttttggtcagttaaccaaa

SEQ ID NO: 148924 - DNA, 378 bp, Homo Sapiens
tttgaactaacacccgggctgttttctgtcccttcccttccagggggccctgactcatgaagaacccttgcctgctttctggaccattccagggccagctttccccctcagcttcctgagatcatcctaatgtccccagaacatctccttggcgtgctccggcccctcctaagaggcgtgtgcccagcttgcttccctctggagccttggggccagcaccgcctcccaagaactgcactgcagtgtccatggccaaaggacctggtagggctgccggataagacacgggcactcggcccagcacaaatttcagataaatgatgaattttattttgatgtagtgtgacccaaatattgcttctactaagaatttatttt

SEQ ID NO: 148925 - DNA, 691 bp, Homo Sapiens
gatttaatcgtctatttattaatgcatttcaagtttcaaaaaaccttacatctttgcacaatactttattttttgcaatttttagtaaaaatttccaaagtgaacaaaaaaagatactgtataaaacacagtggacattaaaactgacagtagtattagatctcatttgtcttgatccttttatattaccacatcttgattcgcagtggaaagagttcagtgcatgtatctcttttcagaaaacatttaacttagactcacaataacatagggcagtgtgtgtacctgccaaaatcctaccacaggataacattacaagcaaaaaatttacatgttccaaagtctaccacactcaagaagttactaagaactcttgcagaataaaagtcaccattttagaaatgcaaacccacttccaacctttgcacagtccaaaaacaaaggcatttaaatgatttaaaagcaattacatacatatctacctacttgtttgtttagaattatttatagtctatctggggtttcatgtacaaaatttgtctctaaatcatgtacaaaaagctgtattttgaaaaagtcaccacatactgtacaagtttacaaggaagagatcccgttattttctctagcatttttggccttgctggcttgcgtcacattatgagaatgattgtgtaaaccttatactctt

SEQ ID NO: 148926 - DNA, 322 bp, Homo Sapiens
  misc_feature (263)..(263): n is a, c, g, or t
tttttgcatctgaaggggacacaacaggtacttgtgaatgtgccccctgaaaggcttgtgcacacaccacactcagagggtagcctgtcgctggtcttcagtgttatatcctccgcctccaagaccccatgggtctcaggcataggctgggtcttcagaaagtcctagtgtcctttgtaaaaatttaaatgacttgggatgcaggcctgggataaataatctccccaaaatgatatttaaaggtaaagctgaaaattaaccantgtgtaaggtaatgcctgtgtctaatcgattctaagacacctttaacgtttggaaatta

SEQ ID NO: 148927 - DNA, 908 bp, Homo Sapiens
acagggagacagaattcgtttattgggatcactgggtggaggtggaggaagaactgagtggctgctgtcctggtctggggatggatcaggcaccaaggttaggggagggagcccatcaccatgttagtaaaataataaaacagtggttggacagagggaagacccactgcctgggatgaggctgctctgaggcaagaggtgtacgtatcctacctggcccaacacacgcacttccccactggctccttggcccgtgtcagcgaagggagcgcgggacggtgggggaggcggagcggtagcagcggtacccctccagtgccgctggcaggagcagcaggccgctcagggggtctttgcggcagcggcccatggcctccttgtagctcagccgttccttggagatggggtctgtcaaatccttctcgtagctggactcgtcctgcaggagctgggccagctcttcactgatcatcccggagaggagggcctgctggatggggatgcggcctgtcctcttggggtcgatgagccccccggtcaggtgctgcacctgcaggtgtgggagcacgctctcccggggcatccagcccttctggacggcctcgcccaccgagagcctcttcttggtgacggggtcctcgatgccggtgaaggccttctgggcgttaagcagcctctgtgtggaggtgttctcgatcaggcccctctccatcgccttgtgcacagagtagcgctcacggctgagcaggtccacgatgccccctgtggccgcctgggcctccagtagcttctgcccagtgatggggtccagcatgttcttggccacggccgtcttgatgctgcacttgttgtctgtggttgtgtcatagatcccggcgatagggaagctgtcatcaccgagcccgaga

SEQ ID NO: 148928 - DNA, 545 bp, Homo Sapiens
  misc_feature (516)..(516): n is a, c, g, or t
  misc_feature (519)..(519): n is a, c, g, or t
gattttcacgatgttcctgtctgctcaatgcatgctttctttattgttctgacagttgtgtggtaacaagctaatatgcttccagttgacttccagtctaccctggtgttagaaaccgtttcatctcttattgtaaatttgagtgcttgttgttttttatatttgtgatgactcttccagcagttgttgacaattgttagaggtttgacttttaaataattacttattttttctgattgtggttcagtttaactgaagaatatcctgagattgtaagaaaagcattttttaaaaggtatcacttgtgatcatttatctttctaaattctatttttaatactgttccaccaaagtgatgcagtggttaccatgacaccctaatttcatgtgtttttgtatttatgaaaatagtttcattgtcatttattggcggtatacaaagtaaaatgttataaatgtgaagttataaaataaatatatgctaataaaatcctgagtttttctgattcctaaagnaanccatcacaaacggaatgatgacatgt

SEQ ID NO: 148929 - DNA, 253 bp, Homo Sapiens
ttttgggattagatcagacgctttatcagagaagtcacaatggaacacatgcagggaaggggtgctggggaaacttcacaagaatcttctttaagtcaataaagaagagctatcagtcctgcacaatgctcagtatataaggttttcctcccatgtgtatgagttttaaatggcatcatagtttgcatttttttggttcttttcaatgcagacatattgctggagcctgtgctctgggctgggctggcctggc

SEQ ID NO: 148930 - DNA, 644 bp, Homo Sapiens
aactttttatgttttcagttcttggcaacggcaacaaaccacaacattatcaaggaatgtaatgcagactttttaagttgtgcgcaaatgactgtttcccttctggtcatggacatgtccaataaatagattgtagaaccactgtactgtataaacttcatttatacatgcagttcataaaattatttttttcttaactgaataatttaccctgttatgtatatatacaaatagataatttttgtctcaatataatctaatctatacaacataaatccactatcttccccttttaatggtcaatgtacatacacaagaagtgtctatccttatgaatcgccagccaattctctttttgctatccatggtaagggcccgcacgtacgactgggtagttcggcactgggagttccaatgccttttgtctatgccgctgcagcccttcttttgtgtaacccatgggattgcacttggtctcgtagaagtattgcttcagtgggcttttgatacaggaccctttcaggactgtgaccgtcccgccgacaatgtcactgcagtctttttgtctgccgccgtacccactcactaatactgtcacacagctcagctccctcggcggcagggtcgagatgcggccgacactc

SEQ ID NO: 148931 - DNA, 698 bp, Homo Sapiens
taatatcatttaagctactcaagcactctttattataaaatgagaatactaataataccttgcgctaggttgtttaaggatcagagaaaatatatgcacaaagcacctggaacacaggaggcactctttaaatggtaatacttcttattacaacttaaaatgtcacacgacaaatagggtacttgtcacagacaaacattcaaatgttaatgttatacagtaatagtaatattgaataagtaattttatttccatgatctatttacactgtacaaagactgttgaaaagcaccctacaagttcacagtacattacaatatatttactttaaaaatatattcctttataaaaggtttataagaacattggcatgtcaacatgtgacaaaactctcaaagcatgtcaccaattctgtgagagcaagaatgcatccaagtgttatcaatttcacaatcacaagtcaccagttgagttttaaatacatacatgttttaaataaaaaaagaattctatagtggaaagttcttgaggcaatacttattagttcattaacgtatgcattttcatggagatgtggcataataacccacaatatcaacttaatctgtccaaagaaacatttcaacaagtttagcagtacagaaattctggtcatttgtttctactttttcttctgtgctggttctcctggctctact

SEQ ID NO: 148932 - DNA, 427 bp, Homo Sapiens
ctgtaatttagtataaagttcctatttcttttcaataattattatataataacaaacgtggatcttctgagaagaaaattattttagaagttttgcaaaatatttagggtttgtttgttgtcattgaaacatgagctttgaaccaaatcttcatttgtctcttagttctgtttttcatgtgaatttgagggagataataaaattttgtgagtcagttcgtctcacaacatttttctgaggattaaatgaagtgaagcagccaactagtaaatggcaaatacttggcaaaaattatttttaaaaccccaggtgttccttctgatctgtgtcttatgttagttttgatctactttattattgtcttaaagtcttttgggtgctaaaattatgtacttctctaagatattttatgaaatgttcctagatt

SEQ ID NO: 148933 - DNA, 401 bp, Homo Sapiens
atcaagacactgtctgaagtttccccctcatgatttaaaaaaaagaaatttatctgacagaggttctgctgaggaggccagctctcacatcagagggtgatggcagtttgtgctggatgaggataagacaatgctgtcctagggctggccatctgataaagcttcccagaaagtgcagtaatggacccctgggaggctttctgctctcctgtctgcgggttcctgagctgccgaaagtaccttgatgttttctgaaagcagagccaatgaccacactccagggactgagttctcaaatatttacctttggagtccaacccttctgaccatccagaggcaagcacaatattcctgagaaaatctcaaatagatggtgagacaacattgttttttctgccaag

SEQ ID NO: 148934 - DNA, 486 bp, Homo Sapiens
ccatataaatgcagaaacatttattgaaagacatttcgaagccatcgtgtttgtatttcatgttcatgacaataaaacttgtaaacttcagtaacagttaaaccttttttaattatggattagccattaacatttttgaaacgtggaccatttaacctcggcctaccccctccaactgtcctggtgatgagttcattagctaagttaaaattaatttgaactttgatctaaaccaaaacaaatcgggaaaaataaagctgtaaaggaactttatcaagctttccaaaaccaactagaaattacttgaagttttcgagtgagcattgcctgtgccagtatttttcattataggattataaactcgtttttttcccaaagcgcatgtttaccccaggcagaggagtaattattcacccaatttcatggatgtaaacgatggatataaataattgatagcacctaaaggcttccagtttgggtggaagg

SEQ ID NO: 148935 - DNA, 393 bp, Homo Sapiens
tttgtctgtcatttaaaagacttatatttacttagaaatgttgtaaacatatggtaaagagcttggtgttttattacatttcttgaaaataggtgagtggagaaatggaaaataggttaatcttttaaactgtatttataattgcttcctttccaaagccaatgagcatcttttttctctttttattttaggtctcttgttggtcatcagccatagtgcacagcagtttttagatgtgcctacatgaacagtacacacatactcacacactaacatccacatacatctcccttttcagtggcttaggcagagcagcaaaaaacatacttgtctcataccgaagggatttcatttacaaaagtaaaaccccttctgtcgtcttctcgcagccgt

SEQ ID NO: 148936 - DNA, 570 bp, Homo Sapiens
tttttacacatcagggcttgatttattgttttgttgattgtctagacttaagcaagtgataagaaaatgctaataatgcagattaaacttagaagtatctcacatctataaccattacattgtaaatagaacaaaaaattgcaaaaatattcttaatagaatattctcaaatattctcaatagaaaactactatccgatctagcaaagaagtagctgacaacatggaccagtaaagtttcgacaaatgtcttctcatcttactcattaccataaacaaaaatgtcaaccagcacacatgttagaacaaccccctttgttaatcagttgtggatacaagagtatggaaaaaatcactgaaagcattctgagaaaaatccatttgctgtacggaattcacaataaaattatatatttttatttgtaaattgtgtactaagcattgtttttattggtaaaatttataataaacttatatatgtgtacacacacacgttttttctagagagttagtttgtcctagttgtgacaaccagaagtattcccagacacagccaaatgtccccaagggg

SEQ ID NO: 148937 - DNA, 320 bp, Homo Sapiens
gtcggcggcacaaaatggcggctggcggcggcggcggctggtgctgcagggtcggcagctcccgcggcagcggccggcgccccgggatctgggggcgcaccctcagggtcgcagggggtgctgatcggggacaggctgtactccggggtgctcatcaccttggagaactgcctcctgcctgacgacaagctccgtttcacgccgtccatgtcgagcggcctcgacaccgacacagagaccgacctccgcgtggtgggctgcgagctcatccaggcggccggtgatacccgtccgcctgccgcaggtgaaggggcggcccc

SEQ ID NO: 148938 - DNA, 861 bp, Homo Sapiens
atttatactctgtggacgtttattaaggctctggcaacactgtggagctggcctgtgtccccgagaagaagagtcagtcacaggggggtctccatctgatccagcagtttgaagcttctcattgttgtccttatccagggcaggaaacttgagaccctggtgaagacttctggaggaacccctgacgactttccataggagacgatgccgtgggccacattgttacacagcagggggcctccgggatcccccttgaaggcagccttccgttcccgccggtcccccacacagatctgccttcggggttcgtaggaaccgaagatgcggaggcactgcctatccctctgcactctcagctgcacctctcggagtgtatctgttcccctcctcatgctgaccctgccccagccgggccacagtggacagcgtcccgggtctcagtccctcctgggctctaggcagagccactgggctcacgtttcgattccgtctgactcttctgctcagctgcaataacatgatgtcattctggatggtccgctgattatattgagggtggcggatggctctgcgcgcagtgatgtgttgctgggtgttttcccgtctctggatattgtgggcgcccagggtgacatttatattgcttccccagcaatgagctgctgtcagcacaaagtcttctcgcaccaggaaccctccacatctgctctgacctgctggactctggatctgaagatacgccatgtaggggcgggagtggggcctgctctcccggcctccgatgatctccctgcctcagccccagtgggtaggagaaaggccagcagaagcaggagtggctgcatctttcctgaaaggctg

SEQ ID NO: 148939 - DNA, 547 bp, Homo Sapiens
  misc_feature (521)..(521): n is a, c, g, or t
cttggttcttaaatttgatgttatttgagagtgtctgatgttcctcatccatagtagatctgtcattgccctcatcatgctgagggacatagtactgtttatatttttaagggcagaaaggcttgatttgatcaatccagtggggaaaaaataactcagagtcattcctggcatcaatcaaggcaaaaattctttcactctttcagcttccttccagctgggtgggcatcctcttggtggaaagtacttgctacaaaaagaatgagtggtttggactaacctacgtctagtctttttgatgattttgagattaagccaaatattttcattgacgaaaaacatgaagaattataaacagctagccacgtatgtgaacaatcctaactgatcattgaacatcgagttaaagtgtttagaattttgattgggtataatgacaggaattcaggaataattttgcatagtctgatatccatatttattgccgacttgacatcaaggcacaataaagagataagctntcattccatttaaatggagaatgcat

SEQ ID NO: 148940 - DNA, 460 bp, Homo Sapiens
aatagaattagcatatgtttatttgtatcacagagatatacagaaacaactttggcatattattcatctgggttcatttattgatttatgcattaattcatacattcatccattttacattcactgagttctatactcttggaaccaagttcattgttctgatacgttagggagatggcagtctgcaagctaagtggctctccatcttgagatctcaggaactccagtattttcctgaagattctatgcctctgaaaacatattttcagtctgttgatatttcctcattttttctggtaaaatcattaaaactgaacgattgacactatcaacactctcagtactgtcacagctgaaaacttcatcatctgattcctgcactgaagagcagggtgaggagccgttgacttcttcaaacttcccctttaaaattccactcatagctgcaacgctgtcacat

SEQ ID NO: 148941 - DNA, 457 bp, Homo Sapiens
tttctgctcctccttacacgtaaagggcttctctgacggatgaggttctttgctaactgtgcagttcttcacaattgaggcctcacttttatcccttcttaagggttgctctatactgtaacacttctggtactgatgaaggtttgcactgaaccagaattgtctcccacatgccccacatgtgtgaagtttcagtccatggtgtgtaccctggtgttcatccaggtgcaaaatatctttcaagatggggccacatatgtcacaagggagagccgtctgtgcgggcaaacctgccttggaagtattaacatgtgacactgctatagaaatgctctgttcagaagatgactcttcatccttcacttcatgccaacaaccagggcctgtccaagcccctcctgctgtgactagagtcatgccctctcaggcagccagagttctctctcttgttacaatt

SEQ ID NO: 148942 - DNA, 905 bp, Homo Sapiens
ccccccaaaactatccctgggggggttgaattttatgggatgatgacgtcgtttgggatagaggttatgaaaaaaacctgcattatgttccaaaacttttctacagtggaggccagtcaacatgggtacaacttaacacctaacaaaaaatggctccaaaaagtatacatagccctatttctgttcatcccatctgaatggaaaattttacttagctggtaattcttcaaaatgttttgttgactcagggaaggggaaacatattttacatgcacagaatgcttcagaacttttctgctcggctaccaatctgccatgtaggttgataatcaaagtcctaaagtacagtttagttctttgggcctacagggacaccttgttgactaactggcttcagccaatttttttcagttcacacacaagatcaatttctttgtcagcaaataccttttagaaaaagtacactacaaacacacttggaaaacattttattaagtactgtataaacagctatttagataataattgcatagaactataccaaggtaattgtgtctttaaggaacaactaccaagtgaacaagatgagcaaagtcctctattatacaagatttccttcggtggaacattatggtgacaaagcagcgtaatgggctcttaagcagattgatttttatcaaactggacatatcagaattccttatgtataagagaaatatgcacatgctcctttcaagaaaagagtgataacccaccatggaattacctccagtttaaacatgtactcttgactgccaaaaatatcgagatatgttaagcaagataaagcagcagaacacgctttaaaatatgttgatctctttctgtaatctacatgttaatattaaatgttcttatccttgaaa

SEQ ID NO: 148943 - DNA, 250 bp, Homo Sapiens
aacagtgtttatttacttttattgtgtgtttggacatctttaagaaacccatgaaagccagacaggcataaacttcgcagtcttagagggttcagaattcaccatctctgtgtgcaaactttttatctagagtatgatgaatcctaggtatggcattcgaggctctgtggcctctcccatgtgtatatgactgtggatgtcaagagtagcccagaaaggggtggggtcaggatgacagaagaacaaagca

SEQ ID NO: 148944 - DNA, 532 bp, Homo Sapiens
ttttcatgtttcattctacctatgtaatcattttatttctgtgtaaaatttccttgtgttgagtggtagctgatagtgtctaaccagaggctaattttagacagagagccatattttacatctattattatttcagctagacgaaaacacagaaattgagtgggtgctggaacacatccattatttgccccgtagagataaatggagtagttgagaatagtgcaccgttggcagaatatggtgggaaaacgtgcacattggcttcccacgaggacctattttgtactaagttatttcatatttcggtctctaggatgccagtgttataacatctcaaagtgctaaaaattttccacgaaaataatctgagccccaagtgtaaagcacaagaaaatcgcatcccatttgtcagacagcaacgacatggctggttgccttcatactgcaatcgcctctgtaatcttcctgtgagacgtagcatcctccagggagtgagttggaaccttagccttgtgtttgcaggccttctttc

SEQ ID NO: 148945 - DNA, 677 bp, Homo Sapiens
  misc_feature (444)..(452): n is a, c, g, or t
tgatacaatatttataacatatttataacatatcttaactattacattatcaacaagaatcaacaccaagagtcctcagtatgtattttgttcatcatgcattcattccacaaacatttactgagcacttactaagtacaagcactgtgcaggctaatggctaagtgagggattctaagaaaatgtacggaccctgtcccagaggaattcacaatctagtgaggtgacaatgccaggcattgcagtgtttgttggttccccacagctttgttcttgtcaactatagtcaccaaataaaaatgttagtgaataaaacctcaggatctttgagtgaagcaacaatccttatagttagcttaaaatgttgagtgcgttatggttacagatgatagtgtagcgggagtaaccttaggcctgcaaactcaaatgtgtaacaaagataannnnnnnnnctgtaactgaaatgtatttctatttgaagcctccatttacctgcagtgacaataatcttatcaacaggaggccctcctcctttctttcaatttgaaacctccatttatctgcagtgatattcttatcaacgggaggcccggccctttctccagggctttgtcaagattggggagacttctgaagtgccaagatgagaagagagagaccttaggtccttgtgtcac

SEQ ID NO: 148946 - DNA, 817 bp, Homo Sapiens
  misc_feature (216)..(250): n is a, c, g, or t
  misc_feature (629)..(637): n is a, c, g, or t
ttttaaaattccactgataatttatttcagcttttaatatattttctactataaaaccaagctgtcaagacaggaaaatattactagctttgttattacaaaacaagtgagaatttttaattcacaaaggatgaaaacgcaagacattaatctcactgtacatacaatattacaataaactgattagctgtagactaataaaacatttaagacttnnnnnnnnnnnnnnnnnnnnnnnnnnnnnnnnnnngtaccttgaaacaagaaacacaggacaattttaatctttgatatatgttcatgaacaccaagaacaagaacatcactgatttgagtctaattgttttcctggtatacaatcactaaataagcaagatctaaagcatattgtattattaaggacatctttaggcaaatataaacattctgatttagggctttttctccccacccgaaacaatctgctttagctatcaagtagtttggtttgttatcaatttaacacgctcacaacaacaaatacagactttctaccacaaaattcaggtgagaggtttttagacagatcatacaaaaaaatacttgttcccaaggaaggcaatctgtaaattataaatgcaaccctaagnnnnnnnnntcctggtcacaaatcactcgctttcaaatattgatggagaaataaaaagtgtacgttgtgggtggagaaatgttggcatggaagagaggagaaaaggtatgaaatgaggaaagtgttatttgccacaggaaatattggattcagttgatttttaaaaatgaggtataacagtatgccagt

SEQ ID NO: 148947 - DNA, 641 bp, Homo Sapiens
  misc_feature (66)..(66): n is a, c, g, or t
  misc_feature (611)..(611): n is a, c, g, or t
caaagatgaatttggctcatcatagaaagaagttctttgaaggctgctgctaaacttgtttccctntgaaaaagtaaatttcaaggcatgatagtgcaagaggtaagtttttgatttatagaacatttatagactaattgtgcttagtctctaatttccaatttattttaaagaacagaaactacgctgataagtttcactttgcctaaatttaccagtatatccatgaatcgcaccagaattaggacaatttgattatcttaatgattctgtcatgaaacttgcacactgtatccaaaggtaaagagcagcggatggaggctcccacaagttctgtgcacaaggactctcttctcgggagttaaggtatctgagaaagcagttctccccccagattaagttctcaaaaaccctctcagtaagcaatgaagaaaaacagtgctaggtggagagtttcttttgtttagttaaatctgggaggtctgagtgttcctggggtcctcgtcgggatgtgccatgggtcgagaatcctttgaatgtgagtattcactattagaaggctctgtagggtcaatcaaattttcgatatcactgtcgtcatgatcctcacnactgtctccagctgctctttggggaggagg

SEQ ID NO: 148948 - DNA, 1118 bp, Homo Sapiens
  misc_feature (63)..(137): n is a, c, g, or t
tgctctgtccgtccttcgtggtttcctcttttctctctcctacttgtgtctgctctattgtcnnnnnnnnnnnnnnnnnnnnnnnnnnnnnnnnnnnnnnnnnnnnnnnnnnnnnnnnnnnnnnnnnnnnnnnnnnngggcctcccgtttgttcatatgtttggcgttctgtcttctttttgggcctcctctggggtctctttcttttgctccccctccgttctctgtctctctgtgctttttgtctctttcttctgtctctgctattactgacggcagttttactaagagttaatgttgactcaggaatattatgtatagcattgatccccagtgttgctaatgaattcattatgctgcaaatgcaaagtgatttgttagtaccacttggccaaataaaagtggaattctgtctcgacaagaatgttgaaagaaagaaggccagtgaaactttcaatctccactgggagtgaactaccttgcccaatctgggtcatcaatcatagtaaaatgttcccataccgataatgcatctttcatggttcactgtattcatcagcacttttgaagtcaccagtctagagtagtcgcctttggccaagttttcagtagcctgtggtttaggcaataagcctcaactgtctgtctcgaggatatgttcccaaggtggttgtactccatgggccattttcaatcaaatcttgtttgtgaaacttcgcaggaagcagccggtcgtggatcgcagaggctccagcggtctgggcaacctggagggcaagtggctcggcggggcgcgcggggttctagcgagacaggtgcgcgcccgtgcgcgcctgcgtgccggtccctcctgagccccgcggcgggcgcgaccccggacggcggactgcaggcgctccacgccgggttttccccgcatctcctagcacagacagtcccacagcagccccacagacacacacgctcgcgcccgcgcctcctcgtctgcacttcaaagcgagtggcgcccggctgcgcccagcgcgtcacgcgatcgcgtgggtcgacgatatcccgggaattccggacccgtaaccagcctgctttttgacaaagctggttctatagtgtcactatgc

SEQ ID NO: 148949 - DNA, 467 bp, Homo Sapiens
ctggatcacttgaattttattatgcttcagaagctccacacgggagagaaactacggaagtatgaggagggtggtatgtgcttcattcaggcctcaagtcttcaacttcagaatgtccacattggagagaagcctcagtaatgtgtgtaataaagtctttactcagttttcatgactacagtctcacctaagcattcacaaaggggagaaacattaaaatatgaggcacatagaaagcagttccttttgagtttgtatcttgtaatttatcacagaatccatgctgatgatacatttcattcagtcagggtcacagtccacattccccaccaggcgctcagagatatggaatacgttcccggtgtgcactgcggtgtgtgtagtcaaggaccaccgcggagtccaacgcttcccgctgaagagtgagattatagacattttcctttggcattggaggaagcgagtcc

SEQ ID NO: 148950 - DNA, 876 bp, Homo Sapiens
  misc_feature (559)..(591): n is a, c, g, or t
ttgaagatggtgatacaccagaatatgaaatgtgacgatatgctaacatgctatatgttccacatgtatgttggagttcgtgctggaggagggatcggggatgaaatcgaagacccagcaggagatgaatatgagatctatcgaatcatctttgacatcactttcttcttcttgttattgtcattctcttggccataattcagggtctaattcttgatgcttttggagaactaagggaccaactggaccaagtcaaagaagacatggagaccaaatgcttcatcttgtgggataggcaatgattacttcgacacagttccacatggctttgaaacccacactttacaggagcacaacttggctaattacttgttttttctgatgtatcttataaacaaagatgaaacagaacacacaggacaggaatcttatgtctggaagatgtatcaagaaaggtgttgggaatttttcccagcaggggattgcttccggaaacagtatgaagaccagctaaattaaactcagacccaatcacctctaaaaaccaaaaccctacccnnnnnnnnnnnnnnnnnnnnnnnnnnnnnnnnntggaaacattttgctgattttgtgaattgccagcgttgtgtgttttctgggagcatcgaagctctgtttcggaagagctgtttcctcccccatatgctcctgctattattttggtaatgctctgatgcaacattgcaactttatgaaatcttgtatgaaaacaaaaagactgcaaaaaatacacttttcaaaaagaaaccattcattgcatgtttattatgcaagtttaatgaaccaagaaaaaccttcagaaaccagttgatcacggtgagagaatttctgata

SEQ ID NO: 148951 - DNA, 446 bp, Homo Sapiens
tttcaaatgaaatatctttccagagtgaaattttgtgcagaaatgaagcatgaaagtaattttttatttcttacctcatacctgaaggattaatgttagccaacattagctttgtaatcaatgtgctgaccttctagaataaatcataagggtacaaggaaatttaatactctaaattatagatgtgcacttgaccatatttcttccccttacaaaaccataacttctgttctagaaggttctgagtccccaatctactacactcagagggaaacagacatggagggagcccgaggaacagtgaagatgtgctgggaaccgggcagtgggctttttcccaattttctcagcagcactggctcaaaggctccctggcttggatgacagccgtatctgagccgctctgcagccagcagggcagtagtgggcagagtctcatggcaccc

SEQ ID NO: 148952 - DNA, 530 bp, Homo Sapiens
cacagcacactgtacatagaatttatttgtttgcctcatacattaaaaaatcggaatagtgcaattacctacaaataatttcaatcttctcattcgcgagttgcaaagtttaaagagaaactttaaattgctttgggtttacgtttttaaagacacactcagatttactaagagagcatatcagaaaccagatctaaaatgttaaggcataaactttaattatcaggtctacttcttctgcccctctaatgccagttctgcagatcgctcacaccactccaacctacagctaaagaatgaagtaaaacaggtacacactaaatttggcatttaactgctgaaagaagtgttagaattttttagggtgaaaaagttatctgtatcaattatcttacacaattccactccttccttcaagaaaaggaatccaatggcttagctctttcccaacctttaaaatgcatcgcggtccaccccactcccctcaattccttctaggaaaatgtgaaactaacggtttccgtggtggc

SEQ ID NO: 148953 - DNA, 574 bp, Homo Sapiens
  misc_feature (540)..(540): n is a, c, g, or t
tttgtatctagtaaggatttattataacaaatattgaataatttattatttaaatggttagaataaagttcaagggaaatataagcaaactacttctttctctaacaatctgaaatacatgggggtttaaaccttctatatttttgtcaaaatagtaattaaccatagatgacagatgctgctccctagtcaatggagggtctcaaattttactctgcatctcattgggaaggaaatataaatttttaaaatagaattaacttagggaaaggcatcagtgctgcaactcttagcaccaaatgttttttcttggagcaccaaatgctctaaggaaaacattccaagtatcaaagttttcagatagataaatatttatggatcaaatccataaagaacagacattgttatgaaatatatatagatgccttcaaaactttctttctaggcagagtagacacataagttaggagtcatttcccacttaattgtttttgcaaccttatgcaacacgaatggattatgtgcaagacttattcattnttacacagaaagtagatcttgactgacatggtgt

SEQ ID NO: 148954 - DNA, 414 bp, Homo Sapiens
tttttttgactatttgaaaggtattttatttttgatggttataccctcattcaacaaagaaaggatgaaaacatcaacacataggcaggcagctgttgacactcagcacacacaaagactgtcctacaacttgtagtcactctgtaaaaagtatcatagtcaggtacttgttcctaaaattcagtatgattctttccacacactacttttcacagctttgtgcttgactgactctagttactttggttcattcacatagatcttacatgactcaagtctgcaccttgtacagtttctgttgccctcctgcactgcaatctcttgacagttcacgcaactaataactcctctgccaccaaacatcagcttattctgttgaatagtaaaaaattctaaaagatggcaatgtgtcat

SEQ ID NO: 148955 - DNA, 1011 bp, Homo Sapiens
  misc_feature (39)..(39): n is a, c, g, or t
  misc_feature (963)..(963): n is a, c, g, or t
ggccaaaataaaaaaggaaatttttccagatggattaanctgaggtcccactaaccattagggtaggaaccaaagttttaagctaaaaaataaaatctatattttgttgcagataaatgtgagatttacctacagcaattttctattgatgctaaattaaaagcatgaattgacatcgttctaacagaaatggtttgacagatattttcttggctttaaaatgttcttacgcatatgcatagaaatgcaatgaggataagaataatcttctgtattgtctgtacagttcataaggcctttgtcattgttagtcaccttcgatgtgaatatcagtagggccattaaattaaagctggcctaaaaagttttcaaagtgctactgtttccaactgatgaaatcttcagttttctggattttctgggtgacgattattttcaattctttttttctggtgatatatacaagaagttacagcagatatataaagggaagatcagaagcctgctgtccaagttcatcaccacttgttcctgatccttttcaagtgtaagtatttgatagccagttgttctactacatattagttttccactactatcaaaagaagccaaacgtaatctaaatgctatgctccttcgaggctgtaaactgacagatccgctacatggctgattcagtgtattgcgtttgaaaatgatgtatcgattggtgtaagttacaagtaggtcgaagccgaagttaaaacctgtccaacgccagcagtattcaccatctttggcaagctttctaccacacctcatgctgtttccctctagttcttctttattgatttcttgaggccccacctcactgtcctgttctgcccgcagcatagcaaaccactgctgttatacacagaagagagccattctgaagtactacagcatcttgttcataattcttgcagaagcagatcactgatnatatattgtaacctaaatgtctgaatacctgacacaaatgtttttctt

SEQ ID NO: 148956 - DNA, 608 bp, Homo Sapiens
aaactccgtaaggatggcgtcggccgcccggcctgcccctccctgggccccgctgccctgcacctccgccttcagccataggcgctggaggttgtgctgacgctcgaaggtccagaccagggcctcctcgcgactgcgggcaaaggtgcaccggtttcggtggcgccggcagccgagcccagggctgtagtagtggcagacttggtagcacaggggccttgggaaggtgggccggcagcccaccacgcgccagaccttgctcttggtggcctgcttaaagcgggccagcaggatctcgcgggagcagtcatgctccaccctacggaggacgtaggtgctttcattgagccgctgggtgcagcgggagcagcccagacacaggtccaccagggcacacagccgggccagggacggccctctggtggccgcggggctgttgggcagcagggtggaccctggaggcgccacctcgaacaccagcttggctctccagggaggcgtctgaggctcctgagctcacgggtccacgcagtccactggaactgttggccacaggttcgaagccctcctggagctgcctgccctgccgagcctgcccaggagctctc

SEQ ID NO: 148957 - DNA, 537 bp, Homo Sapiens
  misc_feature (467)..(467): n is a, c, g, or t
  misc_feature (503)..(503): n is a, c, g, or t
  misc_feature (518)..(518): n is a, c, g, or t
tttggggtgaacataaacaggtttaccacagtacacaagggactgactacttgggtttttggaacatcatcaatcatggattaggctcttgcttcttctctagctccagctcggcagccgtttgtactgctgcatcgactagcagcaggaagctgctgaagtcggcgtactcctctggagacacaagttctggagaagacggggaagtgatagaaatcttgacctttttctttggctgggctattccggtgagcttctggctaggggccgactccggatctggttgcttctctcttgacatctggccctttggcaagggccacaggggcaggctttgtacattgtctggaccactggccctgacttggccggcacagacgcctcggtgctctgcaggtgggtggcatgggcatctttgcccgttttgtggccaatgatggggtcgtttctacgctgttgaagcatantccggagaatgcgtctgcgagcattgataaaccagntagaaatccgcacanagaccaaatggtctctctg

SEQ ID NO: 148958 - DNA, 571 bp, Homo Sapiens
  misc_feature (62)..(62): n is a, c, g, or t
  misc_feature (505)..(513): n is a, c, g, or t
tgtccccccaaataccaccacttgagttcatcagatttcagtttgaatcagtaacctatcanaatgttttatgctgctggactcaaagtgacccagaagattctcaatttatttccatccaggtacagaggtatctgcatggtaaataccacctccgcacctggcacagcctggcattcttgtaggagcctgggcaaagagccctggaactcaatggagcaaagagagtgaactcctctcccagaggtcatggagaagaaggcaaagcaggcctgtcacattgtccccagcctgccaggtgccactgcagcctcggaaagtttgtctaggccaaggcgctctcctttgctgcttctgcctgcctcttagtgtgggacctcccagggagatgagaaaggagaggaaggactcgtatctgttcagttctcttctcccctgtgcacattcactttacatcccctccctccatgacatcttctcacacaggctctctgctttgtttacnnnnnnnnnctggcaatcagccttgaagagagattttacaatatttggaaatattttataatatatg

SEQ ID NO: 148959 - DNA, 519 bp, Homo Sapiens
tgcggccgcagtgaggagacgttaaaagaattaaaactgtatatgtttagtgggaacacaggagcctttaaattagctcagaggatttacatagatacctgcgataaaatggttcgtataaggttcatataatagttacgtaagactcttgaaaactgtaatgtattatgcaattttaagattgtatcatagctggcgaaaatgaggtcacatcttgccattcttttttcgcctcgaaaaattttatgaggaaaatttcctttcacttcctcatttatttccttttcctgtaacctaaatggtcaagcggctgtgaatgttatcttctatgggcagcaataaatacggtttggtgtcggagtctgcgtagtgaatggctcactggatctggcgcatgcgcatcttttgtagtgccgcaagatggctgccagccattttgtcgcgcgttgctcctccgaggagttgggggcgatggctgcagccccctgaagactaacagtggtctcagtggtgggaatt

SEQ ID NO: 148960 - DNA, 567 bp, Homo Sapiens
ttttaaaataaggatagttttattcattacaaatactatgtcatttacagacagctattatgaatagatctattaagtactaatcacacttattcagtatttaccaaaactatatatagcaagaaaaagaatgtatccttagagcataaagttccctctgatattaaaataaaagcctatttaggtccattatttgcatctgaagggtaaatgcagatacatcagaacacaaaacaaagcacttgatattacagcaccaaaaacaaaaatgtggaaaataacttagcacattcattttaattatacaaatagttaatggtgctctccacataccgactctaagacaggatatcaggaaacagaatggtacttttctagtctgcagaggcaactaacttaaatgaaggattttagtgggttttctctacaaactactaaagatttataggttttgatacttataaagtcatagtctactatagattataaaaacaaggacttttaaaaaattacaaacagtagaaggatcaacaaattagagagtaacagaagtaaatagtacttagt

SEQ ID NO: 148961 - DNA, 434 bp, Homo Sapiens
  misc_feature (419)..(419): n is a, c, g, or t
tttctacgtccaaaatattttaatacactacatattccatttaagagaataacttccttcattttgataatcaatttgaggataaatgaccaaagacttgcgaactataggggggaaaataacgtcaggcatgtcctggctctctacaaatctcttctcagtgttgtattttatgtctccgaatgaaattgcagtagtgcgcctccacttcgcaagccccttaaaatatctccattccagatcccttagattcatgaattgttttctgaacattgaggaagggtggcttctctattgtcctcagctggactggtgtctccagtgaggaacatcgtgctgggattttattctctaattcactgcctgcaaggtgtagtgtaatttgaagtggtcttgggttagtgaaacatatactgcanactctagggcaacca

SEQ ID NO: 148962 - DNA, 369 bp, Homo Sapiens
aaggagacggatggtttattaaggggacttccatgcagggcactccagtggcggggggctgcactggagaaccattcccctttgtaaaaaccatgcagtttttatagcattttcacttagcatcctccccctaatcacctccacctggcaaacttcatttaacccaaaacaaagggccttgatcccctggacagcatgtgttccacaggatgggctaggggctcagatgttcttcatagataaggagtgaatctctaggttggccacttgcagatttggaactccaaacatacattgttttgaggccataaggtcattctcaggggatgcttaagttattgctgtcaggtgcatctgccatacaacctg

SEQ ID NO: 148963 - DNA, 284 bp, Homo Sapiens
ggagacagtctcactctatcacccaggctggagtcaaatgcaaaatctcctacccctacacccattgcagctcaaatcttcgttcagcttatttagccttagctgagctgcttggagtctgacctacgaatatatacatggtccagaagccagccagatatttagacaattatatacagaatttgggctactcctttctccttctctgtctgggatttctactttccagtaggtatttttgccccaaattctatcctctgattataaagggcagtaaaccgttc

SEQ ID NO: 148964 - DNA, 673 bp, Homo Sapiens
  misc_feature (564)..(589): n is a, c, g, or t
taatttatatagttaattctttcaggcagcgtggattatttgctccgtaagagccaatagatttcctgtaattgattcagtccagtccgatgtttctcgcccataagtatgtttattaaaaatgaatatatcttatcttcttcaacgaagcacttttgcagccattacgtctgttcggagctagacagaagttactaaacctggaaaattccttaaggatcacttgcttcaaagggagacacggtggccctgctgttcaaggagcgtcagtgacccagagagtcagtgaccaagaggaaacgcctgtctcctggggacttccaagatactagctacagtctcttatatttacacctttcctccctaaggacagcaggaaaaagaaagttccgtgtttctttttaaatcagggagatgttaatagctacatggctcattttgtctacaccacagaaataacagtggttccagttaatcatgctcatgttgagggggagtgcttatgcaggggccgccagaagaccctctctccttcactaccaccaccaccaccctaagaaatgnnnnnnnnnnnnnnnnnnnnnnnnnnccagaggtcaacaagaagcttccagaggtagtcagcaggggacaagaaagtgtttttataaaaaacgcacatatctttgatgac

SEQ ID NO: 148965 - DNA, 554 bp, Homo Sapiens
gcggccgcgccctcacacagcagcatgcactcgattcgcagctggtagcagggaatggccagcaggaggaggtagaagtggtcggcgctggccagcttggctcgctcctctgtgaatgcccgcaggttttcaatctcgtgcttctcgggaaggagcttaaggagttgtttgagaacctccacatcaaacttggtggtatctccagcccggatcatagcagcgacctcctcgttggagcacttaaattgcttcaggaagatgttgaggttcaggctcttcttggcatcgaggaaagtgatctccttgggctccttcctggcccggggggccaccatggtgggctccttgggcttggctgcagggaaggagaatagtcgctcgatgctggagaagtcgggctccacagcctcggcgtcggggctgctcagggacgcccacatagagttgtgctcacgtgccacgttggatggcagcttctgccagttcagcttcttcatgcgcagtgtgggtgggttcacccgccgatggctggggacccatgctgagcccaagcc

SEQ ID NO: 148966 - DNA, 749 bp, Homo Sapiens
  misc_feature (11)..(11): n is a, c, g, or t
cgatttccacntatgatgcatcatcaccaggcaccctcagatggccagactcctggggctcgtttccagaggtctcaccttgccgaggcatttgcaaaggccaaaggatcaggtggaggtgctggaggaggaggtagtggaagaggtctgatggggcagattattccaatctacggttttgggatttttttatatatactgtacattctatttaaggtaagtagaatcatcctaatcatattacatcaatgaaaatctaatatggcaataaaaatcattgtctacattaaaacttcttatagttcataaaattatttcaaatccatcatctctttaaatcctgcctcctcttcatgaggtacttaggatagccattatttcagtttcacataagaaatgtttactcaatgtttaagtgttttgccccaaaattcacaactaacaaggcagaactaggacttgaacatggatcttttggttcttaatccagtgagtgatacaattcaatgcactcccagtttgtgtcctttaacctcattttctgtggcatttgttcttttacaagtctgtgctcctatgattattagaaaagcccaaaatattccagtatttgttctgtcagatcaaaattgtatcacatctctgggtttggtcattgccatggatgatctggaagttcttcacggaggcctgtgtgacgcgcccatggaagttgagtacataggactgtgtgtcatcattccagacag

SEQ ID NO: 148967 - DNA, 1024 bp, Homo Sapiens
gtttttagttagtatgaacgggaaggcgagggtaccatttacagcgacgggtaaccacgcgggaggagcaggtcaactcccgacagtggaggtgaagatgcgtgcgcctcgcagctatgtccctcgcgcgacgcgtccggccgcccgcggttcggtcgggagcggcagccagtgctccggttccggttccggttccggctggcgtctgcacctgcgaccaccgtgagcagtcatggcgtactccacagtgcagagagtcgctctggcttctgggcttgtcctggctctgtcgctgctgctgcccaaggccttcctgtcccgcgggaagcggcaggagccgccgccgacacctgaaggaaaattgggccgatttccacctatgatgcatcatcaccaggcaccctcagatggccagactcctggggctcgtttccagaggtctcaccttgccgaggcatttgcaaaggccaaaggatcaggtggaggtgctggaggaggaggtagtggaagaggtctgatggggcagattattccaatctacggttttgggatttttttatatatactgtacattctatttaagctatcaaaggggaaaacaactgcagaggatgggaaatgctatactgccatgcctggaaacacccacaggaaaattaccagttttgagcttgctcaactgcaagaaaaactgaaggagacagaagcagccatggaaaaattaatcaacagagtgggacctaatggtgagagagcacagactgtgacttctgaccaagagaaacggttgctacatcagctccgagaaatcaccagggtcatgaacagaaggaaaattcattgacagattttctccagagaaagaagctgaggaggccccttacatggaggactgggaaggttaccctgaagagacttacccaatttatgacctttcagactgtatcaagcgtaggcaagaaacaatcttgggtggattacccctgaccaaaagaactttctgctgaagaatagctgaaggatg

SEQ ID NO: 148968 - DNA, 419 bp, Homo Sapiens
tttctgtccttcaatgggaacttcatgcaacaaaatttcatatgacttagctctgtattcccgagaattgagactggcagtattctttggacgaataacagcaacatatgcatcttctatgttttctggatttcccattgctcatgcaacagaccttcctacatcatgtgaaaaggatgaggcctttttcttctcagaatttctatttagcaattacttttcaccacagattaacaatgacttcaagataataaacgtttacaaattatgagacagacgcattgaagactgggatcactggaaaatatggagggcatttctggttgtcactatgactgatgaggggagatgtacaactgccatttagtgtccatggaacaggtttgctaacatcctcttagtatgctagacagcgtttg

SEQ ID NO: 148969 - DNA, 656 bp, Homo Sapiens
aatcaatttattttcaatcttttatttttactaatagcagtgtttagttataaaatttcctctgatcactgctttatatttatcccatggattctgatatgaagtgtttacatcatcattatttgttttagagatcatgtagttttggtttatatttttcttttaaaccaagagttaattgaaggtttttaaaatttattttttaaatgtataatgggcacataattgtacatatatatgggatacaatgtggtgtttcaatgcatgtacacacagtataatgatcaaataggcgtaattaccatatccaccactataaacatttgttatttctttgtggtgacatttaaaaacctgcttttctagctatcttgaaatacatgctacattattatttgctatagtcaccctactgtggtgaataccaaaatttattcttcctaggtgtaactttatacccattgaccaacatctttcagtgcctctgccttctttctctccctagcccctggtaaccacgattctaccctctacttgtgtgagatcaactttttaaaattccacatatgagtgagatcaactttttaaaattccacatatgagtgagatcatgtggtgtttgtctttctgtgcctggcttatttcatttaacattt

SEQ ID NO: 148970 - DNA, 480 bp, Homo Sapiens
  misc_feature (73)..(86): n is a, c, g, or t
  misc_feature (96)..(99): n is a, c, g, or t
  misc_feature (101)..(243): n is a, c, g, or t
ggaaccccatttggccccttttccttttccttcggggcccgcgcgccccaaaaatgtttttgaaaattttttnnnnnnnnnnnnnncgcaccaaannnntnnnnnnnnnnnnnnnnnnnnnnnnnnnnnnnnnnnnnnnnnnnnnnnnnnnnnnnnnnnnnnnnnnnnnnnnnnnnnnnnnnnnnnnnnnnnnnnnnnnnnnnnnnnnnnnnnnnnnnnnnnnnnnnnnnnnnnnnnnnnnnnaagattttcaaattatttttattaggtaattttataatttcatagcagctgttaggatacacaaacatatatatacaattttctaaacaagtaaataaaagcagtttagtatatctgcctgaattcatattattcaaaatcttaccaaaatatttattataaaaatcagtaaaattgtttaacacatttataaaagttgctgggtatgtatacataaacattttaagcttgctttac

SEQ ID NO: 148971 - DNA, 911 bp, Homo Sapiens
  misc_feature (131)..(139): n is a, c, g, or t
  misc_feature (814)..(814): n is a, c, g, or t
  misc_feature (887)..(887): n is a, c, g, or t
tttcccactggttttcctttaataggtatcatggggtataattaacccactgaaaatatacataccacatacatggttcaaaagtaattatttccaaaagaaacccctcacaattacaaatatttaagtannnnnnnnnctttcaatcacccctttctcctctctaggagcatatgacaaatatattgtttttatatgtgtattctctatgccacttttagttgagctccttcttctttttctggccttgtgtatgtttctatgtttccgtggctaacaaatgtgacccactctctacagcttaagggtgaaactctgtgaattttccaaatctttctgcctcctctttcctagcttgtcaatttcatttcttttttaccactctctccacctgcctagaaattaaccctcagattacagatgatcattctaacctctcagactgagggatcattctcggtatctacaaatataccaataatttctggggtatgaagactgagagcactacatggctagaagctggaacatcagaaatgactctaacataaggtctaaccttaacaccaacgtctaaccacatggcctgggttcaaggacttgttgtaatatttgggaattttccaactgggctccatccatgccaaatagagccaaggcaataccctttatcttaacgtagacagtagcttccctaatgtagtaattattcaggtaagtcttttcttctggtctcaaagcatgcatcagatgtatcagttccttctcaatgcagaatgaacacatgctgaattagcgtttcttcctctccatncttggatcttttcacatagggctttttactaagaagagaggtgatatggttacttactcagcccaatgccatntgagtagtgaaagaagtatggagc

SEQ ID NO: 148972 - DNA, 432 bp, Homo Sapiens
ctttcctctaatttctcctcataagcctaatcaaatgtatttgccttacttcctaccattctgttgaagattctccgaaaattggagaaagcactaaatatggtaggaagattctcttgaagttcctgtgatcttttgaaactgcattcctgagttctatccttacttccttaaagcagcatgcacttttggtttgttgttaatcaggggtctcctgtgcttggtgtgtggggtaggaaggcaggtgatcacctgcaacaattcttcacagattggaagttaaacatgaaaagcccccggagaccccacgaactagatgccagaaagttctgcagtcattgactgttaactgcaattccaactatacggtcagccctccatatccatgggttccatatccgtggattcaaccaacatggattgaaatattcc

SEQ ID NO: 148973 - DNA, 777 bp, Homo Sapiens
agaatatacggctaggtacgaggctgggtgtgtgaattcggcacgaggcctcgcccgcccgtctgctgcctgcccgcccgctcgctcgcccggcccgcgactcatgtccgccgcaaggccggcagcgcgccccgccgagtagagcccgcgcccgccgccaacccagacgacgagatggaaatgcaggacctcgtcatcgaactcaagcccgagccagacgcgcagccccaacaggccccaaggctggggcccttctccccgaaggaggtgtcctcggcggggcggttcggcggcgaaccccaccactcccctggccccatgcccgccggggccgccctcctcgccctcggcccgcggaacccgtggaccctgtggacgccgttgaccccgaactatcccgacctgccagccctggaccgacaaacacccagatctgttgacctgcggccgctgcctgcagaccttcccgttggaggccatcactgccttcatggaccacaagaagctgggctgtcagctcttcagaggccccagccgcggccagggctcagaacgagaggagctgaaggccttgagctgcctgcgctgtggcaaacagttcacagtggcctggaagctgctgcgtcacgcccagtgggaccacggactgtccatctaccagacagaatcagaggccccggaggccccgctcctgggcctggccgaggtggctgcagccgtgtcggcagtggtggggccagcagctgaggccaagagcccccgtgcaagtggcagcgg

SEQ ID NO: 148974 - DNA, 1027 bp, Homo Sapiens
ggaccggtccggaattcccgggatatcgtcgacccacgcgtccgcctggacagggaagagggttctctacagaatatagattttccccttaagagacatctttgcagggccaattcaaaatatgtaaagaaatatattttagagtaaaatgcttttatttctttcagatcccgctatctgtcctgtgatgccatactagagtaaagctggaatttggtgtcttattgttacaaaaagccttaagatctgttttaatgttaatgctgctcaattgttcctgagttccaaagggaggaatgtgtaatgagacatgtctgaccccctcttcccatcatggcctgaattactttagaatgcccttagttgagaggaggggtccattcagacggttttggagcttagaattttgtttttagtttgcattcctgagtgctggtagacccttcagtgttcattagaactttattgttcagacccaagaagagcaaactttttgatgaagtattacaagagaaaagataaacagccttctgaagaagcaagttattttgttgtagcaatgtctactaaagaaaccaactggcttcttcctgttcgcccacctttcctttgtttattgatatttccaccagaggaaggaccaggcaaaagggagaataaattcactttttaagataatgcttctgagttttagcacagcatcccatttcccgggaagctttattgccaaggcaataaggagaccatgtgagtaggagttaaatgcacagccatttgtgaagtgagactgcttgggttcagatcttgattctgccctttattctatgttgtggaatatattacattgtgctgtgcctcttttaccttatttgtaaaatagagcaagcacccaactcaagcagttgttgcaagaactgcctgctatgctgtttaatacagtatgtggcaaatagcaagtgggtagtaaatgttaataatactgtttggattctcattttacatatgagaaactgaggtttaatgaagt

SEQ ID NO: 148975 - DNA, 491 bp, Homo Sapiens
tttgaagatgaaggcgatgtatttagctctgctaaaacatagaattacctattatagtgaagaaaagaaaacagagaaatcaagagatgacattatattgacagatgacactctttggaggaggttgtaatccagaatgtggcatgaaggaaacttcagggaggaaacgagccactctgcccatcagagcctagaaaatctctgagctcagagtctccaggagcaatggaagaacagctaaaaacaagggggattccttcaaagtctgcatacataatatgtacactagtcagccgctatccacttcttttacattggagcccagaggaaagctcgacgtttgccctgaattctttacttccttactcccgtgcctttctcttgaaagtcagtggtgtctgcctggaagccaactaatactttattgttgattaagaaggcaatacccgtagtctgttctttgtcccagggctgtttacagttctagaggc

SEQ ID NO: 148976 - DNA, 383 bp, Homo Sapiens
ttttttttggattggaatagaatacaactttattttcagtcatttctatttccttggttatgaacaaaggtagcaaagtgcagttgtatcagcagtgccaatagaaattacagagtttttcatatccctttacagtttgccacaggtatcttaaaatattgtttacactcatctctcttcagtttaccattgtttaataggcctaccctcgatctttttattcaatatgttaataaagaaacctatacacatagtatcacgttatacattttaaaaatattttgacaactgtatataaatataactagcttactttgtaatcctacatattttatgtgtatgaaaatattattctgaaattagccaggcatggtggtgcatgc

SEQ ID NO: 148977 - DNA, 521 bp, Homo Sapiens
actaaaaagcactgctctagaggcaagagctctagaactctttaattaaagtgaaataaaatgaaaggctctgtttctcagctgcgctagccacattttaggtgcttggtagctaattggagctagcaactggcatattggggagcacagataatggatcatttccatccccacagaaagttttattggactgtgcggctgtagaatccctctccttcattaatgcttcttctgtttctccagccgagagcagaaacattcatactgggagtttgctgagtggattcctttagcctggaagtggcacttgttatctgagctgtaagttgaagcaacatctctgtagcttaggaagggtgacaccactgccccaggaggagaagtctccattgttttctgtacaacgtgaagggctacctgaagatggcaccctctaccgaataaacaggtgaagattgcacatccgcccttttttctgattctttcattaattcctttcttcatcccatctttgatttttc

SEQ ID NO: 148978 - DNA, 437 bp, Homo Sapiens
tttggcgaggagggcagaatttattaggcaaaaggaaagctctccacaaaaagaggggtccttcatgcaggttttacacctcacaaattgaatgccaggccaccacacacgagctgaagaggcacggcttctcccctgcataaggagcaaactcctcgtggctccaccccatgtgtgggcgcttagtctgagccacattgatttatttcccttactgcacatgtgttgagaaatggaatctttcacagtgggcatgttcattcaggcaagccacgtgtgcacaatgacctaggcaagtcagaggctctccaggaacccttctctatttgcctaggcttgtgcctgtcacctttctctttcatagctatctgttttatagattggtctaatatatcttttaccagtactacaagaaagtggcttacatgattatggag

SEQ ID NO: 148979 - DNA, 545 bp, Homo Sapiens
  misc_feature (140)..(149): n is a, c, g, or t
ttttttccctgcatgccttccacatttttccttttccctttattcatttctttgaccagtggatttggtgtaaatcaggatgttcacactctgagtgagtgacactttgattctaatagggaaggaaatataggaattcnnnnnnnnnnaattaaaaaattgggcatgtttagtgggaagtaggtaagaatagctgtcaagagtagaaagagaccaagcagagaaaatcagaaagggccaaggatacaggttgttgggggaggtaaataagtgtgtgagaggtctattcaatttctgtgagaaggaagacgtgaatttaccttgaaatgcccaggaacttaacaggggtctgattaagctacaatgaccactgccacctacctgagggtggggcagggaaaaatcaaactcctaatactgtggcctaaagacatgtacattacgtaggggaaaatactaaccccatctaaaaacaaacctagagtaaaagtcaacatgtttcagtgctatcttcactcattaagcattttttccttctttttgat

SEQ ID NO: 148980 - DNA, 479 bp, Homo Sapiens
  misc_feature (404)..(422): n is a, c, g, or t
tttctagataatgtagaaattctaactttattgatcagttttatatcaatatgtgtgtgaggtaataagtgaaataaataacagagaaaaatgatcacttccagcttctataatactgtctccactatcatgagaatgtctcttctcagacccacttcagctccaaagaactcctcctaaaaagcacaagggccttgtgtacgctgaaatatattcccttttcttcttcacataactgactgatgcaggtaaattcttgtaagttaaatgcgcaaaagacaggattccacttaggtaaaggctgagtagatgatggccttctttattaatttgcaattaactgtcatctcaatttctcttggttaggtgtcaagaaggatatagagtcatgagagatttattcnnnnnnnnnnnnnnnnnnnaagagcaggaagtaactggaagcgtcttgctgaactgagcttgctgcccctcgtgcc

SEQ ID NO: 148981 - DNA, 770 bp, Homo Sapiens
  misc_feature (555)..(637): n is a, c, g, or t
cctcttgggaaagattttaggagaaagccaggcagtccattcagggaattctggaggcagccttcagtgaggagctcacacgttccacccactgtcccctcaaacaatgtcatttcagaaagaaatagtacaactgtgtgaaaatgtggagcagccaacaagcaggggctcttaggcaatcacatagtgaaagtttataagaggatgaagtgatatggtgagcagcggacttcaaaaactgtcaaagaatcaatccagcggttctcaaacggtacacagactattggcatcagcatcacctagaaacttgttagaaatgcaaattctcaagccgcatcccagacttgctgaatcggaatctctgggggttgggacccagcaagggcacttaacaaaccctcgtttctgattaatgctaaatgtaagaatcattgtaaacattagttctatttctatcccaaactaagctatgtgaaataagagaagctactttgtttttaaatgatgttgaatatttgtcgatatttccatcattaaatttttccttagcattgnnnnnnnnnnnnnnnnnnnnnnnnnnnnnnnnnnnnnnnnnnnnnnnnnnnnnnnnnnnnnnnnnnnnnnnnnnnnnnnnnnntcttggggggcgcctcggccctcaaaaaacttttaaaacctttcgtttggcgccggggccccatagggaagggaaccgggccaaaacggtttccaaagaaaaccggggcaggaaaaggggttggattcccccc

SEQ ID NO: 148982 - DNA, 854 bp, Homo Sapiens
  misc_feature (801)..(801): n is a, c, g, or t
  misc_feature (813)..(813): n is a, c, g, or t
  misc_feature (818)..(818): n is a, c, g, or t
gattttgtttgcaatctgtagcagcaattccagcctctccacagccggccgaagtgatttctctcgttccagcatctctatgatgagctttccccactcttcttccacatcattagggtgataaccttgaggcagtttaattcggccaaattcaatccacacctctagtaatttatataattcctcaattcttcctttttctctctccttggccagaatttctgtttctttgaagtgtatatattggttataaagtgcctataaaattaatatttggtgaataaatggacacaaactataggacccaatttttcataccacctcacctagaagccagcagtgataagcttggagacttactccctagaaagattttaccaaaaaaatttaagtccttgactttacctttagttcaacagggttttggggaaaagttttatctgacatcagtattgtatgctgtttgatccagggaatgagggagtccactcggctttggtattcttgccacctggagtccacttccgtagcactgatcccttctccaccctcaggaactttagggaaggcatcataaatcgaagacacataagtgattacagacttttcatctggagatggcacatccacatcttctgcatccagcaggcgagtgacccccagtctttctgccacttcaaaagcttgttccagattctctcggttactttggatttgcaccctctccatgtctactagatcgggtcggtatcggtgaatgagtgcattgaacatcttcccatcactccagcaggagggaanattggtgcattngattnctggtaaccagctgtcaccttctggtccaacaggat

SEQ ID NO: 148983 - DNA, 156 bp, Homo Sapiens
agaacagaagatcatttcttacatcttcattaagtaaaagaataaatagctcatctctcaagttgaaagaaactgggcttggtattacaaaagcaaaattaagatggccatataggttttaggctcattttgccatgcattatgcaaaggacaaag

SEQ ID NO: 148984 - DNA, 564 bp, Homo Sapiens
acaaagttaactgtaataaggatggttatttatattgtttatttatatgtacctttgagatttcaatttttgttaaatgaatatttattaagtcattatgcactagaaaacagagaaaactgaaaacaaaaacctaaattgcgaggatttttcagtactactgtaactatatgcaaactcaaagcagtttttttgtgttcggtggcgctctgaaatcctcttctggataccttgccaagtccagtattgtggaagatggcgttatggtccagatcactgcagagaacatggattcctcgaggcaggcactgctagagacgagggacttcagcatcacctgtgggaaggcagacgcggaggatccccaggagcgcatgcacatccggtgggtggatgatgacaagaacgttagcaagggtgtctaagtcctatagatgggaagtccatggagactataacaaatgtgaagatattccacggatcagaatacaaagcaaatggaaaagtcatcatatggacagaggcgttttttctagaaaacgattcccaggatttcctagaaat

SEQ ID NO: 148985 - DNA, 504 bp, Homo Sapiens
tttaagaggttgtgaacatacatatttatttataatacaaaatgaagattggagggaaaagtgctttaaaaaatagcatgtaagtgtataaatgaaattgttgcttcttctccgatacaattttgattgggtgagcattatttgcttttacaataatgctttattttgttttttgcattgcattgcactaacctgtccattaatacaaacagaaaaagaaggtggaggacgtgcccagccgcgtggtcagcgtgccgaacctcgcctcctatgcaaagaactttctgagtggcgatctgagttccaggattaatgcccctccaataactacatcacccagcttggacccaagccccagctgtggccggacctacaaacccaaccagtctacagatgcaaaaactgccacaaggtttgggggatgttggggacaggggcccttattctatttccctgtagataagaggggaagtaggattctttctagcacctggtaccaaattc

SEQ ID NO: 148986 - DNA, 501 bp, Homo Sapiens
tttagaaccattcattcattcattcatttgatcaacaaaattttagtgccatctgtgctgtgccaggcactatatggggcaatgttctggatggagatgattcagaccagtgtcactcccaagccacttaaggcctggtggggaaggatctcagagtatgtgatgaagggcacattttgtgaaggatgggttcttcaagcccatcttgcaagggttgggaaaaccttcatcagggatgttggggggagtattgtggcaggggggaaagccacaagtaaaatgctgagtttggaaagtacacagaggcatttttggggaatagtaagtggatggccaatgtgtgggtgaggaatgagagttaggaccacagagattggctgggccaccttgtggaacacctcccatgtcaagataaggggtttctgtaggtggcttactgtgtgtctggcatgaggtaggcacttcacatgcatctgttaactgtcctgcaaggttgttatc

SEQ ID NO: 148987 - DNA, 667 bp, Homo Sapiens
  misc_feature (370)..(370): n is a, c, g, or t
  misc_feature (427)..(427): n is a, c, g, or t
  misc_feature (492)..(492): n is a, c, g, or t
ttttctgagcaaagtggctgagtttacttctgcgtgggttccaaggcaacagtgtgatcaacaatgagttcttccctgtctctgtttttggcttgtctgggtgctgaagtccacggcaatacacaataacatgatcatttacggtaagcaggtgcctgagtaaaaaggatgggatctccaagtctcagctgtcagggtttatcctggcccgttttacttcgctattctggtcatccagatggcagaaaccttctgtactgatgtctcttttttcatcctcgatgggttctagagggaaattctggtctgtggccaggacctgtcggacagtcatgttaacacgagcggtcttcaagtagctggcacacancctgccagtcctccatagaacaaggctctaccattgaatctctcgggaggacagcangggagaggtgccctctaggcagtgaggcaggccttcccctttctggttttggaggacacgagggnactgcgtggttcaagaggcggctgaaacccgacattatcatgatgtcaccactgtgcataaacatggccgtgggggcctcatccctttgaagaccacccaggagaaagatggcggactgtccaaagctgaatgacagccaggggtttgggagtgatctagctcagatctgtctac

SEQ ID NO: 148988 - DNA, 282 bp, Homo Sapiens
  misc_feature (45)..(66): n is a, c, g, or t
ggagacggcatctccagcctgggcacagagtgagattccgtctcnnnnnnnnnnnnnnnnnnnnnngtagaaagcaagaaagtgtctctgtacaggtaggcatgaaatgaatccttctcttcctcccctttactcctttaaccccttctcctgcaatgtcttgaagtaaattactgtcattacagaagagcaatgcactgcatccccccaaaacctttctatatgcttttgctaccccgttaacagaagaatatacagaactgtcttaggcgaaagtatgta

SEQ ID NO: 148989 - DNA, 536 bp, Homo Sapiens
  misc_feature (470)..(470): n is a, c, g, or t
  misc_feature (494)..(494): n is a, c, g, or t
  misc_feature (519)..(519): n is a, c, g, or t
ttttgtgtttcataccttttattacaaaaatcaataacttaattcagttctgtataaagtcgataggacttctggtccaataagcagcctaagctttcattctcatcccaagaagggacaggagtcttggcccagaggctgtggggaccaccaaaagcctcccaggcagctggagcactgtgtccaaaccaaggaagtccaatgtggggtgtggctgagtgaagagctgttcctaaggagccaagtgctgtctatacaggcttgccccctccaggagcattgggtcacctctggggatggccaggctgaatcagcactgccagcctctgcccacctgatctctgcctgggctggaacaggtcacctgagcaaaagcatgtccccaagaaggccagcgatgtcaacatctccaatgatagggcgaaagaagaggccccaagcaggctggtcggaatggactttagggtggnagccgtgaggaggacaccggtcangcgggcttgggctgcttgcccctanggttccagactcacaca

SEQ ID NO: 148990 - DNA, 785 bp, Homo Sapiens
  misc_feature (471)..(483): n is a, c, g, or t
ttggcccttgacattcccaccctcctccaggacagccccttgcagcacctcttcccaggcggcctccgattcagttctcaagacccggggccttgtcccctcctttgagaagctgcccctcagtggggggcagctccctggcttttccgggctcctccgcccacaggattcaggcacggctcagccagctctggtttcatccaccctgaggggcctgtctgtgcataggcgccctcactaaatgcaccagaagcctttactggtggttgctttgttaaaatgtgactgtcatcatccaatgtccagtttgcccatctacaaaacaccaaacaggtataagaagagacagaaggcctagcatacccaaaggtttaggccggtgtgcttggtaaatgagtattattattacttctggatggtcgcaaaaatacagtgaactcttctcttcacccttcttgtcagtttcatttnnnnnnnnnnnnncaggtatgaaatgaaccttagagtcatttatgaccatggccccacagcgaggctacgcagcttgggaccaggcccgtaccagagcgcaggagaacacgacacaaagtgttattgaggccaccacctcctgcacgaccagagggaataaagcctgctctggcagggcctcctgggcagggtgtctgccccctcccaaggccgccagcgcgaagcctgcattcttgcacgcgcacccaacgttcacacccagccgggacgtggcactcaccgcctgccggggcctgagccaggactgcagatag

SEQ ID NO: 148991 - DNA, 864 bp, Homo Sapiens
ttttaggtgtctgccatgtgctgagacccttatattgacgggaatcctcactgcaacctgtaaggtatcagaactcgcattctaccactgaggaaactgaggttgagagaagtgaggtgacttactcaaactcactcaacaggaagtggcagagctggtgagtcttatttgcattctctgtcctggaacgtgggtctgcacaaagatcccagcccataggcagagccttctggagccttggctgcccccatatcccagccccttgaaaggcccatgagctgcacagttagtaggatctggctgcgggggggtggttagtagggcatgctcgggcctggttagtgggttagttggttggcagaaggccaggcacctcgtcacacgccacagcgtcccggctgagccctgggttagtaggttaatcacaccatgcaacactgccccggcccctccagctgcagcttcagaggcctcccgcccccaccagccagggagtggggcctgaccagggcagggggtctaactctaagccccccagccccatcaaaatcaaccctaaccacatggaccctgaccaaaagcatgttgcttccctatttattggctgtgggtctcagagcaccccctgcaaatatttcagctcccctgaaaatggaccctacttgtcctagacagaaaccccctgcctggttctggtcagccccttcccagagggctggatcctgttacactctgacagacacacgcacaccagcatctctccgcaaaagatctgacaaccgtgcttagtagacatctcttccatcaccgactgtcaggcctctagtttctccaactattggcctgccctcccaccattagaaa

SEQ ID NO: 148992 - DNA, 794 bp, Homo Sapiens
ggttactggttcctagagatgaaatgattatcttattttcagtaggcaaggtagtttaaatgcagaaattctgcgatatatgaatattgtgacatcaagaacagcttcattggcatattctttgggaaagaggcaagaagaataaaagggctaaaagtattttattttcagcttatgagtgttgttactgcttcaaattgtgtttagtcacctgagccataaatcagttgtagtagggctattgtattttaaatatattttttgttctccaaggagacttatctagtttgccacctccttgcctattgctctgatatggttttccctccttttttatttattgcacaaatatctaacagttaaaaaagaaaaatttcagtaccatatcaattgtctttcatattttgtgttcctcctttccagtgcttttctatgtaagtaaatattctgatgtacttgtaagtaatcactcagagcataatgtaattttgtctttggtgtcttaaaattttgcagccaggcaagagaggttcacagggaaggtaggaacaagtgattattcagtgtgaggatgggaagaagatcaaagataagtaagggcaatgattgtatccttcccgtgtcattgcccctagtccccaagccaccctcctgcaatcatgagtatagtggtgtattgtggaaggcagcatgcccagttttccagtttcaaaatatattatttagcagtgaggcttaactcccagtaaatgaaggggtctgtgagtaggggaacccttcagactggttatatt

SEQ ID NO: 148993 - DNA, 549 bp, Homo Sapiens
tctgtgtcctcaccttctctgcttcaattctggtgctgcttaagccgattatcatttcatgccctaaaccaaaaaataaactctacaaacatcaacattacataggacaggatctggcccacaggtaagaaaagcacctacaagagagctgcatggagctgtgggtgcatttcctgttaccaccagggcatcccagaatgctgacaaagagaaaactaagaccttcccactctgatttgttacatgtcataacaccaagcaagtgacagaggagacaattatggggcccagaggaaggtgcctgtatcatgtagacaaaatccaaagcagcttgtttcagacaaaacattttgctttggaaacttttgaaacttccatggccgttgaatatagcagagatgatctaaaaattttagaagcggttgaggtacccgtggtaggggcaaggcatgggagtggtgatccttaaggggcttgtctttagtttgagggccacacacagaggaggtgggcagaaaactgaggtctccccagagcagctttccagac

SEQ ID NO: 148994 - DNA, 845 bp, Homo Sapiens
  misc_feature (826)..(826): n is a, c, g, or t
cgtggtgagtgatggagggtgcgggcagggcggagaagggggtagggtcggtgtaggctgaaggtggggggtgggggtcgtcgggcccggcagaaggtcaagagcccgtcgtaggtataaggtccccggcgggcagtgcgtgagagagatgaagatgggctgttgcgggtaagacacgtccggtagacctggctcgtagtaggcctaggacggcttgattgcgtgcaatgatcccggggtgcaattgtatccatctcgtcaaatatggagacagagttcgcacaatgcactcacattaccgcggatccacttctgtaactggtcctggtacagttttatcttctgctcatgagggaagtgcagagtcgatacaaacaggtggacaaagttactcttcagaccttttgggtgaagattttcagccacaatttgactgacaaaattcttgcctgtgccagcccagccgtgtaaggaaagggtcagtggtttcttgggatttttgttgttcctgaagccagtcagcgccttgaaaatcacttccgtggctagatgctgtccaaacagcttctcctccaaatccagcttgagagccgaagcgttgagcggccgctcctcgcggcagcactcggcgaagcggcagtagatgtcattgtaggacaggtagccggtgatggccgacgcggccccgatggctaggcccacggtgatgggctcgaacgccgccaccactcgggccgccagcagcagcgccagcgccgccgcgccccggagccacccagcccgcaacatcccgctcctcgcctcgtgccgaattcggcgcgccgtnacttcatctcttctaccat

SEQ ID NO: 148995 - DNA, 737 bp, Homo Sapiens
ttttttttgaggaagtttcccctttattcagatcctttcctggtgaccccgggtgggccataggcccattcactttccttgcaagcccccgcttcctgtggtgatgggaggcctttgtcttggcccacccagagcccggggcagtctgttggggtctctatatattcagcagggactcccatcccttcctgtccccaggcctgtgtctcctcaggactcagagctggttctctggctcaggctccatgtccttccccgtccccagggctgggggctttggggacgctccatcaacccacaggagcagctcccagaggaacctaagaggccacatctgctttgtggtcgatctggcagtaaatgtttgtgtcagagtgtagcaattcctaggagatggagctgtcagagggtccatggccgggggtggaggctgggggctgctgctccctgaagtcactctgatcgctggccctgccagtttttcggaggagcaggaaacacacaagtgcagccaccagaagactcccaaccaggaccccgatcaggatgcctagagtgttgtcatctgattttacagtcagcttgagggggtcgctcctgttggagctgactgggttggagacctcacactgatactccccagcgtcctcctgcctgatggggtctatggtgagcacatggataaaccaagacagcttcatcctcttcgtgaccttgcaacgctgggtgttgaaaat

SEQ ID NO: 148996 - DNA, 717 bp, Homo Sapiens
  misc_feature (357)..(414): n is a, c, g, or t
ttttctctgataagttacatttattttcttgtgcatttggcatttatttgggttgtttcaatttgtgtgtctcagtatatagagtttcgcacattgtcctctgatttctggatcttttatttctgttggcatttctcttattctttagttaaaattactgttttccatttcaataaaagttgtcttgagatctgtcctttgctttggtgtcactgaatatgaaatttagcaggattgtttccactccacaccgagacagcaagtcatttcagcatcagccattctttgtcaactgatttgaatgtttcctctagtcccagccactcaggaggctgtggtgggaggatcgcttgggcnnnnnnnnnnnnnnnnnnnnnnnnnnnnnnnnnnnnnnnnnnnnnnnnnnnnnnnnnntgacagagtgagaccgctgaggaagaagacttgaagccaagaagacttgtaggcccagctacttgggaggctgaggtgggaggaatgcttgagccccagagttcaagtccagcctgggtaccatagcaagtccctgtcttcatcttcactggagctcttcaatgttctaagataatcaggcaactgggagatgagctcaccaagccagcaggatttgggtcagtcttacaggatattcatacatctcagatgtctttcttgatgaattgagaggtgaggccagctgaacttcctgggtcgagt

SEQ ID NO: 148997 - DNA, 215 bp, Homo Sapiens
aacaatgcaaaggaaaatgaatatttattcaatgtccaaattggggaggggtctgtgtgtttaacaggaaaagatacagaaaaaaacctatcacacaggaaaagataaatatgtttgattattttaaaaggtgaaacccataaccaaaatttaaaggcaaattcacacaagtggaaatacagatgcccaactatcgtacaaagagaaccatgatc

SEQ ID NO: 148998 - DNA, 488 bp, Homo Sapiens
ttttttttcgaaagtgatcgatccaaaattaatttcacatgtctgagggtacaagtgtctgaaggaaatgggggaggaaaggagaaaatgagactggcgaagtaagacaaggccatttagagttggggggaaaaaagcagtcatattcaatgtttcttcttttattcatcgagagtattaaagagcctaagataacaaaatttccaagctttaggcttgagaaagggcaaatccaacttgtctctgaagatgagctgaatgcgtcactcaagagtaagatctcatggacctcaccgcgtgcctcgtgtgtaggctgtccacaggtgtcctcgagaagacaggcaaagtgcttccacatgcttactttctggcgaaattccaggcactctcctccctccctctccaccacagactcaggctgctttccctctcggcctcccaacattcaagttccaaatcatgggtaagaaatggagattgagtggaga

SEQ ID NO: 148999 - DNA, 480 bp, Homo Sapiens
agttccactgtagttcctcagttgataaaagactcatttgtttatgttgttagcattgatcaaagttcatatagcaaaataacacagtagtaactgaaagatagttaccatcatgttcactcattcatgaaatcttaccttgccatcttcactgtcttgagtaaatttaaggtgtttgtttaacatctgtaatatgtttaagtttctgactataatgtagtaagatataaagtatatctaattttgaacttctctgcaaaggtaaaggatctctattaaacatccatttgaatcctgttaaatagttttagaacataatctgctaaaagttctgaagctcctttccaatacctgcttctcctgttcagttacttaagatagaatataggcatttaggcattgcacggagtcctttggggaaggtgaggtgctggcagaatttaattatagacagatgcattagtttcctgttcctgctgt

SEQ ID NO: 149000 - DNA, 468 bp, Homo Sapiens
ataattcttaacccaacatatccctactctttgcccgttttccaaattctcctttgtcagactcgtcctggggcctgtgaacgggagcccatttccaggcttgcccagcactagagcgcatcgtcctacgtgcttcctcgtgtgcagggcactcgccttcctcctcctcagatctggtccatgtttgccttcgtgatggactttcatccgtgttctccagtaccgtgctgtgcttcacaaaagccacgtcccctgccccttccgccaggcaccggaaggccccgctgtagtcgtagtatctctccagggggctcttgtcacacaccccttccccagagctgtcacccctgcagaggcgacagagggactcagagtaactggtctctcctgcccccgggacgcagctgcccccaaaatagtcgctgacagctttgagtacatagcagcccatcaccgagaggcggccgc

SEQ ID NO: 149001 - DNA, 400 bp, Homo Sapiens
aattttaaaaattattcagattattaaattcatgttagtcttattgtgatcataacagtaggaactgtacagatgattggtagtggctctcaaatgttaaaatacatcagaataacatgggaaacctgctgaaatgcagtttccagcagacttggttttgtcatagcaattggtatttttaacaagcattccaaggattctgatgcagatcgtatcctgaccacactttgagaaaccattatttagtttctgaatgagctccccattaagaaatgtgaagttttatttaaaaattaataagacaaccctttctgatattaaaatggtctttatcattttatcctatgcatcccaaagagttaaggcagcaggaaatactttgttcccgataatatattcc

SEQ ID NO: 149002 - DNA, 465 bp, Homo Sapiens
tttttcttctgtcttgaacatgagttttttatggcgggaggtagactgaccctttttggacttcaggtggctggagtgagccctgctcccccctggctccttcccagcctgggcatccttgagttccaaggcctcattcagctctcggaacatctcgaagcgctcacgcccacggatctgaagggtgaaatattctccatccagtggtttcttctttggctggggagaggagctggtgttgttgggcagtgctcgcttagtgctccctgggggcagctcgtggtgaggctcccctttcttgcggagattctcttcctctgtgcgccggtctctcccaggacaggcacaaacacgcacctcaaagctgttccgtcccagtagattaccactggagtcttccagtgtgatgatggaaggatgggcctccggttatgccgccctgcaggaactttacacatgtagttg

SEQ ID NO: 149003 - DNA, 457 bp, Homo Sapiens
ggaaaagtccttgttcagaaacagtacgccggtaggtatcagggggtttacacaggagagaaacttttggaagacctttgaaggctatgaatgtggcagggttgctagtggtacattctgccttatcctcagagggaatcatatagaaataaaactatgaaaatgtaactagaacatcttcatcaaaatatgaaagaacacacgaagcaaataagccctgtgaaaaggaatattttagagatttcgatcagaaatctaacatcattatatggcagataatatacaggatgtgtattttaggacaatataccttgaatcactagttgatatgtcaatgactaattaaaaggggttgtcagtgttacacatcattggttaaatttatagcacagtgtacctcttcccccttttttgataagagtcttctattcccaaccaagatcgttatatgattaaa

SEQ ID NO: 149004 - DNA, 486 bp, Homo Sapiens
tttacggggcaaacatttattcagaaacatggtttgcagtgctacctccctggagtacttggccaggaatgaaagccgggtacacactgccgctggcggaggacaggagatggaatcctttgctcaatatagttccagcttttatgaggcagctttagtgggaatgtgtcaacttctcacctgaagcccaggctgaaaagagccctgccctgcaaagccaggcaagtgtcgggccgcaaagaaggggcaagaaagtgggaggcggagagggggtcttggtgaccaaatgacaccctcgggggctttcatctcagcttcaaagggaaagaataaaatgaaaagggggtggggatgggcagcagtactcactgggtctcaagcaggtgggtcactcttgtcctggaccgtaaggccacgggcatggggatgttggtgcctcagacacaccgtgccaatgcttggagcagccctgattccaaaatcacg

SEQ ID NO: 149005 - DNA, 441 bp, Homo Sapiens
tttaaattgaaatccacatttattgatgagagatatatacacaaaagttaaaacacttagtgaaatattggattcacaggttatttccagtatataaagaatatccagttattttacacgtgaaatgttacagtaatcagtccacattgtaagaaagcttagaaagctaaaggcgaaaacaaaagacctcaactacccaaaatgtgcttcatcaacaaggcattttctagtagcatatatgagaaacaattcaaaaattagttgaagattttatctttttgcattcattagtctttaaacactatgtgctatagatgctctgtgctacgtgacttcagaccaatggggattgtgaatgtgaggaatacaattagttttatcttttgttctggacatacaagaattttcaaagagaatcctgcataaagcccagttttattt

SEQ ID NO: 149006 - DNA, 749 bp, Homo Sapiens
  misc_feature (341)..(349): n is a, c, g, or t
taaaagccaggcgtgattagactttatttttaaaaagacattaactgtaatatatatcataaacaactttgtagtgttaaaaaatagaatttcttaaattctactccagtaaatttcccatgagatcttataattacaatgggaaacagttcaacaagagtgcagagtgcagaatgtcaggaacataaccactgtaagacaaagtaccagcatcctgaataaaccttctacaggttagcaatgtttctgccaggactgtggtaggttaaaaagtatgtagtcgtattagggaaaacacagcactggttgtcatcaatttctttattttgagataaacctcnnnnnnnnnaacacttggtagggaaaaaggaattgttttatcccatttacatggaagctaaacaaaaaccaatgtgcagatgagtgtgtgaggtgccaatggatggaagcttcgctagggaccacggtggcctggtggcggcctcaacaccatcaggtggactgtggggctgggggtagggcactgctcaccttgctacagaggttcctgggttaattctttttgtttgtttagagtaaagccaagcattattgctttaattttattaaaaagaactctaataatcaattgagtttgggaacaaatgatctcattcaaaaaaagaagaagaaaaacactacagtcagatattaaaagctatttgaagatttcttaaatttcaagcttaccgtcaatttaaaataactct

SEQ ID NO: 149007 - DNA, 1047 bp, Homo Sapiens
gcgcccctttcaattctggggatgtttcaggctccaacttgggggcttctccagggtcccataaccaagtgttgccttctcctctacccactgacctgcgcccgttccctattgcccctcccccgggggggcctcccgcttcccaaaaaacaggttttttcctcaaccggccggaccccttccccttttccttcccccatccctcccactccgtatctccctcatttcctccacattagcggggcagaccctgatgtgagggatctggacaggggatgaggaagccagcagaggctcttgaccttctcagcatgagggatgccctctgtgccagggccctcaggtcaggagaagtcagtggtcagaagtccagcctggctagggccctctcttagagtctaaagtcagcaggtgggtctggagaacagctaggacctggctcagccctcttgtgtcttggcagggaagatcttcagagtaggtcttgacaatcagggagtggggagctctgtaggcaccgtgatgggtctctatcagaagtccaggcttgtcccaggccactcacacatggatggcattggccacatcggtaaacaccagccggctgggtctctgcagtgggccctgggagggcagagtagtcttgccctgcatggcctgcacagaagtagcagcctgtacagaggcggcgtcccgcccatgctccagcagctcctgctccaactcatcttgttcctccgtggggtcgaagttgtacatgggcatgagctggtggcgtagcttctccagcctcttcttcttcctgatgtacaaaacttaatcctctcccggcgccgagctcagttggagaggctatggggtggtagtgactggcaggaggccggggcggggggaacccccaagcccggcgtctggggctgcgggtccgaccacgagatccgccctccctgcaagccccgagccgctggccaggcccgctactgcgcaccagccgcatccgcgagcgctggctctgccggcctgagctagggtgggtagggccatccc

SEQ ID NO: 149008 - DNA, 473 bp, Homo Sapiens
cccagaagtcagtattttgcaagggtgaaaggagtaggactttctactgcaccttgaatttctctgccagcaaactaatggccactgcagtttttagctctgagcaccctcttctcaagtttctccttgcacttcatttcttttctcccctttttcttttccttggcaaacagttctactctagagccatcttttccgattcctctcctagcgccactcccaaatatcctctggttactaaaccctcaggctcatctcacatatctgaaccagtctcaaaactttagctggctgggactcctcccctcccacctcccactctgtctggggtcaccagggctacctgttatcattaaataagccccctttccattctcaatttgtcaccctggcccaggtcctcaccatatcaccaccactttcccatctgcctcctcttgctggagagctgcctctctcctcctggcggccgc

SEQ ID NO: 149009 - DNA, 806 bp, Homo Sapiens
gtcctgaaattggtcatgtagcttttctgcgaaatagtattgaatctgaatactttcacaaaataatactgaaaggtaaaccctaaatcttgccagactgcattagtattttggcattgaaacttgtgcaatatctgtgtaatgtagaatgtggggtgtgcatgcagatgtctggtactggagtaagctgaaggtatgtgcagtatttaagaaaatgtacattctaattaattcacttataaaaccatttacatattgtgtatatgtttttattttcaaatgataaactctagacatatattttgcaaaatgagcttgggtttaaaaagtgctttgtgccaaaaatatcatacctaatttttatagtgctttactatcagaatttatattgtttattatatcttttaaaagcagtaagcagttttcatctgacagcgtagataaaagaggagtataggaatttgaatgctagagcatctcccaggtgagccttattgcagatctttttgatatagtcacccataagcatggtgagctcctgctctcataaggtcagccaaagccccttaagaaggtacacagcacatctgcagtcatttcaggaggtcctgtgaagtgtggtgatgcatctaacaccttttgctgctcactgagaaccccgctttgtacttacaagattacactaaccctttttaaagggcaccaaaatattattattaatccttaactaaaattacatattttataatgcccttgcaactctaaaccacccttttggtttaacatttttggtatgggatttttaa

SEQ ID NO: 149010 - DNA, 464 bp, Homo Sapiens
tttgaaatgtaaaatgtatttaatctttcataagtctgacaagctctgccatgttcaactgatttgttgtgtatgtaattcactgcctgagtttcaatctggatgtctatattgaacacttcagttttaggatatataccattaaaaggtatgcaaaagatccttttaacttgctgatatagcactcagtaatcagatgctgttcaatttccattatgtcgatggtgttttcaatcctgtgaactttgcaatccatgcgccaatgttggcagaaatactgaactcttattacaaaattttcatatcatttaaagctttagattattgcctttatagtggaacttctgtgaaattgagtcctgagatctgagttttagccttgaggttgctcctgaccttgagacattaatactcaaatcttaaagttttctgggcctccgtgctgggattggtcatagttcagt

SEQ ID NO: 149011 - DNA, 917 bp, Homo Sapiens
ttccctataaatgctgtcccttccacagtaaagaataacctggtaatgatacaaaatgtccatagcccaaagcaagctatgctaaaaaccttcaaaattctctttcccttaggtaaggcacagatcccttgaacaacccttctctttaccttcttaatattcaaagcccaccattcccttgatttggaacattcagtctatattactatcaatgcccttttctttctctccctccactgacccagcatcatccttcagttttacagcgcccctgccatgcctagagggggaaattacctgagcctgagcaggcaggaagcactctctgggtagaggacagggataggcgtgacggggccaggactgatggtcaaaggaaacactggcacaggggcatcccacagctccaagtgcccttcccctgaggaattccacctggcaggagggaggtaactccaacgggggaacagaaaaagatggcccgaccaagtaaggtccaggtctatgagctgcacagctcaggacgccagtgttatctctcacatagaggcttccgttcctgcactcttgttccaagtctgccgataggtctgttagtgtccctaaaagtaacagctgctctcggggcagggggttcccatttggtccagcctcttgggcccaggcctggtatgcactactgctccacgacaggtggctgcagcatgggagacgctggtgagtcttgaggtcctgtactgagacgaagctatagctgaggggcagtgtagaaccttggttccttccctgggacaaccagacagtcttcacactatcgagttaccaatggagtcaactgtacattaggctccttgacagctgtacacagggtctatttggatgaagacctgagcatcctcaagccagcccacgcgtcc

SEQ ID NO: 149012 - DNA, 424 bp, Homo Sapiens
aggataatttaagaatttattttcaaataaaattgtttacaaaggtttgggtgtagggggtattaaaaaagatagcacagtaatatgggctggtaacagcagagtagcagtagaaggcatgaggggaggagggcatggttactgaatttgggaaggagtagagaaggccaccttgaaaggagcagtgactgtgagatgagggatacaaccagcctgatatgaatgacttgactttcttccctccctccctttgatctcctgctgcggtttcccataggcaagtattagtttcctattacatcacaacttatttttttaataattctagaggccagaagtctgaaatgggttttgtggaccaaaatcaaggtagcagcagacttgtattccctctggaggcactaggggaacatctatttccttg

SEQ ID NO: 149013 - DNA, 795 bp, Homo Sapiens
gtccactgagcacagtattctagtgctgcttggtataccgattcaaaatacttgaacctttgtttagggaaagtctttgaaggtagctcttactggcatatcttcactattatgtacacagacacccatatggtatatattagatgagttaaatgaagacaatgtatgtacacattttacagaccttcaaaaatatattgcacttatatacaatgcagctttatcttaacgtgatttcatgactgtaacccatgtgaaaattcttcatgagaaaggcagttgatatgtccgagaaagtcgcaaaggaagatttcagtaccatgccctgtttagtaaacatctggtggagagtgagagggtaagggagagagggctccccccgtactcttcaggtgcgctcccgctaacgtgaggcagtggagttgtactgaattcaggcaagggcacgaaatccttaaagccaagcctatcgccttttctgacttctgctagcgagcaggcccacgacattgtaggcacaaggcagagatcccaatattttgataaataacgtagcagatgtcctaaagcttcccagagactctgttaactcttggaataaagttttcactttaaatcctgtatatatcaggaaattcaaacataatggtatatggatttctctttcatctgaaaaacaccaatgcaatagattaaatgctaccaccaagccagatgcaaccccgcctccaacctgcaaggaacccccggccgtaatggccgaattcccgggcatatgtccggtaccgtcgactg

SEQ ID NO: 149014 - DNA, 554 bp, Homo Sapiens
ttgtattgcgaaagtgagacttttaatgatggccttgcaaggtcgggtgtctagtaggcaggcacacccagcacagtcacaacaagcaatttatcccctagtgtgcaggtccctcccccagttcctcataggctgagtactagggggtcacagtcttcccagatgtcacctattgattgttatgcagaggctgtaggtgttttttttagggttgtcttgctacattttgttgcagcccacaatgcattgcaatcctagtcagctcgggggctctttaagaatttgatttatgacctaagtagctgggaaggctgataagaacagacaaagcaagctattctgcaggctagtaaactttcatctcagactaaacttctttggatcgggtgagggccattaagcggcggggtggcggggaggggacaagaagccggcattgactacgcaagcaggggcctagtttatcctgtttcttctgtagtttgctgtcctaaaccgattcaaggcactttgtcttggaaatggaccaccgtatacattatttccttcacaag

SEQ ID NO: 149015 - DNA, 510 bp, Homo Sapiens
ttttgaatcactctaaaataagttaattttggttggagaaatgtgagctcatttgaataaagattttcagtactttttagtacaggtgttctgatctccaggtgtggagggagggaaagaaacaactggagtttgggaaactctcatttagtccaacctccccacagcagagatgggtacactgagtcccagaagagagaggcattgcccaagcacacacacctcgttataaaagactgagacagggtaaagggctcagggttggggactccggcctttttccactttgccatctcttctttgtgaggccaggatgtgaatgtctctcttggtgtgatcctcacaagcagggggaaatgtgggctcatagatctgctgctgccagggtcctgggggatctgcaggggctggaactgagtgagccttttcatctctaccccacagagccagtcacagaattgatgcttagtgagaacccaaggttattttcattcctttagagagctagca

SEQ ID NO: 149016 - DNA, 482 bp, Homo Sapiens
tgtttttgggaaacaaactgtcatttatggcagaagagtccacagtagcttggataggagtgtggggcaaaagttaggcagcccaaacattgcacgccagccttggcccctggcccgctgcccgccagctcaaacatgctccctggaggaggagggggacagccctttgtaaactcataaagggcagctagctatggccacagttgctctaggaggcagcatgaggcccataaaccccacctctgacagctttacagggcttggtgtgagtatgccagagatgccatgcatagtgccatcagagttcccaagtaccaaccagcaagggtggaagagctcttacacacaaatctgccaggctgtcattttccgaggtggccatcaggtcacccggcttcccagcatctgggttccctgactccctgtgctgctgcctcttctctaagagtgctggattcatgggcaggggggtgggggcagcc

SEQ ID NO: 149017 - DNA, 304 bp, Homo Sapiens
attgctgtgtagcacattaccaaaatcttagcattttaaatcaaataacatttactatctcacagtctttgtgggtcaaaaagtctggacacaacttatcttgctcctctgaaaaggtatcttcaacatgttgactgactagggcagggttctcatctggaaactcaactggaggtaaatccttctgtaagtgcactcaggatgtttgcagaactctccttacagttgaagggctgaggtcccaagttattgctggctgctgtccagagcctgctatcagcttctagaaatctccagcagttta

SEQ ID NO: 149018 - DNA, 869 bp, Homo Sapiens
  misc_feature (20)..(20): n is a, c, g, or t
ttgccttagcctatttaggnacccctatagcacagtttgacaaaaagcaggctgtaccggtccggaatcccggatatgtcgaccacgcgtccggagaatgatgatgatactggaccagtggttagaccgacctgtgttagacgaacctgtgttgcctattatatggcagcaccttccattagcaatagctgaaaaaattcagagaagaatttagaactttcactttatttttgccattcttcaagaagttgctgtatatttcagtctggttataccttcaattgatcaataacttcaattataggaaaggcatcttctataattttaaattactgtaaaaaaaagataccttttaaagccttggattatacttaaaaattgtaatggaagaaatgcatattaagttatatgcagatattaaacatatctgattctgaagataaaactgaagtatttttcagagcaaatggcattatttctccatttttcctagtatgcccctttaatttgtcagtttgctgttagcactgttatatgctgccttagaaagacttttggttgaaggctgaatatgaggggaggggatatttatgactgtgttaatcttttttgatcattagctgaatattcaatatttgatatgtaaccatatagggatgtgttcgatataactatataggcaagggatatattgatttggccacatctatttgatttatggagggcaaatacctgtttcttttagatacagccattgccggggcattctaaaagttttctactaagataaagatgattgtgtatggctgggagcagttgctcatgcctgtaatcttagtactttgggaggactgcggccggaggatcat

SEQ ID NO: 149019 - DNA, 472 bp, Homo Sapiens
aaaaaaagggcaaccagcctctgcttttacaattcccactgtttaggacttaactgttctgaaagtgagtttactcaatctgtaaatagctctctaattgctaggaagtttgtgtgcatgtgttttaactgagctctctgtaactttcatctatggtctttaggtccatactacgctgtaacaaaaggaaaatccatttctcttccatgtgaaaagagctactcttatctttcaaacattcctcaggacctaactactggacacattagcatcctaaaagtctgttgctaatgcacaatttggcttaattaaacaactaaaaatctatgaaattattccagacaatgaatcatttgctaagatttctatatgaaacagtcaatataaatttaaaagatggagggtcggcggactagaaacagcacacattaaaaaacaatatacagagtagactctcaactttcttaagatg

SEQ ID NO: 149020 - DNA, 519 bp, Homo Sapiens
  misc_feature (64)..(73): n is a, c, g, or t
aaactatatacagcagccgctcaaacaccgtttatccggtccagtttcaaataaaacaaaaaannnnnnnnnncttggttgcaaatgccttgatttgcaactgtgagaaacagtgaccagcagtcccccagacacaaatttgctataatgttaaaagctgccaggaaagaaaaaatatcttgttccaaacgacttaaaaactgttttaaggagtgtaaaaaggaaccggtaaaaaccctcgagcgtaaaatatgaaatatgattttggtttaaatgaagagcaaagtctccttattgtttacagtaaaaaacaccagctgaacactcagtttatgccgttcaggtgggggttaaataaatggaaaggcactgtatggcaactgcaagaatgaaaccaatgagacctgcgcatcatcaccatcagtattgcaaggaatgtaaaaaagcgcttttaataaataaacctaggtgtaggcatccgtgtcaatacctcaataccttctggacacgtgtcgacgc

SEQ ID NO: 149021 - DNA, 991 bp, Homo Sapiens
gggatgctttttctggagtcctgtagagaaagtgctctctgccgcattgatagcagcgagagctggaggtgttgggtcgggagaccagccgttcgatcccgccgcaggtaggagctggtttccatcctggcaccacggcacacacctccagcctcgagcccggcgctgctgcccgggggtctccttcaggctctttgacgccgttccagggggcacctatccaggcatcctctgggcctctagccagaggactggctcccggcttcagcactccgggctgcagtaagaagtgcccttatcgctctgagccctgccaccatcccgtgaaccaccgaaaccctggtccagcgcgacagccttggacctgggactggacggatccaaaacgctcagcctcggccccccacagacggggctctgcatcgtctctgatatgtcacccaccatctcccacaaggacagcagccggcaacggcggccagggaatttcagtcactctctggatatgaagagcggtcccctgccgccaggcggttgggatgacagtcatttggactcagcgggccgggaaggggacagagaagctcttctgggggataccggcactggcgacttcttaaaagccccacagagcttccgggccgaactaagcagcattttgctactactctttctttacgtgcttcagggtattcccctgggcttggcgggaagcatcccactcattttgcaaagcaaaaatgttagctatacagaccaagctttcttcagttttgtcttttggcccttcagtctcaaattactctgggccccgttggttgatgcggtctacgttaagaacttcggtcgtcgcaaatcttggcttgtcccgacacagtatatactaggactctttcatgatctatttatccactcaggtggaccgtttgcttgggaataccgatgacagaacacccgacgtgattgctctcactgtggcgttctttttgtt

SEQ ID NO: 149022 - DNA, 700 bp, Homo Sapiens
  misc_feature (90)..(115): n is a, c, g, or t
gttaggagttggaggctgcagtgtactatgttcgcatctgtgaatagccactgcactctagcctggacaatatagtgagaacccatctcnnnnnnnnnnnnnnnnnnnnnnnnnnggcaaagttctagatcctaactggaagagttaggccaagaaggaagaagaggttctgggagctgctggctactcctcatcctcctcactatcgagatacttgtgggtggcgtagcccatcagggcaccaatattacctatgacgacgctgctgccaccagccccgaggctctgcagcgtggccactagccccccggcgggcacgccgcccccattcaggatcgcagaccagctcatcagcgaggcagccaccgagttggccgcgatgccggcgccggtgaagcccagcgcgggcagcccggcgactgcgagtcctcctccgacggccatgaaggtcagggccttccagaacccggagccgctgtccgagctctccgagcactttttcttacctgcctccaccccactgcaagtgaagagcagcaggtagcacaagaaaagcgataccgccttctgccgcatggtggcgccgcgcgcgggctccgtcactagaccttggaggagagaagagaagcaatcttcagcccggagcctgctgatagatgggcacagcagcgagtaaacggttctccggcgtgaaggctgg

SEQ ID NO: 149023 - DNA, 439 bp, Homo Sapiens
gggcctaaaaaacattttatactttcttgctctattggggtgcattactcagtgatacaactggtccctaaaaaaagtgctaatctcattttatttactgacttcaggtttggctagttacaatgcaaaaaagatacatgaaacagttccaatatggaggaatccccacaggtatgaggaacaggaacagtccgtgccgctggtagggctactttcttagagaaatgaaatttccagttgacccgtgtgcccagggcattctccaaaatgattcacattctcattcatattcatgaatcctgctctgtttccactcatttgtatgcacaaattcttccctgagttcacacaggtcagtgctacagaagatgtggtcgatagcaattctacagggtcatgagaaaaagcagcaccttgtccacaaaagtccatggaagtt

SEQ ID NO: 149024 - DNA, 728 bp, Homo Sapiens
tttgtaaatcttccagtgcagttttttgtataagaagagtaataatctacagggtgcatttctgacaaaggtgaccactttgggattttgatggcatcatgagacactttttcaagccaataaagagatgtgtgaaatgttgaagatccaaaattttctccagaagatggtgaagggtaagggtgtggtaaatttaatcccaagtaaataacaaatggttcagtgtaattaattgcttcctttcttaaccagtttactgctttgtctgtattctgccaatccctttccatcactctgactttagtcctgttacggataagattaaccatgggcctgccttcttgtctgagtaagaaagcaacatctcttgtccacgcttccacacgattactaatggagtgatgtcctgaagtatagtccagtttcccaaatttctgtgttcggtagccatgcctctccatgacatccatccatgttgtataatttggatctagacccttaaaattattccaagattctgttaagtgagtgaagaggccactccacattgctgcgcgtgatgggcaacaaattggagagtttgtgtaggcattcagaaaggaagtcccacgtgtcttcataaagttgataaaaggaagtttcactacctgacttcctggatgaaatgttaaccttccatcgaaggagtcgctcacgaccagcaccacattgggcgctttggcggccgc

SEQ ID NO: 149025 - DNA, 434 bp, Homo Sapiens
gttgtgtcatacagaagagaatcatagggcaagaacacaggcctcaaagactggtgagttcacagttctctgcaaaccaatgtctgttcagactaattttgctgtgggtccccaagacaaaaaccagatgaggtgctccttgggtcttgttttatgtcctcagagcttggcttttccatcagtgagaacactctggcctctgccagctgaagggtgcaagtgtcagcctgtgtcagccagccagtcaaataggctggaagcccacgatgcagtgacaagcggcattctctttgtccactcgtgccagctctcaggagagtttggtcccaataactgtcccagtccgtagggctttgttgtctcaaccttcaattggacaatgctaggaaagtccaatcccagtagtgcttgcccggtgtcacagattagcgggt

SEQ ID NO: 149026 - DNA, 836 bp, Homo Sapiens
gaatttttcaaatactcaatttttattggtagtagttatcaagaacaaagtcctcggacttctgatgggaaatctgaactgctgtttctcttttagcgtacaagaagaaatagatccctctcattagcactttaatatcagtgtcacgtgtctggaaggaaattgtattcatttaggtaagcaacacactacataaatatcatagctgttagacccaggggactctcaggtgccagaattggggactcctttaattggaagggagctaaagggtctacctcctacctagaagtcctttctatgtggatatgaattaaattctcttgtctgttttgctctgatggggtctgtgtgggctagctggctctggtgtgtgcctgacgacagactgaactccttaaccatttcagacagcttgaagatgtatgatcattatttgaaaagggagagagggaggactctttgttttctccaccagtttggctcctgaggtttcttcagcgttaggtttctgtagggcccagctttctccagtgtttggctactgcaactctgtgttctgccagtctcttaactcagacagaaacaatgcaaaccagcagacagagcatcaccttgaaagtactaaaacagctgtcaatctagaaatctctgccccgcaaaaactgtcataaatactgcaagacccatgttcagatttccccccttttacaaataatgttttgttttatttcccagctactacaagtgatccaaatgttctttatagcagactttttcctgcagtctaggatccagtcagagatcttgcattaaattatatctctgtaatcttt

SEQ ID NO: 149027 - DNA, 412 bp, Homo Sapiens
  misc_feature (181)..(355): n is a, c, g, or t
tttatggtatttattatgtctttattagtattattttaattggcaaatcatgcttgtacacttatggggtacaatgtgaggattcgatagatgtgtgcaccgtggaatgaggaaatcccgctactcagcatctccaccatctcagagagaccaattccacatgatgtcctggaagtgttgnnnnnnnnnnnnnnnnnnnnnnnnnnnnnnnnnnnnnnnnnnnnnnnnnnnnnnnnnnnnnnnnnnnnnnnnnnnnnnnnnnnnnnnnnnnnnnnnnnnnnnnnnnnnnnnnnnnnnnnnnnnnnnnnnnnnnnnnnnnnnnnnnnnnnnnnnnnnnnnnnnnnnnnnnnnnnnncgttttgcaaaacacctgagagagtccatatcaaatgtctccctgcatttagattgg

SEQ ID NO: 149028 - DNA, 316 bp, Homo Sapiens
gtagaaaaattaaaaatgctgaatcccgcagaaagtttccactccccagaccaaactgtgtgcatagcggggagaagggaccagatggccagtgggttgaaatcagtggaaaaccagctgggatgcatgagagggcatttcctcttccacttccctggaagcctggtcggggcaagtcctggaggtctgagcaggacaagaggtgtcaatgtcatggcctctgtctggctttctggatccttagatgaattgcagttggattggaatttggcacaaaaatctgaggataagctgttagttttctgctttctggaaa

SEQ ID NO: 149029 - DNA, 1507 bp, Homo Sapiens
tcccgggatcgcctgcgggccggcactgctcacctctcgtccagggacatgacgggcacgccaggcgccgttgccacccgggatggcgaggcccccgagcgctccccgccctgcagtcctgagctacgacctcacgggcaaggtgatgcttctgggagacacaggcgtcggcaaaacatgtttcctgatccaattcaaagacggggccttcctgtccggaaccttcatagccaccgtcggcatagacttcaggaacaaggtggtgactgtggatggcgtgagagtgaagctgcagatctgggacaccgctgggcaggaacggttccgaagcgtcacccatgcttattacagagatgctcaggccttgcttctgctgtatgacatcaccaacaaatcttctttcgacaacatcagggcctggctcactgagattcatgagtatgcccagagggacgtggttgatcatgctgctaggcaacaaggcggatatgagcagcgaaagagtgatccgttccgaagacggagagaccttgggcaggtagtacggtgttcccttcctgggagaccagtgccaagacttggcatgaatgtggagttaggcttttcttggcatcgccagggaacttgaataccgggccgggcatcaggcggatgagcccagcttccagattccgagactatgtagaagtcccagaagaagcgctccagcttgctggtccttcatgtgaagtcccagggggcagagaggaggctctggaggcacacaggatgcagccttccccctcccaggcctggcttattccaagaggctgagccaatgtgggagaaagatggaggactcactgcacagccgcttcctagcagggagctatactccaactcctacttgagtttctgcgggtctccccgcattccaccgggaagggtaaaacacttagcttttattttaatagtacataatttaataccaaaaaaggcgcctggatccccaaaaaaccgaggctgggagctagtggcccttttgctttctaggacttgggcggccggccctccctcctaagcataacaaaggtggtgttgctccagctcagccccaggggacacagatgcactttgggggtgagggcaggtaatgactccatcgcaccctcagttcagctggacagaggctcaggtgaccccagccttcactgtctcccgctctccaggagcttatcttcgccccatctcccaaataagtgggcccttgtgctgtgaggaagaccaaagcctcagggaagataagagatatggagatgggagggggaggacaaggggcagagagtagggtctagctggctatctctggccttactaacaaccccctggaggcatgccccttttctccagcacacaagcacattggggcacctggaaatatgggttccaggctcctgttctctggacttcagatcctgggggagccctcccccccctgaatccctggcttagctaccttcctgcctgt

SEQ ID NO: 149030 - DNA, 359 bp, Homo Sapiens
gagtaagcgaccacgcccggccaaccaaacctctatcttagatgttaaagaagacccttattgactacactggccaagaagcaacagagatataaagctgaatcttgtagctaacccctgaaagcaagccaacgcaaattcctccgccaggccagtcttctagggccaatatggagactgtgggccacagaagattcccttctatttcaggttctcaaaaagtggtgtagactcaggcaaatgccaggaaatgtgtccatatgccagaggagacacagagccagacatgaaggctatgggtcctgtcttcagtgaaacactgaacgctctcggaaagctcccatcattcttgcatcgct

SEQ ID NO: 149031 - DNA, 341 bp, Homo Sapiens
tttcaattgtacagatatttattgggtgtcaccatgcaagttaaacaactctttgcaaggcactgtgaagttaaatacaacaggcaaataatgtcctttcaaagggaatgttgttccttagtacagaacaatggccaccagggtttaggcatgctctcctcccacctggaggctcccactgacatctgaattcttctttccacaggttgccttggattcagtgacagccataacacaatcactataacatttggacaaattactctgattatttttttctctatgaatctaaaaattgttttagataaaatttacatgaaatttcccattttaggccaggc

SEQ ID NO: 149032 - DNA, 594 bp, Homo Sapiens
  misc_feature (502)..(503): n is a, c, g, or t
tttttgggccatatatttttattaaatcatagaaaacatttgtatacaaatcttttcactttgggaagactggaatattaaacagctgggtaactaaacagttgaaagatacatttcactttaaatagaaacaagttttaagttgtcacacttattaaaacaaaaaaagctgaaataattggtaacaggttgttggctttttaacctttagaccacagaaataatctctcttataaccctcaactttaagaatgttttttattacttacatcaaccacgaatttaaaagatagttaacttgaattctgaatacaaaatcaatgtccttgtacctacacaggcttttagaatgctgcaaatgctgaattttaggagatggtttcattccacaggactgactgaacttcctttctaccatggaaaatgtatgtaacagtgtggaatatatttccgaataagttaaatattaagacatacaatatggcaataatgtcctactttnnttcctaccaagtaaattcaaaaagtcatcctaatcttatacgtttataaaacggtgaaagactggggatccagtgatacttgaaatacaca

SEQ ID NO: 149033 - DNA, 907 bp, Homo Sapiens
  misc_feature (60)..(60): n is a, c, g, or t
  misc_feature (139)..(139): n is a, c, g, or t
  misc_feature (208)..(208): n is a, c, g, or t
  misc_feature (246)..(246): n is a, c, g, or t
ttgaaagggtggttccagcaaaaaaaatccccgattccttttcccggatagtggagtcgnaagttattgattcttggggaagagacatcactcaactggggtaggactgataggaggtggtggagctttgcgttttttnggagttccacttctttctgagcttattttagagacttggtcatgctgctttggttttgtgggggtcttnaaatcagcatcctgagagattttgataatagaaggctntgaattcctgcattttctgagagtttggaataatgtaaggcattgtatccaagagaatctacaaggtttaggtctgcaccctttttaattaaggcttccacagcgttagagctgccaatctcacaggccagcatgagagcagttcttccacttttgttcctggaattgacatctgctccatgatccaggagaaagtgacagatctcactgtgaccattttgtacagcaagaagcagcggtatattcccatccaaatctttgaggtttatggggctcttgtgttcgcagagaatctgcacagcttgaaggcagccctgagccgctgcataatgtaaagctgttttcccagagctgtcgacactttcggctgggcatttagactgaagcagcttcctgatgcattcatggtggctgttcttggctgcgagatgtaaggcgctgtgtccggtagtatcttgggctttcacatccacaccatgtgtaatcatgaccctgaggcattccacgtgttcttttgcagcatcaagatggaaagcggtcttgccctcactgtcgtgtttggtggcactggtccccttcttgccgagcagtgaggccaccttctccgcatctccattctccacggcctgcagtagccggtcatcattcttgttccactcat

SEQ ID NO: 149034 - DNA, 502 bp, Homo Sapiens
gagaattcatgtctcatctacaattggttgcaatcttgtgaggtaaaacctttgcttatacttgggaacatgtatacccattcaaggtagagctccatatgtgacttggaatttggagagaaaggcactagattaaaatatcttcttacatatttcaacatgggagtggagagggagcacgtgtgaaattcccctatggatactaaggattccagagaacaccccaaaaacccagaaccagcatatctgcaaaccagtgttctcagcttacgcggtcttgccctcactgtcgtgtttggtggcactggcccccttcttgccgagcagtgaggccaccttctccgcatctccattctccacggcctgcagtagccggtcatcattcttgttccactcattggtgtcactcttcctgaacttcgctttcaagctcttcatgtttagtgcattcagccttccaaagctctagaggagacttttcaacaccccatcgaggcggccc

SEQ ID NO: 149035 - DNA, 134 bp, Homo Sapiens
ttttattgtgaaagagagatcacacacactaactttattacagcagtatattgtggcaatcgttctgtttatcattagtaattactgttaatctcttactgtgcctagctttatcataggtatgtatgtatagg

SEQ ID NO: 149036 - DNA, 904 bp, Homo Sapiens
  misc_feature (423)..(423): n is a, c, g, or t
tccttgttttcttgctcctattcttaggatttcctcacaccaggtgcttacaagtttcgtttctgtcgtcatgtggctttaaccatgctaaggtccatatatgtcgctttggatttgaaccctgtatcctcatgtgtgcatgttgtctccgattatcccgattccggacgcgcccttctagcgggttcccgcgttttctggcattccttgacttctggaatgataatctgtgttcttgtctggagtacctggtcggattgtcagtgatgtccgttcactgccacctccacatggaaaccttgcagcggcctgtccacgatcacctccaggtggatgctgcactccgccctccgccggcacagctcctcccggtcgatccgagaattcactgacgttatgccattctgcagatttacctccagnaaggtccccgcggcctttggactccacctggaacaggcgcggcaccagctccgccagctccagccctaggtcctgcgcgatgcggcccacgaaggttccgtgtttggcttcctccgggacggagtagtggagctggccgctccccaccacccacattgcgaggatcagaagcgagagcagtagaggctgaccctctggatctcctcgacttgagtataacatttcaaatactcagtcttcttctaattagtgaaaattgcctccaaattagaagaaatcatctgatttcgtcagtcccattctgctgtgttcgccatcgttcagcacagagagagtgaaaaagaattgagcctctttcccatgggaaaagggctgtatttgtctggattcagagagaacatcgcggcaaagagtgacatcacgtggcccaaagtgtaagtacatatttcatgaataaaaatttcacagttattctgcaaaa

SEQ ID NO: 149037 - DNA, 353 bp, Homo Sapiens
aattacttcagaaatgttttttaatagtaaccatttaaggataaggaattccttctgaaagtagagacaaatgtttggttcacagtggcattttgcagccttcccatagattggattaatgttttcatgtgttcatgttgttaaatgtactaaatggaggaagactgctgagaatccttgtcatgattttaaacttgtagccataaaatatttactgaaatgaaatcttaattcttgttcattcctcctaagattagagggcagtttgtaaaaccattgtgccagtatatgtgtaactaagtcattgttggatttttgcctgagtcaaatgtcaccagctttccctcttcaaa

SEQ ID NO: 149038 - DNA, 617 bp, Homo Sapiens
tttgctgtttttatgccttttatttgcctacatcatttacactcttgagatcatatttggatataatttatgtatctacccaagagggaacataagtggatagagtgaagccttccacaagtacttaactcattgaaatggggccaacttatacctttgccactttaggtgacgttgcagctcacaaacttgtgacactcagttcattcattcattcattcattgaaaaatggcaagtgggaagtagtggtcagacagctgacctgtgtgcctcccaagaacaggtgggggtggccatccccacgagcgaacatctgggacatggctgggaagagctccttacacgggagaggcctgcactatttgaaatgtggtgaggaaaaacggacaaaaatcattttgatgttttacctaagtaattccttgtcggaagagtcttctgaaccaatcttgcttttcttcaccaaacgctctatgtaatgctcttcaaagtttccaccaacatttggaattttaataacaacctacacttttctccatttcagattggccacattgatggagatcctggtcgcaaaggcgcattcccggtgtcatttgtgcactttatcgctgac

SEQ ID NO: 149039 - DNA, 586 bp, Homo Sapiens
  misc_feature (332)..(450): n is a, c, g, or t
gatcctgctaattctctgtttctcttgcttttctcctttatgactaagttttcctcattatgggttaccccacattactgcttacgaagacatctctttagtcagaaaacagtagcttggttcagttctagcttcattgttaagctcataggtaaatctggcaaatggctagaaacagtcacatgtttgcttgtccttaatgctctcaccttttcccagctatttggatgtatatacttttgcttactttgtagtgtaccaacttaatatatgttatagactaaatgtttatgtcctcccaaacttcatattttggaagccagacatggtannnnnnnnnnnnnnnnnnnnnnnnnnnnnnnnnnnnnnnnnnnnnnnnnnnnnnnnnnnnnnnnnnnnnnnnnnnnnnnnnnnnnnnnnnnnnnnnnnnnnnnnnnnnnnnnnnnnnnntttttaattagccaggtgtggtggcatacacctgtagtcccagctactcaggaggcttgcctgagcccagaagtttgagactgcagtgagccatgatattgccagcctgggtgacagagcaagaccttgtctcaag

SEQ ID NO: 149040 - DNA, 544 bp, Homo Sapiens
tttacaattataaagttttatttttgaagaaaattatcatgtgactggcaaattcaagaaaaaaacattagagctgaaaaaaagttattttaatccatcaacctgttccaagaaaagctgctacacatcatcctggctaaatctgtggtaaccctgttttagagacttcttgaaggctactagggggcaaagaggcatggagattcagtctcatggcttttattatgcattccaaataaatagctgttttctgaatgcagttgcccaaatgcctaaaattttctgactggactgattctcactcctgatagatttctaaataccttatagaagtgtcttcaggaaaagacgccaagcaaccctttgaaattcctcaaagctgcacactcatcacctgggaattattcacaacctctcctgcgattgccctgtgggccacaacctctgcctgctgtccctgtcctcgcgaccagctctccctcagggcccccctaaagttactgccccaaagtccagactactccttgggcctccagttaatcct

SEQ ID NO: 149041 - DNA, 443 bp, Homo Sapiens
ggacttgacgttctcatccaggtaggtgacgcccagcgtgtagaggggtgtggcaccacgccatgcaggaactggcccagcatgaagaccagctggtagcgggacaggcccgaggtgctgtccgcacacaccgcgccggggttggcagggcacgtcctgacacccgcgtccaactccacctcatagcggccagccgtgaagtggggcagcgcgaacaccagcgaccccgtgcccataagcagcacgccccagcccagccagcgcggcttgtgccctgagcccccgaagtagctgacgaaggtgaggcagaggcaggcggcaatgtcgtaggagctggcgatgagcccgctctggtagctgtgcaggtcatagcggcgctccagggaggtgatgactgtgttgatgaagccattcacagtcatcccctgcaggaatgcggccgc

SEQ ID NO: 149042 - DNA, 388 bp, Homo Sapiens
ggctagggaagctgaacctgaagggatattcttctccctgccccctaacagttaggacgtgacacatgacccaggctcagccacctggccactattctctgagcttggcatcttcagcaagtgacatgaaaacatagagacaattttagaattattcatagcaacagagacagtaggtatgcaacagcagtggggccctggtggggtttgaggggggtggccctgccattatgagggtggccatgccaggctgtaccttagacacagacttggctgtggttcccgttgccgagcctgcctaggttacagcccattttccatatccgatgctgcagttttcctgtcaactctttgtatcctttcagtaaatttcattttttcttaaatg

SEQ ID NO: 149043 - DNA, 567 bp, Homo Sapiens
tttcatttcaaatttctttttttattctaaataaaaaccacactttgtgctgaacaatggaatataaaagaatcagatgtacaatgattttagacatctactatttggggaaaaaagtttacaaaatatacaaaactttacagcaatagatagtaaacacttaaatattaggaggtcagtacttattaatttaatggaaggagttagacgtcaacaactcttctctgtttcataagagactttagctattcaaggtgggggcggcgagtggattggacaggggaagggttttaaagaaacatcaaaatcgagtttcattttcattctgatgttaagcttatgatgcataaccacattgaaactaatgctgtgcaccctgcctcctgactcatttggtgcaggatttagggaaaagagtcccagattggtgcagaccaccccatagagcccactcccataccaataaatacagtgtctatctagaatttgctttggaagttaagcagtcttgggcttggggaaaggggcacagaaggaggccagaggaagaagaaaattcagcaattc

SEQ ID NO: 149044 - DNA, 499 bp, Homo Sapiens
cagacatgtcgtttgtggagaaggtagcccaggagcagggcggccacccaagttccaagcggccgaggcacctgcgggatcaggccgacttcagtgttctccactacgcgggcaaggtcgactacaaggccaacgagtggctgatgaaaaacatggaccctctgaatgacaacgtcgcaagccttgctccaccagagcacagaccggctgacggcagagatctggaaagacgtggagggcatcgtggggctggaacaggtgagcagcctgggcgacggcccaccaggtggccgcccccgtcggggtatgttccggacagtgggacagctctacaaggagtccctgagccgcctcatggccacactcagcaacaccaaccccagttttgtccggtgcattgtccccaaccacgagaagagggccgggaagctggagccacggctggtgctggaccagcttcgctgcaacggggtcctggagggcatccgaagagttgccg

SEQ ID NO: 149045 - DNA, 609 bp, Homo Sapiens
  misc_feature (143)..(156): n is a, c, g, or t
gagaatggctttgttggattcccctccctggcccacactcactgctacatctctcttccaaatcataaatgcaaaagatggccaaaggtgcatgctctgtgacacgtttcatagtcagacaaaaccggctgactgcttttacnnnnnnnnnnnnnncatttagaagaatttcccttggcaactccgtctctccttagtcaacatcagctaacttcatcctccccctttatcaagacattgtttagagtaaataattcattaactggtacagcaatttcagaaccctttcacatagtttcttagggggaccgtttcccttgaagaatggggtacaccagaggacttaggaagagaagcgcccactggggcttggtcagactctgccaggagacaggcagctgtctgttaactgaccctacccagtaccttctgggattggattaacaaaaggggagttggttaggctggagcattgcaactcatttcttccctgcagtctctctcctgaggtggcccaggtatgtgtttgaggcctgggacttgctgccagcatgagacaagctccagtggggtccatccccctgattcctcagtgccccagcaccacct

SEQ ID NO: 149046 - DNA, 422 bp, Homo Sapiens
taggtgtcctttttttccctttcatttcaccgtctaggaagcgaaatgccttgttctataggcactaaaccaccccccctaccaaacctttctcggggaagcagaaggggaacttgtgccttgtgaggaagcgacaaaggcccctttctggccctggagacttcacgccaatggagcaccagctctctgtcctcgcaatagcccgagtgcaggcagaacgcagtcatttgtgtttatctgagaggagctttgggatataaatagtttcaggccccgctgcgctgtcattccagcccagcctcctgattgagctgcttccgggcgggctttcttcttgttggcggtcccatgctgtgttcagatgggctctgtgacaggtttggatgttttctatcactgaataaaactttccactttggaaa

SEQ ID NO: 149047 - DNA, 495 bp, Homo Sapiens
tttcctggtaagttcttttaatttcttatgacaaaaatttctcacaacacacaaatatttacaacatatacattgttttcagttctttacattgaatctcaaagacaaactttttttataggttaccacagaacaaaagctgtgactcatgtttttatttcataaactattataagttaaagtgaatagatttttttaatattccttgtagcattttacaagtgcaacagaaaacttgaagaaccaaattaagatagctgtagttcattagataaatgttgcttgttgtcatcacgttgttcacagcaaatttttgaaaaaataagcaccaatcattcttgcaaagaacaattttatctaaaaggattgaaaagagttaaatacaaggtttttaatttacatgacaagcaataaatacgctgtatcgaacctcatcccacacactgctaccctcgtacatataatgaactgaaaagtgagctgtcacgtatgtcg

SEQ ID NO: 149048 - DNA, 352 bp, Homo Sapiens
tttccagagaacaagacatgaacaggtttatttacagaaaacaatgaattctcatatatctaacctaaaatatagcagattctttccgaagaagtctaatgtcgacagtaaaattaacaggctaaaaattaagctccatcaaacaagatgaactctgagagaatagatggggcaggccgccatctttcctgttcaggcaacttagtcattccagcctgagggctttggagagtatataccgacaaggggcagaagagatcccacagcacagcatagctgctttaccaaatcatggccagaatggttctgtaagcaggcccccgaccctgtcgcacatcactgtacaggacct

SEQ ID NO: 149049 - DNA, 413 bp, Homo Sapiens
ttttcacctctgatacttttaagtgaaaacatgaattaggcaaactaatcaatttgacaactgttgggatccgggctttctcactgtagtggaaatggcttctttacttgaagtctgctaagatgtcactgaaaatattgaggaacaggtgagcgtggtgatccctgaagaccagcgtgggacggaaacgaatggatttgtcaccacagccacccaacaccacacctttgtttctggcaattaaaatgagcttattccgtatggaatcatcgggagtatcgaaggagcaaaaggtgcctcgtcctctcaccctgctgatgaactgggggtaccgggcctggaggtccagcagtcctgtgagcagggccttcccggcatgggctgcattatttagcaggtcctcccgcttgacc

SEQ ID NO: 149050 - DNA, 398 bp, Homo Sapiens
cagttgatcctcattatttgtggatcctatatttgcaaatttgcttacttgctaaaatgtgtttgtaatctccaaattaatacttgtggagctttcaaggtgattcatggacatacacacagtagtgaaaaatctgtcactccttatgcacgttccaagctaaggtcaaataaggtgaccctgggcctccttgtttcagctctcatacaaagatgacccaaggacagaggcaacagagggcagtgcagggtagtgcaagaagctctggctctaggactaattggacgaggtctgaatcttaactctggcacctgttagtgaagcagcctcaagcaaatcacttaatgcttctgtacttcctttattgttttgtaaataaagaaaattcaatctacaaa

SEQ ID NO: 149051 - DNA, 454 bp, Homo Sapiens
  misc_feature (90)..(202): n is a, c, g, or t
agataccataaataaaaacataatatgcagatcagcagaaaacattttcaaacgtaactagcaatgaattaataaaatatcttatttaannnnnnnnnnnnnnnnnnnnnnnnnnnnnnnnnnnnnnnnnnnnnnnnnnnnnnnnnnnnnnnnnnnnnnnnnnnnnnnnnnnnnnnnnnnnnnnnnnnnnnnnnnnnnnnnngcaatacactttcaaggtagaatgctaacacattctttcataagcattaccaaggctgacatctaatgttagttctgatatatttattatacatggaaaactttaaaaatgttactccagtctgtcattgtatatcccacggtgttactcatcaaattttcatagctgctttaatgacaggaatggttaaaaaggattttgcagtagaagtttaaaattggaaaagtctggccaggtgcagtgcctcatgcg

SEQ ID NO: 149052 - DNA, 665 bp, Homo Sapiens
  misc_feature (541)..(558): n is a, c, g, or t
aatgctcttaagctaggttttgcaatgtgacaagcaaagctgactaaaaactttgtaaagctcataaaaaagactgcagataaaaagcactaatgcttttgctagcgatcacgctttgtaaattaaaaaaatctgcattctgccccccaaacacgcattatttctaatgcagttgtttttaaaccaaccttaataactttactgtaaaatgttttagccttttagaatgattcatgtcaacacttaagacaaagttcatgaaaagtcccagcatttttccaattcttgcagttgccatggtttatcaacaaattttcttcaaatgaagaaaaacattttcatttaaactgtacagttttttcttcaccctaaaaactcatagtcttaaacttctgtgccagtgaaagccggcacagtatttcaattctttcttgatttttgttttcaacaagacgttgacagcttgcctcgagagcctttgacgtccttaaaattaaggcaattaagattcaagataaaccttacctacatatttctaagnnnnnnnnnnnnnnnnnncccactagattaaaacaagaagggaaaaagagaaagtagcttaattattgaggaagacaatttgtttccatttctattgcccacctcttgacatcaggttttctgtg

SEQ ID NO: 149053 - DNA, 1173 bp, Homo Sapiens
  misc_feature (148)..(148): n is a, c, g, or t
  misc_feature (235)..(235): n is a, c, g, or t
  misc_feature (270)..(270): n is a, c, g, or t
gaattgtgggtaggaaggtgccgacctgtagggtatgcgcaaattatagtgggtcgcggaacggcgggtggggttcgaagggtatatgtgtggggtgggagcaatggtatgggccgaacggtgtgtatgatggcgaagggagagggcngcgttgggaggtggggatgaattgcgggcggttgagggagccgaggagacattatagcgcagggtcgcgagatgcgtggcgcattgnaccggcttgtttggagttgaatacatgctcgttancgaaataattttttgttgggagggtggtgtgtgtttgtgggaggggtgttagaggttgtcatgtttgggagagcgcccgagtataagtgggagaggccgcgcgtgagtgtagataggagggttaaggcccgggtgtgggggggatggttctcacgtcgtgaatgaagggcaaatggccactaacggccccaggctttggccgttgatgagctcctggacatggccgggtgccaacccctatggtcatcgttactggaattcctttttgcaccagctccaaaatttctcttccttttggatagctaatcataatgaccactatatttcctgttgccgcgtgagacatgggcaaggtgatgttcccgtagcgctcctcattgtagaggaggacggccgaggcgttcctccgcgccgccaccagcaccttgtccttgaaggtgcagcccccacgagccaccagggcgacccagggcgcggcccctcggccgccgggctcgggcacgaagaagcgcgtgtcgggcgcgcagccctcgaggtctccgccgggcgcccacgggacgcccaccaggccatgcgcgccctccttgggcgagctgtcgccgaagcggccactctccgagacgctccacaccgtcaggttggtctgcgggtccacgtactcgatgtttaccacggccgagaaccactcgagagcccggccccgggccccgggcacgcacagggccagggcgagcaacgccagagccaacacgccgcgagccccgacgctggcttcgcgccgccgccacgccatggcagcaccgctgagctgactagggggagtcagggtcacgcgcgagtgcggtgcagtcgaagagcagagagaagcggacaccggacgcgtggtcgacgatatccggagaa

SEQ ID NO: 149054 - DNA, 685 bp, Homo Sapiens
  misc_feature (144)..(194): n is a, c, g, or t
gaccttccctgtctgcagcccagctttggactgtggagatgccctcaagcctctactcagttggctccagcctcatattgcgtgctatacctttaacctcaagttctcttgctgctaacttaagctgtgactgtccaggacctnnnnnnnnnnnnnnnnnnnnnnnnnnnnnnnnnnnnnnnnnnnnnnnnnnngaaggtgaacacacaggatgaggccctgaaaactcatttcaccgcgtgtacctcacccgaaaaattcccctttgtactcctatctttatctcataactgacagcatgaaggtagcccgaagtcccctcaccctgtcgtgtcctcctgattctctagcccagttccctctggctccagcacagactcttatctccagccctgactgctgaaacgctccagccccagctccagcccctcaggaggggactgcgtgggaggaatgactccagcaagccggcagctgacccgtctcttgcctgcatgcctcccgctgtggtccactgccggtggtcttcagctctctcctcgtcccacccccatggtctgctgacagcccagctcagtgcatccctgccatctctgctctaccgctggtcctccctacaaccaacttacaggtttgggggcacacgtgaaggtttgacatatagtaaacacatgtcatggtgaaa

SEQ ID NO: 149055 - DNA, 349 bp, Homo Sapiens
tttttattgaaacaaataaggtagtttatttgttggaacaccaggcaatgtcctgtaataaactgactcctaactacagtggcttaaataagataaaaaatcatttctttcagatgtagagcccccagttaggtggttggacaagtatgggtagattttcccactcgacaaggttatgcaagggtccaggcttctgcagtgactctgctatcctcaaaatgtggctcacatttctggattcatgaagagctggctctactgtcgccatttacgcatttctatggaggtgggaagtgaggagagagaaaatttacagtgagcaaccaagtagttgtgtgacattaagcta

SEQ ID NO: 149056 - DNA, 570 bp, Homo Sapiens
ttttaaaaaaaagcacaaaatcagttaatcacaactaataaaaattacatttggtcaagaactaaaaagtcaattgcaaaaatgagaatagctatgttacgctgataaattatgagtgattctttcatatcttttatgttgttgccaataaagaaattttttttaaaagaactaccctttataggggttgtcctactgatttctttgccataatttggctgcattcaatctgtccttttcagataaggactacaattaaccagttcctgttaatgtcttcaaactttcctttttgctgctaaataatggtcccattccccatacatgcataccctctaccccatccttccccccgccataacatttacattttacccaactctagagcactggccaagctaatgcctctacttcttagcagtctctttctcgcagagcacttcctaagcttatgggttctctcctcaccaaggagttaatgaccagactcaaggactaggtaagtcgtaagataaccatataaagagggagaagtctgtgtctgtttttatgagatctctggaatggtat

SEQ ID NO: 149057 - DNA, 1021 bp, Homo Sapiens
agggcaggtccagcagggagtgttcggcgtagagcttctgggagacgttgtagacacgctggatgaaggggagggcctcgcctagcatctgcacggcctgctccgggggccccacgttcatggcctccaggaagacctcgcgtgtgggcagcgtgcagaaggccacggtgacggcacggcgcacgacccaggggtggtaggcggccagcgaggcgttgtaggagtcggcgcagagcgcggaggtgcgtgcgtccttcggggctggtaggcaggcccttccaggaacagctgcagccagtgcagggcgcggtgcaggcgcagcaccgtccggcagccagactccgggtggtgggagcggcgctccaggtccaccagccggttgctcagctcgtgggccaccatggcctgcaggctgcggtagtgctcgctctgcgggccgcccctgaggcgctccatgatccgcagcttggagaccacgtccttggagatgaatgagaagatggtgcccaggctgttcagaaacctgaccaggcccttccagctggcaatgtaggggtccagcaagacctcttccttctcatcgagacactgcttgaaactgaccaggacgactttcagattgaaacctgtctccgagtcatccattttttgataggaacggaaatacagtagggctggggggctgtgtcgctggggtcagcttgctctgtggctcattttctgggaagggggcttcagatggcaccggactggatgggcaccggttcgggtccctgctccaccgagaggcccaggaaggggcggaggcccggggtggtgttggggaggggccgacctgagccacggctccgtcctgcgcgggagccgggtccgtcggccgcccgcccgctccggccctctaggacgacgtcccctcccgctcccggcccctcggcgacttccggaccgtgcgggttgggttgggcaggtgcggccgccgagtccctcgtgcggaattcgccacccaggcctcgctaccttg

SEQ ID NO: 149058 - DNA, 451 bp, Homo Sapiens
gatccaaattacattccagtgactgttttaattccataagtttctttaattgttccttttcatcttcagacaaatttgcatttaacaggtttttctgaagctcctcaattttgtccatttgctttttgattgtaacttttaacttggcattatctttttcaagcctgaaatgtatattttaaaataattattctcacagataaatttttaaaatactgtgtaatttcttagcaaacacctgaaggcataattacataaattcttaaagatttcaaaagtaggtgatttggcaactctatcgtttttctagttgtggtttgtggataatgcacaaaattctaggataatatagaaaaatccgcatttcaagattgcttaatgctgaaatttttccttgacttcacacagatgtacttatgatcatagctgatataattctcatactacactg

SEQ ID NO: 149059 - DNA, 919 bp, Homo Sapiens
actcaagggggtggggacctttggttttgggggtcctgcgctcttttttcccccattcttgaaataagccaaatttcctaaggaggtttacctttcccttttccagttttttcgggatctcacatcaaccaacgggtatcttcaattctgacttcttttgacttcttcccttgcttgcccaagacttttccatatttttctcttaaattagcttttcttgactcttcatgttagaaatatctacaatcgtgtgtcgcatctcttcaatagggtgagcccctgccagaatgggctttctcatagattgcaataatattttcaataggactgtgatgggtcaataagtgcaagacatatccaatacttaacaagctttttggcatctggaatatttttaatcaggtcattcagtgtgaccagtatatcttcttttggacatccctcattaatcaagttcaggcattcagaaaatgtgttgtttactttttcagtaaataatctttgttcatcttcttctgccatggtagtccaaaaagacccaactggtttttcattttgtcctgcaggctcatgctgagtaactactgaattagggggcctttttagcactcttcctttgccagctttccactcactcagacgagcttttctctcttccgaggtttctttgggctgagctgatctactatcaacaattgcttttcctgcagtatgtcttcgctggtcaacgggctctgacttttccatcagtttatcattagacaatgaagcaggcctggctacaacttcagatgctatggatcttgatagagtcttatttcttattataccttgataagaactggttttgacactagataaagctgtttttgattgtaatagttctttttcatgaggccctttccggattgtaacatcc

SEQ ID NO: 149060 - DNA, 219 bp, Homo Sapiens
agttttgtggtctggtaaattttgggtccatggttacacggctgatttaaatcatatccccactctggaaataccttgataacttgagagttaactggagtaaccactaacaccactgaattttcaaagctcggacagaaaagtcagctgaagtggttaatcatggtgttacaactagacatttagtcctgcttcaattcttgcagagctgaatcaact

SEQ ID NO: 149061 - DNA, 1080 bp, Homo Sapiens
ttttccgctcagatattttatttgtgtttgtcttttttttgaggctcttgggctgctggcgaacctgggccgcatgcttctgccgcaactcttgctcacgccgcttgttgtactccagctggttgcccagctccgtctggtgctgcaggcgggtgagctcagcccgcgtgcgctgcagggcctgggagctgccgcagctccagctcccgcgtggcctcgtgctgccgaagcagcagtgcacactccaagtccttctgggtctgcttcttgttcaggtcctcccgcagcaggtcctggtccaggctgtgcggagccagcaacatcttgcgcttgtactggcgacactgcagctcaaagtactggcgctgccgccgcagcagccctgcttcctcctccgcctggcactgctggagctgctccttctgccgcagcagccactcggccttctcccgcttgggagtgctggggttctcctggagctcctccttcagctgttccttgcgaagtttgtaggtccgcttctgtgcctccagcagggcagccagctccttcttctgctgcccaaggatgtgctgctggaacttccgctcctcggcctgggcagctcgtgcctccttctcacctatggcctggtgccgccgggccagcttttctgcctctgccccaaagccagcccgctgcgcctcaagctcccgctgcagccgtgcactgtgctcctcccgttcacccctcagccgtgactccagggccagcagctgcttctggtgctgtcgtcgcatccgcttatagccgctcagctgctcccgcagcgcagagtcctgctcatgctcctggatctgacggctgaccagggaggcggttcggatggtggcaaagtggtctcggttacggcagtaggcccggcggcgggcggaagaggtggtggaagtgggagctggggctgcaggcggctggagagggctgggggttatctctggctggtaggggtcatcatataggttgtcagagcccggcagccggtggataatggagctgtgagaggcctcgtgccgaattcggcgcgccgtcgacttcatactc

SEQ ID NO: 149062 - DNA, 1193 bp, Homo Sapiens
aaaagattggtaaaaggggctcctgggtttttcccccccctgtccaattaaagctctccgggaaatatttagggggtcggtggccaaccaaattatgggctttggtcaaaattccccaagacctttaagggggtttcccagattcccactagctttcgctttcccccagcgggtctcccaatagtccttgcaaggggttaaatcatgatggtgatattctaatgcttgggcataatcatgcaaatagaaataagcattgcccaactggctgtaaatagcgctaagtgtttttaggtcttcagttccaacttgaactgcagcttccaaagaatgacacgccagcgcggcagtctcctgatttacatagacgttccccttccaaggccagctctaggcaagaagcttccattctgtaacgaacatgaaaagaatggtcttctctcatgcttatcaaattttcctccatcgagtcatattataagctgaataaaataaaattattttattttgtgccaatccagtcctttacaatgtagaattgtttgtagaacattgtccggttagtatattaatgagttggtgttaatacatcctaagctcctgattcttctttattaataatgaaaggaggtcaatgtcagacagcttaaaggttcaaaatgtatcccaaatccttgcatctctggccctttcagcagcacttcagcaacatttctcccgcgggcgggcgggtcccgggtacgcggtgaaggtgcagcggcggccgcctcgggcgacagacgggtggtcacggcccctccccaaggcaggggcaccgcaggaggccggcgcgccccctgctcccgcccccggcaggtcacgtgggccagagctcgtagcgcccctcgctttcccggagcgtccctccgccacctaggggtcccgccgctccgccggtctcaacaccgccctcctctgcgcctgcgccccggctccaggcgctctcattcaaaccgacaacgccccgcgtctttcggaccggccaatggcgggcggcgcagcggggacggggcggggcgctggttgcccccctcttcgcagtcctggggaaccgtctgcgtgtcaaggtgacagggggcttgggagcttggtcctcctctgctccgggacgtgtcctcaaccctcagactgaagtttctttcctgtcctcttct

SEQ ID NO: 149063 - DNA, 1011 bp, Homo Sapiens
gatcctccagcaagtagattgatattttctcctggtaacaattctaactgctcggtacattcaacaaattttccagactcaaagctgcttaatgattttatatagttgaagtcagctttcaggttgagggaagtgctactggtactctttttcaagtcatggatagcgttctgccattcctgcacagcagcccaatcggcaattgagatgtagcactcacatgctttatttcttaaataatttataacttcaggggaagagtcagtcggtttggacagcacagtttttctggattcacccattcagacaatgtttcgggctggcactgttacacccagcattggctaaggtgagcaccgatttgtcaaagctggagatgcagcaatcaacacctgtcatggcacacaggtgttcctggtactccacagaggccttttcaaacctcccttcagcctgttgagccactgagttaatccacagaagattttttccaacaatagatgatgaccagacagcaattccctgtatagcttcaggacaatgaagttcacatagtgcttctaccaccatcataatggttacttccaattcattcccctgagataggctggttgttttcatctctgtaagcaagtcaaagccatgtctcactgtcactgcaggctggcctgccaacaatcctaccctcatgatggagagtcgaatccgcgttagccagtcctgacaagtttggcgattggtatagaaaaaagttctaatgaccttgggaggtgaagttaaggcattagcacatccctcgtatgcattatacattaatttctccagattttccagatactgcagaagaagaacaagtctaagttggttgttaccatggccttcatcactgtctgcagttgtccactgactaacatcctgatcagggtttaatgtgtgacctgcgagacttcgaatgataccttcaattgtctggaaggtgtcttgagctctgcccagtggggttctcagccc

SEQ ID NO: 149064 - DNA, 560 bp, Homo Sapiens
aggtttgaaaaggcctctgtggagtaccaggaacacctgtgtgccatgacaggtgttgattgctgcatctccagctttgacaaatcggtgctcaccttagccagtgctgggtgtaagagtgccagcctgaaacattgtctgaatggtgagcgttcagcatttttaaataaagcaaaagttatagtaatatatttcgtactgatgatcttatcatgtttttaggtttctgtgctctttgaaatatttctaattgatctgaatctctctcttcttattttataaaatactttcaggtgaatccagaaaaagtgtgctgtccaaaccgactgactcttcccctgaggttataaattatttaggaaataaagcatgtgtgagtgctacatctcaattgccgattgggctgctgtgcaggaatggcagaatgctatccatgacttgaaaaagagtaccagtagcacttccctcaacctgaaaggctgacttcaactatataaagtaaggctttctgtttccagttataaaacaaatttccaataactatgatgtttttcctatgg

SEQ ID NO: 149065 - DNA, 455 bp, Homo Sapiens
atggttgcgctcttatatttagttcagaattcagaacctctgcttccctcctgagagccatctctgactgtgccaactcaaaacaactgccccctatttacccacatccctggaccttccctcaggggagtgtctgagtgggcatagggtctgtgcccccagctccctgccctcacccttgcctttctccccaccctcctagaagtgagtgagtgtggaactgcagggccctgaacggcccagggcagggcattgctttgcctgacttgctgggggccttgggacagccccttgcagagcagggagacttggctgggagatctccaactttccttcccgccctcgcttttggggagtcccatgacttgctgtgtgaccttcagggcgggaggaagggttgagaatctgggtgaggctctcaaggctcaggaaggaaagtacgatcgctgcttaaa

SEQ ID NO: 149066 - DNA, 1401 bp, Homo Sapiens
  misc_feature (140)..(160): n is a, c, g, or t
  misc_feature (163)..(163): n is a, c, g, or t
  misc_feature (206)..(206): n is a, c, g, or t
gggtgtggggggtgtccccccggtggcttaagaaaacccaccttagccatcattaggtgccaaacagccactttaattgggaatctgagtctaccagtttcacatagggaggtggaagccgtggggagaagccaggggtnnnnnnnnnnnnnnnnnnnnnacnttcacccccttaagggacagtgcttccaaacctaacaaaaccnccaggggtaagtcctcgtgctgggcctcgagccagcaactctagtcaaatcccaaggcaccggtcagcatgtgggtcaaggggcccactatggggacatacactcaagaggatgaaagctctttagcttcagaatcagattgccttccccagaccccaccccaaaacaggctcctctcccatctcccccttcacagtgacaaaacacaagcccacatcccagggcctggagtatttgcatgcatttgcatagacggcaacgcaggtccagctaaggcctttttctacataaagtgacatcagtgcagggctggtgattttgctctactgtgtgaaagatatctgaggacaccaaacaagccaggacagagtccaccctccaggagttagataacgctgggatcttgggctggtccaggccaaggccattccctgtgggtcagggtgttcagccccggtgttggtgttggtggctatggctgtgcccctccctgggccccgcagctcttgggctctgtgagtgcttgtccttcttccctgacctcttcttcagtgctttgtctccaaagaagtggctgaagatgaagtcctcaaagtcatctacttcatcatcatcacctgtctgttgcacagccacctcctccaagctgtcctccagggcatccacaaaatcccggaagcggaggcggtcatgacggaagatgccatcctcaccaaagaaagcaggtgagaggggtagctccttggtcagctgcccagcccagggcagccgtgccaagtatgttcttagcagagaggccagctcctgttgccgcactggggctagctctgtgccaaagaaagtcaggccctcctgccgggcacactcgtccacacctgagcagccctggggtgcccggtacttgggcctcaacagctctgcccaggatggcagggggtcatggctgtccttagtcccttccctccaccgaggttgcttctgcttttctccagaggagtggaagctaccacttttccttgggggttccttcgggccctgtcgcttgccctccttcttgctccccgactcctccacccttggcctgccctccttccaccttcctgctggctccctgtcctcctgacctccccagttcttcttcctttcccggccgtaatggccgaattcccgggcatatgtccggtaccgtcgactg

SEQ ID NO: 149067 - DNA, 236 bp, Homo Sapiens
ataagccactgagcccagccctagttcagtatcttttatgtaaattacaaacatctgcaacattatgtatcatatgcagatacttattgcatttcttttattagtggtgaaagtgttctatgcatttattggctcttgaatttcctcatctatgaattgtcattcatacacctacttttctgcttcgtttttacatatgtctttgcctattaaagatattatccctctgttttaaa

SEQ ID NO: 149068 - DNA, 566 bp, Homo Sapiens
ccaaaaacatacttcatatttcctcttttattatataaatatcagtttaaccttttactgtaagaatataaacgttttaagaggatctttgttattatttatacaaattcacaaacagtacaattaattgataaaggtctctgggtttctttaactccatggtcttgcatgttgctgtggagggttctaaagaaataacaacaaaaatccaacgaaaatatacatcctactcagaagtgatttctttaaagccacaagtcccaacccccaccaaaagaaagaaagtcatctattcctccatttagaaacggaattttttaaaacccacaaactcccattttgttaatagaacagagataagatatgagcttcatcacagccccaggggctctgcaggccagctctgctcctgtttcccacaggaagccgcactgtgtgacctttttggggggaaacttggaagagggtgagggtagggcagaatttgcatatataatcatcattttcaagacacagtctgcatctccaacaaaaacaacggttcaactctcattgctcccacatcc

SEQ ID NO: 149069 - DNA, 727 bp, Homo Sapiens
tttgtatttttagtagagacggggtttctgtgttagccaggacggtctggatctcctgatttcatgatccgcccgcctcggcctccctacctcttcctttacttaataagaatgcggtctaaattttcaggtgccaagcccccaaactcctcttctagccttctgaattgtgtaataaaaccaggaaacaggtgatccagctgtgcgaaaacagacctcaaatgtatttccagactaaaaagccagacttgcagtgaaatcctatgttccaagtcatcagatcagtttaaggactagaagactagaatgactgactggttctctgaccaggaagaacaggggtggagtttgggagagccttcttgacccaggaggctttggagggtagttaacattagaagtcaaaaggcacttctagcccagctgcctaagtagaggacaaagactttctcctttcaaaggagaactgagcccaggattggtaagtttaaggcacttaaccttgaccagctctgtaggtctggagcattctggtccctggccgctttcaccaccaggccctgctcacttatccacctcacttactgccccagcattcctttggcattgcgagctgtgacttgacacattttaatgacaagattgaagtagctaccttgcaggatagattttctggggtataggggacaaaccaacagtgccatcaggtgtcttaacacccggatgt

SEQ ID NO: 149070 - DNA, 681 bp, Homo Sapiens
  misc_feature (458)..(467): n is a, c, g, or t
tataccaaagtgttggataacaaaggctagaaaattcagataatttataaaggttaactatacttgtgcttataaatgtgcagattctacaatatttttccatgtcattctaaaagaatcttcagaaagaaaaacttgaagaatactaatgtcttgggaaacatgagattaagtttagggaaaacacttgatagatgtggagaatctgaggactcagaattcagcaactaatcacaggtggttttctaatttggcctctggacatgtctcactgtttgtatttctctctcctgtcaaagtgaatgatatattcttgaaaacccccaatttcttgaaatgggtgttctgttcattcatgggcaggggtcaggattgaagttcatatatgaaacaactggggatgtagataggaaagaatgtctgctgcaagagtgtatgaagggggattgtcatttacnnnnnnnnnngtacctcatggatggaaggattcatgaatagataatggacataggaaaggaggtcaatggaggacacataacagacatgctatcccccatttatttgtgattttgtaagagggttctcttctttgtcttgttcagatattttcatgtgtgtgttttagtgagaatctgagtttttaatcagtaaagtctgatgttttgataacttgaaaaaaaa

SEQ ID NO: 149071 - DNA, 556 bp, Homo Sapiens
ttgctttctcggtcagataatttcagaaactccctccctgtgcacctgtgggcattcccacttccacacaccaacaagacaaggttagacagatcttctaaggcagcttctaaggcctttcagcatgtcaaaatgcatctttggggtatccgtttctgagtaccaacaagggaacggaatgggttaagatttcattctctcagtagaggaaaatctagggattcattctacatttgaagccaaaaacagttatctgactccttccagagcctttaaatgttgatcccttcccctcttctcccatcaaacatacacttggaagtttaagaagaatggagggatctcaaggtgtaaagttttctttctgtgcgatgaccagtgctggtcctcggatgtcaactgccaaccagggtagctcatggttacaacctcccgtacagctctcacttatccagaactactgaggctccaagctcagtatcaaactgttcacttgcactatgtcctctatgatgtcactgtcatcatcattttacagacacactgcgactccaag

SEQ ID NO: 149072 - DNA, 450 bp, Homo Sapiens
tttctttctagaactctgaatttataatttatattgttacagagtacatttaaatctgccttaataaaggcaaggaggcaaagaaggaaattcaaactcactaagcaccttctgtgtaccaggcaccatacatatcgcttagcagtctttatatagttcttcttgcataatagctctcaaggtggaggcttagggaggctggtgactttccaaagacatcacacatggctggaggtgtagcctgtgtctgacccaagctcatgtctttctctcgatgccacatggcagggctgggtttcccaccctttccaggacataaaggaagggagtgggcaggagctggttttgttagacggtctttgagatttgccacaattggattgatgagacagcccaggtccctgcggaacactggtttgcaggaatctgggcccggggccaatgatttgc

SEQ ID NO: 149073 - DNA, 600 bp, Homo Sapiens
ctgtagctcaaaggtggagggagtttattagttaaccaaatatcgttgagaggaatttaaaatactgttactaccaaagatttttattaataaaggcttatattttggtaacacttctctatatttttactcacaggaatgtcactgttggacaattattttaaaagtgtataaaaccaagtctcataaatgatatgagtgatctaaatttgcagcaatgatactaaacaactctctgaaatttctcaagcaccaagagaaacatcattttagcaaaggccaggaggaaaaatagaaataaatttgtcttgaagatctcattgatgtgatgttacattccctttaatctgccaactgtggtcaaagttcataggtgtcgtacatttccattatttgctaaaatcatgcaatctgatgcttctcttttctcttgtacagtaagtagtttgaagtgggttttgtatataaatactgtattaaaaattaggcaattaccaaaaatccttttatggaaaccatttttttaaaaagtgaatgtacacaaatccacagaggactgtggctggacattcatctaaataaatttgaatatacgacaaa

SEQ ID NO: 149074 - DNA, 347 bp, Homo Sapiens
catcttcaaaataaaaatttattcaatctgtaacaagaacattgaatctgcacatttgcgcacaagttcacatttaaaaacagtggagcatatctgtaataaaaaaatctatgatacaagtggaacatcccaaccaccaggaagattaaggaaggagatgagaccactctatattctgcttcaaatgcctcaaaaatgtcccagagattccagggagcacctgctttaataaaacatgagcataaaagtttggggtggcttggggcaaaggtaacagtcagaggagagtcttctggacttgttttccatgttagaacaagtcctacaaaacaaagcagaaagaaaaa

SEQ ID NO: 149075 - DNA, 402 bp, Homo Sapiens
ttttttttcttacaacatattcttttattgcaacattttcctcagtttggaaaactgtgtccccacacgtaggtccttctagaatattgtaagtcaatagaagaaggcctgtcgctcacacactgggattcccacctcgctggaccccaggtcagatagcaccagggcgtgtgtttcttaggccgaaggtcctgcctccaggaaggtgggcttcccttcgtggtccataaagaaagacagatacttggatgcagccaccaggggaacagccatcctccaatagaggcacacgactcacttaggcctgggcgacagccctaacgggaatggcctgagaaccccagagaggctggtgtcccaaggactctgcccgagtacccagaggccaccatcaaaagggag

SEQ ID NO: 149076 - DNA, 433 bp, Homo Sapiens
ccctgggttaaatatagagaatttaatggctacatttaaaaatgtacattattatgtcaaagggtaaatttacaaattgataatcatagtttgcaacaattcaaagtttattctcaaatttatccaagtttacttttatttacaatgaataaaaagaaccatgtgaaatgtaagagatgtcagacattaaaagtatttttggtattaactcttataatatttcagaattcagggtagcaaattttaaaaccaataacaatagaaaaaatgtaaaccatttactaattaagattgcattaaaacaattgttggtctttaaagaagtattcttatccttagacactgtactttcaattgaatagggtgtattgcaagaatttggcccacttcatattgcccataagcctctccagctcaaatgtttcaactagtc

SEQ ID NO: 149077 - DNA, 395 bp, Homo Sapiens
aattaaaatatgtcactctgaaagctgtatggagaagggacagggagtgctaaaggagtgttccagggcaggatgaaagttacttgtactatgtcagatatggtgcaagaaacagagagacattgatggatttggagatagagtcaacatgagcttgtgaccagctcaggatggagggctgggaagagtcagaggtgcccctggatttccagcatgtgtgagaacgactggggggcagtcacaggaagacaggaagaacagcccacctcattcatcgcttagtctacaaatagtcattagtatggaatggactgtggacacaggccctaaggatataggtttgcctcggaggcaaacgaagacatcccagggcttggggagctcacagcccagag

SEQ ID NO: 149078 - DNA, 113 bp, Homo Sapiens
tttcctttctttgtttcttttcttttcccccaaacaaccagattaaatgctgagcgcttttaaaatatcaaaacttgttcaagtcataaaacaacaaaacataagttttattt

SEQ ID NO: 149079 - DNA, 1229 bp, Homo Sapiens
gtccgctccggcagcgcgctctgcccggcttcctcagtctcctcgccgggagcgtccgggagcagctccgaggccgcggcgaaaccaggtggagtccgaggttcggaggagtatcagagggagcagggattggatcaagtcattgcatctagagtacgggggaacgaagaaatcatggagagagtttgccccaggagagaggcgagcgttatgtaacctaggatctggggtgggtaacagtctgtgcagtgtcaatgtgagaggagaaaacacccaacgtgagggaatggtcagccttgtcatttcagcattctggccttccctatgaggaggaagatcaacgaagtcacagggcccttctagcccaatccagagctgtaccatggcagagacaagagaagaggagacagtgtcagcagaagcctcagggttctcagacttgagtgactcagagttcctggagtttctggacctagaagatgcccaagagtcaaaggctttagttaacatgcctggcccatcttctgaatcccttgggaaggatgacaagcccataagcttacaaaactggaaaagaggactggatatattatcacccatggagagattccagcttaaatatttatatgtcactgacctggctactcagaactggtgtgaactgcaaacagcatatgggaaggagcttcctggtttcttggcacctgagaaggcagctgtgttggacactggtgccagcatacacctagctagagaactagaacttcatgatcttgtgactgtcccagtcaccactaaagaagatgcttgggcaattaagtttctgaacatacttttgctgattcctaccctgcagtcagaagggcacatcagagagtttccagtgtttggggaaggggagggtgtactttcttgttggaagtgattgatgagctgcactatacagccaagggggaactgagctggcggaactcatgacacgccggcgcctatgctcctctggagctcagaagacgaagactgtgttcagtcagctataccaattttcttgatgcctgttccaggcaagtggcctgtgccaatcccccccaagtggtcttgaaagctgggcctcggtggggtgccccggagtctcggcgaactcggggacctggcgtctgttctcacgggacccctggtttggtggttcccagccgcgggggtggctccagagggagggttttggtcgc

SEQ ID NO: 149080 - DNA, 479 bp, Homo Sapiens
  misc_feature (74)..(139): n is a, c, g, or t
  misc_feature (164)..(241): n is a, c, g, or t
aattccaccactaagcaacaatagattttatatgtgtgtgtggatatatatacacacacacacagaaagatgannnnnnnnnnnnnnnnnnnnnnnnnnnnnnnnnnnnnnnnnnnnnnnnnnnnnnnnnnnnnnnnnncttgaatctacaaatatctttatannnnnnnnnnnnnnnnnnnnnnnnnnnnnnnnnnnnnnnnnnnnnnnnnnnnnnnnnnnnnnnnnnnnnnnnnnnnnnattttcagctatttctgttcccctgaactaatttgagattagacccaaacatgcttttaaatgtctcatgccaaggcactgaattaagacttcttaatgttgaaatattttaagtgatttcatattaaattttctatatactgaaattgcttgtttgatttatcttaaagtcctattatatctttctacaaaccttcacgcaacttatctaaatgtcaaactaccaatcaaataatgt

SEQ ID NO: 149081 - DNA, 586 bp, Homo Sapiens
  misc_feature (50)..(50): n is a, c, g, or t
  misc_feature (106)..(106): n is a, c, g, or t
  misc_feature (428)..(457): n is a, c, g, or t
ttgtaacataaaactttatgtgatataggaatagtgtcaatgacacagtntaaagacctctatattcacaattatatccagagcataattttccatggccatagtntgagccacagagaaagccaatgaaatagattcctacttttatttaatgccaagagttttcactagccccaaactttttattggcagcagatatcctaggaggggtgtttgggaaatatctagctattttaatagatagatacctttttgcttgatgataagtttttgcttgctcatattttttgtgttgatcctgagaatgcaagtaaggaattaataggaggttcttagtgaccagatgttgtaatgggctatacagtccagcaggcagtatgcacctagaaatttctcccttttttaggctgggcatggtggctcacacnnnnnnnnnnnnnnnnnnnnnnnnnnnnnntgagacgggaagatggcttgaactcaggagttcgagactagcctgggcaacgtgatgagactccgtctctaccaaaaaatatataaaaattagccgggcgttgtggcttgtacctgtggtcccatctgc

SEQ ID NO: 149082 - DNA, 546 bp, Homo Sapiens
cagattcacagaagtttcatacacctttcacccaggttcccctaatgttaacagcttacatataaccttggtacatttatcaaaactaaaggtgcaatcatactaatagctagagtttatttggattttaccatttttcccaatgtcccttttctgctgcagcggccaatccaggatgccatactgcacttagagctgttgctttcttttttcctaactttatattttgaaataatttcagatgataggaagttgtaaaggtaagggccccacgcacccttcatctagtttccctccatggttacatcttatatggttgtaatgcagtattccaacaaagactctgacactggtgcgatgtgggtggacagtccaaatcatttgtcacatgtacatctgtgtaactaccactgcaatcaggataaagaagtcccatccccacaaggatctccctccccaccttccctaactcctggtaaccactaatcgttcatctcttcttattttgtcatttcaagaatgttgtataaatgggagcatagtgtg

SEQ ID NO: 149083 - DNA, 469 bp, Homo Sapiens
  misc_feature (267)..(414): n is a, c, g, or t
aaatgattttcacctttattatgcatctattttcatggggtttcccgatatctcactgtccagtcccttcatttggggaatgtgttggattagggaacagggttgaagatttgaagtttagactaaagagctgggaacagcttcagagtcaggctcagcctgactcatgcttgacacccccacgcccagggagggttgggggatgtgaggagggcagggaaatctgagagcctccttccagccccataacgctgttaacaagtaggnnnnnnnnnnnnnnnnnnnnnnnnnnnnnnnnnnnnnnnnnnnnnnnnnnnnnnnnnnnnnnnnnnnnnnnnnnnnnnnnnnnnnnnnnnnnnnnnnnnnnnnnnnnnnnnnnnnnnnnnnnnnnnnnnnnnnnnnnnnnnnnnnnnnctgggcatggtggccatttccgcatccatcagacactttcctcagcagaccaggc

SEQ ID NO: 149084 - DNA, 469 bp, Homo Sapiens
gattcccagtcctagctctcttctgggcctcttctgtcctagtcattctccgccagtggctacctcttcctttgttctttgccaggttacccctctgtgctccttcctggcccatgatcaatcagttccaggccacagcaggctgattggcttatcacagggctctcatttacatcatagagttctcagtctttctgtccagcacctgctcaaaactccttccttgaaccaaggttcttaatctaagagctctattggtggttcggttgctcagttatttctgtttctgttggtaccacacatatgtctgcaaatgtgcgagatgtgggggagactctctttagtgagaaggggctctgcctgtcaggaaggcctgccctgtacactgctgaggcttgcctacaaaaccccattgtgcctgcggtgaaagaggtcttctcagtttccctgtcatgtagaggggaggaaa

SEQ ID NO: 149085 - DNA, 581 bp, Homo Sapiens
tctgagcaagcgtcaggcctggggctgacggatgaggagatgtcccgggctgagcaggaaattgctgccctcgtagaacagctgacccccattgagcgctatgccatgaaattcctggaggcttcactgagaggtggtgagccgagaggagctcaaacaggcagaagagcaagtggaagctgcccgcaaagacctggaccaagccaaggaggaggtgttccgcctaccccaagaggaggaggaggggccgggggctggggatgagagttcctgtgggactggtggaggcacccaccggcgcagtaaaaaggccaaagcccctgagaggccggggactcgtgtcagtgagcgtcttcgtggagcccgggctgagactcaaggggcaaaccacactcctgtcatatccgcccatcaaactcgcagcaccaccacaccaccccgctgcagtcctgccagggagcgagttcccagggcagcacctaggcctcgacccactccagcattcagctccggctgcaattcatgcccttgttcctgtcccagtttatgcccgtttgctcagacctgccagctgctcagca

SEQ ID NO: 149086 - DNA, 635 bp, Homo Sapiens
  misc_feature (110)..(124): n is a, c, g, or t
  misc_feature (135)..(267): n is a, c, g, or t
gggggattccaacccttttccttggccgggttttcttgggaaacagtttggccccgtttcccttccctttggggcccgcgccccaaaaaaaggttttgaaaaattttttnnnnnnnnnnnnnnnccagccaaggnnnnnnnnnnnnnnnnnnnnnnnnnnnnnnnnnnnnnnnnnnnnnnnnnnnnnnnnnnnnnnnnnnnnnnnnnnnnnnnnnnnnnnnnnnnnnnnnnnnnnnnnnnnnnnnnnnnnnnnnnnnnnnnnnnnnncagctttccaacccagctcatggagctttattcagacgggagtgacaacatcctgcttcgttcttgctgcccttgaaggggcaggccctactgagccatattccctagaaacccaatgccgaaggcccatgtttgacctcccactttattcaagtcgcctaggactagggctggggccttcctagaagccccctctcagaacctgttctcacccacccaccactcccgttgtcaggcccagggaggacccatgaatgacaaaaatcatgtagggatattccctggactgggaatcccctgccagcttcaaggacatatcatctgacacagggagaagctgacatctgtcatattcttctgcctcacgt

SEQ ID NO: 149087 - DNA, 1009 bp, Homo Sapiens
attttgggtttgaacctggccttgtttaggtggggaatcggctttaattggtataggagggattgattccaaccatcactccaaataatttcctccttttttccatcaataatccctccaggaattaatatccagatttccatatctttgcaatacaaattttcagctggctgtacccattttttcagcatctttgggagaagctgctgtaaactgatatattcgtttatcaggagcagagattcaaaaacagcaatctttctttccatcctttcttagagttttattcattctgacactgtagccatctattgcaaattcacctttctgttgtttgtctttatcacttccataataatagaataccgttttactgagagcacaccaccgtttctgccattcaaatcccagaaagctgtgatcttttctgcgtttttcaaggtagccagcctttagaacaaaaggaaggtcttgtgctgcaattggaggaaactgggctccatcagagggggcttcatcgtctttatcatatcgttctgaggctaatgaaatagtgtctggaggcccagcaaaagggtcatcatattcttccccatcttctgcatcacctttgtcttgaaattcctgaagatagatagactttacatcttttatcttcttaataagggattctctcttttcctttgctttcttggataaattttctcctttcagtatatctgctacaaatgtttcaacatctgccaacaggttcctaatttcctcagggagggggtagggagaggaggtgctgctggggttgggcatgttagggagcgcagggcgtgcggggaaaggacctgcgctgaaaaggtgaccgacggggtggggctgcggctgcgacctagactcaggctagcggcccggattaagaacagcggggctacgagtcgggacactgccgggccggggctcacaacaaggaagtcgcggacgcgtgggtcgacgatatcccgagaattccggaccc

SEQ ID NO: 149088 - DNA, 780 bp, Homo Sapiens
ttttaaggtaacgggtttattcacagtgtcatttacaggcagcccccaccccgcggcatcagatcccggcgggaggcccgaagtcgctagaaggtggggacggccttggaggcggggggccgggccggatccccgggcgtccccggcgtcgcctcctcgtccagaccccggcggcccttgccgatggccaggcggggccggccgcggttcaggccgtccaggagcgcgcaggcctggcagagcgcgcggctggccagcgccccacagcgggagcaggcgccggggcgcgggggccgcgcggccggggccagcgccaggcgctcggccgagtgcacgaggtccagcaccgcggacggccgcgccgcctccaggcgcttgagcaggtcccgggcgtggccgcggaaggcctctggcgcgtagacgcactcctcggagaagtagtcgaggcggcggaagtgcgcgtacagcaccaccttcttctgcgaggcgaactgcagcgggcggcaccagcgcgcgcagcacgtgcgccagcaccgtggagtccttgccgcccgaggcgcccacggccaccaccgcgccgggcggcagcaggcggccggcgagcaccgtgtgcagcacctcggcctcgaaggcggcgcagaagcaggcaccgcacagcgcttggcccgagagcggacggcggagggcggcgcgtgcagcatggcaggaggcgcacggcggggcgggcattgcgggaggggtcggcttctcccgggcagaactcagtgctgggatgcccac

SEQ ID NO: 149089 - DNA, 669 bp, Homo Sapiens
  misc_feature (54)..(54): n is a, c, g, or t
  misc_feature (113)..(113): n is a, c, g, or t
ccggggttcgtagccagcactaggctggtggtaaggaacgaccatggcctggcngtgcgcgtccaggcgcaagcgcagcgaggtgcgcaggatggcgctgagccgctgcaganagtcggcgctggaacgcagtagctcctccggcggcagcagcactgtgagcaccagcacgccgcgggccagcagggccggcacctcgctggcacaatccagcccatcccagccgcactcctccgtgttgcagccctggtcgcagcggccgtcggcaaagtggtcggcgcagtacttctcgtacaccgggttgcaagtgcgctcgcggccaccggcgtggcagtcgaagttgtcgtagaggcaggcgggcgagctgcaggcggggtcgcagcggctgttgttgaagaggcgccagcactgcagcgcctcgcattgccgccaggggtcgcccacgctcagcgagcagtcgccgccgtcccagccgcagcctgggctgttgcactcgcggtcgcagcgctggtccccgcgcttggcctggcaggcggcgcgcgggcaccgcggctcctccgagacctcgggtgccgcggcgggcgcctcgcagcgcggcccggtccagccctgcgcgcaagcgcagcggaagaagggcgcgagcggcgcggggcggcaggagcccccgtg

SEQ ID NO: 149090 - DNA, 319 bp, Homo Sapiens
gaagcaatggcttcaatttgagacttctctaggatctcaacttcagtgcttttcaccttaattttttcctctagggagaggatttgcacagctagaaaatattcctttcttctcttattttttgttgaagtcgcggttcgggccaaaaccttcgcaggccataatcgcttttcccatcggcagaggacatacttggcatccgccatcatttacactcatgtggcaagtggcaatgatttggcacaacgtactcccaggtctcacgccaatgtgtccgggcccccggctttccccagcgcggcgccccaagcccgggcaa

SEQ ID NO: 149091 - DNA, 462 bp, Homo Sapiens
  misc_feature (96)..(104): n is a, c, g, or t
  misc_feature (409)..(422): n is a, c, g, or t
ttttgtctttcacacactggatgtttattattagaaaatagcttctatcagctgtcagtaccaaacaagttgaaaggagcgagcttctcaccatannnnnnnnnctccttaatgatatttaaataaacagctcactgtgtgagctcacgccctttttccctttaaaaactgaataattaaatgaagtttagtacaaaacattcttcaaatatgacttgttctgcatctgttatgctgtctccttgagtaatggacgcgaaagagatgaaaaagaccactcaggctaccaaagtaccccaaagaatccatacgagaaactgagaaacaaactaactcaaataagacccaaccaaaccaagaaaccagtttttacgttgactttttgattttgattatcatctaagtttannnnnnnnnnnnnngtgtgtgtgtttgaaatagtaataaaaaaggaagaattga

SEQ ID NO: 149092 - DNA, 474 bp, Homo Sapiens
  misc_feature (145)..(165): n is a, c, g, or t
gggttccccaatagcattttaccttgttatagcagatcaacatacattatttatatcaatgcccattgtttatattgactacataaacactattggtaactaaaacatgtagtttactatgattattttccctaaaattgagaannnnnnnnnnnnnnnnnnnnnctatgtacttaacattaatgtatccacccagttctccaaaactgatatgaatctattctcaatgcactcaaactccttaggcattctatcaattttatcttcttgaagaagtctctccttgagcctcctggtctatttcagttcgaactgcattatttacaggctgtggcttttcaccaacactcaattaatcctgttgtctctcttttgtgttggatcccatttcctcaattttgttttcttcttccttggtttatgccattattttgatgatgcacaagctccagcaatttcaaggaaaggccacta

SEQ ID NO: 149093 - DNA, 492 bp, Homo Sapiens
ttttttttatgtctaagcttagactcatatctttaaacaaaagaacaagagttgaagatctatgaaatagacagtgggaatcagtaacattcatccggaggtggtggatcttcagagagaaattggtgttgtataatgtagccttctccacatggcaattatgctgcttattagaagttctgaggctcattgttacttcaacacgcacaaagaaaatgctgcatcaatgtttgttgacctgcttctgaaagacctctattgttcctttcgcctctccttgttcttccatttgtctcatggaatctcttttcacacagaaccctctctggataccagcgtcgcctggaatttttagcaaggtcatccatcaggaaagtcaggaaaacacccttaaattcttttattttccttttttgtgcacaacccaattcaatcaatcaatgaatttacttttgtagatctttaattatttgcttataagttatccaccat

SEQ ID NO: 149094 - DNA, 565 bp, Homo Sapiens
tatcttgtctcttttcatctgaatactgtgatgctgacgagaatatcttatgctttcttcagcctgttgcaatctgagccaatgattttctttgcactgatcctttctactctggagagaagctcttttgacacagatcctgccccgtttaatagactccagctgctggcactgccttctgagttctttcacttccgaattcttatcgtcctgcagccccaccacagtcaatgactaagttcctctggactttcacatggatcgtaatagacaacttcatcctgtttttcttttataagtctttcaagagagtccaactgtgtagtaagcagtatttctttgttttttaatatctcaaatttaacttcatatagttctaactgaatttcataaaattgtatttctaattcatctacaacatttatatttttttcttgttctggaagatcttccatctttccctgaatttcagctcttttgcgatttaaatacaattctttcgctctcatgagttgcagagtctcttgagctagcattagcttaagtttttccaacctgggaattg

SEQ ID NO: 149095 - DNA, 148 bp, Homo Sapiens
atttagatgaccaaaggtcattacaacctggctttttattgtatttgtttctggtctttgttaagttctattggaaaaaccactgtctgtgtttttttggcagttgtctgcattaacctgttcatacacccattttgtccctttattg

SEQ ID NO: 149096 - DNA, 692 bp, Homo Sapiens
  misc_feature (307)..(320): n is a, c, g, or t
tttttcatctttgatttttttatttaaaaattaataaagaacttaacgacaagtataataatttaatctctatatgcaatgccatgtgtacatctacataagggaaccctgtgcgttttaccttgcttttgtatcagagtttttacttgaatctttccaagagaagaatcaccatctgttagtgacgtgttgcaattaaactatgaaatgattttgacaatagtttttctattttgaacacactttaatttttagggatgaattaatttatcttcagaagttcctttttgactctgaacatttcaannnnnnnnnnnnnnggtctagactggtgtgaaacagtgacattattttgtgtactaggatgtcctcttgtttagacagatttgtgttactaattagaaaactgctaatacccttatttcaatttactgagatagttgggattcttaaaacataaggagagagaacttgttggaaacatttttataactttagttaaaaacagtataaaaaacatgaaacccatttttaaatatttagtctacgtgaaacagttacacttccttcatgttacaggatcaacttcctcattgttcttgcaccaaaatatttctcagttccttttattgatattcagggattcgaacttcatatagtgtttccgcagaggttgtgtgtgtgcacatgtg

SEQ ID NO: 149097 - DNA, 784 bp, Homo Sapiens
catggagttgggctttattaggtgactgttgaggcaagggaggttctagggctggtggactgatggggggcaagggcttctccttgcttttgaatttagtgcatgttgcctagaggttagatgtgtgagaatagatgaggttgcagcttttggctcgatccttgtgtatctcgccctcattcccccggtctggccgtcctgacagctgagcggatcgctgcattccccggcgtgagtcagttcggcgcagctgcctatggccacggccaagggaggccactgtagccacatggaagacatccctgacgctgcgctcagaggaccgggaggagcactcaacataggacacagcccccacctgcttggccagcacagtgccctgctcatgtgtaacagggataagcctctgcttggacagctccctcagtgtggccaggtcagtccgcatgtccagtttacagccaaccagcacaaccttggcattggggcagaactcttgagtctctccttgccacttcttgagaacactgtccagtgtttctggtcggctaatgtcgaagcagatgagcacagcatcagaatcaggatagggccagaggccggacattatcatagtaagaggaccctgaagtgttccacatgttgagctcaatgcggcgcttgtcgatctcaaagctcgcagtgtagttctcaaacacggtggggacataactcccgggataggcgtccttggcgaacacctgcagcagcgccgtcttgccgcactctgcgtctcccaccacca

SEQ ID NO: 149098 - DNA, 474 bp, Homo Sapiens
tttccgattttctcagttttaatgttatgttccatccaggatgtagtatcagacttttctttgtttttcatgagcctgacaatcttgaatagtcttggtcaggtatttttaggattcccccctattgtctgggtgtcagtattttttagagatccccgggggatacggcactgttcggaaactgctgctctagggccttgtgtgtgtgtctgggtggggatgagttgtttatataaaaacgagttagcctaaagagtagaagaggagaagtaatttccgtggtccggtgatctgttgttataatgaaccatcccagaacttaggggtgtaacagggtcatggattccgcaggtcaagaagccaagcagggctctgtgggtacagctcttctctgctgggagccctgaacagctggggcaggaatcatctggaagcctcatcacttacgtctggtgcccgggcttggatgactcg

SEQ ID NO: 149099 - DNA, 592 bp, Homo Sapiens
tttttccatttaaaaatcattttattattaacatcatcttcccatgtagccaagtgtctgtcatgtataaggaatgtcggtaaatattccatttgaagcttctttgtacatatttccctcgataaataaactctgaattcacataaaaaagttaaacttaaataactcatatttccttctcttgtaacaggcatatattggtaaaatataaatattctcggactcaggctttgttctaagtgaggacagtaattgatcacatggtacaattattgacagtaaaaccaagaaattgtcagctggtgtcctggcatggactagtgctgaggtgggagacaggaagttcacatttggtttctgggccaaagtggggcaggaggggtggtggggagaaaaggacagttgttttctttacagctctgataaaaataatctgtgctgccactgaattttaactttgaatatattcttctacatttgctgattaattccataatcattttactgaaaactcagatgtcaactaacaaaatatggcacatgatccattttgaacaatgtcaataggttcagaaactaccattgggctggc

SEQ ID NO: 149100 - DNA, 768 bp, Homo Sapiens
ttacttttaactacttcctaaagtattataaacctgccagtggattttaagtgatagctaagcttccaagcttaattcacgttattacaaataaattatataactatcttaaatgtttatcttataattaaatgtaatttgaaatgctctaatgtattttgcagataaaacaactataaacaatattaggcaactggatgtttactagtgtcggactagcaatagaaatgcactttaaatatatatttaaggggaaatgcgtgcctggaaatacttcttttcctagtgaagttttatattgacacagagaaaagaatacttaaaattttgagtgatgtctactggcttccttgtaagtagtgattgatagcatgcggctttgacttgcaatacaaatcattacgattttatagttatcagaacattacgtttctttataaagaccctaaggtcactcttctttttgcaacttaagggaaaaaatattctcaagggaaaatactttttgaaatttatcaccattttagtgtttacatttcaataaatagttcacttcaggtttgggattgagattagttgcaatatatttagaagctcctacatgacagcacagatcactgccatctgctgaactgctaaagtgcttggtgccatgttgagaaaacttacccaagaatggataaatatgggtgaaacattactgagaatgcctcacgttagcaaatactatgaaaattcttgtttatatatcaaactgatttattttac

SEQ ID NO: 149101 - DNA, 601 bp, Homo Sapiens
ttttttactattaaatatttatacttttattgtgtcattttttgctcagaagtggccgtcctgccagaaaactgctattctcagctctgctcacattgactttgctcagcatagtgattggaaatgatgtgtggataaaaagcaaatatgtcttctttgcatcttttttcatccagcacccaggtgataggactctcatgtctgcttcctgatgacaggtgaaattgcgacatatacatggtcacagctcacaggtgagatgatgactctcatacctggatccagctaagagaacagattttgactctgatatctaggcttagggcaacagataaggtcctgggtctcctacttaaataaaggtcatagtgtattatgatatcaaggcatattgtataaagccctcaaatgatacagtgtcataacaggacccagaacgaaggtgagattgtgactctcatatgcacatccatctgatagaattgtcaccctcacacatagacagttctcactggtgaggtcctaaatctcacactcaaatgcaatccagacttggaattgtgactgtcatatatagatgcagctacaggtgagatagtga

SEQ ID NO: 149102 - DNA, 574 bp, Homo Sapiens
ttatgttaacataggatttttaatgtggaaatgtaaggaacatttacatccccagtaatgaaagagactcaagagtagaggcttcttagaagtcaatgagagaagaatccggacaagaaacagcttaatcctttctacggcagagaaacatatgctcagaattctttggtttcattttcatgtaataatttcagttcagaatatagtttatgttctaaaaaagtcttatttgcatttttagtgaggtgctttgatcatcttcaagaagactgctgggaaacatcagattcctggaaccataccacaaaggatccgagactttcacagggaggttctgcaggcaggaagtgtgctgggatgccacacaagcaaacagccctgaggagctctgtggctccattttcagctgcagggagaacaggcacagtcagttctcagatgtgctgctggtgggcagggcccactcacctgcaactttcagtgtcaccatctcactgcgctgggcctccagaccattgtctgcctcacaggagtagattccagaatgttctgtagtcagagagaggttgaagga

SEQ ID NO: 149103 - DNA, 632 bp, Homo Sapiens
aaagtgtttgatttaagcactttttcctttaagccaattaattagagcttttatgtatttttagtagtgaaacatatacgtgacacaaatacatagatatactagacacatagaaatagatcttatagattcataacacctcttttttttcctcctattttagacttccaatttcttgataacctgttttattactccaggcagatgtcagctacatagccctaaatttgcatattaaagggccaactcttgtgaaaaatcagatagtgaaatttatatctcaaggtacagagagaaagagtctggtggtactacagggagattaaaaatggatgccaagtcaaacataaaattacagaaatctatcatagaattgtataaggaaaccaattttatttagataggtagttctaaatttagtctctgtcttttaactggatctgtgaactctgggcagagcccacactgaatcctgggtctccaaaaagagaactagtatggggctagaccacgtgacgctttcatagtgcactttttttcaaacaaagacatttctctaagtgtctaaactactctctttcttactttaaacaccccagagtaatctctgctacaaataaaaaaatagtcca

SEQ ID NO: 149104 - DNA, 483 bp, Homo Sapiens
ttttttttaaggattataaacagaattttattataatggaacagatggaacaaaaaagatgagacttttagcaaagagggaatgatcactaataaactgctgattttattagaaagtttcaaaagaagaaaaaaatgaaattgtaatttaatgaataaacattacatgtacaatataccatttggaggttacttttgtttggtgagtctacaaataaacttcattgctattgatattcatctgttaataaaattctcttttgattatatttaaattacatatctataagtagacctcaaaagtaaaacaaacaaaaaccccaaaagctttctactctatggtaagggattgattaccctttgttgtttagtaactcctggtttttaccatttgggaaaactgggggaaaaaaaggagacagaaaggcaaaggcagaaatcacgagagatataataataagagatgaagacagaaacagagata

SEQ ID NO: 149105 - DNA, 675 bp, Homo Sapiens
ttttaagaagtgaatcaactagttttattttttcaggaagtttaacagcgaagaggaaaagacaaaagggcaaaaatgtaaatggaaagcagaattcatgagatgattcaaaaatgtttgtgagttgagtgggaaaaaatcaagtaaacaggatagactgaagactagtacttggtaaaacaaaaccctgtaagaaatataaaagaccacatcagaaacacaagtagttaattccacttaaacactaccacctctccttcttgaaacgccaatgacaactgagataaatggcataaagccataaatataaaaaagaatatccctggaaactagaaaggacatatgacaagtggtaaatgactgaggaccgaagaaagctgctgtagtaagacaagcccaaaagcaatgcatcagagcaccagaaactggaggaacgttagacaccaggcatcgggggtggggagatgcacatgcgcagtgatgttctatgtatccaggagtgacgttttcagatgaggctaaccaacaggaattgcataccatcactctggctgctctctcctgagattcacatttcctggcaaaccacggtccagtgggtacttgaacaatgccatagcaagcttgatgcaccgcgacgctgcagccgtgcccgtcgcaattaaccagcggttc

SEQ ID NO: 149106 - DNA, 409 bp, Homo Sapiens
  misc_feature (251)..(274): n is a, c, g, or t
  misc_feature (409)..(409): n is a, c, g, or t
cttcccaagagaattggtataccaggcgtgagcaactgctcctggcccaaaacatctctttctacatacacttgagtaggtggcataaaatgcactgtcaatatatagaaaacatgaaattttccaaatatttccgatcagagaatcacaagagcagcaaatgtggtttcatcaagtgggaagaaagcagcaatttaaaataactttttgggagactgaattgagtaataataaaacttcagtctttcgcnnnnnnnnnnnnnnnnnnnnnnnncaacaacttattgaatgtggccagctcactagatgaggaaagaggaaggcattttctgcattcttgcctagttttccttataagcaccactaagttaatagctctgtctttttggtgtttgcactatgtaatgcn

SEQ ID NO: 149107 - DNA, 842 bp, Homo Sapiens
  misc_feature (686)..(686): n is a, c, g, or t
  misc_feature (716)..(716): n is a, c, g, or t
  misc_feature (743)..(743): n is a, c, g, or t
aagtgtggggaagttataattcagataatttattttcaacaatgacctgcagaggaacaacaaaaagggcaaagtaaaatttgaccaaaaaacagtgagaacacatacgaggataagaaagaggaaggctatggaatagctataaaaccatcctcattactgtttcttaagttccccccccaccaacctctgcctccaaaattgtagagaagaacagtaccaggaagaggatcctgactaggctgccatccacctcctcaactcgggacttccaccacgtgccttcccactcagtcttgataagctggccactcttgagcagtaccatggggcggttggggtaggcagtgacatactcctctatgaagtcacggcaggagatgtcttctatgtcctcccaagtctttttcagtggccggcaaatgggatacagttccgactgtgtgacataggaagcatagccatcatcaaagaaaatgagaaacctgagcttgtttttgacgtttggtgtctcagctacaatgccagcatagagccagacctgattcccatctttgtatttggcgaccacccgactggccacatacagcttgtcagcaggagggtggtaatcataggcaatatggttccccgacagtagactctttcctttgttgtcaaatttcaccttgtatttcttccctggnccaactgtctggatggcaatagggtgcctntgtggcagtcttagttctctttctgcncagaaatcgcatgctgactatcaggtcaccattctttgcttagtctccagacatctgacctaaggtccctttatgcagatcctggaaactgctcttctt

SEQ ID NO: 149108 - DNA, 1022 bp, Homo Sapiens
  misc_feature (47)..(145): n is a, c, g, or t
cggtcctaaggtagcgaggcctgggtggcgaattccgcacgaggagnnnnnnnnnnnnnnnnnnnnnnnnnnnnnnnnnnnnnnnnnnnnnnnnnnnnnnnnnnnnnnnnnnnnnnnnnnnnnnnnnnnnnnnnnnnnnnnnnnntgtttagaaacaacagtctatgatagtataatcctctcttttttgtacacagagtaaagaggacaaataggtgaaagaataaatgaaaggctggaatcccacttcccccgctgtcccagggcattggatattgacggataggaggcagcaaaccactcacagagccaggaagaaatgaatgcgttggtattgccaggaggggaggccggcccggctgaaatacactatgaccatagccaggtgatactgatggagagaaaggaacacagagagggagaggtcacatcttggaagaggaagattgtggagagggggaatgagggtctggggaggggctgcccatcagagaagggacctcagtgttggggtgactgtactcatttggaaattgcgggatggagggtattcgaaggtcggatgcaaatccgagaagccagaggaagggttttgggtgatgctcccaggatggtgggctccgatgggatctttggagggggtgtgtctgggtcggctggggtcaagaggggccttttgtgtgccagggcagagaactgtccctgaagagcttgaaagtaaaacgggcccgggagatttcaggggctgccggccaagaatgggggccccacaagctcaagatccccaaacggaccccattaggaaaaaggtagggggccccaccttcattttcactcttggccaagaaaaaccctagtcataatttctcctcgagggcgagaatcggtttaactatactccacctttgagagagcacccccggctaatttacgccccggggcaaactagaacttggtctttaaacgcacccctggtggggaacgccacctgtagtacaccccttttttttctggatgccacc

SEQ ID NO: 149109 - DNA, 548 bp, Homo Sapiens
actaccataatattttgtaattttccttcattactgtaatttgctaaaccatttctgttttggtagataattaggtagtttccagttctgctttttagaagatactacagagaacttctttgtgcatatttccttagaacaagttccagtagaagacttactcgcaaaagcagtggaattttttcttagtattttctgttacaggtacagaagagtgcatacaacacacagttttgtcgaatagttatgaagtgaacacttgtctaaccactgcccgagtcaagaaagaacatttctaaacatgtttgccaatttaatagatataaaggaagtatctcaaggttgctttaactgacatttctttaacacatgacaacatatttttatgggggaggggactagagagaaaatgacatatttttatgtgtgcttatttgtatctcttgaattctgtctgcatcttttacccattacactttcaaatacttgtgaaatcattggtcgagatgaattatggctataaataaaatttcactaatctaaaaaaa

SEQ ID NO: 149110 - DNA, 1034 bp, Homo Sapiens
  misc_feature (84)..(84): n is a, c, g, or t
aacgtagtgcattatgctagaacaaggttaggcatctttaagttaacccggttagccactgagtatttccccacccttccggancttatctctcggaaaagggtcctggagtggactctttctcctctcacagggcccactcaagagttccaactgctgagggctgtcctttggcatcgtggggagctccacatcaacctcaggcaggtcaggctcctcctcggactccgggtctatcaactgggattctgtagaggtggcagaggcctgacccagaggcctgacagtcagtccatgcatggtatagccaccgccacttgtcctgggcgctgcctcagtatcgctatcactttcatcatcataatgtataatcccacactttcttctgttctgttgatgtacatgacctccaccatatccatggcttccaacggtggcaggttaggaaatggccaggctaaaaagttatgaaaatgtcaagactttggggaggctatttcttaagcatatataaccaatccatttcagtgtcactatggtgcttgtcaagaccaatgctatcaaaaacacagtaattattcctcctattttggcagattctgctgattctgattcctggccaggtggaaggagggtgcattttaagggagactttattactgcttgctcatcactgtgctctaaataaacagatacacagtagttcgtgtttggaattaacttgtcaatgatataggtgaaatttccactcatgtttccttttatttcgggtttaatgcttcttaacaattccctctgactgttcttcaatgacgagagataaatcaactgtaattcttcctcaacatagatggaaatttcaccatcacattaatgtggttggtaaaaccacaatctcaaactctggtggttcaaagacatgtctatggccagccagaaattgtgtgagcaactgaacaacgttgtgttcccgcctcgtgccgaattcgccacccaggcctcgctaccttaagaccgttatgagttactgccgt

SEQ ID NO: 149111 - DNA, 467 bp, Homo Sapiens
  misc_feature (107)..(132): n is a, c, g, or t
tttttttgcagttgaaattttaactttattattttcctattacaaaagcaacacatattcattacataataaaagggagggagctcaaaagatataaagaagtctannnnnnnnnnnnnnnnnnnnnnnnnnaaaggagtctgttttaaaattgcctattatcctattccagggaaaactattaacattttgccatatttcattttatcagtcttttcctatgtatttttgaacacagctcaaatattactctatataaagacttgtattcagctttttcaacataaattacattaaagttatttttatgtcaataaaaattatctttgtaaacaaaattttaatggcaaaataacatttcatcatatagacatactgtaatttatttaaacactctcctaaaatcaaatatttagttaggagaaagttagtaggtcaaagcatataaacattgcgcaggtcactgt

SEQ ID NO: 149112 - DNA, 440 bp, Homo Sapiens
gtttatttataaaatactgacagtttgacaggacacgggacttcttgtggtatatatttcaaatcaatttctttcttacctttcatttaaaaaataaacctgctaacacgctatatgacatagagatatatatttttttcttacagacagacacctgccataatgaatactctccccataattttttgttatatcttttaaatcaaaaaataaagatttgtgttgatttttgtttctggagtctagatggatggagaaaggtaacacgtttaaatgcttttggttattctgatggaaacaaagagaaggggggtggtcccgagggggcacctgtgctcaggtggtggtcaggattgccatgtgcgcatgcccatgggtgtccctggatagggccatacagaggcactggggagcgggtggcgactgctcagatgggtctc

SEQ ID NO: 149113 - DNA, 941 bp, Homo Sapiens
  misc_feature (221)..(233): n is a, c, g, or t
acaccccgtcggggaggtatttaaaagcgtgcgggttaaccgcgggcgctttttttaattgggagagaaggccaaccccgtggttcgtgacccagggtttctcttaggagaaccaggttagggccaagtttccctttccttggtgggcccggggggccaaaggaatggttctgaaaagtttcttcagggcccgaggccgaccgacaaaatttgtataaatnnnnnnnnnnnnntgtttcaggacagtgagcaataaagtttaattacccagttctgtgaggtcactttcacggactagcatccgttccgtgaggtgaaggactgaataagcggaagcacaggccaaacccatccgtccatggtccccactgtgcagatgggctcactgaggctctggtgtacattgcttgctcagcactggatctatttcgggccaaagtgtcagcagaactgatacccacagggcatccaagtccacatccagactgggctccctctaatgccatctcttaaaccgaaccactgcctgccgatggtgagtttccaatcacgagctgcactgggggtgctggaggcctggctgggcacacatcctggtgggtatgaaggggatttgggggtggcatctagaagatcagcatgaggggcacagaggagaaagaacccacagcttgcagccagcaggggaaactggctcagcacacagacagggccccagtgaagcccatccaggccagctgccctaagtacagacctgagtgggacaggacaggactgataactaaggaaaacgagagaaactgagtgtgcaggggccctactgccttctgcctgcaaggaggctatgctgggtgtgcaaacagaagagcaggtacatgaagatcctcactgcccggccgtaatggccgaattcccgggcatatgtccggtaccgtcgactg

SEQ ID NO: 149114 - DNA, 441 bp, Homo Sapiens
tttgtctttgttggattgggttaatttgaagaccttgtcttcgagctctgaatttctttattctacttgttgaattctattgctgagactttccagagcattttgcatttctaaaaatgtgtccaaagtttcctgaatttttgattgttttttctttaagctatctatttccctgagtgatttctcccttcacttcttgtatcattttttggatttccttacattgggcttcacctttctctggtccttccctgattatataactaacctcctgaattctttttcaggtaaatcaggtatttcttcttggtttggatccattgccagtgaactagtatgttttttggggggtgttgaagcgtcttgttttgtcatattaccagggtttgttcatttgggtaggctctgtcagagggaaggtctagggctgaaggctgttca

SEQ ID NO: 149115 - DNA, 505 bp, Homo Sapiens
tcaaatattttatttcttttattataagacatataggtaaaaacttgcatattttgaaaaagatagaaaatggtaataaaatggatatttttcttattaagaaatatgttcataaatatgctttatcaaatgttaaaatggttattttgcaaaataataataaatagagcagagctgtgacatacaagggtcaaccaaagtactggaggtttttatgctatatgttttatgaaaattcagacttctgattatacattaaaaattgacattttgcactacagggtatcaataattctgattttaaaaatatttttatgatggctccatgaattcaaaaataataaaacataaaaggtggtttgactaaatagaatctgattcaaataatttccccctaaataagaaattgtaagatataatttttgagcctataagggacacatgtatcagttcccaattctatatgtctcggtgggcattgaacaaaaattgtttgctaagcctt

SEQ ID NO: 149116 - DNA, 485 bp, Homo Sapiens
agaatagaattttcatttgtttttctttaaatcctttactaattatataatttgaaagcaaaaagaagggcctatattaaatgctgaaagtgaaaagtgatgacattattagcagacactgcttaaaggagaccatttgtagcagttggcttaacctcaacttctaaaactacattgaaaatgtaaatacatagcttagttttttgtaatatatggtgacttcagatttttttgtacagtattttgaatgtgagatgattgtcaggactaactgtctttttaacaaaacattttcagtattttaaataaaattttgtaaagtaatgtgaattaaaaattttggaacaattagaattcattcactattgtatagaagatgctgttaaaacataggaagggtatttttcttgatccaaagtttgtgaatttggctttgctacctcaattgcaggtgtttgtttgcctttataaactgttgcaaatag

SEQ ID NO: 149117 - DNA, 495 bp, Homo Sapiens
gaaggccgaggcaggcaaatcacctgcatttaggaaacgtgaataatgttgtttaatgaaattttactgtatcgttcacctatctactctccaatttgttcttctaacagaaccctgatttgttcaggacaacaatgtgcccagataaagaacttcatttctcagtgttccttggagggagaagtggccaagtaatataatatggttctaggtaatgaagtgtaggcagaagctactgggtggggcttcctgaaaagttcataaaaacaagggctgactgagctggcaagtatggtttgccattttctcttcccttctaccctgtctgaaatgcggatgtgatagaggaggtaacagccatcttatgaccctgaggtgacaagaatgaggatgatacccacagggtaaggatgattgggcaaaagtacagaagtaacattggcccaatggctccatgatgtgattttaccactctggacttctcgattatgagaa

SEQ ID NO: 149118 - DNA, 998 bp, Homo Sapiens
cggtgttaggggaaagattattgcagtgtgggaggtatggatgtgtctgtagagtgatgcgcataatattcggtgagtagtaaacggggttaaggtccatggagtagagaatggagccgaaataggtgcgtttacttgactagtttagcgaataatttgagggttcaaaggtaaatactagagtatatggaagtgataagtctgtcacaatcaaccatatcatattgtaagaactttaaaggcgtaggtcttaaatattcaattgtgtgtagaagaagtactcatgacaagatgaaactgttaaatgcatttcagagttcgtaaaatatttagtagaaaagtaatacacctattatattaccctgaaataaattatcccagtatacatacattgtttactaatggagaggtaacatacactccttgtttatccattaagtgatgtcgtattggtggataaacactgatcactggtttttcctgaggaaactgtggaggaagcagtatattaatgttaattgtcaggttgtttatggtgaatggcaatctgtattccacatctttctgtatttcggctatactggagtgtgagttccggagggactcgatcaggcgctgcttctgctgctggaggctggtgaggccaccgggggacccagccgcggaggaggaggcgctcttggtcaggggaaaaagccagctcatcctcctcgggtccacgggccggaggccctggaaggctctggcctgcttctcccagtggctcggcccggcggttctccagcgacagaggagcggggtgggacgtccgtggcccaagcgctggggaccgcgtcttctctaagcctgtcctgcctgcgctccccgagttctgggggacatgctacgaacggcgggcggctggagagggaaacttgcggcccggaacaggaggtcccaccttcacggcccagacgcccaaaccggccagccagggagcctggccgccccctcgtgcc

SEQ ID NO: 149119 - DNA, 152 bp, Homo Sapiens
tttttttaagttaaaacaccaaatttatttcataatattgaactatatgcacacacatagaaaataaacatttcatataactgtatatatatttttaatcctgtatttataaagactgaaaaactaccaatttagcaattggaataagtttt

SEQ ID NO: 149120 - DNA, 513 bp, Homo Sapiens
  misc_feature (314)..(420): n is a, c, g, or t
cggccgcccctgcatggggaaaggggccacaggaaggccctgcgagtgcagctggggccaacaggaacagcaggacaccctgcagaggtggccccagcctcctctgcccagcccttcctgaactctatcatcatccctgtctccagtcactcagtcagcatggctgtgatggacactggaccacagggctgaaaagatccagagaacacacagaggaataggccaccttacacaccgatggggcccctcctctgggaagggagcactttgtgcacagaagtttgagggggaggagctgggtgtggtggctcatnnnnnnnnnnnnnnnnnnnnnnnnnnnnnnnnnnnnnnnnnnnnnnnnnnnnnnnnnnnnnnnnnnnnnnnnnnnnnnnnnnnnnnnnnnnnnnnnnnnnnnnnnnnttttaaaaattggccaggagtggtggcgcatgcctgtggtcccagctactcaggtcccaggctgaggcagggaggcaggagaatcgctggagc

SEQ ID NO: 149121 - DNA, 562 bp, Homo Sapiens
atggaggtgtgatctgtgggtgaactggcaaatcctgtccccacgtgcaaatgaaatcacagccaaagggcctcccttgtccctgactagcaagcacgggactttttctctgctgtggatctgcagaggacatatgccctttagctgtggaagggattcacagaaggccagggctgcaacctgtgacctcagacctccgctggctgcgagacggcggctgggcccgaggcgggagtgggctcggtttccttcgctggcgcaccttctgatgatgccccggcaacagacctggcctgggggtgcaggctggccctggatcgccggacggtcttctcgccggtatggatcctctggtggtggaagagggccgggcgctcacggaaggcgcggccacactgcgtacacacgaagggcttctcgcccgtgtgaatgcgccggtggctgagcagcacggcgcccttggcgaaggccttgccacagtccacgcagcggaagggccgctcgcccgtgtgcaggagctggtgctgggtgaggtagaagctgtggctaaaggcgcggccgc

SEQ ID NO: 149122 - DNA, 888 bp, Homo Sapiens
cagtctgtctttcgctctggaagcactcctcaactctgttgcaagtcccgagttcattcaggctctcttcgtcaggataaagaggtgccaaggtcgttcatcgttaggtggtctcggaaggcaatgatagagaatgtgcttcaactcttccagagttatcctttgcatgtcaaactgccagaatatgctgtctatcgtgttcccaagaaaaccatcgcgaccttctgaagacaccagtttggggccaagaatggtcatgaattcatcaaaatccacctggccatccccgtccatgtccaagcgctgcatgatgatggccagctccatctcgcttggcatgtaccccaaagagcgcatggccatgcccagctcctgcttggagatgaagccgttcccatcccggtccagaacccgaaaggcctctcggatttcatcgagctcctccacggagatattagccagctgttcgctgtcactgccagcagagagcgatcggttgaggtaattccccttgtacaacaagccggcggtcacatggtggaacggcatcttttccctcttgctgggccggggctccgcagcccggcagccgaggcgcctccgcacagcgcggggggcttcctccgaggcccgcagggagggggcggtgcggaatggatgcgccgagcgggcagcgctcagcctctcgctcacacccccagcaggcagccgcgtccccgtgccggcatcctcgctgccgccggctccctcggcgcccccgggccgctccccacgcgcgcgccggacctgcacgagccccctcgtcgactcggagcgcgatctgggcgcgtgcctcctgtccttgtccctcgtgccgattaacacccagcctcgtacctagcctaggtt

SEQ ID NO: 149123 - DNA, 1049 bp, Homo Sapiens
  misc_feature (30)..(30): n is a, c, g, or t
  misc_feature (44)..(44): n is a, c, g, or t
aagagaagaggaaggcagcccatatctacnacacagcctctcgncactgctgctccttatatttcctggaaggaagaacttcataggagcagggaagtcagatgcatgttgcagtgtccatcagtagaagtcagcttcttacctctcatagtgaatacagttgctctgcctgatgaattgagctacatatgtacacatggggaagactgggatgtagcttacattattcatctttatccttctctcactttgcggaatcttctcccatattccctaagatatttacttgagggaacagcagaaactcatgagctggcagaaggcagtactgctgatgttctgcattcgagaatcagtggtgaaataatggaattagtcctggtgaaataccagggccaaaactggaatggacatttccgcatacgtgatacactaccagaattctttcctgtgtgtttttcttctgactccacagaagtgacgacagtcgacctgtcagtccacgtcaggagaattggcagccggatggtgctgtctgtctttagtccctattggttaatcaacaagactacccgggttctccagtatcgttcagaagatattcatgtgaaacatccagctgatttcagggatattattttattttctttcaagaagaagaacatttttactaaaaataaggtacaattaaaaatttcaaccagtgcctggtccagtagtttctcattggatacagtgggaagttatgggtgtgtgaagtgtcctgccaacaatatggagtacctggttggtgttagcatcaaaatgagcagtttcaacctttcacgaatagttaccctgactcccttttgtaccattgcaaacaagtcatcattagaactagaagttggcgagattgcatctgatggctcaatgccaactaataaatggaactatattgcttcttcagagtgccttccattttggccagaaaatttgtcaggcaaactttgtgtgagagtggtgggctgtgaaggatcttccaaaccattcttttataaccgggcagg

SEQ ID NO: 149124 - DNA, 768 bp, Homo Sapiens
  misc_feature (608)..(608): n is a, c, g, or t
  misc_feature (631)..(631): n is a, c, g, or t
  misc_feature (740)..(740): n is a, c, g, or t
  misc_feature (748)..(748): n is a, c, g, or t
ttttttgtattgcagagctttagagcaagcacagttttatttatttgccttaaaccaatatttccggataaaaggtatatttttcttgtggagattgtagaataactatcatgagcaaaggcagaaagtattcatttcaacttagtaaagacatattttttcactatcacagaaagatgacctttacataaaaattgttacatatacttccatagatactaatagtaagtatgattttttttaaaaaaataactttctaagacaaatggcaaaggctttctttttcatgaattctttggttataaacaggttttgagtgatttttgttctatgaagtattaagtgattctgctgatatctgttctgtgtgtcctttgaagaccagaatataattaattttattctggtctaacatatttattctgatttacattgcttttatgtaacataattacagaatgaaaatatacctttagatctgacatatatcgttgatgaagctcctgctgagcatgttgcataagcttttcatccttttaaaactaaaaactcagaggctcttaacaggaaggataaacaaagctgaaatacgaactctgtatatcttncaatgattctcgacatgatgttntgtattcactggcccagagactcattttttctatgcctggggacattattttctataccattgctatcatctgatttcagctggtcaatctgctcaaattctttccctnatctgagngctaatttttctttgtgtgt

SEQ ID NO: 149125 - DNA, 1058 bp, Homo Sapiens
  misc_feature (1026)..(1026): n is a, c, g, or t
gccgggtcggggcggggcggcttttctgtcggaggacgcgaaccggcacgctgcgcctttaaggagtccggctgggctgggcgccggagctgggagccgcgcgggtaggagcccggcggcaggtcccagcccggggctagagaccgagggccggggtccgggcccggcggcgggacccaggcggttgaggctggtcagaatctcattttcagcttttgccagagccagtagcagttgggaaagaaggctgtgctctttgaagagagtcagccagcctgaaagagcaggatggatcttgatgtggttaacatgtttgtgattgcgggcggcacgctggccatcccaatcctggcatttgtggcttcatttcttctgtggccttcagcactgataagaatctattattggtactggcggaggacattgggcatgcaagtccgctatgttcaccatgaagactatcagttctgttattccttccggggcaggcctgggcacaaaccctccatcctcatgctccacggattctctgcccacaaggatatgtggctcagtgtggtcaagttccttccaaagaacctgcacttggtctgcgtggacatgccaggacatgagggcaccacccgctcctccctggatgacctgtccatagatgggcaagttaagaggatacaccagtttgtagaatgcctgaagctgaacaaaaaacctttccacctggtaggcacctccatgggtggccaggtggctggggtgtatgctgcttactacccatcggatgtctccagcctgtgtctcgtgtgtcctgctggcctgcagtactcaactgacaatcaatttgtacaacggctcacagaactgcatggctctgccgccgtggagaagattcccttgatcccgtctaccccagaagagatgagtgaaatgcttcagctctgctcctatgtccgcttcaagtgccccagcagaatctgcagggccctgtcgatgtccgcatccctcataacaactcctaccgaaagttgntttttgaaatcgtcagtgagaagtcagatacc

SEQ ID NO: 149126 - DNA, 938 bp, Homo Sapiens
  misc_feature (164)..(369): n is a, c, g, or t
  misc_feature (389)..(397): n is a, c, g, or t
gccttgtgccttgtaatgtcttctgcgttccctgatcttgatacgtatacgcttgagtgagtgtacgtcgcgcagccgacgaccggccagcgatcatgaggagaagcgagagcgcccatacgcaacgcctctcccgcgcgtgccgattcattatgcagctgcannnnnnnnnnnnnnnnnnnnnnnnnnnnnnnnnnnnnnnnnnnnnnnnnnnnnnnnnnnnnnnnnnnnnnnnnnnnnnnnnnnnnnnnnnnnnnnnnnnnnnnnnnnnnnnnnnnnnnnnnnnnnnnnnnnnnnnnnnnnnnnnnnnnnnnnnnnnnnnnnnnnnnnnnnnnnnnnnnnnnnnnnnnnnnnnnnnnnnnnnnnnnnaagaattcggcacgaggagnnnnnnnnntaaggaaaagcatattcccttttgggggcaactgatttggcaaaatttaacgaggtttttaaaactcaacagtcatggagcaccattaaatattcacacaaaaagacccaggcagcttagagattagtatttccttgttcacaagacacctaattgacttgcaacaagacaaaatattcagtgcatctggttggggccaacatggatgatgacgtgtttctcataagcccttttcattgttttctcaatttgcttcagaaaaacttgcgggattcgtccacataaagtgtgcacagtctccaaaaacttcagctgaagggggtaatacatggattgaaagagattgtcttgaaagggaaaatcccgtattgcttcatagagtgctctgaacgttggttgcttatcgtcatggtagacgcctcggtttccatgcagaacagacacaccttcatgctcagcctctctgcagttgcttccgtacatgcagtgatcgggacggtagttccactggcaggggaatacatagagacactctgggttg

SEQ ID NO: 149127 - DNA, 446 bp, Homo Sapiens
tgcggccgcgctcaccacgtggatccccacttactaccattctcggcgggggtccagttgggggaacccgcaatatgttgttccaaagagcgctcgcccctagcgcccgtccccgagggtgatggacagagcaggactggtttgctggctcctgaaccttgggctccatcgctgggattacgcagcccctcccttctcagctctggggtgaatattgtctgtgtcgagtggtttctctcctctctacctcggcttcctcttctgtattgcagccccagtgccccaagtcgctcagggatcccgcgggtgggggcgccctgatgtccccgaggtgcagctcccacgctgcggcccggctttatgaccgagccccccatgacgctcagatccgccggggcttcagtctcgagggcgagtccgtgtgccgcggccacccgcgcccccac

SEQ ID NO: 149128 - DNA, 514 bp, Homo Sapiens
  misc_feature (411)..(411): n is a, c, g, or t
tctggaccacaactcccaggcgccacgcggcgcgcacagcctcctgggaagtgtagtcctgacccaccgtcgccagtgactcgtgatcccacaataccccgcgagggaggcgccccgggcacgcccctcccagagctcagacatcccggagcgaccgggccccaggaggcccaggaatctgctcccttctctcctcctgcttcgggccttgctgtcccgcggcgtccttcggtgggtggctcaggacccagtgccctcagcccttctcttgggccccgctgagccctgcgcgcgccccacttggcctggaaggccgtccccagcctcccagagcccagtttgggtcattcgggcctctgagtagagttacttcttcaagaggcccgcgcacactgggaggcctcttgtggngccctgcagtgtgagcgcgcggtagctgacgtgcgtctggaaggccattgctgggttccgagttcggggctctgccaggctggtggcaagccctgcctgaagt

SEQ ID NO: 149129 - DNA, 395 bp, Homo Sapiens
agtcgtctccttttgtgctggactgggttgagagaagtgtatacctaggacagcttcggatccccagggacttcaaaccctaagaaagatcatctgaattaggcaggtataagaattgcttgtattcatgtgggagctaatagctcagcacaagtcatgcatggagtagctgaaagatgactaggttggtgagcaagggaatagtgatcaaacaggttggagttcctggtagctttatgtctgaatatttttgcttctttgggaaagcttcaggaaggactaggagaattacactactttgcaaacattttcagacaggagctaatctcttttatctgtcatggacaggtagacagaccttcaatgccttttgtaatgacttaaaccaaatgatg

SEQ ID NO: 149130 - DNA, 1018 bp, Homo Sapiens
  misc_feature (84)..(84): n is a, c, g, or t
  misc_feature (430)..(430): n is a, c, g, or t
tttttgattctattcaggagaagtttatgaagaaggtagaacttgaatagagactaaaagctatactgaatttacatagagcanacattttcctactggagagaacatcaggggggaaggactgtcaatggtccattggggaacacaaagaaatcattttaggtatataaaagaaattcaattatgaaaagccttgaaaacgaacctgagggagtttggcctaaaagcaaaaaggaacccattataagaatttatgaagtagagtgacatcatgaaagttgtcttttaggaaaagtcacctggcaccagtatgaaaggtgagttaggagagaatgagaggatgtagattagtcaagagactatcagttattggatgtgaattaaagagatgacctttgtaatagggaagagtggagagactgaggcaatntcagaaaactaggtagagccattttctcattaagagcctttggctgcaagtaacagaaatgagattaaacaacaagaaaaaatattgagtcccactgctggatatccaaatgtagtgccctttcagggacaggcttactccagttttcttccagctccatttctccgagattcatttgactcagtgctcctctatttgacagtctcatgttccaggtagcatgaacctagcgacttcagttccatcacatccacacatgaacaaatcctaaagattatgaagaaagagagctgacaaagccaaatttggggctttaatggaacaagatgtatgtaaggaagttattaaaagattcatgaaagatttccaaacagcagcaaagactgaattgaaattctcagaataaatctgcaataggccaggtcaactgagttcctttcacaatccaatatggctccatgactgctgtaccaggctccaagatcagttgtgaatttcaaatatcaatctcagccttcacagggttatcttaagtactgtacctcaggaccactgactcttctcatcatgtgtcagccttcctagccc

SEQ ID NO: 149131 - DNA, 1015 bp, Homo Sapiens
ttttttcacagggccaaatgttcccctttattatggttcactcagttaccaaagacagacacattggctcaggcagctcaactgccagctggggaacatccagctccaaaaacagggagcagcagcggcaccaggagaatggcaaagcaggtcactgggaccccagaactgacctgggccctccttcacccgaccccaggccagaccttcctacaaagatgaatgtgtgccctgcccccacttctcatactggttctctccccgggaaagtgcatagttgcctggagatgcagcatcccagggcctgaacaagctgggccacacaccgggatcaggcttcccaagggtagagccagagcatggccatataggtccaagccaaagaggcaggtaggacaggaaactgattggaggtaacatccaacaggtcatggatgctaggcagggagctggatcacaggcctcctggagctaccagagagagaagggaaagggagccaaagttctggggtaggggagaggaagggaaagggaagaagggcctagacctaggtaccttttcaggtaccagggactgtgaccattgctcccaagagagaaaatgggagaggggagaggcaattatattttgtgcccaaaacctaaaggaccatcaggaagagaatttccagaggccctggctcaggatggcctgtaagcctaggtattgggttccaagctgaagccaggccagagtagccaagtggggtttggatttttgtccaaacagctcaggcaagcttctggtgggagaagggaaggtgggaaatgggcagatgctctttgggcgagaacccactccccttcaggccccgcacacagctagagcctctaccagccatgttctcacactgcttggaacagaacagccccacgggcctaaaaccactctcctgaaagtggtagggagttccgactgggtgaggacaagccaagaccaaggcctgtaggcagaagggagccagttaccttgatt

SEQ ID NO: 149132 - DNA, 492 bp, Homo Sapiens
tttttcacctcgaccttttttatttgcattttttaaaaacaattaaattagaatacaaatattagaaaacagcggccttcagctgcccgtgcgggcgggaggggccgagctgcgcagcgggctgcgggctctgcagtgagactgaactgccctcggccagatgcacgtccctttctttagacctgaaatgatattgcttcctgactaggagttctgtttatacaaaggaaaattctgggctggggaggacaaaagcaaaacagaccgcaggcagcggtgttggagaaccaggtgaggccggtgccccgcctgcgccccggtctcctggggggcaaggggggtgcccagctgtgggctcctgaaggcagagccctggtagctcccccagttgttggaccctgaggccaagggcatgggtggggcctgcgaggggccgggaacgcctggggacaggaaggaggcccctggtctggtcctgctggaagagtgagg

SEQ ID NO: 149133 - DNA, 519 bp, Homo Sapiens; identical to SEQ ID NO: 60892

SEQ ID NO: 149134 - DNA, 444 bp, Homo Sapiens
  misc_feature (253)..(254): n is a, c, g, or t
tttgacattggtcattcaggttttatttatgacaacttcttagaacacacacatccaatctaggaacagaaatgtacaacatggggcttaaataactttcatacactatgtacagccatcggcagaaggtacaaaacatatatacaccttgtgctagtcacatcatggaggacagcaggagcctaatgaagcctgcagcctgggcaggacatgattgctagaaaagagttggtgggcagggcagggccctgannttcatctcaggggtcttctctgatcctcggctctttgtgggggagtttctatttccctacttccctgcaaggccctcaggacatggttcacaggactgaactagagtgtgataggggcttcaagatcatgagtgctggggatggggcaggggacagaacaaaggtatcaaagaagaaacagaactttccc

SEQ ID NO: 149135 - DNA, 392 bp, Homo Sapiens
cccccctagaaacgtttggaacaatctagaactttagagctcgaaaacaattgtaataatgctaaagaaaaagtcatccaatctaaccacatcaatattgtcattcctgtattcacccgtccagaccttgttcacactctcacatgtttagagttgcaatcgtaatgtacagatggttttataatctgatttgttttcctcttaacgttagaccacaaatagtgctcgctttctatgtagtttggtaattatcattttagaagactctaccagactgtgtattcattgaagtcagatgtggtaactgttaaattgctgtgtatctgatagctctttggcagtctatatgtttgtataatgaatgagagaataagtcatgttccttcaagatc

SEQ ID NO: 149136 - DNA, 540 bp, Homo Sapiens
tcagtgtcaggactagtatattttattttcagatgcaagcagcaacttttgcatttcttatcacaaaaaaactatatgagaaagctggcaagcccagtgaacttcctggccggagaggtttttccattaaaggtggcaaggtttgatcatccaccatctttagagttagaccattgagttggacagatttggaaagtaatccatgaggtcccaaaggtcttagaaggtatttatccacttgcttgttagaaaaaggatagggtaaccgcaagtacttggtgacattatggaggtttatggcatacagagttaaatctccttctttataccttggattgtcagtgtttgtgcaatgaaggtatactcgaagcttccttctctttgaaccttgcacgcttgccattaacaccttggtgcccaccaatttcttgaacagaagagatagccaataatcaggtaaaggatcgaagttttcatccactaaatggtagtttcctgctccaaagaatacttgcctcatcaccacttctattcccattc

SEQ ID NO: 149137 - DNA, 747 bp, Homo Sapiens
ggtgtgagccaccatgcccagcctacaattatgactatttccatttgaaaccatcttcctcagaaattgaaattttagagccgctcttgctagcatgtgaaaccttttccttgcttattgccttttggcgggggcagtgaaggaggagcctggcctttcaaaatgtgatcaaaaaaataaccgaactccagggctcattagtccttttataaacgccggtgtgaaatgatgggtatccgtgtgcctggtccaagtttcctggtggttgacttgggcgaataaaaataagacatgttctgcagagttctccttttaaattcttgtgtaatattccgtttgttttgctcctttgcaattaactacaaacttctaagtcctagaaaagatttcaagtatttatagagtgagcaacgatcattttcctagtcaaatagtatggcaaaaatcactgttttaaaaagttgtggcattaaactataaatcctccccccctcgcttcccacccccaattatgaaagaaaagcatatgacaatgcctactgggctcagcttttgggctaattgagtctgactgagccttcttagcaggttcctgtcttttgaaacctcaaatcccaaaaagctgtctaataattttacttttttagggactaagaccaggtattttcagcagaggttcttacttttctgtaattgaggcgcaactataatgttccagaacacaatcttaaatctgaaagtgagagg

SEQ ID NO: 149138 - DNA, 513 bp, Homo Sapiens
aattgttggcatttgagcgggtccttgaagaatggacaagacttaaatgtgcaaagaaaatggaagagtaggacctgagcccaaggcacagaagtgggaatgtgggtgtcatatgaagagaccttcctggatgaattgcagagtttggaaaagcgtaaataagccacatttgcctacaaagcaagcttcaatcgatatgcaatgtgcagaagagttaaagtaaaaaataaaagtcctcatccccccaacaatcccattcactagaggtaactactagtaagaatttcatgtacatatttttccggaaattgtatcatactctgcatacagttctgcatcttgattattagtcacttagcagttcagtgttttatgacatctcgtatcagtacctcttgctgtaccccactgggtttttcttctgtgattgggtagctgtcaatcacagtgaatgaatatatcataattttgcattttccaattacttggttggcttcaagttttgttgattac

SEQ ID NO: 149139 - DNA, 679 bp, Homo Sapiens
ttttttacatgaaaatgtatctctaatgtcttctgtgtgccggacactcagcaggtaccggctctgctactagaaatcttggtcaaattgctcaatttggtgtagaaaaataatttctggggatgaggggcagtgagtgccccaagaggggcctcagtcacgaatgtcgatgaccagtgggcacaggtggagtgagtgcttgatgcccatggtgaaagcagggatgtggggcttgtgcacagtgacctgctggacctcgtgggagccggggccaggccgtggcgtgaggtccagagggtaggcgaagcgcttggccatgctgtaagtagggctgcggttctgatagatggatggctcaggtcgggcgtacgtggtaggtccagtgcctcctgccacatcctccttgtagaaccagttcttgtccctggaggccagactgtagcagggagcagctcggctgacaggggtgttgggccccagcaagagtggcatctggtactggttgggagccgggttgaggtccatcactctgtatgggcgccggtagccaaacgtgtactggggagccctgcgtacccccggtgggtggatcttctcaaagtagtactggcaggatgcgagggtggggtccaggcgcaggttggagatgcgctcctccatggggacctgcgggcagttg

SEQ ID NO: 149140 - DNA, 314 bp, Homo Sapiens
tttcaagtaacacatttattatctcacagttcccatggattgggaatctgagcatggcttagctggggcccctgcattagggtttcttacaaggttacagttttggtgtcaaccaggactatggtctcatcagaggctcgactggggaaggatccatttctaagccttctcgggttgctagcaggattcatttccttgtggctgcaggattgaggtgcctggcttcttgccattggctgaattctgctctcagcttcaagaggctgcccacagttccttgcaatgtggtccccaccctgggctgttgggattta

SEQ ID NO: 149141 - DNA, 1056 bp, Homo Sapiens
ttttgtctttgagtgacaccagagctttgttcacggtgatgggctctcccataattgtgggctttggttgaatgggttttaacggaggactctttggtgtagcctgaacaacagttgttgtgagggagggcagtccgggtattgtcccagtggtggtcgttgtaaaggttgcagtgggtatagcgattagctgcgggggagtgggggctggggcaggggcaatgggccgggcacttttcagtttagagaggtttttgtccgttttgcagttgttagcttttttgcccttttctttatctcctaaatttttcttgtcaattaatccttctgcttccagtttaggcatctcagcagccaaactgccgtctgctgccgagcaactgtctaacgcagccgtcatgttggagattactggaaggttgttcagttcattgttaaggcccttctttttgccagaattcttcccagctttagcaccaataatggaacctgggccattgctcatcagctctctctttccctttggggtcccaggtgggtttccagcaccaggggatgccggtgccttcaactggtcataagcagatacacttgtgcttggctcactgcattcaagtgccacattactcaatccttcctcacagtccgagatcttgtcctcactgtcaggctcgaactccagcttgttttctgggtctaagtgtgcatgagcctggtggtacctcaggccgttaatgtgcttgtactttttgttgcagtttgggtggggacagtcgattaacactggagaagagcagccttggtccaaaaaagtagtctctggtttcccttgaggggtagtgggagtgcttctggaatttgtgcggacacgctttccaggcttattgtcctcagagctggagttcaggtccagctccattggaggcttgtttttccttttgttggtggaggaagggctggctttgatatcctcagcagcacaatttgggggtgtccttcgtccgctggcattgaggccctcgtgccgattcacccccagcctcgtacctagccgtt

SEQ ID NO: 149142 - DNA, 223 bp, Homo Sapiens
tttaaaatagtacaaaacataatttttttcttatatttgtatgcaactctcaactgtatacagagatacctcagagatattgtgtattcagttccagaccaccaccataaagcaaaaattgcaataaagcatataaaagttatgtttacactatattataatctattaactgcaatagcattatgtctaaaaatgtacacaaaattttaaaatgctgcattgc

SEQ ID NO: 149143 - DNA, 250 bp, Homo Sapiens
tttgcaatacataataaatctgattttttccgtaggaggtggttcaggaaaacggtcccatttggcacctcaagtctaggtccctcaagtctctacaacagtatgcaaagaaaatgttcatcttcattcttcttatagttttctggtaacttactgaaccaagcgcacacacactctccaaggacaaacatttttcagtgctgggacaatgcaaattcaggtaagggaagacaaacatttccctaagtgc

SEQ ID NO: 149144 - DNA, 2423 bp, Homo Sapiens
ctggtatacctgctggggagcccgtgtgaaggcctggtattcctgatgacatgattgcaactattcgctgagagggtgtgcccccggaatgaacgctctcgggttctgtcgtcgccgcagaggccaaggacaggctggagcctgactgagcccggctcaagttatcaggggtggaggagcacttggtgccggagtcgctgcacgactcttcccggtgcaccgacttcggccgcggcttcttcggctttgacttgggcttgccgagcccctgctcctctaggatctgctgctgcttcctccgcaggtactcctgcttgatgagctcgcgccgcgccttctcctcctccttccgcacccggtcttcctcagctttgcgccgggcttccgtcacgcttgagctccacctccgcttccagctgctgcttgcgcacgcgggcctcctcgcgcttgcgctgctgcttcaggaggaagctcgcccgcttcttggcgagctcatcttccgctttctgttcatccttgaagaagaacgccgacccccggcttctggtcgccttcgctgacaaggtccgccgagccatcgaggcttaccagctccccatcctcgtcggcggcctctcagcgatgcggagagatgccaccttcaactgagagtctgcgctgtctctctctcagagctctcctctcacagcgggagacgttttcttttccgcagaaaattctggaggagctggaccccacctccttcacactcgcatccagaacttctttgaggctcatctgctccgaaagaatgttggcatctttggaagaggacagagtaagtgtccgctgattgctttcatcatggagcctgtaactgtcgaagagacacttcccatgtgggtcaccactgggctccagggcactgtccaggccagggtccgtgggcgtccgagggtggctgctggcagggaagggtctcaagtgcgggagcgtctctacactgggcgttggggttttacttcgggaggagccctgtggcctgtcttttgggaccttcagctccgccggccttccggaacgggaattccggccttgacccagccggggggctttgcggtggccagccacgcccgtgggagagagtggctccacgaagtggactggtgccttcactttgtggtcctgcgagttattcttagagcctggcactgggactgtgggggacttcatcagaagctgctcttgctgctgagagattttcaggatggcctgctgcagcgtactgatggtttcgttaagcttctcgatggaaaggtcacattcattcacgtcgacaacctccccaacagtgtcctccaggagggcagcggagatcaccttatttctctccagctcgtgcagagccacagggtcttttgctttatgttgctgagcaaaggccaggctctctttgtccacatcctgtggctcgtgaaggagctcctctctctgctcctccttcacgagaaagtcttcggttttggaaacagcgtccccacagtcctccccgttgtgctgagagtactcctttgcaaagtgctccggcctgaggggtggggcagcctcggccttgcccttcttcaccacatgcaggaatgcagccttgccgagcttcaggcgctgccttgccgacagcgcctccatcttcttcttctgggcctcgatggccctgcgcttctcctccagctgcatgtgcagctgtaccagctcagatgccaggaggctggccgggatccttgccatgctggctcggtactcctgctccctcttcgtgcctccacgtcgtcagaggggctgggcagctctcctagaccgcatctggcgtggtcttctgggagctgctgttgctggacttggtctcacacgctgttgagtctctggagcttcctctccgcaaagctggtcatcttcgacgctcccagctcgccatggagacactgctcatctgagaggctgtcgctcaggcaggggctcgacgcgcccgctggctgtcatccttgtcttcatgttccttcaccttcactgtcctcctgcagtttggccgactcttcctccccaatgtatctgctgaaaaccacacggatgggcctcacccatgaaatcgtgctcggcttcctctatgtccaccacatccgagtcagaatcctgcctgaggagagtccacggctctgaatcgctgggagcttggggctttttgaacaactaacatataaccttccctcggtgtcttcatcggccctacctacatgtaaggaagaagccatccgtggatggtcctgggggaacaggatcgaatccgcccagggccagagtcccaccacagacctgtcctgcggtttccactgacagtgtgctcctcgtcccgattaaccccaggcctactagctatgttgtgcgttccc

SEQ ID NO: 149145 - DNA, 787 bp, Homo Sapiens
  misc_feature (525)..(534): n is a, c, g, or t
ttttaccattatcttacttctcattttcatattgcattcacccatcttgattatttactcttttcttcctttttagaataatgaacaccttttcccctttgctttcttggttaagtaatattcctccatgtgtctacatgttccaaatctatatgggttcttcaacactgttctctttcccctgctggctatcttgaccattacacatcctttcctttgccaataatgtttttcaataactcagttaaaatttaaattatgacattttagcctaaatgcaaaatacttaatctttgatgaaaaatttaaaaagagtataaatcatctcatgactcccaagagtactatagtacttacagatattttaatgccagtaatttaaagagatacggatcttcaacagttgtcagaggattgcgattgagaattctgaaaaatgcaatggaattaaaataacctgcattttcaatgtgtgaaactgcataagaagtttacattcattttttggtatggaacttgtgggtnnnnnnnnnngtcattttctgtttttacctaataaatcaacattagactccgtaaagcattattcctttgggaactacctagatctctaggagataaagtagaggagagaaagagggggaaaaacagggaaaaaaaagtggatagcaaagaaacaatatgccacagaacttttcaggtcgaaaaccctagaagtgactatgttggtaggaagccctgattctgtaggaaacactatttctagtgtcctccataattcaagttg

SEQ ID NO: 149146 - DNA, 394 bp, Homo Sapiens
ggcctgtagtttttcaaacgtttttaattcctaattcgcacctctcttgttatcatcacacactgtagtagccaatggcacttctttttgctttgacacttgacattattttaggcctctgctcctcctttggcttccacaagggcattctaatttcaaaagaaaagttcatctggaataagtcctgtgactggcccctctggcacccagtcgggttcaacaggtgtctgttgaatgactaaatgaatgaatgaagcaaatcccttcaaaaagttcggcgacatctttactctcagcaaaatttccccatttccttcttaaacttgggattaccacttagagtggcctccagggattcccaagggaaatcggcaaagttgatttaacagttttg

SEQ ID NO: 149147 - DNA, 1504 bp, Homo Sapiens
ggccgcgggaaacccttgtggaaaccatgggggccagcctggtacttcacctgggccggcgtttttgagggcccactccccatcggatagttagatggaagcactgatctgttcattagcaattccgccagactccatgccccagaggaacattgcactgaaagttctctagtggctcttggtggaccaggtagtaacgcgcagagaacccatccttggccaccgccatgtccgtgtgaaaggtcagggagaggatccccgtcgatgaacgaagttcagaggtgttttggtcccacagtacttgccaatcagggggccaacatgtggaatgccatcccagatgtccagccaatcgtacttgcagtccccttctcccacctgcaaaggttcatgctccaggtcaaagatcaggaacttgcaggatgatctccatcttgggttttgccaggatggtaaaggttcaagtccaagttgtgtggatacttctcaggaaacccaggagattcgatggtcccgttggggcttgtgaagttttttgagcagtcttcagagcctgtcttgaagatctcgtagcgcagagagaagcctgccccctgccgggcgtagtcggaggtgaacttgatgtagagcatggagcccgaggagatgatggtgggcggggcgatgttcccacagtgtttgcccaggaggtctgcggattcactgtccccatcccgaatctcgataaagtcatacttgcagtcgtgcttctcgatttcaaagtgagggttgaagttgaggacaatcttctggttgggttcgggggcgtaaacaatccactcgcagttctggtgggaggggtagtcctgggggtaaccgggagaggtgatatagccagcatctttggaattcaaacgacctccgcacggtgggtctggttggcctctcacttggtgtcttgaaaagtagagggctaagaaaacccaggtgagaggaaacatatccattttggagaaggtggctctttccagagctgggttcgtaggtttcttgtttaaatctttgtgtttttctctcttttattttcctccttacaacgtcttatgcagaggtttctaatggtcagcgtttccctcctgagtcctggtggcttgtcttcacctctattcttgctggaatttccacctcaccaggaggagagtagctcctgaaatcagcaaagagggaacaagccgggaagagaacacggttttcctcttaaaaacaaaacgcatatatgttctctccagttcctcaaagtgtcatttcctttatcctacaaatatcacgagtatttcccgaaagccaagcgtaacaataatgataataataataattaaaaccaagacttgccttgggcatcacacggcccccaggcagctgtgtgatctcagaggcgtaaactgacacacatcccgcggcacccttgacggacacgcgggcggaggcagccgccgccggacagcccgagtggaaggcggccgca

SEQ ID NO: 149148 - DNA, 584 bp, Homo Sapiens
  misc_feature (21)..(21): n is a, c, g, or t
  misc_feature (40)..(40): n is a, c, g, or t
  misc_feature (53)..(53): n is a, c, g, or t
  misc_feature (136)..(136): n is a, c, g, or t
agcaccgttggattatttggnctttcctgggctaagaaanattgtgctttccncctgccccccaagttcttgaaatgcaccttttctttcaccaaaaagacagctatcgggtatttaccccatcctctaacacacnttcaaatgaaggttcctgattgagtcaatttgctgtggatgaagttagctgtttaatgcgaaagcagtctaacttctagtagcctagctaaatcctactgggagccttatacacgtagactaaactcttgctggtatcttcagatagtaatgcatttgtgtatttcagatgagttcatcttaattcacttccattttttgccttctattgccttgcttggcaggtagctgcattccatagtgtggcattcagtatggtggatttaaaagtgagggtgggagggtaaagtaggggttagggaacttttgcccaaggatcaggtttagtcttgcttatgggtaaactggtggggttccggaaaccgacatgggtcttccagtaggagtgggaacacatgaaggacccccaacaattcctttaattagtgcttattctagtttgagcactg

SEQ ID NO: 149149 - DNA, 457 bp, Homo Sapiens
ttttttgccggaaaagatgtttttatgttcacttacatggaaaaaaaatccaattatacaacatgtagatatatgtttctcagaaaattcatctctatgaacctgtttgtttcagtcgcagttataattcaacaattgccaaatggaagtcataaaattgtggggtgggggttggggaggagagccgccaaggggaaggtagtaattatgtgctatttcttttctagtttcagattatttggagtttcaacttttccagcaagtcagagttacataaacagacaccatactaaaatatgattgtgtaaaaatataaaattcctaaagcatgatggcaataatattttagggaaaaaaacattagagtctgatagcatcagaaaatacaaataggatcatttgagcagtcctgtttctgtgtacgaacagcagtgcaaatgatggatgtcgtgaaaga

SEQ ID NO: 149150 - DNA, 448 bp, Homo Sapiens
ccaactggaaacgaatcggagccattttcattttcctaaccggggcctgacatgctttaaattatctggctgtattctaaatcaacacctaacccctcaaggaaactgaagaatcagtatagcagggtaatagctttggctcagagctccaataatgtgctgtctagatctgtccatgtggaaatgctttcagtccaaatttttaaattggtggttaccaaagagttcacaaaagcaggtttgtagtgtagcacctttcatgcgaggcatgcaaaaagcctattttaaaatcactgtgcatattatagagttgtagccacctcacaatgaagtactacagcctgtgctgtcttaatggtttatgtcaggaaatgaaaaagatactgtaccagatctggaattacaatggggagtaataatgtatactaaatgacttttgtattttaaa

SEQ ID NO: 149151 - DNA, 1016 bp, Homo Sapiens
  misc_feature (402)..(529): n is a, c, g, or t
ctcacccgctgatgcccgccaacccttggggtgggccggtagttgatgaaattttgcctccaccccctccagagcccccaacagagagtgcctgggaacgaggactccggcatgcaaaggaggttttaaaaaaagcaactattcgaaaagaacaggagcctgattttgaagagaaaaggtttacggtgaccattggcgaagacgaacgggaatttgacaaagaaaatgaagtttttcgagattggaattctcggatcccgagagatgtcagagacacagtactcgagccttacgcagacccttattatgactatgaaattgagcggttttggcgtggcggacagtatgagaatttcagggtgcagtatacagaaacagagccgtatcataattaccgagaannnnnnnnnnnnnnnnnnnnnnnnnnnnnnnnnnnnnnnnnnnnnnnnnnnnnnnnnnnnnnnnnnnnnnnnnnnnnnnnnnnnnnnnnnnnnnnnnnnnnnnnnnnnnnnnnnnnnnnnnnnnnnnngcagcggaggaaggaggagtgggagcgtgagcgagccaagcgggacgagaaggaccggcagcaccgtgaccgcgaccgggagaaggagcgggagaaggagaacggggaagcccaagccccgctccccgcagccgccaagccgccaagctgagccaccaaagaaggaggctgccaccacggggccgcaggtgaacgagagcagatgagtggaaggacccttggcgccgatccaagtctcccaagaagaaactcggggtgtcggtctccccgagccgggctcgaaggcgtcggaaaacatcagcctcgtcagcctctgcctctaattcctccaggtcgtcttcgcgggtcatcgtcctactctggctccggctcctcccggtcgcgatccccggtcttcatcctacagcctcctactccagccgctcttccagacaccagctcgtttctcaggaagccggtccggtcccggtcctctcctttcgtccca

SEQ ID NO: 149152 - DNA, 714 bp, Homo Sapiens
  misc_feature (170)..(170): n is a, c, g, or t
  misc_feature (190)..(190): n is a, c, g, or t
attgggggaggaaatcccaagcccttatttcatggcccagggatttccttagggaaaacaagctatggccccaggtttccctttccctaactggggccccgcgcgcccaaaacgaatgggttttagaaaagctttcttggagggccgaagggcgggccgaacatgtttcntttttctttttccctttccncccccccggctttttggaaaagtattctcaaggtaaatatttttttcctttggtaaaaagaaatctttttcccccccctaacctaagcaagtggagctgccactacctaatttatctattgttttgctaagaggtagataaaacaaaagtgaaatggggcttctatgaggaggtccattagagggtgggtggggaggggctgggatcgcccagtggaactcccccaactacaaagacggcctgaatgagtccaaggaccgcgccctcagactcccccagggcaaaggatcctgcttcacctcttctccttctagagccaactgggcccccattgaagactgaaaaagggcccaatggaggtgtaggatctcaaagaaaccctgttgaagaggtctcagctctggtttccccaggcttcctgactttggggctgtgtggtgggttccaggccaagccccaggtctcactccagccagccccctctagaagggaagaggccattcctttcctcaccatctggtccc

SEQ ID NO: 149153 - DNA, 341 bp, Homo Sapiens
acaaaatttatttttattgtggtaaaacatacacaacataaaagttatccctttatccagtttgcggtgtacgtttgttaaccttacagcaagtaacacatgagttttaaattagaatttggacaacggcaaatgagatgaaaggcgaacaatccgaaagccggatcactgaggagctctgggaacgcgccgcgagctgaagccacacggggaactccattttgtcgggacagggtcggtcctggccgcctccagggagtcgggtagtttccgcggcgtggcccgggcctcccctgaagtccgtccgcctctctccgcctggcccagcggcgcggccgcaa

SEQ ID NO: 149154 - DNA, 861 bp, Homo Sapiens
  misc_feature (406)..(406): n is a, c, g, or t
  misc_feature (413)..(413): n is a, c, g, or t
  misc_feature (418)..(418): n is a, c, g, or t
  misc_feature (425)..(428): n is a, c, g, or t
gtttggggaagaggttttcccacatttccggacaggaaaggctttaagtgaaatttggcaacccaggttcttgccaattaaagtggccaagggccgggggcgctaaatttaataaattgagggttcggcctggggcttccctttggaaaggatacccagaaaaaggaccttcaggaaaccccccttttggagttggttttcagaaacggctctgggttgccccccgggggggttttttaatttggtgaggaatgccaaagcccctaggtccatggcccagggatctccctaggggaacacggtattgacccatgtttcactggacctaagtgggccccgcggggccaaaacgaaatggtctagaaaagcttcttcgagggggccgagggcggcccgacaaggaggnttttaanggggngcggggnnnngggaccgtgcccagatcagaatcgcctcgataatcagtggccggggacaagcccggcctcgtctatctgatcaattcatcacttctgagcgccgggccccgcagggccagctccgggacctcggggaccacagcgtggccgccgcctaaggggcctcgctgcacagcgccccgagggggcttcgcaggaggagagcttttcatttcgggtcggcccggcggggctggggtcacgatccgatcaaataagatcaaagtgtaagcgggaggaggggcgcaggggtgggcgcacgcactcgcctaacacgctccaagcgcgcacactcacacactcacgcgtccactcacactcaccctgcacgcgcctcacacgcgacgccacagctccgcacacaacacccaggacccaggccgctctccctccctaaaacccc

SEQ ID NO: 149155 - DNA, 579 bp, Homo Sapiens
  misc_feature (119)..(119): n is a, c, g, or t
tcaaataaacattccaacccagaaggggtcactaacaaataacaaatgccctactacaatctaaacggaatataatccttctagccccagctctttacagcatattttgcataggtacncaggagctaacgatgggcattatagttggatacatcagcttcacacattttaatcatttccagaaattaaacagtaaaagatgcctgaccagagaaaaatatttaatcagtaagaaagccggtattaattttatgtctaagggttatcatgtaaagctgtggaagtaaacaagaaggaagatggattatgcttatccagttatagattttgttagaaaaaggagtacagcaacgggagaagaaatgagatcttttcaatcagggttgtctaccccttaccttaaactggatcctggccactaataagcacatctcagagcagacagtcagctctttcatttccagaacccccctgaagaaagactactgttctccatttcttaagggatttgaagaaactcaaaggctcactgtgtctttgaggtctgtcgatagacagctactgctctgtatggccatg

SEQ ID NO: 149156 - DNA, 523 bp, Homo Sapiens
tttggccactaaatttttattgtgacccacaatatgaaatacattatggaacagacacatagaacacttagacacaaataaactaagtatgtttcacaaaaacattacgtactttactattatattgcactctgatatttttctacttgacattattatagtctcttctatgctattcaattttaaagaaatgctattagagagctgctaaatttgttttatgacctacagttttaaaaaaatctgactgtaaagaaactaaactaaggggaaaatcaataaaaagtgaggtaaggtctcaattaacagatggtttcattacaaagtatgaaacagatatgtttatatattgttattggtagacttgatgcaatgtaatgtcacaacatcccaaacatcttataccgttacacctccatgcctttcctcatgctaaccaaaatgatcttttaccttcactgtctccctctgaagaaatctgattcactcttctagggaaagcttaattgtcaccttctttgtg

SEQ ID NO: 149157 - DNA, 423 bp, Homo Sapiens
tttagggtgtaccattctgtaatgccctgtttatacaccaaaggcaggtttgtgttgacagaacatatttggggttgtcatgcaacagcagtagtactttgggagaaggggaatgagggggtggaggtggagttggtagaaggaggactttcacgttccagttcttacatcctcgacctgcaaggaacagtttgttctcctttagtgaagaaatcggatgctcattttctgttctacatccaccttttccaaccccttaacatattttgtgatagatatgggtctgtccccatcctgatctgccttcttaatggtcctgtctgcgatgctgcccagctggtcatcttaagattttactcctaccatcatgcttatctcctgtttcagctcatctcacatgatctcttcactcttatccacatc

SEQ ID NO: 149158 - DNA, 480 bp, Homo Sapiens
tttttggtaaaataatgttttattccatggatgaacagacgctaccatgccacatccccacttccctccgaccagatgtcgtggccagagctggcttccccttccagacctagctggctttgtagtcgttcaggcccattgaaatagcaaacgcacagtcatgtagcactcggatcggtcctgtttatcagcacgttggtcctttcacaaatggtggtgaatcacctttaaaacacccagtgatggagaccttccaatcaccctaactataacggacgttcagagctcatgtggataaacccaaagccccaaacgccaaaatgcaacagggacgcatctcctctgctgatgggatgccaaggacacccccgcagggctgggagctggagaagtcagtcctgacattcagcttgtccacaagctcaaaaggaaatgacagtaatggatatatttcaaactagcacttctagagtccagatc

SEQ ID NO: 149159 - DNA, 488 bp, Homo Sapiens
aattgttgctttataagtaaggatccagtccaagttcatgtactacaattggttactttggtctctttgcttctgaaacagtccccaacatttattgtggcattgacttttgtagagtccagggcattctaattttatagaatgccctgctcttgatctatcagacgaaatgcttcctcttgcatttaacctgcttctccactctctgggtttcctgtacactggactgctggtagaagcctgattagaagcaggtttaatgtggcaaaaatttctcctagcagtgcaaggcccccttccccagaaggcaggcagtgtccatctgctccaggattggtgtgtttttatcaagaatggatgttggattttggcagtttcctttttggcagctcttgagatgatcacgtggtgaatcattttctattactacagtgaattacagtcacttgaattccatcctactgggtcgatgtgccggtaccgaccca

SEQ ID NO: 149160 - DNA, 467 bp, Homo Sapiens
ttttacaggagttcagtatttaattaaaaaatttacagcatctgctagattgcaggctgttctagaccctggagttcaagtagtgcaaagttcctgtcttcctggaacttaccaacagtactggagtttcaacgttctataaacaaagatgggtgaggacattagccccgggctaattaaagcgctcaggcccgctccagacctgagaatatcagctgaatctgaatcaactgttctccatttctgtcggttggtggtatcgcggggccacggcgacctccagcggccaccctccgtcttgtggtctgttctgggtccccgggaaggaaagggaggggcgataagccgggtccttgggagcgtcctggtctcccttcgctttacagactaggaggccgcagctagctggcagtctcagatccaggtttcccatctctgggatgagaggagagttcttcactcaggac

SEQ ID NO: 149161 - DNA, 439 bp, Homo Sapiens
tttagaccttcatcttctttattttatatatgatgcttcttttaatgcagccaaaagtgatatttgcttttctcagaaccataatcgatacaagatgcagtgaccaattcattccttaaaacacctgggctccttaaggggctagaagacacaagttacatccagcccatcagggagccagaggcgggaggggtccccagccaagctctggcaggcctgccatggggcagggcctgaccgtgcagccagaggctggcagaggcctggggaagggtgggcagaggcagctgggctctcagtcctggaaccggagaccaagggctgctcatcaagctccgtcaggcaagggcggcctcatctgtgcctggtagattctaactgcttccaaggtagaggaggacgcgtgcaggaaatcgtgtcaattgtcaccttctgcctg

SEQ ID NO: 149162 - DNA, 629 bp, Homo Sapiens
aagggacaccagagccgcagcctgctctgattctatggcttggttgttactataagagtaattgcctaacttgatttttcatctctttaaccaaacttggggccaaaagatatttgaccgtttccaaaattcaaattctgcctctgcggataaatatttgccacgaatgagtaactcctgtcaccactctgaaggtccagacagaaggttttgacacattcttagcactgaactcctctgtgatctaggatgatctgttccccctctgatgaacatcctctgatgatctaggctcccagcaggctactttgaagggaacaatcagatgcaaaagctcttgggtgtttatttaaaatactagtgtcactttctgagtacccgccgcttcacaggctgagtccaggcctgtgtgctttgtagagccagctgcttgctcacagccacatttccatttgcatcattactgccttcacctgcatagtcactcttttgatgctggggaaccaaaatggtgatgatatatagactttatgtatagccacagttcatccccaaccctagtcttcgaaatgttaatatttgataaatctagaaaatgcattcatccaattacagaattcaaatattgc

SEQ ID NO: 149163 - DNA, 715 bp, Homo Sapiens
gataatgatgtgcaagtgtaaaaaactcaaaactggctttctcgttcaatacagacatatctttaaaaaggtcttcgtctcagatccattcagagggctgaatggacatgtgttgtcgaattctgctccaccataaaggcactggaattatgtcttcctataatatgatgtgtgaagaacagtccccttctatccaatgcatttaatggtaatgatgaaaactgagcccaaaataggtgtctgtaaaaatcctatcataattgttgaatctacaaaggtcttttctctaaaagagcttcattgtcatgttccgaggagaaactggcccccacagtgagcacaccctaggtgttcttagtatttcgcagggacagtgcaggtctcccagctgtggctctggcctgagttttgtccgctttgagcacacagcctggggatggggcggcactgtgaccatccagggagcttactgcagccagaaggagcccctgagcagtggggtgctctgaggtactctgaccaaatgccaggggatcaggcagattcacccacaggtgtgccaactgctctgccaccagagcctgtaaacactgtgcctcccaccacggcccagcgcaagccccagcctagagctgcccctctaacaaccgtctagcgacagagctgcaaggcccagagcacggggcagtctgcacctcctgagcagcctcgtgcc

SEQ ID NO: 149164 - DNA, 440 bp, Homo Sapiens
  misc_feature (412)..(412): n is a, c, g, or t
tggtcaatgacttctactgtgcgtgcgacgacggctggaagggcaagacctgccactcacgcgagttccagtgcgatgcctacacctgcagcaacggtggcacctgctacgacagcggcgacaccttccgctgcgcctgcccccccggctggaagggcagcacctgcgccgtcgccaagaacagcagctgcctgcccaacccctgtgtgaatggtggcacctgcgtgggcagcggggcctccttctcctgcatctgccgggacggctgggagggtcgtacttgcactcacaataccaacgactgcaaccctctgccttgctacaatggtggcatctgtgttgacggcgtcaactggttccgctgcgagtgtgcacctggcttcgcggggcctgactgccgcatcaacatcgncgagtgccagtccttcgcctgtgcctac

SEQ ID NO: 149165 - DNA, 514 bp, Homo Sapiens
tgtccatgcccctctacgccatccacaagcctctgaccgagttatccgtgcatgcatttgagcgtttcttgcaggagaggccggggccaaaggaacgcttcagttgcgctgggctgtgccaaggggcctcagcaggagcaacccttgggggccagagcccaggctcttccagcaacaggaaggacctttcttccctctgcagcacctgtcgaacaaaacatgctggactccctcattcattcccggcagagaagcactcccctcaccccccacagagccctgctatgccgggcactcagaccagccagaggtgggggagcctgtgagtaaagtggagaattggaggtgtggtgccaccctgaccacagcacctttcttctccctgaggccacctcctcaaatactcttcttggccacagatgagggcccagctgtggttggcagatcttttgggagataactggatgtgtgggggtgagagagttgccatgggtcccagtctcagggcggccgc

SEQ ID NO: 149166 - DNA, 698 bp, Homo Sapiens
  misc_feature (462)..(462): n is a, c, g, or t
gcagagcatgacctgatgttagggataggggatttactttcaattctttttatagtgccaccatgtgcgtattcacaattgacaaattcacaacctgtccctaacccctagaggttttcaggaatgcacgctctgtagtactccagaaaaaggtcaacatcttgacagaactgtctcccaacatgggacagtactcaataacttgttaacatccaccatctcttgacatttcctactgcatttagaagctgaatgaccagggctggagtttatgataagggtttggctgtagaatattttcattgcatgtttaagaggtaagtgagtaagtataccactcccagcaccttcactgggtctgaccaccacctaaactgtccttgggtttgaattctgtttgactaaaacatatatatattaaattggaagttctgtaacactgtttactgataccttttttcngtgggttccctcatgtaccaggaactatgtgttgtataacaaaacttttccacttcaggaatatttttcagaaatatgtgcaaaatatggaagctcatgatgaatgattccttgacctctaaaaaccaaaaagttctctaacccgtgtgatttatctgatgtcaaacaaagtctatggtgtatgatgtttgctacaactgaatggttttacacaaatcttaagaattggtcatttg

SEQ ID NO: 149167 - DNA, 914 bp, Homo Sapiens
ctttctcgaaaccatttcctcccatattagttccctttggaatagaagcctttttaaaagtccaccttagtatatcttcagggaatcacaaattcactatgctatttataattcatgagtttctctaatggtatcaaggcagcaaatacaggtgaagtaataattatccacctgatagtacttaacacacataccccgtgtaaaaatactgctggtgtacagtgtgtgtgttggtgacgccggaggaagtggccgtgaacaggcttaatgccgcattgagtaacttcaacctcatcttgctcaggttcatatctctcctgaatttcccctggtaagcgcaagattcaggatccgttctcacagttttttgtttaccagttgatgttggctgcattcaggaacgccttgctctcttaagccacagtgccttcctggtctcttcttcacagggtcttccacaatcgctctttttcctgggcacggtggtttgctgaaagtcggggtggggggcggggcgttcccaagtttccaggccaattacctacctgccttagagcaattacgcacttctctctggtagtccctgaaatgttctaatcatcagatcgccccagcttctcctgaccgtttcttgcttacggctcagttcagacagtatttgttccgggacgctcagcgggaggcggtttttaccggctcactcgagaccccaattccaggcgccctgcagcttccctcagactccccgggaccgtgtttggccttcccattcgtacgctgcggctgcgctttcctctcgtaacaccacgctggcgaacctggaaaggatcaaatagtcccactcgccaacctagcgcggcgggaccggcccaaaagggcctttgcagcctgcgcatgcggactcggcggccgca

SEQ ID NO: 149168 - DNA, 734 bp, Homo Sapiens
taagatacaaatcacgaaagcaaagaataagaatagagataagaacattaaaatactggaggctagaaactggaaacagacctaaaagggctgaatcctgtatcggcaatggggaaggccaactggcaatatgactggaagccaggagacctgaattaaaaacagagttggctgataggtttaaaaggcacgaagatccctaagatgcaccccacaactctgcacagccacacagagccaacctgcacagtccctctcctatcctggcaaaaaggtatcgcttttctgtctgcaaagggaagtagaatctttggactggggacaccagttacagaggagggaaacaattctgaaaagagggaagtaagctcttttatggttactgctgtgctcccaggcctctctcctcacttggccactcagccaggcaaagggctacaagatatttctctggggaatctgaagaaccccaaagaagctgacaagggtgctgtaaggaaatggcccagccaggtgtctctgcagtgaaagccacagtcagccacagacacaggctcagaggccctctgactcacgagcaggcacaagaacatcactgcatagcccagaaaaggctgacaaaagccaaagacgcacaacaaaccagagcagcctcaatagtgacttaaggaaaaagcacccagggacccccaaagcctcaggaatatcttccaccagttgacaggagatcccac

SEQ ID NO: 149169 - DNA, 508 bp, Homo Sapiens
  misc_feature (201)..(218): n is a, c, g, or t
ctgtttcctaccatttataaaatttactttttattgaaaaactattttttgatttttgcattaagtggtctagaattcttttgcaatgcatttgcaacagaattttgtagccttaaggggtaggaagaaaaacctgactgcaaatcatgtcagtgtagtacaaaattctgaaaacacataagggctggttatttacctccnnnnnnnnnnnnnnnnnnaaagaaaaaaggacttttaacctttgctgacaaggttttgtctgtttcagttatacttgtgaattgtgatctaactgcagaaaggatacattattaaaatactttgccttgggataggttataaatgagaaaatggaatgtttgcatccctttaaaaatgaaaatcatatcaaaagtatgttgtttcaggagactttgtatttagaatattcatgtaaaacttgtgaacaagctttcattttgatcaaactgatcttcatttttgtaataaaacggaagactcatccagt

SEQ ID NO: 149170 - DNA, 465 bp, Homo Sapiens
ttttggccaaaggaagcatctggcgatgcatctttaacttttttggatgtatgaaattttcataacactatatagatggacctacataatatagcatggtatttataaacatatacatgcccatctatagcagtttaataattgtgtcattaattttacaggaatcgcatacatttatattaataagattaagcactatttatggctgaatctacataatatagcacaatatgtaagagtatatgtgtctatagataatggtgctcaacaattaaattcccttgaagaactcaagaaactaaattgtaagaaaactggtcactttaaagattagtatcatctaataattaggtcttaatgattacctacaatataacttcaaaaagacatttatagtaaaccataattttccttacaattccagcattattactaagttacttttaccaacggagctaaatgaat

SEQ ID NO: 149171 - DNA, 990 bp, Homo Sapiens
  misc_feature (88)..(159): n is a, c, g, or t
  misc_feature (412)..(420): n is a, c, g, or t
  misc_feature (516)..(569): n is a, c, g, or t
  misc_feature (673)..(734): n is a, c, g, or t
tcactgcatatttcatttattttgtttactatctagtcaatgtaaacttcacaagagcaggaatgcttctgtcccttttgttataaannnnnnnnnnnnnnnnnnnnnnnnnnnnnnnnnnnnnnnnnnnnnnnnnnnnnnnnnnnnnnnnnnnnnnnnctgagtgcatgaggccccaagtgggctgcatcacatcccccagggaaacgctgctcacaccattaccccatttcacagatgaggcaatcgaggctcagagaggagtccatagctagctaataagaggtggagacagaattgaaacccaggtctctgactccagggctgtgtgctttcctctctccaagcacacagcactgggagagtcttgtctccaaggcaggctgcatgagatcagacagggagagagccnnnnnnnnngtatctgtctgtataccacaatatggcttaggaaggtcttggtggttaacaaggctcccaaataggacccagaacacaggtgctcaataaacatcnnnnnnnnnnnnnnnnnnnnnnnnnnnnnnnnnnnnnnnnnnnnnnnnnnnnnnaatagataaatatggatgcatgggtggatattaatgaatctgcacagacccgtgtgtggatggatgggtgataaatgaataggtaggtggatggacgggtgggnnnnnnnnnnnnnnnnnnnnnnnnnnnnnnnnnnnnnnnnnnnnnnnnnnnnnnnnnnnnnnataggtggacggatgagtgaatgggtagatgggtagatggatggaaatgaacagatggaaatggttggatgggtggataaatggttggaaggatggatggatgggtgagtgggtagatggatgataaatggataggtaggtggatggatgagtgaattagtagatgggtaaatgggtggaaaatgtacaggatggaaatagttgatgggtgataaatggttgagcctctgccgattttgacccgcgcctcgtccag

SEQ ID NO: 149172 - DNA, 748 bp, Homo Sapiens
  misc_feature (41)..(56): n is a, c, g, or t
  misc_feature (69)..(228): n is a, c, g, or t
  misc_feature (510)..(614): n is a, c, g, or t
gggggggcgggcccccaaaaaagggttttaaaaattttttnnnnnnnnnnnnnnnncaaaattaaggannnnnnnnnnnnnnnnnnnnnnnnnnnnnnnnnnnnnnnnnnnnnnnnnnnnnnnnnnnnnnnnnnnnnnnnnnnnnnnnnnnnnnnnnnnnnnnnnnnnnnnnnnnnnnnnnnnnnnnnnnnnnnnnnnnnnnnnnnnnnnnnnnnnnnnnnnnnnnnncaattcccaaccccagaccccaaccttgctttattttctccacgggtttaccagcactgacacactgcatatttcatttattttgtttactatctagtcaatgtaaacttcacaagagcaggaatgcttctgtcccttttgttataaagtatccccgggacctcataacagtgcctggcatgtactaggggttcaataagtgtttgctaataaagagatgctgagtgcatgaggccccaagtgggctgcatcacatcccccagggaaacgctgctcacaccnnnnnnnnnnnnnnnnnnnnnnnnnnnnnnnnnnnnnnnnnnnnnnnnnnnnnnnnnnnnnnnnnnnnnnnnnnnnnnnnnnnnnnnnnnnnnnnnnnnnnnnnntgtgtgctttcctctctccaagcacacagcactgggagagtcttgtctcccaaggcaggctgcatgagatcagacagggagagagccttcttttctgcatctgtctgtataccacaatatggcttaggaaggtc

SEQ ID NO: 149173 - DNA, 479 bp, Homo Sapiens
ctggtttttaagcttcctgtatagcaaattcctactgcatgtattttcccatgatacacattatgtgtaggagttatctgtggtgtgggaggctgtcattcattcatttttacggctgaaggcttacatatcgttttaccacaatttcaccagtttcctattgatgtacatgtggccgattccagtttttgccataaatattagtgtgcatgtctcctgtgcacataggcaagaaagccccaaagcccccagagtggatgattaggaatgggttggttgcatgatacattgtatggactttaaccatactagataatgataatatgatttccaaagtaattgtggctacttaaacttttacaataaatgtgtaatacttgatgttgatgatgtgttctgaaaacactgagttgaaggaattgtgttaaaagtcaccgtcttggtggtagaattatagcaagcatttttattctgttaaa

SEQ ID NO: 149174 - DNA, 600 bp, Homo Sapiens
gcggccgcggcctgcaggagcgcggcgaggcactggccgcctacctggacggccgtgagccagtcctgcgcttccggccgcgcgaggaggaggcgctgctgggcgagatcgtgcgcgccgcagccgccggctcgggagacctgccgcccctcgggcccgccacgctgctggcgctgtgcgtgcagcattccgcccgtgagctggagctgggccacctgccacgactgctgggctgcctggcccggctcatcaaggaggccgtctgggaaaagattaaggaaattggagaccgtcagccagaaaaccaccctgagggggtccccgaggtgcccctgactcctgaagctgtgtctgtggagctgcggccactcatgctgtggatggccaacaccacggagctgcttagctttgtgcaggagaaggtgctggaaatggagaaggaggctgaccaagaggacccacagctctgcaatgacttggaattatgtgatgaggccatggccctcctggatgaggtcatcatgtgtaccttccagcagtctgtctactacctcaccaagactctctattcaacgctgcctgctctcctggatagtaacc

SEQ ID NO: 149175 - DNA, 539 bp, Homo Sapiens
atgaaacttatcccattgaaattttcagtgttaaataaaaagagatttgtgatatttttaaatataaacttttacatcagtagtcagcagcctgacaattgaaatttggtaagtcgatatattttaaaatattttgctctccaaatagaattgtttttaaacaattgggaggttttttgttctttaaatatgttttaattgtcattgtaaaaacaaaatcttgcttgaccctatattatgccatgaatgaattgctgagcctttataatacagtgacagcttgtttcatgcatagtcatggaacatagagatgttctttaaactgacctattgataagaggtttaatgagtttcacggctttcaacactattgtcatatagttatctttgccatttggagtttataaaaccattttatgtattgtgatactaaaggaagttgttttgctttactttaaattgaattattagactaatatttgcaaattctgcattttaaatgtggacactggctgtttgaaaaataaaatatagaatac

SEQ ID NO: 149176 - DNA, 519 bp, Homo Sapiens
  misc_feature (365)..(365): n is a, c, g, or t
ttttaagacgaaaaatagattttctgttatcgggggcagaaagatcgggccaggggtccctgacgcaggcggtggcacccgcagataggagcgggaggagggcgcgcatccctcctctcctcgccgggccagcccgccggccgcccggaggcagggcgtgcgtggggaccgcgcgctgcgcttcggcagctgcggcgtccccagagccaattccgacgtggcaccgcgcacgccggcgcttctctcctcagctgcagctggggacactgcccggtgggagatctgggggcgccgtctcgagcgcccagccgatgaacggggcgaggggcctgtgggagctggggtggaggtgggagggaagccanaggctgggttgggatggataatcaacaccttggggggaattcgtcacggcagttcccgcccagcgtgagccagggctccgaaatgggtccctgtgaacaggagggcgggtctgaaaggagggtctgtatgagggtgagaaccgggaggcgaaag

SEQ ID NO: 149177 - DNA, 418 bp, Homo Sapiens
ctttcgtctttagcatttatttataattggaaaaactgtttgtttgtttgtttttctgagcaagcacagaccacaagcacgtcacaatcaattggctatacatgaatatttttgtcattctcttacagcaggaatgaaatagcaccaagagaggtgtgcgctacatgttacatagacaatctgtggtatgcaacaaaacccaggccacaaaatcgtaattagacacttcctgtctgcctcagagaggcaaagaaagctatgtggaccgaatgggagcacagacaggacagattgctgagggaagccaatgcgcagctcttggggctgcttttgcaggcagggaaacagcgggaaagcttcagtcccagctccctcgccagggaaggacggagaaccacagggaaatgtacagaggcca

SEQ ID NO: 149178 - DNA, 508 bp, Homo Sapiens
ttaaaaggtcctactaagtttattggactaggggcttagacagcaaattcatatgatccctatttggtgcatttttctaccatgggtccaagatcattacatggatacagccaaggactgggccccaactttcaggaaaaagaccacaaagaagaaaatcaaggtggctatttggtccccccagttgataatctgtgtcctggaactggaaaaacaaaaggtggaaaatacagactgcaccgagttaaaggacttggaaaaagttggtggaaagtggcacggtatacgagtaaggtcactgggcttgggatggcaagggtgctgcattgaaagagcatccacgggaccaagtacttataatgtctgatggtgtcattccctcaacgacttagaatatctgtatgcgataataaatagatcagttatgtaataaggcagtgtgttgaatatgcattcgtcctgtggaatgaaccaccacagagagatacatgataccatacacattctt

SEQ ID NO: 149179 - DNA, 486 bp, Homo Sapiens
ccatccatgtccctgcaaaggacatgatctcgtttaattaactttttttcaaaagagtgtttccagggttacagttaacagtaaaattggaggcagggcccagtcttttcactcctttccaatattatgtcttttatccaatcatatgcctcttattagaaaatcacaatacaacaaaggtcaaatcctcctaggaaatgctatcaacacactttggggacagtaatgataaaagcttcatggacccacatttaacaacaaagcttatgtgataactgtagcaaaagaatgggagtaagactgaacacttctgaatcctcttgttcttgaataccttcaagccaggtcctctctgtaagtttgtatttcacctccagtgattctgagtaggcacaactcttctccccatcacacagacatcaaactccaggcacctagagaagtagcttgccccaaattgcccgatgaggaagtgggtgtgtgtga

SEQ ID NO: 149180 - DNA, 1088 bp, Homo Sapiens
  misc_feature (74)..(74): n is a, c, g, or t
gtcccagggggttcagggaagtttccccgtgcgggtttcccagattgaaagtgggggaggtgccttgggttctncgggtttggaggcttctttccagggtgttcaaaggaggttccaggccggtccaagctttggtggcccctggcttttctcgtcacttttcataatccaacatcagttttattcttgggggtaccatgtatttcccggcccacccccccatggatcacgtcaatgtccctgatgttatgcatgagctggtaggcgatgtccttacagccctggctcaaggcctcagggggcatctcgttgtctgagtaccagtcccggtcagccgagtgggcgtaggcggcgctgggggtggcatggttcactctcgtggtggtcacaatgcccacagatttcccagcgtccttggcccagcgcaggatggaggtgacctcgttcccctgggtggtgttgcaccgggaacgctcagtggctgcgcttacccccacggtgccctcattggccttcaccccacacaggtaggcggtggcggtgccggcgctgtcagggacctgggcattggtgttgtacgtcttggagagggccacgaaggggaacttgtccatctccagcctggtctcctccccagggttgtggtggagctgacccttgaggatgcgggcagccgtcactgtggagacacccatcccatctcccaggaacatgatgacattcttagccacgttggtgttgagcttctgaagctccagggcatatttcagtgtctcttgcgcttggtctcgccagtacttggggtctttctctttctctggcactaaggagttagtaaggcaggtgccaatggccagtactaagaatggtgaaatcatggtgcaccccaagacctgctttatccctggagcccagagatgcaatcgacgtgggtgggagggggtgggctggcagtggtcagatgttaactgatgttccaatcctgcgcagagcactggcgagggtccgtccaggcacaagcgcgtgggagcacggagccaggatagcgggcgcggagtggcgatcccgggaattccggaccggtccac

SEQ ID NO: 149181 - DNA, 515 bp, Homo Sapiens
tttcttcttaaaattttttattgtggtaaaatatacataccataaaatttacaattttaaccatttaaaaatgtacaattcaacgtcattaagtatattcccaatagtgtgtgcaaccatcaccaccatccatctccagaactctgtcatcatcccagtgtgaaagtgttttagaaaccatatatgtaaaggcaggtcaattaggaatgtgctagctgaagtcttgaccggacagcaaattcatccatccacctacctactgtgtttatgtaccaggcttgataaatacagaaacaaatgagaccagaactacaaggtaagaaccttgtcgtctgtgatgctgggccccctgtcctacttcaaaacagagtgggaagatagaaaggattcttagatgagtctctaattgaaggaattcaagttttacttattctcctttcccagggaaatgggaggtgctctcacccatggcctcagcctttccagttaccaagaggtgtgggattttctctctc

SEQ ID NO: 149182 - DNA, 622 bp, Homo Sapiens
aaaacagaattttaagcagactttttagagagacaaggccatttgatggtagtgattttggttttgttttatgaaaatggtacaggtggtaatccctgatgacagaatgcactgagagtggggccaagggccctgaaggatcctgtctgttcagtctggttaaggcgacagctgggcgggcatgtggccggggagcagtggcacagcggaccctggcagtttgctcacacctggccctcgtcccatagccagcccacctgcctcttggccctggtagtgactccacagaacttccccgagcaggggcctcacagtgggccagcacccatcttgcatgcaagggagaacctgcatgcagtgcacacaccccggccagggtggcacatggctgctctttcaatgtgaagccaacaccaactggagagatttaactataaaggaatattttttaaatattcagttttgttgtcattactcacttcctttccttccatttcgatctcagaaactgttctttttcagtgttgacaaaaaagaaatgtatgggccaggtctacaaagtaacaccttgtcataaaacaggctcaaaagcataggaatcatgctttaattgccatttagc

SEQ ID NO: 149183 - DNA, 571 bp, Homo Sapiens
  misc_feature (202)..(217): n is a, c, g, or t
atgttttcaggaagtatttattaacatgaaaaaagtcctaattgtaataagtgaaaaagcagcatttagagttgtataaacaatataataccagtgtccattctttaaaaatgtgtttgcatgaagacagaaataaagagacttacaataaatataccacaatcattaatagctgtctctggttggtgggattttgggtcannnnnnnnnnnnnnnncttcttgatatatttctgtattttctagttttccctaaaatgataaacagaaaagaattgctgttaagtaaaggaattgctgttaaaatagagacactaattccaactttggaattacgtatccaccctgtctgatgttattcactgccacccatccccatcccattcccaacctcccaaagtgtcccaaatctgacatgatggcataatctatgcattgcaaatatgacaccatcatccagctatttggagacattaataattaccttaatttttcacactctttcaggtatctggcattgggtaaatacagttaacctcacgtagacatattttcagctattaaaaaccaag

SEQ ID NO: 149184 - DNA, 460 bp, Homo Sapiens
  misc_feature (197)..(209): n is a, c, g, or t
tttttgaaagataatttctctttaattgattttttaccactatgaacagtaaaataatataagaaaaatctatgctgctatttttccatttgtgaaatccaaaattacaccttgcagccaattccctcagagtacagacgtgactcctccctccttttatttgtctcattcctttaagtgcaagaaaacagaccacnnnnnnnnnnnnngaatagctgaaagtttatgatttgagaaaggggcaaggtgtgggacaatttcccacacaactcggaacccagggccagggaggcacctctgatgaaaagagatttctgtaaatacatgagaaagtgattctgttgacacctcattcttctgtctgtagaatgtacgagtgacaacaggacatgttgttttaacaccagacaatgaagctccctgctctccactcctcgccagtgatggcactgacagcttc

SEQ ID NO: 149185 - DNA, 648 bp, Homo Sapiens
ttaagatgaaaaataggaggttcacttttattttgctaatccgtcaaaatacattcaagcatggcacaaaaattatattcaacactaggttctgtaccacctgctcccatgaactcttaaatctgaataatgttcagataattttcataggtggaagtggtcaaaacatacaaccaattgtccctcctccccaagtcccacatgccaaaatgtttgcatataaactgacaagaggaacccagaagtgactaaataccactatgcttttttcttcactacaaatagcaattttaagggtagacacatgacaatgaagtgttaatataccatgaacagaacaggttgccttcctaatacacagaaaatccttttacataattcatttgcaaactttagaagccactatattcccatgttgggaataatatgacaaccttattaaactgaaaaccctgagaaaggtgtactattccaattgacccagatcttcccgccaaaactgagtaagtcaagcagagtagtatttaacaattacaacgaaaaatttcagagaatcattttctgtatcctagaggccactctacagccaccaaaaagctggaccaaattaccaaatgaagtagcccacatgtaatttgtgtatcacta

SEQ ID NO: 149186 - DNA, 392 bp, Homo Sapiens
gagttctttgctaatggcccgggtgttgcttgccagttggcctggtgttgctttctgctgtgacatggtaacactgagttccagtgcaaagtcccacaatcactgtgctccccctcccccaagcacacagattctttgcaccacacggccactgcatgggggtggaaggggtagtagacaatcgaaaactgtctttcctactctcttcagtgtctctttcagcaatatgaagttaaaatcaggtactgtgatcacttacctgatttttggttcttgtgaaggtgctttttttgtgtagatagttgttaaatttggtgttcctgtggtgggggcagcgattggttgaggcttctattcagccatcttgcttcatctccctccaatagattaaa

SEQ ID NO: 149187 - DNA, 454 bp, Homo Sapiens
tttttaaatgttcccagaaatagtgtatttgtttgtttacatcttcagaggcaacggaccactaaatgttttgggtttaaaaacaatgtttaaaattatcaaatggtaaaagacatcatgaccaaagcttgggagatcagtgcctgtgtggagacccttcccaaaacagcttcaggcaaaggaagcctggccccctccgtgggccgagtgagatgcttgtgtgtgcagcaggtgcctctgtggtgctgggtgaagagcagacgacagggggggctttagaagtctccctggggcctacgctcccaagggcagactgctctcctccccatcccccaacagaggggcctgtgctctaagcactgcccgctgagcccagagctgccctccaggcacccgccgtcccaacggcccccatttacttgtctctctcttgtcaccagatagacagacaaag

SEQ ID NO: 149188 - DNA, 466 bp, Homo Sapiens
gagcgcgttgcgacttgcaaacgagcagagggagcgggatgggcgagcgcgcgtgcgcggggggctgccagccggcgcagctgctggcgcagggcggagggagtggtccgcaggagctgcgcgcgcgtctcaagcagccgatctactgcctcgcgctggctcctggagaaagccgaaggagagaggcatggcccggttttgggggtggggggcgaagggcgcgatcccgctcgcgcgggacctgaccagccaatgggaagcaatgggaggtgggtttgccgcgcgagccgcagccgccgggataacggaggaggccagaaggagcgacgtaacgtggggcggtggggcggggctgagaaggagggagcgcaccagagagggagttgattggaggatatgaggaggcgtggcccgcctcagcccaatccgagccccgcaattcgtcgtcccggaagaagaggcgggg

SEQ ID NO: 149189 - DNA, 481 bp, Homo Sapiens
tgacctcccagcagcgctgcgtcagctcgggctcctcaaacagccggctctgggacagcaggacgcaggcgttcttggcttccaaacttgtctccagaaagttgacacaggcttttgccaatgctgggacgatgtacttcttagcagcgtacagagtggccagcaccgtgtcggcttccagatcgatctcatcactgtacatgtactttaagaggatcagaaaggctgcgggctccacgtctggaatgtgaatttcagatttgacttccgccaggtctccgtagaccatggcatagaagacggagctgccgacagccaagacgtacttgtgggcgggcaccgtcctggtcgcccccgggggccccacgacgaagtgcacgtcggccatgagctcgttgttgaacatgagcgcgttcctctcgcgcagcgtggggcggcagcaccgccagccggggctctcctggtggttgttgccgagtgt

SEQ ID NO: 149190 - DNA, 433 bp, Homo Sapiens
gcaagatgaggagatgggcaggttttggtaagagccccccagttctggtggacaggcatacttgtggcattgggtgcggcattgctgggaggaccacgtcttgggaggcgattgacttttggtttgtaatttccctttaaacaagaagagatggctcacattttccatatatatctcaatgaatgtactgtattactgttttaaaaatttgatgaaataataatgaattggtctccttttgttatctggtccttgtttaatttgtttaagggtttttgtatacaaaagtttacatttttatgtatatttttcttgtgtaaaaactgatgtaatatgtgtatgaaacactgtatgtattatctgtatatagtgtgacaaaatcatttttctttctttcttttggatgtattaataaatcttgctgtgaagtaaa

SEQ ID NO: 149191 - DNA, 633 bp, Homo Sapiens
agggctaccaaaactgtatttgaataaggaactaagaagctctctggttgaaaattcaatagaagagaagatggagtcaactgggagatattacagcaaaaaacatacatttgtcatccttggggaatagtgacgctgaatacacattatttttgccacttagatttgtcttctctgtggacctatgtttaaaagtaatacctaaattttatttaaaagtttctaagatgggagcaaacaactctgctttgctatcctttagtaggacatattacaaaatatggaaagaagtactttcctccaattcaagatttgatgcttcagggattccagtgtcactgctgcagtagcagcagaaatggcagagcaaggctgagaagagagctctgtagaggcttcatcagtacctgaaggacacacatgtacagcactcaagtgaaaagcctgatctaagaaaattggcctcattttgagaggttactgtgtctcttcaaatatcttatgatctggctttcaactcctggttagtcagtctattgtactctataatcattcatcttgtaggataacgcaaaatagttcagtttcattttcttctcataatccattaatattccctcaagctgctccttc

SEQ ID NO: 149192 - DNA, 483 bp, Homo Sapiens
acacagaattatttttccaatttcaaagagactgatggagatgaagatgactatgtggaaatcaagtcagaagaagatgagtcggagttggagctatctcacaatcgtagaaggaaatctgactcaaagtttgtggatgctgacttttctgataatgtctgcagcggcaacacattgcattctttgaatagtccgcgcactccaaaaaagccggttaacagcaaacttggcctttcaccatatctgacaccatataatgattctgacaaactgaatgactatctttggagggggccatctcccaatcaacaaaatattgtccagtctctaagggaaaaatttcagtgtctcagttcaagcagctttgcttaaggttcttcataataactgcttgaatcaacttcttattttgctcataaaacgttacagatactgatgaggtgttttatgtataccagaattaaagacaattttgtaagaaaa

SEQ ID NO: 149193 - DNA, 534 bp, Homo Sapiens
gagaaaaaaatgcacgtttatttttaaaggaaaaatgaaaaagagggatattggaatgtagggatggttatgttgagaaagtttgcccagattgacttgacatcttggaaaatattttagttcatttgaaaggaggaatccagtgcttccagccaggacaatgaaagagagttctttggctctccagtgatttccaatggattgcggttagagtcttgacagatgtgtccagtggtcttcaatcaggatcacgatgagagacaagccaagaatcccatttgctcttgcttcagggagaaatctttgcttttatctgatcctcggctgaatcttgtctgcatattgttcctttgcttttactgtttttctctctgtgagcgagcgagagcccccgcccgtctggcgggcctaagcgcgaaggctgaattaatcaagatcaaggggctcccgggctgagagcagagcgttaacccttccagtcccagagagcgacaaggcgggggaggaaaaacgcgccggccggggccaagatgc

SEQ ID NO: 149194 - DNA, 908 bp, Homo Sapiens
  misc_feature (167)..(167): n is a, c, g, or t
  misc_feature (223)..(223): n is a, c, g, or t
  misc_feature (232)..(232): n is a, c, g, or t
gtcttttccaaaaagcccatttgtttttccaaaaccccccattgggcttttcccctttccattttcaggagaaaaacccgccctttttccaaagtggcccccaggggccattctccatcatttcatggaggtcaaaccccccctgtccctttttaggccatttcttnggcgtcatttacaagcagttcaccattagacaaaaatgttgttatctgaaaaaagnaccataganccaggaagctgaaaaagatacttttacaataaaaacacattctaaaaaaatgatttttgtctaattacatttggaattggaatttgcttctatcacagaccagtcaccagtcctcagtccataaaatcagcacttccagaggaaggttccaggcatcacagtgcacatcgagaaatatcagactttaaagtgctctgaaaatgaattgattcaaagaaataatatggaatatattaactgctgaattctactggtgacagaatgagttgaggctactataatttagaataaccttaaaaacagatacattttaaaaagtgttccaaaagaaaaatactgtacttgaaggtattctcgcagtgctgaaggctcacactagtgtatttccagaggtgacagttttaatagtcatattggagacgcttagtgacctgtgagccatgggttgctcccctaagctacactgcaataaactctaagctcctctagaagtaatatctatttacatgtgaagatttcaaattctcaggtatacatgagtgcactgtcagaagatgattaggcccagactctgagggtatgatcccatgatccagagtagaaagcagtcccatcgggggaaactcgtagagtgcttacgcggttttcatgtcccaacaggatggagacccgggac

SEQ ID NO: 149195 - DNA, 550 bp, Homo Sapiens
tttctgatttactataatatttctagtaagccattggcttagaaaccagattcactaattaattcatttaccctttcatgatacaaaattttttaactgagtgaggcctttcctgagaattgagcacatgagctttggtgcatggacctggaaatctctgcttcttgaactcctaggggcttcctttacttcattcactcctggtgctcagcaaatttctgaatgggggaggttggccagcctgggagaggtcacccacgccaggaagtctcagtacctctctatttatcctatcacttgggaatcctctaggatctgtttcagggagtctctggttagccctgagacataagtggtgcgggtgagactcctggggcctatctcagaggtcctcacacccctgagattaaatcagtcaggaggcagggtggagagaggagtgtcctatcaggtctgaggaggttgtcaacttcctggacttcttgctaaggactcctcttcccacccttcatgggtagctgaggtcagcgaatctgtagggacaagactt

SEQ ID NO: 149196 - DNA, 784 bp, Homo Sapiens
tttatggtacaaaaattaggcatgttggtttgactctgcccctctcacagtgggttccccgaacacgcatgatcccaaagccacccatctcactggtcaacaggaagttatacctatcttggatgtaatactgcatggccagatcattgataagaaaggggtttcgaagcttggagtaagcaacagctttgtccagaggaaagcctttggagtggaaagagatgaggcagtggcaggatggccatttttccaccggttcattaaggatttacttcttctcccagaatgacaacagtcaggtagtcaaatctgcagagtcgctttaggatttgagtcattggcttggacttggatttcttggtcatggcacagatgccaacaatgatttgaggttcaggaggcacttcatcctcctcatcctcaaggagctcgctgtcactctcttctggcctcatgcctattccacgggtgcccagcccctcatcttccgctccaaggaagaagtgggccgtggtactctcgccctcactggccgtcaatgaccacatccctgccggaacacccactcatcccgctctgcagaggggggtaccccatcagctcagaacccaagccccctggctgtgggtggggaatgccggcatgtccctgatttggccagcaagaaacattaacttcaggcagcaaatgggaaaggcaggtcctcgaggaaggctactcttgagtcccgcctccctccgccctcgtgccgaaatcgccacccaggcctcgctaccttagaccc

SEQ ID NO: 149197 - DNA, 360 bp, Homo Sapiens
cttgtgaaagggtcctttatttccacgttcaacggaattggtctgtgctgctgccctacccctgcccctgtcaggggagccacgggagggggctgggcccgcaaaggtgcctgacttcccaatgccgaggccttgccatctgctggaagagggtctgggagaggggagggatgccaagaggaaatgctgaggagtcctgggcagaggccagcatgcgggcctggccacagggcgattcccagacaggacagactggaatggcagccaggcttgcacaccctggtggcctcccgcatggcaagtggtgccgcagggctggtctggaaagcgtcaattaaaggtcaactgggttgccggggg

SEQ ID NO: 149198 - DNA, 1006 bp, Homo Sapiens
aggttcccccccgcgggggcattgtttggcccaggggttcaaacagtcccttctccatgtttattcccccaatgtccccgggcgcccggggggcaagtggggaggaatagggccctgggggacccttcagcgttcatacaggccccccagaaaaaggggggatccccttccccccttgggccccctgctccaggactaggactcctgggcccccactggccaccatggttttccccatcaaaaagctgttctacaggccccagggaacagatgggagggcctcagcatgtggttgggacaagctctttcttgagccaggcacactagtcctctctcttgcaacccaacccgaagaggcagctggaaccaccccgggggggaccatgaagtgtctagaggtgaaaggtcagcccagccacacctaggtgtactgctgtccagaaggacggcccactccctctcctcctaccctggacccagggggtcacctgtgtacaggtactgcagcagggccccaaaggccacggggttgatcagtgggtgcctgagaaccacgacactcttgcccttccatttggtgtccagcatgttggcaaagtaggcactacgtgcacccaggacgcagcgatgcacccggaatggcttcccgtgtactacaaagaccacgtcactgtggatgccctgctctagaagccgctgcaagaagtcgtcatagtaatcccgcctcctgcaggaagccgtgacctgcttgtaatcgcgtagagcccggcggatggggtcactcagtgccccatagaggcagcgctcaccatcgaaggtgttggcctcgcagcgggctccattggccagaaggtagagtaccagctcctcgtgcccacacaagcaggcatagtacaagggggtgctgtcccacttgtcccgcacattcacctccacgtctcgctgctccagcaggtaccgcactcggcccacatcccccttcctgcagctggcgaacaggtcgctg

SEQ ID NO: 149199 - DNA, 1098 bp, Homo Sapiens
cgggtccatcctccgcgccatggacaccagcgacctgttcgccagttgcaggaagggggatgtggcgccgagtgcggtacctgctggatcagcgagacgtggaggtgaatgtgcgggacaagtgggacagcacccccttgtactatgcctgcttgtgtgggcacgaggagctggtactctaccttctggccaatggagcccgctgcgaggccaacaccttcgatggtgagcgctgcctctatggggcactgagtgaccccatccgccgggctctacgcgattacaagcaggtcacggcttcctgcaggaggcgggattactatgacgacttcttgcagcggcttctagagcagggcatccacagtgacgtggtctttgtagtacacgggaagccattccgggtgcatcgctgcgtcctgggtgcacgtagtgcctactttgccaacatgctggacaccaaatggaagggcaagagtgtcgtggttctcaggcacccactgatcaaccccgtggcctttggggccctgctgcagtacctgtacacaggccgcctggacattggcgtagagcatgtgagtgactgtgagcgcctggccaagcaatgccagctgtgggacctgctcagcgacctggaggccaagtgcgagaaggtgtctgagtttgtggcgtctaagccaggcacgtgtgtgaaggtgctgaccatcgagcccccacctgcagacccccgcctccgggaggacatggcgctgctggccgattgtgccctgccccccgagctccgaggtgatctttgggagctgcccttcccttgtcctgacggcttcaacagctgccctgacatctgcttccgagtggctggctgcagcttcctctgccacaaggcctttttctgtggccgcagtgactacttccgagccctgctggatgaccacttccgagagagcgaggagccagcgacctcagggggccccccagccgtcaccctgcatggcatctcacccgacgtcttcactcacgtgctctactacatgtacagcgaccacactgagctgtcccccgaggcagcctatgatgtgctgagcgtcgccgacatgtacc

SEQ ID NO: 149200 - DNA, 981 bp, Homo Sapiens
  misc_feature (704)..(739): n is a, c, g, or t
aataaaaaaggtcatttccccctagtgttatttgtggggagtaaccacactgatgtggctgtcatttcacaagagcatccgagtttgggagatatgcagctgtaccaagattgaaaaaaatcccatggagaaaggaaacattgatttcgggggtgttcctcatcttctggtgagttctgactctgagttgggtgtcactctgagcagataaaaaaggctttgaaagctccagggagtgcttgaatcaagtgatgtaaccagaaaaatcaccatttctccacgacacctcccttcgttttcaggccttgtcaagaagacaaatttttaaatcattttcctgacccctgagaaagcaggaagccattgtttaaataacacaaggacaaaggctgggatcaaatggtggctgtgtaaatctctggagtcattttattccatcagactcttcacaactattcctatctcccacaggaggagtggaaaaactttggattcttatttgtcattttaagccaaggaaagattaatgagaaggtcattacttagaagtaagaatgtagaaaatgcttactttttgtaattgtaacttcttagaaaatggaacagcttaaaagtcaagtcatttgatcctagttctgatgtttgtactggggatctgaaacagtcacttttcctgacattacctaccgacataagagcaatcnnnnnnnnnnnnnnnnnnnnnnnnnnnnnnnnnnnnctagtacagccatatttgtcaaaagttggtcatgttacagaccattgtctctgaatccgtgtctttctttaaaaatctgatttcttaggagacttatggaatgatcatatattaatgtaataatcaccaaatgtagggggaaacccaacttcccttgaatcccctagtacaatggcccaaatcaccacaactgttgccaggtgcctaaccctcaaagactggccaagatattttcatattgt

SEQ ID NO: 149201 - DNA, 1119 bp, Homo Sapiens
cgcgggtgcaccagtccgacgcgaagaggacccccacagacgggctccgcgacttaccatccctcctacaaaggcgttttctcacgaggcgagaagcatgtttgccggcttgtttcgggggttaaatctcagaacacatcttctaactggaggcgcaggcgaaagccacgtcctcgagactcgaggcgaaccgcgccctcctcggggcgggaaagaaaattttttaaagaggctggggaactcccgagtccagccgtgtgtcttcaagacgctggttaagccctggtaccttggcaccttagaataattggggaagttccaatttagtttgaattggaataaatggaaatcccaaagcaaaagttccatggaacatgcaacaacaaaaatgctagagtgccacataatttacctaagtaaagctaacagcaaaatcaagtactctaagatttatattaataaaaacgcaactaacaattggtaatgtatttattttcagatctacacagaagttgctaaatacaatgctgtacatcaacagaagttctgcagaaatagtaaaattttcctttatctccacctgggaagtctgaaaacatcatagggcttgtgactggggcctaataaccccgaggacaacgtggtgggctgagcgaatacctcaatgtgcgagagaacgaaaagctcgaaccacgaccgtgcctagggaccaggcttttcctgtggccgatgcggggcagatgcagacccagaggccacccttgcgcgcgatctccaacccgacggtgcggctcctctcggacctggagctgtggggagaaggcagccttttagtgaggagccgccgcgtggcgggacgcaaggaaaaccacccgagccgctgaacagtattccgcgactgcactccagggcaccgggaccgccagggtgaggagggactctgcgttctgcaaagctagcggttcccactccacctcccactatctcagcgatgggcacgcgagcgccagcccgggcgaccgcggggaaggaagcggtccacgccacctcaggcccccgccccaggctctgccagctgggggtccaccgcccgcccccgatcccgggaattccggaccg

SEQ ID NO: 149202 - DNA, 1223 bp, Homo Sapiens
  misc_feature (67)..(105): n is a, c, g, or t
ggtaagccagcgcgtagtgggaataccggggggagcttgtaatttctctgggccgccggggtcctcnnnnnnnnnnnnnnnnnnnnnnnnnnnnnnnnnnnnnnnattgcgagtgtggggtggtgtttgaaacaaagaccaagccccttgggaaggttccaaagcagtggtgtgaattaaggtggaagcccatttttagttccggttgttgggggtgggcccacgcaattgggttccataaaacaacccgcagggggcacttggcgtgccagtgtggatttctgcctggagggtgggctgcatctcccaagtgaaaggtgggggccttcttctcagcgttccagttctcctccatcagacgcagagagaaagtcagcttctcctctgagaacaccgtggtcctgaagggcaaccaggtgggcaggatggcctggctgctcacattgccctgcctggggtagcggcactcgatgggaatctctgcgcggttagtcctcacgatggacaggtttcccacggggcgggggtcatggagcaggaaggtgctgtacaccagggcatcgtcagttacctgcatgctgttgccacactcgtggagtccaacctcaaacctgaccacatcttctgtgtccatggagaccagaggctcacaggcctctgggcccaaggtgaggtcagcagccctgatgagcttcccggtgccaaaaaggtctttgctgaccatgaccatcagagtggcctcctgacactccaccagtacgggctgtacggacgtctcaggatggctggctctaccctgtgtcagggccgagtggagatcctgcacagtggcctgtggggcaccgtgtgtgacgacgactgggggctgccggatgccgctgtggtctgtcgtcagctgggctgcggggcggccatggccgcccaccaccaacgccttcttcggctatggcaccggacacatcctgctggacaacgtgcactgcgaaggcggcgagccccgcctggcagcctgccagagcctgggctggggtgtgcacaactgcggccaccacgaggacgcgggcgcgctctgcgcaggcctgggtcccccaacgctcacagcactgccatcctcagccacaagagaggactgggcttggcagacagatccgtccgctacaggagttggcccccagccttcccgggagacagcactgctcaccaccgccgcctgggccgcgggg

SEQ ID NO: 149203 - DNA, 579 bp, Homo Sapiens
ttttttgatatttaaattataatttatttgcctttgttttataaatcgaagttacctgagaatcaaagttaaaatatacatctgaagtacaagaaatggataggaaaaactttcacggagaggtggtgtccacatcacacgagtgacctctccatggttgaaaaagcagcacagtactgtaataagacctcctagttgagtcccactgttggcattggttcagcagcagaaggatggtaggccagatatatctgctatttttatggcctttcccttatggtcacaagatgaccgctacagctctgggcatgacatccttcacagctttgaacttcattaagaggttctattctggtgacattccagcaggtgttagtttctagtccaaataaattcagtattcccatggatgtgtgataccaggaggctatgattaccttcctgtagcagcggagtggccaatgggaccgggaccagagccgggggccgggggccgccgccgcggggaggttcccggcccaggtgcccagcgctcaccaacccggcggcgccgcggcggccccgcagctgtttcctccc

SEQ ID NO: 149204 - DNA, 552 bp, Homo Sapiens
ttccacttctgggcataaacccccaaattgaaagctggaactcaacaggtgcttgtacacccatgtacagagtaacattattctaacagccaaaaggtgaaaacagcaccatgtccatctacagatcaatggacaaacacagtgccatgtgctaacacgaactaaatgtggcctgagaagaatgccaggacgtctatgtttgagtccttgtggacgaactataacctaccttaatagcagacaggactgaaaacctaattcaggagtctgcgcctgtaatagtggccgagtcttgaccaatcccagcagccatacgtcaaccatgcatagactgccgagtgttcaaactgttccaataaggcaaatgccaacctggaaccaatccagctgttctgtacctcactgccgagttttatatatcacttccccttttttttgtctatatatttgttctgaccacgaggaatccctggagtctctctgaatctgctgtgattctggcgctgcccgattcatgaatcattcattgctcaattaaactcctttaaattt

SEQ ID NO: 149205 - DNA, 737 bp, Homo Sapiens
gatgttttcgcaagggctgtgttcagattccatgttccctgaaatgtggaggcctgtggatatggggtggcctcagacaaggatgcccagagtgagatctctgcatgcctaccctcccttctttcccctccagcaactcctcactaagcaggacagcctggacatctacaatgaaagggatctcttcaagactgaggagcccgccacagaggaggaagaggagtctgctggtgatggagaacgaaccttggatggagagctagacctgctagagcaggaccctctggtgccacctccaccctcacaggcacccctctctgctgagcgggtggcttttcccaagggcctgccctgggccccaaaggtcagacagaaggacattgagcacttcttggagatgagcaggaacaagttcatcggattcaccctggggcaggacacagatacattggttggattacccaggcccatccatgagagtgtgaagaccctaaagcagcacaagtatatctccatcgcagatgtgcagatcaagaatgaagaggagctggagaagtgccctatgtctttggtgagccaaggaagccctacacaggaggagagtagaagaaaacctgtcttcagtgttgtcacagagcatgtgtgcatgcattcattcagcatattaggctgtaactgtgttccaggcaagacaaggtccctactttcatgatatattgaagatggaaaagaaagat

SEQ ID NO: 149206 - DNA, 407 bp, Homo Sapiens
tctaaaatgagtcagattctctgattactcttatgttcattatgtaaactccagtttagaatatttcatctatttaatctgcaatttctagtatattggcataggtttgccgcctgttccattgttagttttggaaaacgtgtgtacgatctgtagggctgtctgctggctcactcccatatggaaatgcatgcctgctctttctttctctttttcattgtagttagaattcatgagtgtgattcatgttttcaagaatgagcttcactggctttgttgaattttcaagctttggtttttcctcatgaacaactcctcttattattgttattattccctttcttacgccttcatttggaataacttgttattcttctaaatttcttttttctctttttcttcctcgt

SEQ ID NO: 149207 - DNA, 815 bp, Homo Sapiens
acagctggcacatccctcccaagcgttgatcttctccagaaactcaggttgaccccacagcatgaccaaatacagacacaaccacttgggaaaggtgcaatggtagccagcttttctccggcagctggtcagctagccacacctgagagcttcatagagcctccctctaagacagcagcagcaagagtggcggcctcagcctccctgagcaacatggtgcttgctccccttcagtctatgcagcagaaccaggatcctgaagtatttgtgcagcctaaggtgttatccagtgccatcccggttgcaggcgccccactggttactgcaacgaccactgcagtgtcttcagtcctgctggccccaagtgttttccagcagacagttacaagatcttcggaccttgagaggaaagccagctccccttctcctctaactattggaacgccagaaagtcagagaaagccttccattattctcagcaagtctcagctccaggatacattaatacatctaataaagaatgattccagcttcctcagtacacttcatgaagtctacttgcaggttctgaccaagaacaaagacaaccacaacctatgactggagcagaataagtctaaaggcagagccccagcctcagagacaaataggcttcatcatggaaacttctgagcagaacattgagtttgagaatcctgaaattgagcctatgagaaagagactcatttcttaagaatgttttccaagtgacattctcagtgataatggaggtttcactgtgaagcatcaccagcagatccttgttttgacaaaaa

SEQ ID NO: 149208 - DNA, 529 bp, Homo Sapiens
actagagaagtttctctgaacgtgtagagcaccgaaaaccacgaggaagagaggtagcgttttctcctgagcgtgaagccggctttttggcgttgcttggctgcaactgccgtcagccattgatgatcgttcttctctccgtattggggagtgagagggagagaacgcggtctgagtggtttttccttcttgatggctcaatgacagagactagctcgtaaactgcggggcgtttccgggctgttcgctcctgcttggcaatgtcgcgagaaaggttttcgcctcctgtttcagcggtgacggctcttgggttttctcggggtggctttttaatattagtcttggcgcgaggcgggggatgctgtgtggcacctcctattgtctctttttgcgttttctcccattctcgctccctcttttgtcgccgtttcccgcccgccactcccacccccagacggggtctccgggtctcttgttctgtctgcactccagcctgggcgacagagtgagattccatctccaaaaaaaa

SEQ ID NO: 149209 - DNA, 554 bp, Homo Sapiens
  misc_feature (503)..(503): n is a, c, g, or t
tttattcttcactattatattatttattgcttattattcataaatggttttatattcattgctgttgactcagcccattttcctggaactggagccagccaagtgtctagaataatccataggagtgacatccagagctcctcaagacgtctctttgattccacatttggagaaaatagtcaaagaattacagcagtttcaccaatggcttctctcttaaactgcaacatgctctaaaaatatatttttcatagcatagtgcttatgcacattctgtgtcttctgtctgccacagcactcatctttcagaatgaattaaaaatcaaatcctctgttaaaggtctcttgaacaatctctaatggccacatattatttttaaggcatgtatcaccaattaatagagttttcttaatgtatatcttcaaattgtgagctccttcagagcagggacactgttttttttaatgtgcccaactttagtatggcacttaatacatagtangtatttattatgtattttctgaatgaatgttgagtgaattcaaaatttaag

SEQ ID NO: 149210 - DNA, 595 bp, Homo Sapiens
  misc_feature (395)..(462): n is a, c, g, or t
  misc_feature (513)..(513): n is a, c, g, or t
tttctgtacacatgatctcatttgactacttagttgacccctgaacaacttgggagttagggaaacagaccccctgtgcagttgaaaatctgtgtataactttgactcctcaaaaacttactaatagcttactgttgactgaaagccttatgaataacataagcagttgattaacacatattttgtatgccatatgtattatatactgtattcttacaatacagcaagctagagaaaagaaatgtcattaagaaaatcataaagaagagaaaatatatttactattaagtggaagtggatcaccataaaggtcttcatcctcattgtcttcacatcaagtaggctgaggaggaggagcaagaggaggggttggtcttctctcaggggtggcaaannnnnnnnnnnnnnnnnnnnnnnnnnnnnnnnnnnnnnnnnnnnnnnnnnnnnnnnnnnnnnnnnnnntatttctcatgcatcttgtagtgccaactccaaaagcgagtgtcatcttangggtttatttatgaggatgcagtacataaaatgcttggtgattcataaacaccaattgataaacttctaatataattaactg

SEQ ID NO: 149211 - DNA, 991 bp, Homo Sapiens
  misc_feature (149)..(164): n is a, c, g, or t
ataagttccccccattatcaaatacaatttcaaagggagacattttggtgagtttttttcattaaatgatcacttatgtcaaaaatttaaaaaatattttattacatcattaaaaataattcacttgccatttcaacagcttacactgnnnnnnnnnnnnnnnnaactcttcatactaaactccctgatcccctagtgttaaatctcctatttaaattaaaacttggtgctctttgttactcagaaactgatggataaaaacacatttacttcaaaattccatcaatcaaatacattttgttacctgatttatcagagaaatatctcagctctgagcatgtgtatctaaattattctccctataatatataggtgaggaaaatatcctaaaatagatggaggtaacgtacatgatgttacagcacatataatacatgattgttataaatttttcagagacacctgaaaactcacttaagaaactaacttcagaaacaaaccatttatttttcactctaatgtaaattaatatgtatgtatttacgtacatacacatacataaaaaacaaaattgtctagtattgagtagctgtttatgagtgaaaaaatggttacaaattggttaattagcttaattttgtacttaacaattcgatcattttggggtacaaacaagaagtcagtgcatttatagactccatagagtcagttactcaagcatacactttaaaaaagaaccctcctcaacatcacaggcattgtacagcaagaatatatgtactctgatgcaattcctactttataagcagactagacagcacttggcttacttttaaaatagcttcgtaaaagaaatatatcatataaagaaatgcatgtttgctaaaagtcttttaaaattacatcaaaacaacattaaaacctgttcactgagaagagcctattgaatttaattcctgttttgaaatacctagttaacaattcagaatat

SEQ ID NO: 149212 - DNA, 525 bp, Homo Sapiens
ttttgctaaaatttaccacatttattccaaattgtgattttataacaagtagaagtctttaaaatactaagtggtcagaaaaatacataatgtgagactgacatattttcagacttaagtcacattggcatgaatcaaaacaaagttaccccaactaaaatacatataagagagagccactgaaggaaaagcatcacaagacacagcaacacactttagttcatttggaaaatctagaattaagtgtcaaagcagctcacttaattgaatctgattttcaaaatacacatttcaggtacaagcatttccacttacctgcttcattatgctcttaaaatgcggcaacatgaagacgttacatttcttatttcagtagtctaagactacacaccttatcagcattgctctgcatctactaacatttcataggtgacataatgtctttactcagaggaaagcatcttgtcagctctaccttttatctcctggaaacaaagcatgtttccaagctgatatagtaaacac

SEQ ID NO: 149213 - DNA, 1822 bp, Homo Sapiens
  misc_feature (982)..(1009): n is a, c, g, or t
ttttttatgcagctaaatttattctcacaacaaattacatttaaatgtgtaaaagtggtcaacaggaaaagggcataaaggaaaacaaagcgttctttcaggggaagtaagctgctctggaggccaggaactactgcttgcgttgacacggtgtgagtgggtatctttgccctgaagctgaagttaaactttctactggccgtgtggcacacacgttagatgtgtattaggttaagcctggccaactagagagcgaaggggcttattagttaaattgtgctaatatcagttaggaaaatgcttgtcatgttgtggtgaaatcttgagtttgtgttgcaatgcctgggacatgaacgggccatacaaacagaggaaagctctggggcttccaggcaatggccttgtgtcgagtcatcttacaagtgtccatcttgaaatcataaagtggatttaaaaagaagtagcagtgccacagtttatcaccaagaacttattttaatggaaatgggtctaatgtcccttcatgcaacaagacagatgaacaaaaaacaatggtcctaattagctatgagtgatcttgtatccaggtggaaacaaagggcatgtgtacatgtatatatctcttagatgaaatcacacatgttgtgaagggtagaaaaacgaagcaccaagcagtgctttagtctgcaaaggaaagtttttagccataggcatgttggctagtcgttccccttgatgttgccaaggagcagatgtatgaggtggcaagtctgtgtctatctagctgcttttaaaaaataaaaggaactttaagcattttgccttttcttctacatatcccaatagaaatgtgactacaaatcattacaaaaccactttttaggcaatgtatagttcactgagattacttagatctggatacactgggagataatatccaggaaagataatacattaacacaataatgcagtatatttcagnnnnnnnnnnnnnnnnnnnnnnnnnnnnttttaagctgtatttaacaggttaattaaaaatatggtaagacatagaaggcatcgtgaacatggctgcctgtttaccgaatcacagatctaaagaatgcatagataactgaagtgtcactaagatatcaggtaaaacattggcatccttttacaaacaaatacacacatactttcatacatactttttggccatggcagaaagtgtctgaacatactctttaacataattttacaaaattaatttgcatttactatacaatgccattttcaaaacaaaacgtctgcaaagttttcaatatgtaaaggctatcattcatcttaatgcatcctataattgcacatataaatcagtttgctacttaaagctagctcagaattcttgatcttgaaaacaagcaaatgtatgccttaaaaaatgaagagggagttctggtagagatttccaatataaaagtgggtaatttgtttagaattttgaaatttatcacactaaaatgtttcactacagcgaccgagatgaaagatcactgtaaatgatttctgaacagcttttcaaagggcacagcaaggattttcttaatgcagtaatttcttatgatggcactggttacttcagatcagtagtatgtcaattggtgaaaaacagactgcgtttctaaagtagcatagttttgtcataacattggggtgctaagacaattccggtccccctgtcccccacccctcatgaattctgagggaatggcaggtagaaaactcacccactcattccatcatgatctctggtgggtaaataccatgagttaggaat

SEQ ID NO: 149214 - DNA, 987 bp, Homo Sapiens
  misc_feature (727)..(727): n is a, c, g, or t
  misc_feature (730)..(730): n is a, c, g, or t
cacactgttattttggggcagtggggacacaggccccgtggacctgtcctgcctggcccccaaggccatacttaccccccagaaggcgggccatggggtaactggaagctgggggccagcagtttgcacaggaggcctgtctgagccccacccgccagacctgttgtgagcagctcctgtcactgaggctggctgaggtgtcccggggtggggccaaagtagccccttggcttcgctgctttgggggacagttgcacaaattggacgagcggccccagctctctggctgccatcttgtgctggccgagtagacgggaggggccaagccgtgccaacctctctggctggcagggtggggcagcaggactctggctctggtgaggggcgtctcccactgctgccattttgggggacaccctgggtttgaacctgaaagccccagctctctgccttgccacgtgaatgtattctttgggccacaagcccccgcctcacccctgcctgagctgcctcacccctgtgagcggcgggggtggatgattgctccagaggctgcagagagaaggctgagctgtttctccagtgaagggggcaggaggaggggcctcaaaggcaaggagtgggtggctttgggcttagggttgcagtagaggggctgccgcccggggccccaacctgtagccagctcgtaagatgtggaccacccagctctgcacctgaccccttnccngctgaccaaatgggagaggagcaggtggccttccgggtctgatatgatgcgctttttaccgttgggtaaggttggggtgaagagaagtgtgcggctcctgggtcagaggaggctgccccttctattgctcacccacttcttattcccggtcccctacttgggttcgtctccgcccattttgggttttgtaacagttttgtcttttgggtttctcatccagctcctcccattgacctcattgctcagagtgcagtatt

SEQ ID NO: 149215 - DNA, 262 bp, Homo Sapiens
ctaggtagaccttgttctgtagctgctgtgaagaagctgcagccctgaactcaggtcatactcaggaacagcagcaggggtgtgggtggggtttgagggaaggtactctgaattcaccttcatgtttaacctgttccatctgacttgggtttcttcattatattgttccctcccactcaccttcacttctgtattacaacaatatagactttactctaaagccaatttcatggaagttattaaatgctacttgaatgtgaaa

SEQ ID NO: 149216 - DNA, 991 bp, Homo Sapiens
  misc_feature (155)..(167): n is a, c, g, or t
tacacacgtcagtgtgtattaggccatcaaaacgcctccgggaaattctcgggttattttgaaaaccccttccctccccaagacctttaacctagagggctgttggggcggtctcctaggagaacacacagaaacgactgcgcatgcgtgcattnnnnnnnnnnnnnggctgatgcaacctcacgctgccgtgcggctctacctcgagtaaggaagccgacagggaaatctggcaaaaccaatcggcggccacacggaagtgggcggaaaggcccgccccccggggattttgcgagtgacgttgggcggcgcggcgctagcgacgtagacgcccaacagtcctgcgtctcttccggcgtctaggggggtgtcctgccggcgcgcgggccctgcggccattttgggcttcgcttccaccgcaccagccggcctacccagtccttccggtatcgcgttgctcaggggcttttcaaccctctgtcagtcggaaaaccatcgccgaggccgtggggggactcctatccatggtgttgaagcgtcgagccgactagggaacctccttccccgccaggatggaagtcgcatcagtcgccgcctattgcgcgggctgttcttccctgtgttctgccgcccgctgccgcattcgctgccctctgtggcttttctgctggctcgaagatcggcctggagcagcgacgccaccgctgggcaaggccgagactctgtaggcttcctccgaatcccgtcgacctccagccgctgagcgccgcggccctacctgagagactgtcaagaaaaaggagatggagccggggacaggcggatcgcggaaacggcttggccctcgggcgggcttccggttctggccaccctttttccctcggcgatcgcaagcaggctcttctaagttcccgacgcctcttgacccggaaaactccgggaaccccacactgctttcctctgcccagcccgagactcgggtcagaaactg

SEQ ID NO: 149217 - DNA, 844 bp, Homo Sapiens
  misc_feature (86)..(86): n is a, c, g, or t
  misc_feature (110)..(110): n is a, c, g, or t
  misc_feature (115)..(115): n is a, c, g, or t
  misc_feature (177)..(177): n is a, c, g, or t
  misc_feature (189)..(189): n is a, c, g, or t
  misc_feature (228)..(228): n is a, c, g, or t
  misc_feature (269)..(269): n is a, c, g, or t
  misc_feature (309)..(309): n is a, c, g, or t
ggtcctgttaaaataagtaaacaaaatttcccggaccccattaaggttatgaggaaattaagtccacaaggagtgcaaaaaaagtnccttggaagaaaaagtagtcccanctaancatttaccaatattagggaaacactttacaaagtttccattactatgaagatgatttcttcnttgttcaaattntgcacaaatgaagaatttttctttactgcaggaaacaanctgtaagtaacagtgcatttttaggcataaataagtattantgtctgattccagtatggtcaggttaatacataaatactntagaaacacagaagttcacattagtgaaaaaatccaagtttctcacgtaaccattcttcagttaggtcttcggtatttcttatttcaaataccttggttagttcagctgtctggactagcttattcttacttccagcatacatcatctgttgttcaggcttacatccaacaggactggagaaaataaagcacagaggatatgaaactcttccatcatcatgttgatatttataactatacacaatgaagcgaggttgtcgttcaggtagttcatctttaagttcatctggtgaaatgccctcaagctcctcataccagtaccaccaggcgtttatccttgtcaatcttcattataatagcagcgttgttcgtttctttgcgaaaacgaaactttctcagcttttccactaaatcttcggcaacatcacaaacaaccaaagactcactcattttccttccggccgtcagcggcctgtcgcctacactcgggcgcctttaagaatggcacggcggccgcctcccttcctgccccccc

SEQ ID NO: 149218 - DNA, 625 bp, Homo Sapiens
tttcctcagatttttatttttgcacattcttgtgacatttcccattgtagggaacaggagtttagcaaaatcagcttcttagatgatgtcattctaaatatacatcttaaacaaacaatatcaaaaccaccagtaggaaactgaaaaacactcagtgagtactgttttgtctcagtaacaataaatacaaaaagactggttgtgttccggccccatccaaccacgaagttgatttctcttgtgtgcagagtgactgattttaaaggacatggagcttgtcacaatgtcacaatgtcacagtgtgaagggcacactcactcccgcgtgattcacatttagcaaccaacaatagctcatgagtccatacttgtaaatacttttggcagaatacttcttgaaacttgcagatgataattaagatccaagatatttcccaaagtaaatagaagtgggtcataatattaattacctgttcacatcagcttccatttacaagtcatgagcccagacactgacatcaaactgagcccacttagactcctcaccaacagtctgtcctgtcatcagacaggaggctgtcaccttgaccaaattctcaccagtcaatcatctatccaaaaacccc

SEQ ID NO: 149219 - DNA, 438 bp, Homo Sapiens
caaagccactgtaatcaaatcaatattttattcatacaggagtggaaaagtagaagacatgaacagaaataaaaattctgaccaaatcttaaggagtgtgaatgagaactgaatgtatgataaatgttgcatgttcagttcaatgggaaattgatcgcttatttaataagtgattgtggcacaaaggctgtcttcagcaaacaccaaataactctgtgctctgctttgagacacttttctgaatctgttagcaagagaaatgctgaagctttctcagatgtctgctgtgtctagggaagatgggggatggcttcagagcaagaggccacaggtcggctgtgagcatctgtgtctagctgttgagcatctccaacagtggatgagtgtccaggtagacctgaggctgtgccctgagatttctgatcatctcccagcact

SEQ ID NO: 149220 - DNA, 497 bp, Homo Sapiens
ctggaggccggagcgccttttgatttcgggagactggcccaggaactctagtcacttggaaggcggaagagaaggtggtacctgagccaggtaggagccactcagaggcagcccggggccgccactcacctaggagaggaggtggagtccgatgacctggactgagaggaaacgcgagactgagtctaccaggtgaggtaaaaaacacccacctgctcacctcggaaggggcgggcgaggtgcggctcccggtgacccgcgggggtgcagcgcacctgggcggaggcggaactgggagggtgtgggcactgctcgtagggcctggaactaaactcacctgtgacggaggcagaggaggggcccgggcaaaaacccacctgagctggcgggaaacccgacccgcgagcagtccccgggcttgcgcggcgcggagagggaggcgccccgcggcggggcccccactcggtcagcccgcgcgtcggtccccgcgcggccgc

SEQ ID NO: 149221 - DNA, 445 bp, Homo Sapiens
ctgtgcaattcgctctttattttgggaccagggaaggaccacacacagccctgcagctcagggggcgggggcatccagacgcgggactgcagtacccgaaccctgcccagacgccgctgtccggaggcgaaatccgggtttccagggtcgggagtgaacatgtaaatgaggtgggcgtggtctgcaggtctcccaggaggcctcgggtgtcctcaccacaggtctgcgcctccggcctgcgggatcgaagggaaaggaatccgatccggggaggcaagcctgggagacgtcgtaagtgatggaccaggatggggccagaccgcgctctcggaggcaggatgttatgtgacttgatgggggcgcttttaccgccacctgccgaggcggtcctcgcagtctgggaagaacgttttggagaggcgcgcgaccgggcggcctagtttcc

SEQ ID NO: 149222 - DNA, 581 bp, Homo Sapiens
gagtgctaactattacacaatggggcctagactagatattttaaaatcagtgtctttaggaattgtttgagatgattagaatacaaattcttgaacttcatcaccaagtttctatttcagtaggtcagggaagcacattttgaagaacactaaaatagaccttcaatgtttgaatccaattatgcataaggtattaatataagaattatacataagatattgatataatactacactaatataaggtactatttgtagagttatacactgctgaatatactgtgctaattacaaagtatttatgactcttgtgaggaccacttgacaaggttgctatatatatgtaaaaaaaccctctgcacttcctcatttgacttactactgagtaaaattagcttatcttctcaaaatgcagtttttgttagaaaatataattttgaactaagatttttgcaaaccaggcaagttcttcatccactcaaggagaaactttaaaatccacttaaaatgaagagcattcctccccgactcaattttctaactacatattatcttcatagcattaacaccagccagaattt

SEQ ID NO: 149223 - DNA, 1742 bp, Homo Sapiens
  misc_feature (220)..(220): n is a, c, g, or t
  misc_feature (226)..(226): n is a, c, g, or t
  misc_feature (228)..(231): n is a, c, g, or t
  misc_feature (236)..(238): n is a, c, g, or t
  misc_feature (240)..(240): n is a, c, g, or t
  misc_feature (244)..(249): n is a, c, g, or t
  misc_feature (346)..(346): n is a, c, g, or t
  misc_feature (368)..(368): n is a, c, g, or t
  misc_feature (590)..(649): n is a, c, g, or t
cgggccggtattgagggcggatgagttacgaagccggatgcagagggtagcgttaagccggggggtgggagcgcacatggtaaattcgggtgtgcgcatgtcgagttcgcggtcgtatcagagaatagcgcgagggggggcgatagttccgggtgtagctgaggtcggtggggggtggggagtatgtgcgtggtggagagtttgtgtgtgttttggtgtngcggtngnnnngtcgnnncnagtnnnnnnacgccagttcaagccgcgtgcacataagatcatactgacgcgcgcctcgagctctctcaaaggttgagtcatgcacgcgggaacgccctgcgcgtcncattcaggggggcatgaggcanccggcccgctggcgctgcagaggacccccgggtaccctggctctgcgagcagctcgcgatgagccggatgactgcaggttcctctggcccagcagcagcttgcgctcctccagcttgatcttctcctgcagctgcttctgctcctccgcctgcagcttctccagcttcttctgattccggcgcagctcacggtccctctgcttctgctccctcttgcgaagnnnnnnnnnnnnnnnnnnnnnnnnnnnnnnnnnnnnnnnnnnnnnnnnnnnnnnnnnnnngctcgctgcctctcttccgcttccttctctctgcgcttttgttcttctctttgctgctccagttcctgaagcttctgcctctccagctgccgcttcttaattgaggcatcactcaggtgtttggtcgaatcaaaagaaaccttgatgttgcaggccacggccttgccgtcctcgcccttgtacatgagtttcatcccgcgcagggcgctcatggcctggatgaagcccatgtactcgcggtactgcacataggcctcgaagttcaagtgccccccgaaactgaaggtgtggaagttgcggcccgtcatctcctcccggtaggggtccagcatggggatgtccacattccggatctccccgaacttctcaaacaccttgaccaggacgtcctcgctgggcttctcggagcccgactcctttcagggcgaaccacttgcagggcagcccctccaggtggatggtgtccggccgctcccccggcagggtctcgttcatgtccttggcgtcgcggaagaaggagtcccagtcgtggcgggtggggaagtcgatcttgaactcggccgcgcgcaccttcaggatgtcggagaagccgctgagcttgatggtcttgccgtccaggcaggccagaaaagacttgaccaggctcttgttctccacctccccctcgaagcggatgaagtccatggtgctcttggaaatacgcagcgtggagaactggtggttctgcaccatgcccttcagcctctccatcacctcccagttggagatggacttccccggctgcttcagctgcgggagtgccacgctgatggtcatcttggtgatgggcttcaggtacaagccgtaagcatgggcagagctccacaggcctcagacgtgtcgtgcacgatggtagccgctgccatagcctccgggaccttgggcctgcgcggggctccagcctgctgtcccagcacgcacagcacagccgctggcccaagctcccgccgtccctcgacgatccccggacaggcgcggcctcaccgccgggagccgccaccgtcccccgaggcgcctccgacgccgccacacgccgtcacacgcccgccctcta

SEQ ID NO: 149224 - DNA, 663 bp, Homo Sapiens
tttgtttctagaatagaccacactttttcaccctgtgccaacatcagaatgtcaaacataatttgaactgtttttgggtgactcgggaacacacaggaacagccatcatatcatacctgtgttttcataaagggcccttccgccaccccctgccttgactaccgcaaagtggtcccgtcacccttgttttctcttcacttttccccctgctgtcttccctcttgttggggctgggaaataggagctacttgggatttttcctgctctttcaccagcaatgcagggaaaatgtttctttcttctgctggtcaatgaatcaatcatagaatatattttgcagtttaggatcttaactacttatcattgttgtgttttaaaagtcttccatttcccctaatgggtgaggcagtcaggaatctgcatcaggttaccagggttacactgtaggagcattgcctgtgagcagcgagggctcttctcactttatttactacagatgggcagtaggtttcccatctatgaataaggcacaccccagatcatctcacagactagtactttctgtctttaaatacatcacacatacttgctacaaaattctaaaggaacaaaagcagtaaaaaagtctgccttttcataacatccccaggtgatctgtgtttt

SEQ ID NO: 149225 - DNA, 985 bp, Homo Sapiens
  misc_feature (76)..(76): n is a, c, g, or t
cttgggaaaggtttaatatgtttctcaccaacgcacggttcgtggccgccccgcatggagcgagtccgtcagcacnatttttttaacaaaactgcacaagccacccccactttcaagcaccaccttgatcaacagccatcaacattgaggcaaaaccctccaccagcaaaaagattatgactcattgaaggctcagctgatggttagcagtaaaaaatattaactttaatcatctcgaccattcagtactcatctaatattctctataacaaaatgggaaatgcacataaagcacttctgctacatgctgaattatgattgttgtctccaggaaaagaacttgtgggaacgtttgagttgtaagctgaactaactagctgcttttttcatgaaataccgcttttactggaaagaactgacagataaactgaggtattcaaacctagatatttggcagacattttcgtgaaaataaatatgttcgtgccacttcaaggaacataattctcagtacttgttgccaataatgttggaattttcatgcaaaaattcaaataaaaaacaaacttaaaaccatcaagaacttggtgactttatgtggaagccagtgctacaatactttagcttcccaatacttaaaaacttttctgatgagattactagtgatattaacaatgtgattgatattgaataatgaaatgttttagcatttggaagatctgtttaattcagtaaatcagtattttccaaatgaccaatgcatgacatttcaacatcacgcacaggaaaataggcattcgaggtacagtcaaaaataatgagttttaatgtaacaagtacaaaatgtccattgaagtggtttcaaattccaaatagtaattggaaaatccaccactcgtgttttggggtagtagtatcgaaaaagaataaccaagataatttgaaaaggctattaaaaaatacttctcaattttaaaactgcaaa

SEQ ID NO: 149226 - DNA, 609 bp, Homo Sapiens
ttttatgttccccaacttttaatattagttaagcaagaattgcactgcagcagcaggatgctttttagtggctgacactataaagctaacgttaagaaagaaaaaaggcagaaagtgtgagcaacaaatggtgtaaccaaattattgcaaatggagattagcaataagaagtgaggaaggtgaccgtccactccattctgataagacaccatctttaaatattaagttttttgcaggaagtggaacacccatgtcagcatacgatgactgtgaaagcaaacttgaaaaactgggctctgtgtgaatatccaatattgaagcaccttcctggaatgagtgaacaaagttaaggacttgcagagagagttttctactggaatgtaagaggttttgaaggctctcttttctgcaaaggccatgtgcagcaattttcctacaaactttccggtttaattcggaactgaacagtggaattccaaagcacagctcgagaggaagccaatctgcttctgttgtggcaccagaggtttgctttgttgctgaatctatagttgcttcctcaatgatcatttcaaatgactctgtactcccatttacatctgagacaga

SEQ ID NO: 149227 - DNA, 624 bp, Homo Sapiens
aagtcattcctttcctgtccccagagcagcaacaactccaggcccagcatttatcacatggacatggtctccccgtacctctgactccacacccttcagggctccagccccctgccattccacccatcggtagcagtgccgggcttctggccctctccagtgctctaggaggtcagtcccatcttccaattaaagatgagaagaagcaccatgacaatgatcaccaaagagacagagactccatcaagagctcttcagtatccccatcagccagtttccgaggtgctgagaagcacagaaactccgcagactactcctcagagagcaaaaagcagaaaactgaagaaaaggaaattgcagctcgttatgacagcgatggtgagaaaagtgatgacaacttggtggttgacgtttccaatgaggatccatcttcccctcgagggagcccagcacattcccccagagagaatggcctagacaagacacgcctgctcaagaaagatgccccgattacgtccagcctctattgcatcttccagcagtactccctcctccaaatccaaagaacttatcttaatgaaaaatctactactcccgtctaggagcgtaatcggtaccgagcct

SEQ ID NO: 149228 - DNA, 881 bp, Homo Sapiens
ttttgtcaggccaagtaagtttattaacctgccaggcttctccaccagtcggaggtggcagccctgagcttacaaaatgaggggtttatatgggggagagagaccctggggttgttagtcaattaactttaccacatataatctcatgaccggcttacaatatattatcttgtgaaaataggaatttacaagggggtgtaatccacgtttctcatgacctcccccgtgccacccagagggcttcggtgtagcaagtctggtgaccttgctatagcgcctagataacggttcaggaatgcagctgcagagtattcagggtaagggtcagctgcattgagttagcgggggcggagtggtcctggggcagcctgtccctaacagaatccacctccgagttgtgacaattaaatgaaaaggttgaaaaggtgaacatgaagcacctgctacactgccctgttgccaccagcattgtcactgctctagctcctgtggcactgcacggacacgtggttgctacaagttagtacgcatatttggccttattagaggcactttcctattgtaactgaagggatagttggcttaagtcaattgaaataccagcaacaggacattccagcttcaatggcttgtgcctgtagttgtcaacctgcgctaagaactgaggcagctgcacttccgcagacgtaagagacgaactcctggagctcaaggtcggctggggttgggttcctgtcccgcacgcgtggcccgcccgaaacccgctacatagtggcgcgtcagcccgcgcaactccacggacgcgtgggtcgacgatatcccgggaattccggaccgtaccagcctgcttttttgaaaccactgttctatagtcacatagc

SEQ ID NO: 149229 - DNA, 898 bp, Homo Sapiens
  misc_feature (123)..(123): n is a, c, g, or t
  misc_feature (128)..(159): n is a, c, g, or t
  misc_feature (166)..(166): n is a, c, g, or t
ctttgaagccctattaatggttccagggggctaccctgattttgtgaaatggtccctttgcttcaatttaaactctgcccaaatttaaatttgtctaaagccttttattttaaaccttattcntcatnnnnnnnnnnnnnnnnnnnnnnnnnnnnnnnncttaaancctgatcaactaaaaaatgaaactgcccagtagaaatgcttagctctcactgtggtaatttcgtgaatgtggaggaaactactaaaactttgatatactaaatagacagctctgtcccacatttatgtttattaaaaactgacataaacaaacacaacctgtacaaaaaatatcccaaatctcatatgactttgaaatcttgagagacattatcgcctaggaccccctcttcctctgccacggccacgtcctcttcctcttcctcttcctctgcctcttcctgcaacagcttcccttttcttagatttcaccttaggttcaacatccacaagtagtgtatccagaggtaaactgtctggtagaataaaataccgaatgttatttcctcgaatactcagcgtttccagctgtacaggttctctgttcttcagggtcattttcacagctttaagatgtgtattcatgctgacatccacacctgtgattgttccatggacctgtgttccgttcttcaattcaatggttacagtttcatgactcaatttcatcaaaaatctcacgagcttcatcctagcggcgccgtcaccctctgggtccgacagcacacagaatccttcaaccgaacactgaccgactgcagtatgaatggccggaagcgcctactccaggggctccggacgtcaagagcgcgcggagcactgcagacgcatggcggaaacgccgaggctgccc

SEQ ID NO: 149230 - DNA, 891 bp, Homo Sapiens
  misc_feature (186)..(251): n is a, c, g, or t
ataaaagagcgcccgcggatattacaaccctgacgagaaggggtttgagaagggctttttgttggggtcccgctgcgaaggttttggtgatgggaaaagagggcaccagggcatttagtccatagacccagggggttttccttagggggatgggttttggggagccaagttttcggttttaccctnnnnnnnnnnnnnnnnnnnnnnnnnnnnnnnnnnnnnnnnnnnnnnnnnnnnnnnnnnnnnnnnnngggcctcggccataatagagggttccttgctaggtggttgggtcggtgggtcccccaattaaggtttaattaaagcgtggccgaaaaccagccaccacctggtccaaaggatattccgaaattttcatagagtttcgaaatcctgagaggccattttcgcctagggccccctttttcttatgccgcggcccacgtcctgttcctgttctttttcctctgcctgttcgtgcaacagcttgccttttgttggatttcactttaggttcaacatccacaagtagtgtatccagaggtaagctgtctggtagaataaaataccgaatgttatttcctcggaatactcagcgtttccagctgtacaggttctctgttcttcagggtcattttcacagctgtaagatgtgtattcatgctgacatccacacctgtgattgttccatggacctgtgttccgttcttcaattcaatggttacagtttcatgactcaatttcatcaaaaatctcacgagcttcatcctagcggcgccgtcaccctctgggtccgacagcacacagaatccttcaaccgaacactgaccgactgcagtatgaatggccggaagcgcctactccaggggctccggacgtcaagagcgcccc

SEQ ID NO: 149231 - DNA, 433 bp, Homo Sapiens
tccctaagacctgacctgcctactccctagaaagcaccaaataaggaaaagcactccggaagaatgaagctaagaaggctgtgctctctgaggcatccgggcagccttcactggagggacaaggtccagtgggaccttcttactcaagatggcttcaattccaatcaccagagagttttgagaaccagtgggaggggttcctgggcagcggggctctgctcctaccgggatttgtttattcagctgatgttaataaatgaagctgaaggtaacaagctgtcacttagcatctccaggctggaccagaactgccattggttaagtttcagacttcagccccaaagtacagtgtcaccaccttggatgaaggatattaattagtgtcatgagggagatcacagtctcattcccctccgtcactagcacgagactg

SEQ ID NO: 149232 - DNA, 788 bp, Homo Sapiens
agggccacgagacgagcttcacacgggggttgtggatgtcccagaggtagatgttctcgtgggtgatctgcagcttgcactcgccatacacgtccaggttgggtcagggcaggcaggaagacattgaagcgatctgtcgtgttcacgactgcaccgcctggggccaggaggtcaggttctcccagactgatgtcgttgaggcgggacctcagacactccacagatagtgtcttgtaccgctcctgtgcgtctagctctgagtcgcaggtgaaggtacgtgccgacgtcatcagtgaatatgatggccaaccgcctgccgcattggtctccttggggagccgcgtaacacaccttgacgttgctgatctcagtcactttggggcagccccggaggcacaccgacttctcatctggatacttctccagccgctggggccccttgctggaggatttccggaacaccagccagcacctccggtagatcccgagcttcctgctcttcatcttcacgtagccttgcttgacgatgtcactgaaattggtcgccatggttttcccaccttttaggggcgcggggcctggcagaggcgaggggaaggatgcccaggtgcctgggtctccggctcctccaatcacctgttccagacactctgtcggggctgccgcgaggggctgctcctcacctcacccgcctcagcattgttctagcagctccttcgccccgcgcctgctggaaataaaaatgacagggagattagagacagtgacatctttctcttcctctcgct

SEQ ID NO: 149233 - DNA, 437 bp, Homo Sapiens
ttttaatttttaaaagtttttatttacctaaaaacataaatttatcaaacatatcaatttgctttgcagagcaatttacataaaaattcatgatgtataccaacgacagcatagcattatctacctcagtttgtgaagcatcctttcctacagatctcagcaaaacgcagagccagtaggggaaattcaagctttcatttgggggcctctggggtcctacctgctggcagttctttcagcagaaagtggggtacgggggatgctgaagagggggaagtggaccccattgcctgttaagtcccatctgtctcagtttgaagcaacacgggaatttccattggaggagggttggcctgccggcctggcccttctctcacgccccctctacttcagctacatttcttatgcatgttcctcaaagctgtgaaaatcaatac

SEQ ID NO: 149234 - DNA, 1451 bp, Homo Sapiens
  misc_feature (98)..(98): n is a, c, g, or t
gatatgtagctcggggaggcgatgcgagcaatcgtagggagccgcgttatgtaggtgagtaaatggggggtgcagggatgatacgcggtgactaaggnagcggaaactggcgctttggtatagataggcgtgtgggttatataagtgaacattgggcgggtgacggggtgcggagagatgaaggggttatagtgcaagggctggggcagtctgacgtgtgtcgtgggggggactgatctggtgggcggcgcacagtagagtagggtgcgctcgcaggctggtgcggggacccagacagtgtggtgggaagatcaataataatgcgggaggcgcagatgtgtggtcgagcaggggggtgtggggacaggagcgtgttaggctagtggcggagagggggatagcgtgcgcggtgggtaggggtacagggatggaggataggggagtgctaaaaatatatccccaccgacaagggcccgggaaaggaaaggtttaaggttgttccaccccgcccgttaagcccagttttaatccccccctgaaaaccacccaggcttggcgcaccttgggacacgatttcgctgcttggcgatctgcaggtcctgctgccgcgcgttggcctcgcggacacaggcctggtacagcgcctcggcctcctgcgccttggcctgggcctcctctcgcgagcgccgccgccgctcctgctgcttgctaggtcccggcgaggcctggggggccgagtcctcaggggacccctgggagcgtgcccgcaggtcctcgctgcgttgcacatactgcagctgggcgcgccgcagtgcctgcaccgcctcattcatccgcttctgctccttcatccactgctccttgaactccttccgccacttctcaatctcagtccgtttggcggcgaggggctggtagtagtctcttttctgctgggccactgtctccatggccagggttcccaggctgagatcgtgctccagaaacagggtgtagatgtactgcagaggcatgtggctcatagctggctctcttttcagtccaggcaagcagttccttggcatagcggctccaggtcttggcatattccagggctgcgtccacacccccctttgtccgaatgagccgcaagtccagttcctcccctgtgaggggtacaggaccctctggggaggggccgctccaacagctggcttcgttggtaacagtggctgtaggggtcttgtcaggttctgggtcttctgagagtagagggtctccagccagcatctcaagggtcgttccccagtgagatttcgaggttgtccaggctccggaagatgtcactgtacctcttcctgccctcaggacctggggggagtcccggctctgctgcgtccatatctgggcccggggatcgctctgcagggaccgggatggggatgggtcgcgcgccggcgggccgagccccg

SEQ ID NO: 149235 - DNA, 1028 bp, Homo Sapiens
gaaattccctttgtttgggaagattttccaaggggtcccttttttcccggggttgtgcccttgcggggacccccagggcctgggttacaagcggccttgggccttcttgggccccttgggcctgggccttcctttttggggaggggcccgccgccgggttcctggtggcctggcaggttccccggcgaaggcctgggggggcggattcctcaggggaccccttgggagggtgcccgcaggtcctcgctgggttgcacatacgtgcagctgggcgcgtccgcagtgcttgcaccgcttcattcatccgcttctgctctttcatccactgctccttgaactctttccgcccctttctcaatctcagtccgtttggcggcgaggggctggtagtagtctcttttctgctgggccactgtctccatggccagggttcccaggctgagatcgtgctccagaaacagggtgtagatgtactgcagaggcatgtggctctgctgttgaatggacaccttgccagcttcagcgatcttcatggtgctcttagcaaactccagctcatagctggctctcttttcagtccaggcaagcagttccttggcatagcggctccaggtcttggcatattccagggctgcgtccacacccccctttgtccgaatgagccgcaagtccagttcctcccctgtgaggggtacaggaccctctggggaggggccgctccaacagctggcttcgttggtaacagtggctgtaggggtcttgtcaggttctgggtcttctgagagtagagggtctccagccagcatctcaagggtcacgttccccagtgagatttcgaggttgtccaggctccggaagatgtcactgtacctcttcctgccctcaggacctggggggagtcccggctctgctgcgtccatatctgggcccggggatcgctctgcagggaccgggatggggatggggtcgcgcgccggcggggccgagccccgatttccatcgcaggaattccggacccggtaccagcc

SEQ ID NO: 149236 - DNA, 517 bp, Homo Sapiens
  misc_feature (498)..(498): n is a, c, g, or t
tcaatttttgtttttgtacaagattcaatagttatcacatattaacttatacacaatgggatcaacctcctcctccatgtcgcttcaagtccacatgttcaggctatagtccccaacattattttctgagaaatatattaccacagtttgatttaaatatagatacagtatataatacttgtctctgggaaaaatcaaattttaatatgcaaatgtttatataatacagaaatggaaaaaactacagtaggcacacaacctaattatgacttgtggatgatgatttctacatactctcctactgtaaatgaatagttaaaagtcttaagaagattttatttatatgtgcacttgtgtccaccttatcccatatactgtacatgtctattgacaatctgggaatttaaaggtgcagccctcaagagattgttaaatcactaaaaaaggaaacaattaggctctattggacaagaaaaacactcacaaaatttccaattntaaatttcattatcagtag

SEQ ID NO: 149237 - DNA, 1094 bp, Homo Sapiens
  misc_feature (194)..(205): n is a, c, g, or t
  misc_feature (252)..(252): n is a, c, g, or t
  misc_feature (757)..(769): n is a, c, g, or t
  misc_feature (1084)..(1084): n is a, c, g, or t
gggcgggagaattcccaaggccctcttggtctttggccccgtggttttttcctggggaacacaagctattgagcccctgtctccctttaccctttctggggcccgcgcgcgcccaaacgaagtggtttttagaaagctttttcgggggtccggaagcgggtcccgacaccgaggcgggctacacctttctttannnnnnnnnnnnatgtcccagtaataacaatggaatgtctctggcaagtggccctcttntggactagcagaaaacacagaaaaatctccagcaaataaagtaagaaggcctgatttggattctggtcgccactggaggttgcttgcagcaattaacatatgaggcttaataatgtcctcattaaggtctatccaaaactttattgccagtaaattgtaacattcgtctgacaaatagacgaaaggggcaagtcctgtttttttcacaacagaaacgacaaatcctattaggtccacctcagaacaagatggctgaaagtctggatctaaaaatttgctgaagtgaaggggctcccgtggctggtaaatctgaaataaaatttcatctgaaaccggtagttgttgatactgagttttttttgtcgctgctaactgtatgttagctctttcagatttacttttagattttgaagttgcaagatgataaattctgtatctctttccttctgttaacagagaatataaatctgatgatggacgccaaatactcagtataactgaatcnnnnnnnnnnnnngaatagctcacaatacgcaacttccacacggttgtgacatcccttgataaaccttgttccttttgttcagcagattccatggccttcctaatttccaactggatctgagcttgttcttatcattcaacattcgcctgtgattattcaaggctcttaactgctcttcactgaaataaccctcaaggtaagctgggtctgctgcattcttcactgcttcataaagctctgcaccatcttgcagagcacgaacttgctgtcttgatagtgcacgtgatggtaaatatggtcatgttgtgtcgtcttcatgttcttcanattcctcctg

SEQ ID NO: 149238 - DNA, 701 bp, Homo Sapiens
ttttaagggttgacttagtttattgattacctgggacctaactcatcctcacatcgccaggtgaattccccaaaactctcatagtgctggttatagtggtagaggacccggtgtaaggtgggggaacccagatccaggagggtgttgtaggcggtctgctgctccttcccactagtgtagccattgaagagattgtagatcttgtctgctatttcttgagccttgacatcattccaccacggggcatggggtcttcacgatcacgtcgcttggcctggagcgccgtcctgtgttgtccactccccacagcgtgaacatgtaaatggtgtcaggttccaggcatcgtatgatcagagagatggtggtgagctgcttgtccggcacctgagatggcattgcacaaggagactttgctccagagatgatgtcgtccacaaagctcagcactgtttctgtctccactttggagtggtccatcctgtcagtgactttctcttgacggaggaggtaatctacaatctgcaccccgattggtggctctgagtgttcccactccaggaccacaagagtgctgctgggctcgtgaaccgtggagagtctcagcacaggctgtgggagaggcgcacagggtgggagtccatcagcttcaaaaagcagtggagtcacatcgacaccagttcctcgatgacatctccattccc

SEQ ID NO: 149239 - DNA, 1163 bp, Homo Sapiens
  misc_feature (928)..(1025): n is a, c, g, or t
gtgtgagccaccatgcctggccatgatgtatccctttgaagtgtttcttctaaacattcagcctatcaaacatcagttgctgtagacatttgtgtccaagggaaaaataatccatgtcacatctttggtgagatgaaatattccatggtatcagtcctattaaagccagggctggccaggtaaactcttggcattcttcggtgccgcaattcctaaactccatagaagaatcttgttaatggacatttcgttcatcctgagacgtttgctttggcataactcagaggtagattcagcccaacaactggccctacaatgctcagccatgatgtgatatagttgacattcttattgattttctgagaattctttaatacaggagtcatgaattcattcgtcttgcagggatgaagtacaaaaaagggttgcccaagtattggatgttcctgttgcgtaatagtgtcccatggtccctgtagcagtcgcatcttatagcactcatgaactccttcccaatatgtctttcagagttaaaggtctcccatctccatgggaaggacatgtctgtccatgggtagggtgctcctagatgtgacatcccagacccattcttaatttgaaagtgtattttgcacatgtagccatcagaacagtcctttgatggtctccattcccaactatcacctatctgttgtgaatgtttaatgaattctgcacaataacgttggaatgttttttctccaatgaactcatcttcttccatgttaaatgataaaattagcaaaaatcagggtagcctctgccatcttcacccactgcaacaaatgccagatgatagagcaatgtctgcaatgtctggggatttgatttacacttcgtatcttagcatctttaataactgtacaacaggccgggcgcagtggctcannnnnnnnnnnnnnnnnnnnnnnnnnnnnnnnnnnnnnnnnnnnnnnnnnnnnnnnnnnnnnnnnnnnnnnnnnnnnnnnnnnnnnnnnnnnnnnnnncctctccgctcggcccctgaccctacggaactgaatgatgggactgcgggggcctcgagggcggaggaagagccgagccagcgcgccccgaggccaaccagaagtggccgtggcctccttcagtcaggtccgcggcct

SEQ ID NO: 149240 - DNA, 511 bp, Homo Sapiens
tgtttttgtcccatggcatttattgtgactcatggctttgtgggttagaaattctggcagggcttggatgggcagttctgttcctcacagcatcaagtgaagttggtgaagccttggccagaagcttcgtggtctgatgccttgggtgggggtggctgggaggctgggctcagccaggactcttgactggggcatccacaggtgggtctccagcatgacgtctcagggtggttggactccatgcgtgatggctgagggccccagagctgaccctccaaaagactgaactggaagctgcctgtctcctaaggcctgggcttggaaactgcatggtgtcatttctgccatattttattagtcatgtagtcacagagtccatcttgcaagacggatcttgggccgcagactgagcctgtaccctaaccgtcttccacaaactcttggtaactggacgcagcatgctgggcagctctatggaagtcttgcgggctaagcttgggggtcctgccag

SEQ ID NO: 149241 - DNA, 387 bp, Homo Sapiens
tttttttggtactcattcattcaataaagaatacttttattgaatacctactcaactgacaacagtcttgtaggcaccaggacacaggcatgagtcaagtggacaaaggcccagctctcatagtgcggacatcctggcggggcctcagggtggggaaagtgatggcaggggcggggagagcaattaggaggcaaggacaatagtcctggcaagagataggagggtgactgggacaaggcgatgagctgaagatgtgggcaatgcatttctaagtctattttgaaggcaaagcaatggcatgttctgatgaaccagatgcatgttatacgatatggagaggagccaaggatgaaccagagggttttagactgacttgatgaatgaatg

SEQ ID NO: 149242 - DNA, 519 bp, Homo Sapiens
  misc_feature (260)..(300): n is a, c, g, or t
tttctcttagattaccaaatacagcactaacatcatttgaaagaagagtttgcttgagcttatagctacgaaacggggaactttgtgagtacaatgccacacacatttagaagcaactactgtctaacaggggctttggacacaaagatgcatagagcacagccctgcccttgagaatcttgcttccacaggccgaaatcaaagtccacataccactagaccataaatggggagagtgttgccctagatgctgaaagctnnnnnnnnnnnnnnnnnnnnnnnnnnnnnnnnnnnnnnnnnaatgaacaagtctctgctattacaaaacaaatatcagagaccgtgtggggtccaaagatggaggtaaagaagcaatattgcccttaggctggggtaaggtatggagtgggggcttccttggaactcatgccacagagggcccagcttataacagatacgcacatacaaatcaatttgttcaaattcatacaagcacctctatccctcgggcctcaggtt

SEQ ID NO: 149243 - DNA, 612 bp, Homo Sapiens
  misc_feature (106)..(115): n is a, c, g, or t
ttttctttcaaagatattgtattacttacaaagagactttcccataaaaaatgtccaaaacagcaccagaaatgtgaacttttaacatatttttagatgcttctcnnnnnnnnnnctctttcctagttcctcatggaacttacaatggccttgtgctatatcccctggcattgcagggtctacaggaatagatgcagggccagccttgtcccttccttactctgtagactgaaattctggatttgcagttctggtgctttcttccactctctgtttgataaacatggctccttccaccagttcacagatgggtgctttgagaggtccccagcctccaaatagaagcagataacaaacacattccacgtaacccagaggactagccagacagcatatcctgttatgtaacgaggtctatattgaatagttccaaacaaaccaagaatgacgataataatatgtacaaaatttgccaggataggtgcccactgatatccaaggaagtcaaatatttgcctctccagcacacaaacggttaagatatttgtgggacaatataataagagaaacctaatgatccccatccatcttcagtacatagtataatcatca

SEQ ID NO: 149244 - DNA, 556 bp, Homo Sapiens
ttttaatggttatatgctttttatttgtgacatttgaatacccaagctcacatataactgatttcctaaatatcatttaattttatgttgcttttctaattgatttaattgttagttttccttatagtcaaatgcttaatacaatcataaatggaaccaaaaatatagtaaacatttctttttctgatgtatgtaaaaaagatacaggaaaattctgaaatcagatcactataagctagtaaaacaggtgaattatttgattagaaatggactcttccttcataagttacacaaatccttatgtagtcactgaaaattcttactcagaattaatacctgtccagagggaaacagcctgttataaaagctttctgttaatatattttttaaggcaggaaaacaatcattatttccaaacacactttgtttgtctaattctaggagagaatcaccaatttcttcaaggtccaaaatgatcagaacaagaatgacaacagtgtcaaccaaatgatgcctccaactccttttaatgattgtgccttggtacacatttcct

SEQ ID NO: 149245 - DNA, 820 bp, Homo Sapiens
  misc_feature (172)..(176): n is a, c, g, or t
  misc_feature (178)..(178): n is a, c, g, or t
  misc_feature (186)..(186): n is a, c, g, or t
  misc_feature (191)..(191): n is a, c, g, or t
  misc_feature (193)..(193): n is a, c, g, or t
  misc_feature (195)..(195): n is a, c, g, or t
attgtgtggggggggaattctcaagccccctttatttcgtgggccccggggtttttcctttgggaaacccaggtatagggcccaggtttccccttacccttaggggggcccccggcgccaaaagaaatggtttaaaaaaattttttggagggccgaagggggccgccaaaannnnntnccccaccngccgncngnggcggaatcaagattttactgggcaacttcatactgccagagtggttgggaccagcagctccactccccactgtaggccaagtagggctaaggcaaagtcagacaccccccctaagatggctatctctctgctcccagaccacgtgtgatgaggcaggatgggcagctcaggtggtgtctccattgaggcagggtgctttgaggggctggggttgactccaagacccccgcgtccttggagaaagctgcaggctctggacagcatccctcagctgagcctgagttctctccatctcatttaggcggtgctccaggtttttcagactgtgcccttcattgcttgttaggttgtgctctgaatcaaactctgagctcccagcacggagcctggagtccagatcctgcagctggccccgcagctgctcctgctgctccgtcaaggcccggatttgggtgctcagcgactccacgaggcgggacagcactttctgctcctcacgcagagcggccacctcgcactgcagctctgccaacttgttcacaggtcggtgcgtgcccagtgcctggtttcggtcttgcggctggtccatttggcgctgccaaggtaccgacggcttccgaggca

SEQ ID NO: 149246 - DNA, 856 bp, Homo Sapiens
cccgtcaccccagcacactcccgatggccccccagggggtgctggatctggcttcccttccccaccagcagcaaggacagaggtgcccacagaaaccggtttaatgtgaatccaccaggtgagccccatgaaggggcccaccgcccgcagccagagaccctcgggctgtgcagcctgcagcccacatctgcctctggccctcaggggcgctggggaaaggaaggccaaagtgtatcatgttcataaaagaaaatgctggtgggcccaggccagcgagcttctgaagcccacgtctgtccacagtggcccccaggctcacagcccctcctcagcacgtgtctggtgggccaggcgtgcagtgatgtgggcgaggtccgcggccttgtccagcttgacgtaggtgtcggtgcggatgcggtggaggctgagccagtccggcagcagctcggagaggagcagcaggtgcttctccatttccccagggctcatgatagtacaacagctgcccaccatcctggcacaggccacctccatgctgagcgcaggcttgcgttcggacacaaagacgctccgcagcacgcgggccagctcaggcagccgttctaagcgctgcagccgctgctcctgctccgggcaccgcgtcatctgtgccagctgcttctgtgcctccttggctcggatccgctccagcagatcctgggacacccccttcagagcactgggagaggctgcaggcggggtggctggtggggtagccggcagtgctggcctgggagacccggggctgctgggcgcagcagagcgcaggcctattgactcaggcctcctcgtgccgattcacacccggctctactag

SEQ ID NO: 149247 - DNA, 551 bp, Homo Sapiens
tttgttttctactgaaacttattatttgccattaagaattgcaaactatactactaagaatgaacaacattctcttcattaagcctttttcaaaacacacgagacaaagctcccctttggtcaaggtgtcccacacattaccactgcagctcccagcacagcggcgcaccatgaactcggacgtggagcccaaggaatggagatcgcaccagccttccctgcttccccaccccaactacacccaagggagaaaggatacgaggaaatacactatgtcttcaatgcttggggggctgggggtgtcctctgctaccaggtgggccggtcagtgccgactgtccggcgcgcgtcctcggggatctctggctccccgacctacacaagcagcagcagcagcagcgagtcctgccaacgccgcagtagctgctcatgagaaaagtgcccacgctccccaagccctcctgtttacatttcctagtggggcaaagatactttcccaggacaggcagcagagcagtggggcagagtgcactctgggacccgggacagca

SEQ ID NO: 149248 - DNA, 530 bp, Homo Sapiens
caatgtgcaagagttttattaagggaactcctgtgaaggataaacagaaggaagcaggagcggggaagggagacttcatatcataatacaggtctgacacctgtgaaaggagaggggaactgggcccaagagcctcaggctgcatgcagcatagttctcaaaaagtttcaaccagccggctcaggtgtttccaagccaaacttgctcatcagaggagtcctacatcttccatgaacgtgccaccaccaacaccccgtgctgtgcccgctcactgactgggagtagtgccagagaagcatggcttcagtgcaaacccagcagtgtatgccttgggaaggcagggggacctgtcagtcacttccgctccgtggagcaggagatctgagaggccatggtcaccacagacaagactgtagagaggatgcggattctaatgatgacatggtctagaactgtggtagcaaggactgattctgaaggggagaaataattactggagatgaagttacaggaaggagaggactggatgt

SEQ ID NO: 149249 - DNA, 478 bp, Homo Sapiens
tggtttactttattatattaggcatttttctaatgtgaactatacgaaagcaattctcattcaatgaaagaggcgccaaaaaattagagattaataagtcatcggtttctagcacgttgactgaaagaccagtgagttgtgcttgttgaattctgccctcactgcagatgtgcaggtcaaacccaaagtggtcaatgggaaagatgaagaaagatggatttccagggcatgggctcccgactagaatctgcccctcgctcatgcttctcccggcccctttagactctttagactgacatggtggagaatgtgtttgctgtggtagagaaagggagaaagtaatgagctgggccaaacagcagcactgaaagcttcccaagtcacactcagaccagacttttccagggattggaagatggagagagggaaaggaggtgcatacaccaagtaagggtttggtgcatggctctggaatgtc

SEQ ID NO: 149250 - DNA, 523 bp, Homo Sapiens
  misc_feature (402)..(410): n is a, c, g, or t
tggtctttgtattttataaaatgtggtcaatatgtgtctaggtgtgggtgttttaaaattgattttacctggaatttgtgagcccagtcaatctatatactccagtctttttccagcctgaaaatgttttcttcaataaagtcattatcacttatttctgttgttctggtttcttgattagtaatactgttaagtcttaaactgaattcccattgtttatatttatcagaatctatcacttttcttagttaactatttattttcacttatcatgtctaactctatgctcttttcctgtaaaagacctctcaaggttcacctccaaatcaacgtttccattttctacactgtcaattttgcttctttccacctccatgagggattttaattcttggattgcannnnnnnnngacatccattcttatcgcatctctctttgtatcttgtcttcctaacttttcatcttatctctgtgtgtggttttctgtaattcatagaccatgtcttcctgcaatccaagatg

SEQ ID NO: 149251 - DNA, 393 bp, Homo Sapiens
tttacagagttgcttcaagttttttattgaatgtatttttatgccagaatagctcgtgaacatatgtatccagttctctattttgtattagttatctatcacttcatattacattatcaaaaaacttggcttaaaaaattacacatttgtctcacaatttgtattggtcaggaatctgagcacaagttagctgggtcttctgcttcaggttttctcacagactaccatcaaggtgttgtctgtctttttgtcatttccagagctcactgggaaaggacccacttccaagttcatggggttgttggcggtatttagttctttgggcttttggactgatgccttcagttctttgccacacaattctaacatgcagttagtgccatcaaagtgtgt

SEQ ID NO: 149252 - DNA, 852 bp, Homo Sapiens
tggcaaccaggagaagccaaacttggtcccccggctcgcggagtgcctgcgagcggtgctcatggcgctctatgaggtcttctctcacccggtcgagcgcagttaccgcgcggggctctgctccaaagccgcgctgttcctgctgctggccgctgcgctcacgtacatcccgccgctgctggtggccttccggagccacgggttttggctgaagcggagcagctacgaggagcagccgaccgtgcgcttccaacaccaggtgctgctcgtggccctgctcggacccgaaagcgacgggttcctcgcctggagcacgttccccgccttcaaccggctgcaaggggatcgcctgcgcgtcccgctcgtttcgactagagaagaagacaggaaccaggatgggaagacggacatgttacattttaagctggagcttcccctgcagtccacggagcacgttctcggtgtgcagctcatcctgactttctcctatcgattacacaggatggcgaccctcgtgatgcagagcatggcgtttctccagtcctcctttcctgtcccgggatcccagttatacgtgaacggagacctgaggctgcagcagaagcagccgctgagctgtggtggcctagatgcccgatacaacatatccgtgatcaacgggaccagcccctttgcctatgactacgacctcacccatattgttgctgcctaccaggagaggaacgttaccaccgtcctgaatgatcccaacccatcttggctggtgggcagggccgcagatgctccatttgtgattaatgctatcatccgataccctgtgggaagtcatttcttatcaggccaggaatctgg

SEQ ID NO: 149253 - DNA, 694 bp, Homo Sapiens
tttttttggtttgattagtgcattttattattgtgaaaagcatcttgcagagaaccacattctggtaccatttctggttttaaagggtggcctgtgtgggtatgtagaaaggacacggggccagcggtcccagacaggggcaccctgggagattgcaccagggctgggtgcgtgggcagttgtgtcagaggccgcgtgtgaatagtgactccgaagcctgccgcttcctgggaccatgtttatcccagtgtttatccctgttcacacacgtggttttgtttgaacacgtgactgttacgctttatgtggccttttgatttctccccacgcggttgtgcggtggatctggcggctcctcaggtggaggccggggccgtccattccctgctgctgggtggagatgttgtctccagttcctgcctttggcctccaggcacctggattttgagtgggtcagttctaggccacatcgtgcttgcatttgtgattcccgtggcccttatcaggttgctgcctcgaaagccttcctgccggccctgcagccacccctcatctcagccaacgccacatcagcgccatgggtgcaaagtcagagctcactgtcactcggatctgcatttctccacctctgcctggatttgctctttgggaattgtttctttgcatcctttgctggttttcggttgggtgagtc

SEQ ID NO: 149254 - DNA, 689 bp, Homo Sapiens
  misc_feature (355)..(355): n is a, c, g, or t
  misc_feature (626)..(626): n is a, c, g, or t
  misc_feature (659)..(659): n is a, c, g, or t
tataatttgctagttaatgtttgtttttaacttttttgagaatgtcctttgaagttctaaagtttttaattttgatgaagtccaattaattttttcctttggttgcttatgcttttgttgtcgtatctgagaagccactgcctaatcaaaggtcgtgaagatcactgctgtgcaaaaatatacgatcaagcgaaatgtcaagtattcatttaggaaacacggattgagctcctggggtgcaaggaacgctagtgatggagaaggcccacgccctgacgcacttcgccatcaaatcgtttggtaaacgcagtgaaagaaatgtacagtctgctatgaatgtttataaaagggaaantctgatccaccgtgaagtccatcagtgagaggctttagagaaggcggaaacctttaaatgagtatagactgccaggagtcgaggagaaccttccagcaaaggaaacggcacccatgggaggcctcagtgggaaagtgccatggcataggaaggacttttctacagtccagccttggtacgaaagttctgaagcgaggctgggtagggaggccatgttacccccacagcactatacatcttgtaggcttggctgaacagttgcacaactcanactctgcctatctttcagcataggatgcctgangtcagaggctcccctcttgttaaaccagct

SEQ ID NO: 149255 - DNA, 1634 bp, Homo Sapiens
  misc_feature (641)..(641): n is a, c, g, or t
ccaggcccctcaaggtcaacacagagctcagtggctcacctaacatctgggacggctgtgaggccagggctgggcagccctgcctgactctggagagggaagaattgcaggaaggaggccctccacgtgcctcctcggccttctggcagggcgggcggggaagggactgcagagatctccagccctgctgctccacaggggactaatgtagtccaaagagcacactgaacagaacagcgtccagcacgtgagatgaaatcatcatccaccatataataaacagttcaaaaagtcacccccgggccagatggcacgggcggcagcacccttcatacgggatcgagctctcatggatgagggttcccagggcttgacccacttcctgagagcaggccacgaagcccatgccaggtggtcacggtcgcacggtgacaggctgctgccagccctccagtccccaaaccagtcctcggccctgcagccaggtttctggtcagtggacagtggtggggggccaggctttctcgatatcggggtgcatggcctgtggaagccactcaccagtactcagccagcaggtatttggggtttttcttccaagcagccagcaaggcttcatggcagtcagccttctctgcaanccagggctcgcagaaggctctccgtacggggctgcagcctggcccacgtcttcaagcatggtgccggggctggacagcagacagctctggtatgaggccagcttgcggaagacctgcccttccagcaggaaccgggcaaagtgcttgtagcggtcaatcccctctggaaaatccacctcgatggcggggagcggccagcccacgcgatagaacacgctggcccggtgacacagcacccgcccccgctcggggcagtatgtaggggctggttcctccaggggcttgtcaaactggcagtaagagggcagcagggccgggatccactggacctccacgctagagacgcctttcatgtacatcttagtggtctccacgatttcctggtagaccacaaactcggggagctctttgaaaaggacggagctggggtggatgaagacagggtcgtcgaggagaggggtcttgtaggcgttcctccacttgtcctccagcatctcctcgctctggaccctgcgggccaagtggtcccccaggcctgccgtcacgatctgtcgcaggtaggtcacctggctctcggtgggcggctgcatcttgggatccacgaagagctcagcctcggggcacacggcattgactgcggtggtcagctggccccgcaggcgccggatctccatcatggctttgtaccgcagcccgttggcttcgcaaaactggggtgtgcagctggcatactcacaggctcccacggcgcccagcagcaccatgaggtcgccgagcttcagagaagccccctgccctgcccaggtcctcttcatctgggccacccgggcccgcttgctcttcagcctggtgagctcctcgtcactggccgctggtctgtccagctcctcaaacagctcccgcaccgtcatgctggccacgatggtgatggcatagggcaggcagccgtgttgtcggctcagcggacgcgtgggtcgacgattgcaaggaatt

SEQ ID NO: 149256 - DNA, 642 bp, Homo Sapiens
aattaattagctcaatatatcttctgtggtttattgatccaaaagtacatatttgttatgtaaacttatactatgtaaacttgaattagttttttgcttccttgaattaataaagcccattaatgcaaatctaagccttcatagacttttccaatccttagttaaatattaaaaactgagtattgtagttatttgctaggtataaaaggtgactcagagtagagagtaagatgtcagcaaatagacaataagatgtcagcaaaagtgcctcaaattttaactgcgtcaagttaagggcattgtaaatactgtagttttatgtagcttgcaacttctactgaaatgagtttaatcatgtctttcacatagctgaagtttgtgtcaagatttaagctgattttctcattcttatcaaagtctcacctgggggtagggaggggtaggcctacctcccacctctatactatcattttaggaacagacaggcataaatctgttcatatggtagaacacatgatgttagagtatattttgttgaatgctatggaatattaatataattaattctaaaatatcacctaaaatatgtcaactgaagatctgactgtactaaatatgaaaaataaagcgacacatactttc

SEQ ID NO: 149257 - DNA, 473 bp, Homo Sapiens
ttacttaaatctatttattgaaaaggtcacaataaatagaatgccactaccacttgtcctaaacaataaagtagccaataaaaatataccattaaaacaaaaacagtgctaaaaaagtctggaattttttccacctgccctaagcccaagtcctgctccctaggcagaggagacgtcggcatgtcttccacaggcatcggaacatgttggcatccagctgagatcttctcggcataaaaggattgagagaattgggaagggcatcgctttcttgctctgattttgtgccacttaatgcaggccccataccacctaaaagtatctcgggaaccaacggacccacccacactttggaaatgctggactaacgtctccctctgcctcacgcttaacacaaaggggaaacacacacctgtggtcccctctctgatcataccttcaaggcaccaccagatcccctccaaatatgcctg

SEQ ID NO: 149258 - DNA, 418 bp, Homo Sapiens
ttccaaaccacattcctttcttgaatctatttacagtactgtttcaagatgttttctgaatggtgcacaggggctacattgaaaaccttctggttattgtttgctaactgctgggatggttttaatcagagaagaagccaataatttcagcttgggtgttagaaaagctcctgaaatgtctccaaactgatttaggagaaactgcttaacagaagaggacttattcctgtcctgaaacaaactccttagcatggacatatgctgtaatcacagaccaagataaccacattttttgaacatattatactccaaaggcatcttagatttctaaatattatcagtatcagatgacaaaacctgttcaacaaggaccatagcctcaatatgctagttgacagcctccgccgttagaatgttc

SEQ ID NO: 149259 - DNA, 234 bp, Homo Sapiens
ggattctatcttcattttagacttttggtctgtgggccatttaacctggatgcccccattttatggggataatgatgcttaccatggttaatgttttggaagagctttttatttatagcattgtttactcagtcaagttccccatggccgtaatccttttaagggaaaccctaaagttgttgtagtctccccttcagtcagaaactgatgtttcagctaggcccagtggtacat

SEQ ID NO: 149260 - DNA, 486 bp, Homo Sapiens
ttttttttggcatcagaaatgctgtttatttctctgctgctcccaagctggctggcctttgcagaggagcagacaacagatgcatagttggggagaaagggaggacaggttccaggatagaggttgcaggctgagggaggaagggtaagaggaaggaaggccatcctggatccccacatttcagtctcagatgaggacaaagggactcccaagcccccaaatcatcagaaaacagcaaggagcaggaggagcttgagcaggccccagggagcctcagagccataccagccactgtctacttcccatcctcctctcccattccctgtctgcttcagaccacctcccagctaagccccagctccattcccccaatcctggcccttgccagcttgacagtcacagtgcctggaattccaccactgaggcttctcccagttggattaggacgtcgccccgttagcatgctgcccctgagaggagagcaca

SEQ ID NO: 149261 - DNA, 1035 bp, Homo Sapiens
  misc_feature (125)..(125): n is a, c, g, or t
  misc_feature (197)..(197): n is a, c, g, or t
  misc_feature (220)..(220): n is a, c, g, or t
  misc_feature (291)..(291): n is a, c, g, or t
  misc_feature (903)..(903): n is a, c, g, or t
  misc_feature (971)..(971): n is a, c, g, or t
cgtggagagggagcggcaaagggagcatgcgatatataaaatggggaggcgcggttaactaggcgcatgagtaaacgccgccgcatcttggtggtgcgggtgtgggtccccccacacgacttggnatatcgccgtaggagagagagtcaagcgtattgcgggcgggatggtggtttctgacaaaggcggcaccactnttgggtggagtgccacggcctgngtcgctgttttgtgtgttatgtgcgtgtggggtgggaatggcgacggccgcacgcgtacggtacgtggggnacccacaaggtagggttgtgtaatcgtgggggggcgggcgaatttcatgggggcgcacaaacgtgattagggttactaccgggcaagcggggaagcggcggggctcgcgacgcggaaaaaaaggatggttcgattgggcaaaaatctttctttcggagggtagggagggggaggggccacccacaagaataaaatcgggctaaacggggcgggccaaagtcggtgggaagaggatgggccggggggacacgagctttataacaacggggttcgcagagttcatagtgggttgatggggtggttcgggagtacgcggtaagggtagacgatacccgtcccggtcggtgcggcgggggggcacagtttattaagataatcgatcaatttcttaagttattcctttgttaaccagacagcatctctggagagaaaatgcactctctgtgtagatacataaaaatacatcagtcattttgcccctcctggatgtgaacggaatctcccctcctcacctccacagagggagctcaagccccagggaaccttcccctccccttttatgcattaccaggggagtggcaggggcagcccccaactgtggggtgcattcanggtctgaggggggaggaaggctcagaggggcatctccccagcaccctgccacagtgctggcttctggnggtggtttgttcagcggcctgctgggctgccccaggctgggggctcccccagtcccccgtgcat

SEQ ID NO: 149262 - DNA, 558 bp, Homo Sapiens
  misc_feature (141)..(153): n is a, c, g, or t
  misc_feature (208)..(293): n is a, c, g, or t
  misc_feature (442)..(450): n is a, c, g, or t
ggggggggaaaatcccacgaccccttgttcctttgccccggggttcttttttggggaaaaaaattattggccccgttgctccctttacctttgtggggccgccccgcccccaaaagaggtggtttgtaagaaaattttctnnnnnnnnnnnnncggcccgcacaaggggttttttttgtgttttgtggggttgttgcccgcggggtannnnnnnnnnnnnnnnnnnnnnnnnnnnnnnnnnnnnnnnnnnnnnnnnnnnnnnnnnnnnnnnnnnnnnnnnnnnnnnnnnnnnngtagatttcacagcatctttatttatagcacttaaaaccaggaaaacagtgcaaatatatctcataggtgaatggataaactactacatcaaatatgtatactactctcaaatataaacaactttcatctggttagatacatggtggtnnnnnnnnntaataaaacaactattcatcaactcatataaaccttaggagtaatttgctgagtgacaaaaatgccaaaagcttacatactctctatcaataaaaattcatataaccc

SEQ ID NO: 149263 - DNA, 1391 bp, Homo Sapiens
  misc_feature (91)..(91): n is a, c, g, or t
  misc_feature (138)..(138): n is a, c, g, or t
ccactttttgtctcaggcccaggggttcccggcagcctgttcccccccaagccccctttggggacacctattcccaaccccagcacaatgntgggtccctgagtttggcactctcctaagaggaatgaagagagaagnccctggcttcttaccaaccggggacaggctggtggctggggctagagccagcaggggcccagagccccagggcccaccccaggccccccagctaggaccctgtagttgggcccgtggcatgatacaaggacctggccccaccaggacagctcctaggagagaaagcatagtcaggtaggaacttatgtccaacatggtggcatgttgggttggagcccagaaaaatagatgtctctgataggtaaaaatatatattcttctgcccaggcagaaggggccaggtcctgctgctccacagccggctgtggaggaagctgcagtacctcgctgtgccccaactccagatgctgcctcctgagcactatggggctgatctgccgtgtcaggcctcagggcacgatggaaggaatgtggcctggttcctcccattcccagggcctggactctccagctgggactattcagtaatactgggaaaaggggaagtggggcagggaaggaccctggtgagggccacacggcaagagtgggctgcagagtcagggccagcagtcctcactggcgcttggccttgtaggggcgagagcgtttccgccggtcaggcttccgctgcttgtggagccggccgatgctgaccccttggcgccgccgcacggagatgttctgctccactaggttggccagcatgccttcctgagccagcatggagataaaggtgcagatgaactcatcgtagttgtgggtccttctctggtcatcaatcttgaacttcttcctcttctctacctcctccttgaggcacgcctcatagtttgcaatctcagcctccacacacttcagcagtgccagcagctccttgggtgagtatttctccccactcaagggctcgccaggcctcaccatccccgtcttctctctgctgtccgtggcttccacgacctccttctccactgggctgctggacccctggctgccttggattggtctgatggagggcgaggaacccttcccaccctctgtcagcgccaggggactcagcaccccatcctcagccaggtgcagcaggcctgtgctgatgacaggacccagatcacggacagcacggttgtagcgtatgcagtcaacacgcagcaggctgtcatcctctccaaaaagcaccttggagatgtgggaggtgacagggctggagggccgcgtcgggttggctgagcggataggcgagcgcaatggcgaatttaaaatccttggtgcga

SEQ ID NO: 149264 - DNA, 895 bp, Homo Sapiens
  misc_feature (873)..(873): n is a, c, g, or t
gggagggcctggacatggcgctgaggggccgcccgcgggaagatgaataagggctggctggagctggagagcgacccaggcctcttcaccctgctcgtggaagatttcggtgtcaagggggtgcaagtggaggagatctacgaccttcagagcaaatgtcagggccctgtatatggatttatcttcctgttcaaatggatcgaagagcgccggtcccggcgaaaggtctctaccttggtggatgatacgtccgtgattgatgatgatattgtgaataacatgttctttgcccaccagctgatacccaactcttgtgcaatcatgccttgctgagcgtgctcctgaactgcagcagcgtggacctgggacccaccctgagtcgcatgaaggacttcaccaagggtttcagccctgagagcaaaggatatgcgattggcaatgccccggagttggccaaggcccataatagccatgccaggcccgagccacgccagctccctgagaagcagaatggccttagtgcagtgcggaccatggaggcgttccactttgtcagctatgtgcctatcacaggccggctctttgagctggatgggctgaaggtctaccccattggaccatgggccctggggggaggacgaggagtggacagacaaggcccggcgggtcatcatggagcgtatcggcctcgccactgcaggggagccctaccacgacatccgcttcaacctgatggcagtggtgcccgaccgcaggatcaagtatgaggccaggctgcatgtgctgaaggtgaaccgtcagacagtactagaggctctgcagcagctgataagagtaacacagccagagctgattcagacccacaagtctcangagtcacagctgcctgaggagt

SEQ ID NO: 149265 - DNA, 433 bp, Homo Sapiens
tttttttgacaaaacaaactagtgaagcacctttttacactggatctctgccgtgtcaaggtgtatagctatcctttgctaccttgcagatatataaaataaaaggatatcctggggcctcaaaatgtagaacacctttagaccatttataactgttcctagaactgttgagaatcatgttctttagtaaatgatctgtggtttacacttaagatggctagaagcttagttacagggtacatagaaatacatagatcaagtaaaactccaactactgtagctggaatttgtaaactaagtttgtaagacctcttttatttcctatggagttattctttaatttacagtttattctgtaagttgggaagtaaaatagagaaaataataaatctagatgttctcagtgtcttattcaggaactttatatccctcc

SEQ ID NO: 149266 - DNA, 452 bp, Homo Sapiens
tcggctctaccttgtttccatacagaactagatcttgaatgataaagaggagtttggttctgtggtggagacaaggaatgatcttctaggctatcaaagcagggtgagtgaagttggagagatgtagaaatgagttttgtgtttggatgtcattgagtgattttgatttggctgctagagcacaggtacatgggaaagcatgacaaaggggcctgagaggtagggttggggaggacatgtgaaacatatgttgagatctgattggtaaagttattgataggcgtttggaccttgtcttttgggaagcagggaagtagcaatatccaaaagagagtgttaaggatggattggaagagggaaggttatagaggggatagagagcaaagcaggatgtgactttcccagccttgaaatgcatgagaaagtttgggatcctcacaatgaagggcaaa

SEQ ID NO: 149267 - DNA, 1135 bp, Homo Sapiens
  misc_feature (164)..(164): n is a, c, g, or t
  misc_feature (261)..(261): n is a, c, g, or t
agcccaatttggcgcagccatagagaagggagccccccttttaacaaacatttccaccaccacttttttgagattcttggggaatccaccacggtacccgggctttcttggtggatcatccacctttcattgtgtccgactgaacatcttgttaactgcactgntatgctcttccctggctctatctctttcctttctggtagttgaatataagattagaatgtgaattttatgttggttgttcaactgaaaattgactcntgatccaataccatcaatctgcctctgaggcaaaccagctgttgggcaaagttcctctgaaggacatccaagctgcacacccaagaggtattcaagttgcttccatacctggtccaaacatagcaaatcgtgggttcattctgaatgatcagggagtgtaaaaaagaagtgacagctccatacatagggacggctggattttgaagctcttcttgtgtatggacagcacattctatagactgccatgtaggtcaaaaaatgcaccatcagtgacctcagatataggcttttttaagatttctagatctggaagagacttccagtcaacagaagaccaagaaggaagatccctcaacaaaaagtatctctcacagaattggatctcttacacgtttcattgccataatgatttgtacttcccaactgacacagatcatgaggtgaaagaaaggacaaaatatatagcgtgtacatcaatcggcagccgcgtcagggtgctggcacgcctcatccaccgtcctcccgtgaggtcgtacgcgccacctctctgcctctgcatcactgacctgccagaaggtcttccaagccgctgaggatggcccgcctccaggcggccccagtcgctgaagggcgcgcggcgagtttgttaccgctgacgcggctcagcttcccagcacatggcttagcccgcagcgtgggtgacgcgtcttagagccacgctagcaccgacgcgtgggtcgacgatatcccgggaaatccggaccggtccagcgtgctttttaacacgcggttatatgatatcaagcgggcgggaggggggcgatggcctatggggtcaagctgagcggtcgggcgtgtgtgcgcgtgtgctgct

SEQ ID NO: 149268 - DNA, 1160 bp, Homo Sapiens
tcatgagaatataaacagtgtgttcaaaaaagcaggctggtaccggtccgggaatcccgggatatcgtcgacccacgcgtccggtcacatcagccacgatggatgcggagaagtttgctgccttttttgggaatgtccccatcttccacatccctggccgtaccttccctgttgacatcctcttcagcaagaccccacaggaggattacgtggaggctgcagtgaagcagtccttgcaggtgcacctgtcgggggcccctggagacatccttatcttcatgcctggccaagaggacattgaggtgacctcagaccagattgtggagcatctggaggaactggagaacgcgcctgcactggctgtgctgcccatctactctcagctgccttctgacctccaggccaaaatcttccagaaggctccagatggcgttcggaagtgcatcgttgccaccaatattgccgagacgtctctcactgttgacggcatcatgtttgttatcgattctggttattgcaaattaaaggtcttcaaccccaggattggcatggatgctctgcagatctatcccattagccaggccaatgccaaccagcggtcagggcgagccggcaggacgggcccaggtcagtgtttcaggctctacacccagagcgcctacaagaatgagctcctgaccaccacagtgcccgagatccagaggactaacctggccaacgtggtgctgctgctcaagtccctcggggtgcaggacctgctgcagttccacttcatggacccgcccccggaggacaacatgctcaactctatgtatcagctctggatcctcggggccctggacaacacaggtggtctgacctctaccgggcggctgatggtggagttcccgctggaccctgccctgtccaagatgctcatcgtgtcctgtgacatgggctgcagctccgagatcctgctcatcgtttccatgctctcggtcccagccatcttctacaggcccaagggtcgagaggaggagagtgatcaaatccgggagaagttcgctgttcctgagagcgatcatttgacctacctgaatgtttacctgcagtggaagaacaataattactccaccatctggtgtaacgatcatttcatccatgctaagggcatgcggaat

SEQ ID NO: 149269 - DNA, 915 bp, Homo Sapiens
  misc_feature (218)..(262): n is a, c, g, or t
  misc_feature (833)..(833): n is a, c, g, or t
  misc_feature (855)..(855): n is a, c, g, or t
tttgcatttatcgtacactttatttctattattattacattgcaatacataacaattatacaactcaccaaaatgtagaatcagtgggagccctgagcttgttttcctacaactagacggtcccatctgagggtgacggggaacagtgacagatcggcaggtgctggattctcataagcagcggacaacctacatccctcgcgtgggcagttcacaannnnnnnnnnnnnnnnnnnnnnnnnnnnnnnnnnnnnnnnnnnnncaggaggtggggctcaggcagtaacggaagcaatgggaagcggctgtaaaaacagatgaagcttagcttgctggcccgccgctcacttcctgctgtgcagcctggttcctaacaggccacagaacgatactgatctgtggcccaggggttggggaccgctgctctatgccatacatgaggaagaaaacaaagtccgtgccttcctgagactttcattccaaacgtgaaatctggaagactctgggacagtttgtgatagacaaatggttcctctttccttcccccaattccatggctaaaagggagaatcacaaaataaaacaggagagaggcaatctgagagctaccccatttcaactccctccctcttttaataaggaaaccaagagcagtgagcacttgttctgtcacaggtgcactcactcaccttaatccataggtcagtgactctcaaacttgaacaagcttcagaatcacctacagggctcatgaaaatagtttgcctagtcatccccgaatccctgatcaggaggtctagggtggaagcccgagaattgcatttctggacagntcccaggtgatgctgaagccgncactgctgctggtgctgccccagctaccacacatgagaaccaccgtcacagaacactccc

SEQ ID NO: 149270 - DNA, 1054 bp, Homo Sapiens
  misc_feature (56)..(84): n is a, c, g, or t
  misc_feature (285)..(300): n is a, c, g, or t
  misc_feature (582)..(692): n is a, c, g, or t
  misc_feature (765)..(833): n is a, c, g, or t
tagctaaaattaaccctcactacaagggaataagcttgcggccgcatacgcggtcnnnnnnnnnnnnnnnnnnnnnnnnnnnnnaaattttaatcttcattgttttaattctgaagcataacgtgccacagggaaagtgagtttctttactgtttgccagcagcaaggacaaaaagtgaatggtgggggcccaggagctcccagcttggagagaaggcccttccagacccaggaacccggggtttggggcaggaggcaggaaggatgggagggtgtgatcaccgnnnnnnnnnnnnnnnngttctctctcttcagggaagggttttccagaagcatttgcccatactctgaatgaagtattttcatgccaagccaaacctcctgaagagaagtgaattcatggctgagggagccacgtgccctggctggggatgcacctgaatgctgctcttcagcaagtgagttcatagcatccaccagagcttcccagctcctcaagctgaagacaggctgagcaaaaaccaggcaggccatgaggggattcaaagaaacctaataggattgggtgcggtggctcacacnnnnnnnnnnnnnnnnnnnnnnnnnnnnnnnnnnnnnnnnnnnnnnnnnnnnnnnnnnnnnnnnnnnnnnnnnnnnnnnnnnnnnnnnnnnnnnnnnnnnnnnnnnnnnnnttaactgggtgtggtggcgggcatctgtaatcccacctactcaggaggctgaggtgagagaatcgcttgagcnnnnnnnnnnnnnnnnnnnnnnnnnnnnnnnnnnnnnnnnnnnnnnnnnnnnnnnnnnnnnnnnnnnnntgtgtcaaaaacaaacaaacatacaaaaaccaagaaactaaacagacccaggtttcacccgcggtcctgggccagcccacgggaggggggcactgcgcctgcctcccagagctgaagggagagggagagggtgggtgagtctccccctcactgctctggctctgatgctcacctctaaggggccacacgcagcttcggaggccgtgccctaggtttcattt

SEQ ID NO: 149271 - DNA, 840 bp, Homo Sapiens
cttccaggtatgtagagcccagtactcatccagcaatatctggtgcctggattggtgcagttgacctcgacggtgataggagattctgaggggcgcagataggggctgctgtacatatcttcaatttctgggactaacagagagaggtcgcttccagagtgggccagccctgtggccagggaaagcatagcacctctgcagcagtcattgataacagggttctctcgggttgctactggaagccgatatcgacttagcagcttcctcaggagtcgatgcacagacatgtaggcagggatctcttctgcgggaatctgcaggaaagctgcaccatctggtcccagctttgccaaccagcccttttccacatttcctctcttcctgcccattataacctggaactcggctaaggtggagcggaagtgataggtccttatccctgctttaggagtacgaaagggccctggattgaggctttggcttgtaatgctgatgccaaaggggttgaggaggaggtttcctgggaatcgagccaaaggggacactccggggttcttgaaggcccaccaccaggcttgggctccaacaaatagcccgccaccctctgctacaaactcctgcagttccttgacccccacttcactcacgggttcaaagcagtagacacttgcatcactggtcagattgggctcgatgctggtgcctatgccccccactgcgaggaggccactcagggttctcagctctgtctgcaccacaatcttgcctctgcgccccatccagccagcggacagcattgagcagaaagggcccccgtctagagcgtatcgagctcactca

SEQ ID NO: 149272 - DNA, 1282 bp, Homo Sapiens
  misc_feature (198)..(198): n is a, c, g, or t
ttgttgtctttccagtgtgccgaggggcccacccgaattttgctaaaagggtaaggggtccattccaggcgggggggtgggtgcggaatcttctctttctttccaggggttatgggcctcgcccccacattgttttggaggcggtgcgggttgctccgtttcgtttagaaggtttccgggggtgccctttaagaaagngggagggattcggccgcctcctaagtttgcgtgtaacccttcttcaaagaaagtttgcccttcaaatttttggccagggtcccgggttccgcgcctttggttgtgttaggaagatggagtttaccaccttgttcagggaaaggattcggtgtcaattgggacatgggactgccagggattgaaaaataatgtggcctggaatgatgggccgttttcttgggcagtcagtttcgcaggcacttgatgtaccagttcggccaagacttctggggcgacttgctgggaatggttaatctgtcgtttttttgcactacaagcgcaagctacttgtaatccgttccaaacctttaaaggggacctcccttgttagcatctcccagagaaccacaccataggaatatgtgtcacaagtttctgacacagggagactctggataacttctggagccatccatgggaaagttccaaccaaggacatgtgtgttgtatggttatggaaccgagaggcaccaaagtcacagatcttcaatactccatcagcagctataacaacgtttcttgacttgaggtctctgtgaatcaccttgacaggagcctccatatgtaaataatgcattcctttggctacatcagtggcccaggtcataatgtgatccatatccatctcctcacttctgttactgttaatgtaatcatagagtgatcccagagaagcatattctgtgacaatgccatagttgggaggttcaagaattactccataaaactggatgatgtttctgtgactgaggacactgagtatttctgcctgtatgacagatggaaaaccagcctttctatgtctaaaactgctgtgctacaactttaaaagcaggcttggaggattttcaatcctgtatataatcaccagagagttatacacacggtcatgccctttgagtcactttgggcttaacaagacccattcagtcacagtcacataaaaagcagcaaacttcacaattccataggttctttttcaaatgatgctctcggacgcgtgggtcgacgatatcccgggaattatccggccggtaccagcctg

SEQ ID NO: 149273 - DNA, 2219 bp, Homo Sapiens
  misc_feature (246)..(247): n is a, c, g, or t
cgggccccctaaaccccatttttttctggctagggactggcaatagttacctttccaggctgggtggctccactcttcagtctctattttctagtccagggtcaaattccccatgaggcccatctcccttaattattacccccacatcaaatcatggtgggaccagtaataacagcatgatgttttcttacaatgtggaccaaaagaaaaaagggaaaagcctgaagtgggggtgggtggggaggnnaacccccaggtggaacgtcggccctgagacaatcccctggccctacagttccaggtccaggttagccgttagtccaaccaggtcccttccaggaggacaggcgtgggagtgcagaggctgcctctggcccaaaacgagaactggtagagctggcgctgagatgctggttcccagcttttgagtgcctggaagaccagatgttggtaagaggaccatccagggccctgggacactgccaaggggagaaaatgattttctccaggcccctcaaccacaaaactgcagccccaaggaaatgaagcgttcctggtagacccagacaaggatgttagaggtgatgggagccagaagcatctcaaagacttgcagtccacagacttcggctggagagatccgaggcagtaggctgaatttggtcactaggatcttctatacaaccaattcctccagaagtctggctgccaaaactcctccgtgggaagcaccaggaaaccacttgcattcctgggggcgtgaggctgtgtgtctgtctcagggcaccaggggcagggtgtgcgtgttttgggtggttcgcatctctgtctctcctgggtcttcacagccagttccaggcaggggaccggatggcggtggctgctgctttgaatatgttttggttgtctgggtttggtttttatgttttggtttcagtgtgggaggcttggtttaccaggggtactgactcctccctgggcgctggcatataggccctgcagttctgaccagatatgccagctctggggctcacaccaagccggcgtctttggccatgctgtagaaaagacctctctgctgcaggaggtccgatggggcgccgtactcctggatttctcctttgtccaagacgatcacccttgtgtagtccatgatggtgttgagccggtgggcgatggtgaggacggtgcagtcctcgaactgtgtccggatggtggactggatgaggtcgtccgtttccaggtccacggctgccgtggcctcatccaacacaaggatcttcgtcttcctcagcagggcccgggctaggcacacaagctggcgctgcccgacactgaggttctccccgccttctgcacattcatggtctagcttgtcaggaagggctgacacgaagtccttcaggtgggccagctccagggacgtccagacttcttcatccgagtactggctgaatgggtccaggttcattcggagggaacccgaaaacaaaacagggtcctgggggatgatggtgatcttgaagcggaggtcgtgcaggccgatcttggcgatgttgatgccatcgatgatgatctctccttcggcagactcgttgatccgaaataagcccagggtcagggacgacttcccagctcccgtccgccccacgatgccgaccttttctcccccattgatcgtgacattgatgtgcctgagaacgaagtccaggtcctctcggtagcgcaggcagtagttccggaattccactcggcccacctggggccagctgctgggcggagctgtctcctggatttgccagggcgcctccttctcagtctctgaatactccttgagcctctccacggccacgatgttggtttccatttcagatgacatccgaaccagccagttcaagtacgtggtgacctgcaatgagtaagacactgagaggcccaccaagccagcactgaggctgtgcctggagatcaccgcaaacagggcagcaaacagaacgatgcagttgcccacacactccagccgcacggccagccacctgttggccacgatgctggggtaataggccttctggttctcgtccaccttcaggtcactctggtggatgaagcgctcctgctcctcgaaggctcgaatgacgctgacccccaacaaggtctcgttgaaatggaatagaccggggagcggctgaccgactcgaggcgcttcagctgccgggagg

SEQ ID NO: 149274 - DNA, 951 bp, Homo Sapiens
  misc_feature (122)..(132): n is a, c, g, or t
ccacgcgtttcccaaccgccttttacacccccctttcttttttaaaacccctctttgggcccccttttgtccaaaaacgtgggtgcacgctaatctgtcgcccccccgaggaaacctttgannnnnnnnnnntttgtgcgatgctttactcaattgagaccccactttaatacaccaaggtgaaaactattagaatataacagcatttcacattttttaagaccaataatatcttctaaattacttaccagatgatagaggtccacagtcctttctctgaaacccttgggccagttgtttcagaattatgaaattttagattttagaaaagtatttttgtgcatataccatcactacattaaccagccctcaccacagtctgtgcagcagccctccctctcatcatcaagcagcacaaataaaggaatattcacactaaatgggataaaaagattcaaggtcagttcagattagattgcaagcaaatgaattttgtcaccaagcttatggaaaccttgttttcagagctttttggattttggaattacaattacagataaaggagtgcagacctttactaaatttgtatagacaacgacatgaaagattgtgttaaacaaatgactcatttttacaaatgaaaaaacatgtaattttcaaatacattataaattacacacggcatcttctctttgatattattaaatgtacatcttaaatacatatacacacaactacatgatttatgaaagccaactaatattagaagcacagatacacaatcccttcgatgagaacggggatacttgttaaattttcagtggaatttaaaatgattacaccaactccttatgatgccaggaagagaacctgttcagtgcaaccggacgcgtggcgacgcgtgggtcgacgatatcccgggaattccgaccggtaccagcctgctttttg

SEQ ID NO: 149275 - DNA, 816 bp, Homo Sapiens
  misc_feature (134)..(147): n is a, c, g, or t
  misc_feature (151)..(344): n is a, c, g, or t
agaaaaaagacccggaggtgttttttggccgggggttgttgtgggagaggaagaaggtagaagggatgctgtgtcgttttttctgggtggggcccgcggcccccgaagaaaaaggtgttgaaaaaatttttttnnnnnnnnnnnnnncttnnnnnnnnnnnnnnnnnnnnnnnnnnnnnnnnnnnnnnnnnnnnnnnnnnnnnnnnnnnnnnnnnnnnnnnnnnnnnnnnnnnnnnnnnnnnnnnnnnnnnnnnnnnnnnnnnnnnnnnnnnnnnnnnnnnnnnnnnnnnnnnnnnnnnnnnnnnnnnnnnnnnnnnnnnnnnnnnnnnnnnnnnnnnnnnnnnaatttaaaaaccatttaatacacaaagtgaaaaactattagaatataaaagcatttcacattttttaagacaaataatatcttctaaattacttagcagatgatagaggtccacagtcctttctctgaaacccttggggcaagttgtttcagaattatgaaattttagattttagaaaagtagttttgtgcatataccatactacattaaccagccctcaccacagtctgtggcagcagccctccctctcatcatcaagcagcaaaataaaggaatattcacactaaatgggataaaaagattcaaggtcagttcagattagattgcaagcaaatgaattttgtcaccaagcttatggaaaccttgttttcagagctttttggattttggaattacaattacagataaaggagtgcagacctttataaatttgtatgacaagacatgaaagattgtttaaacaaatgactca

SEQ ID NO: 149276 - DNA, 1547 bp, Homo Sapiens
  misc_feature (846)..(854): n is a, c, g, or t
  misc_feature (1455)..(1469): n is a, c, g, or t
ccggtgagtcggagaggggagcggaggtaggctcgctccccgctcatggcggcgggaccctcacccacgtcgaatatcctgcaggtgatctctctgggccactccttgcctacctgagcctcagccctgtattgtcatcgtcggtttcgtgaccctcatcatatttaagcgggagctgcacacgatctccttccttgggggcctggcactgaacgagggggtcaactggctgatcaaaaacgtcatccaggagccacggccctgtggaggcccccacacagcagtgggcaccaagtacgggatgccctccagccattcccagtttatgtggttcttctccgtctattccttccttttcctgtatttaagaatgcaccaaacaaacaacgccaggttcctggacttgctgtggaggcacgtgctctccctgggactcctcgctgtggccttcctagtctcctacagcagggtctacctgctgtaccacacctggagccaggtgctctatggaggcatcgctggaggcctcatggccatcgcctggttcatcttcacccaggaggtcctcaccccgctgttccccaggatagcagcctggcctgtctccgagttcttcctaatccgagacacaagcctcattcccaacgtactctggtttgagtacacggtaacccgggcagaagccaggaacagacaacgcaagctggggacgaaactgcagtgaccagtgggtgtggctgggtccagcctccagatctggcccgcacgatgccttgcaggatggacaggatgacagacagggacgaagcagagacctctacagacccaagtcaccaagtggagccnnnnnnnnncttattttaattttaatgaacaaggtggaccaaagggctgaaccagcccctcaaccaggaccctggggggcctgctgcctgggggccgtggccagagaccctcgctgtgctgctgccagcccctggctgggcagaaagtgccctcggcatgggcacctgggtgtggggtggaggaggagggctcgcgcctctggtctgggggccaggaattccaggtggcgtgagaagtacacactatttattttggtttgtcagaggcaggcaggatttggagctggaagaatctgctctccggtggctgcctgtgaacagagggcttccggtcagcttcccagggccttcgcctatgccagagggagatgctctcctgggcggggtggctgggtgcaggagagggagcatacccaacctcctggcacgtgcgtccagaactcggtcaggtgcctgtctggggcaggccagaccgagacgcgttgcggtggcgtggttcaacccgtatggccaagacaacggtttctggcccggcccaaaaaatggtctggaagggcggcttggtggcaaccccgttacctcttggttggccaagggtgttcccggaaannnnnnnnnnnnnnnacgacccccacccggggagggattcacccacggcagggcccgcgggcaccacgggagcacccgggggaagaccggaag

SEQ ID NO: 149277 - DNA, 968 bp, Homo Sapiens
agcgcttcgtaatatgaacagtggtaaaaaaagcaggctggtacggtcggatttcccgggatatcgtcgacccacgcgtcgggtgatgaaaacagtgataaagtgactccaggacatttataccctatgttcaatggcacatgcacagctttgcttccatgggcaccgggatgctgtgaaattctttgtggcagtcccaggtcaagtcatcagcccacaaagtagcagtagtggcacggatctgacgggtgacaaagcagggccatctgcacaggagcctggtagtcagacgcccttgaagtctatgcttgtcatcagtggaggagagggctacatcgacttccgaatgggtgatgaaggtggagaatcagaacttcttggagaggatcttccacttgaaccttctgtcaccaaagcagaaaggagtcacttgatagtgtggcaagtgatgtatggcaatgagtgagcccatgggaaacaggtggagatggggaagccgtctcttctgcatggtttattttccctctatccttttatttaatgctctttgtctcgcgataagtttcatcacataatgtgtgagcattttttcctgttaactttatattacaaaatccgttctaccataacaatacagaggaactagctgtgttactgcaccagtgttataggtaacttcagtatattatgaacaaatcaaagaatgtttacttcctgaaaacgtggtgaattatagaaagcaatccagaatgtggtttactctggcacagtctaaatgtgcattcacttcattgatggggtcacttgttaaggtgtcataataagggattatggggaaacttggtaaatgaagtgccggtaatagaatagctgagtttcccaggtttgtaatgggctaataaaggggtatagagtttattgccggaggaaaagaaagaaaatattttaatgcaatgttttggtaaatg

SEQ ID NO: 149278 - DNA, 929 bp, Homo Sapiens
  misc_feature (343)..(343): n is a, c, g, or t
gaagaatacttcacattagagtgtccaccctcaacaataactgcggtggaacttggaaacccaggcttccagaaaaagaattagcactcatagagggtcttcctaatgaagtcaccttctgaaagaacactggtaagtgccagaacttcaagagcctgtggatcccgcccaggagctgccaaattatgaaggaaatgtgttaactaacagacagagggaagatgcaattatattaaaatccctggtcaattttactaggatttagaatataaaacctttacatctcttttgacaataaagagaatttagagctcacttgtcacgaaaatatttttcattattnaaaaaaaattgttataaagttatttcttctgatatggagtttcaaagcatctaacataaccgcttcagaatctccacagtgcaaaaataaacacatgcatacacttaagaactttacattctttgaaaaacaatacaaattggaaagaaaattagtatgtgatcaaagagagtcagagctcaagtctgaactttgccaataaaggcagatgatctgaagagttattttcgtttggaagtccattaacagtccataagtcttgttctgtaagaagtgacagtctagctagaagtttcaagccaccaaccaaagcaacttcagctcctgggtgcccagcaacatcttccttttctgcagagtagaaaatataatccacagttatggcacttcgggaatgacaggtggtcacttctggaattccagtgtcaggaaagtaatgtgaataaacagatgacaaactgaaatggtgctgtaaatttgaagacaatttttcagctgtcactaggacctctgtttgcttcagctgtgtttgtgtcagatcggacgcgtgggtcgacgatatcccgggatatccggaccggtacca

SEQ ID NO: 149279 - DNA, 1546 bp, Homo Sapiens
cgcgccgccagtggagcccccgtcgcgcccggccggcccggagcaccgagctcgcggcacggtaggagaagcccccgatgcgcccacagcatgaatggaggaggccttcctccggcgccgcttctccctgtgtccaccttcctccacccctcagaaagtcgacccccggaagctcacccggaacttgctcctcagcggagacaatgagctctacccactcagcccagggaaggacatggagcccaacggcccgtcgctgcccagggatgaagggcccccgaccccaagctctgccacgaaggtgccaccggcagagtacaggctgtgcaacgggtcagacaagggctgtgtgtcccccaccgccagggtcaccaagaaggagactctcaaggcgcagaaggagaactaccggcaggagaagaagcgcgccacacggcagctgctcagcgctctgacagaccccagcgtggtcatcatggctgacagcctgaagatccgcggcaccctgaagagctggaccaagctgtggtgcgtgctgaagccgggggtgctgctcatctacaagacgcccaaggtgggcccgtgggtgggcacggtgctgctgcactgctgcgagctcatcgagcgtgcctccaagaaggacggcttctgcttcaagctcttccacccgctggatcagtccgtctgggccgtgaagggccccaaaggtgagagcgtgggctccatcacacaggcccctgcccagcagctacctgatcttcagggccgcctccgagtcagatggtcgctgctggctggacgccctggagcttggccctgcgctgctctagcctactgaggactgggcacctgaaagccgggccgagacggggagccagggacctcgccagacgcatcaccctcatcgctctgtgggctgccagcctcagccaccgtccacccagaccaagacctgttcccactgaacgggtcttccctggagaacgatgcattctcagacaagtcggagagagagaaccctgaggagtcagataccgagacccaggaccatagccggaagacggagagtggcagcgaccagtcagagacccctggggccccggtgcggagagggaccacctatgtggagcaggtccaggaggagctgggggagctgggcgaggcgtcccaggtggagacagtgtcagaggagaacaagagtctgatgtggaccctgctgaagcagctacggccaggcatggacctgtcccgcgtggtgctacccacgttcgtactggagccgcgctccttcctgaacaagctctccgactactactaccacgcagacctgctctccagggctgcggtggaggaggatgcctacagccgcatgaagctggtgctgcggtggtacctgtctggcttctacaagaagcccaagggaatcaagaagccgtacaaccccatcctgggggagaccttccgctgctgctggttcacccgcagactgacagccgcacattctacatagcagagcaggtgtctcacacccgcccgtgtctgcctt

SEQ ID NO: 149280 - DNA, 1252 bp, Homo Sapiens
  misc_feature (50)..(50): n is a, c, g, or t
gaaaattccttggagcggggaagtgtgtccatatgtgtggaccccatggntgaaagccagaaacaaaaaagtttaaaacttccccaacctggggttggccagacatcaaaatgatggagtacattttgcagatattttttttctgattaagttacaaacattctccctatagctaaactccgtgactaggctcccagcctcatggccaagaacaataagttcacccacttatctggagtaaccatactagattaaagaaatacaattctttcttctaaagacaatttccagaaagacctgcctttccctatgggtacttgacactaggtcccagcacaggctaatcgctgtatggtttcttcgaagattggcttttctcagtttctttctctttgatactgtacaaggggtccaccaacttgttatgaacaagcattaaacctttgaaatacttgacagtcttcactttcagctccaaggtggcatcctcgtcacacacaaacacggtgcggggatgctgctggaaggcagacacggtccacatgtggttcactccctcctcgatggccttgtacagagcaaatgccttgtgagcacctgtgataaggatcatcacctctctagcatccatgacagtgcccacccccaccgtcaaggccatggtgggcaccttggtgagttctccatcgaagaacctagcattggccaggatggtatccatggccagcgtcttcacacgggtcctggacaccagactggagcctggctcgttgaaggcaatgtgtccatcagggccgatgcctccaacaaatagctcgatcccacctgcagccttgatcttctcttcaaaggcatcacattctgcctgtaggtcgactgcattcccatccagaatgtgggtgttttctgggtggatgtcaatgtgcttgaagaagttgttccacatgaaggagtggtaactctccgggtggtctcgaggaaggcccacgtactcatccatgttgaaggtcttcacatatttaaaggacaggtccccattcttatagtattcaatcagcttcttgtagcagccaagtggggtactcccagtggggagccccagggtgaagtacttctctggccctgggttaaactggatgatacggttcctgatgtatttagccgcccactcgctcgcctgagaatagtgctccaggatgatgagcttcatcttgtcacggacgcctcccgcggcggctgcagcgactgcccc

SEQ ID NO: 149281 - DNA, 938 bp, Homo Sapiens
tcccagaatacgtgccccgttcccccagaaatctttttttgcactcttcacagaagttccgaaaagggagacacttgctgtatttaattctccccccatgctctggaatcccctcccaatttccaagacgccaacgtgttgctattaacaattcctcatgtgacacccaaagggtgttaacaacaacatttaaaggttcaaatccaggaaccggatcatgtcccctacaaaacccgttaagtgtgacttttcccaaactagaccgctgaatcagcttatgccccgaagccaccagaagaccagacatttgaaactgccaatgtccaaatataaggtggaaattgtgcttccttcaaatgaattgggttcataactgccttttctcctgtgccagcaacttctttctcccacgttgctgcaggtagttattgccttatgcttgaaatggaaaggcgaactctgaggttgcaaaggactgggcagtcccaaagaggcaggggtctggaagtacataatcagcacatgctgtgctcccgtaatggcttggccttcctttcagtcccgagaacctaccctgaggtccgtctgaagttcatttggcaagcctggtgaccactcactatctgcactggggcagcatgacagaatgaggtcttcagtattgcacaggtatgaaatgtccatgagtcttaaaaacaaaaatcacagttgctcttggggctgggccgattcctccatcccagttttagcaggatgtggccgttgccacagggcttctgctgaagctctgagactgcttgagtgggtaggcaccggtgccagcaccgaggcagggaatgtgcagtaggcaccctgcatgtcacgggctcagtgtctgcaaatggcctatcagtgaagagcctttgcactcccttagcaggagggagctgggcttgcgc

SEQ ID NO: 149282 - DNA, 843 bp, Homo Sapiens
ctgttttcagaacttccccagctggataggttattaccagccctcttttctgaactcgatgttaattgtcccaatgatctattttgtgaccacatattcttaacacccgttacacttcccgccctggccccctttatagggatggaattttgattggaccaggggcccacgataaggtgtagcaggaagagccacttcttcaaagttcaggcttcttggtcccgacatttccaaagttgtctatgagggacattttaaaagtgaaattttatttttagaccattgccttaaatgtttatttatattgactatggggacttttggggcccccctaaattttgcacttgaaatgggatccccacctgtgtcaccccatagtcccgcctggttttaggatgcgggattgaggccaaggcatcaggccagtatatgaagccaaggtttattttttggtgtcccgattatccatagctccgtcatgaaatctatgtctttctatttttctcccttctgccatagtccctgcctacggctcatcagcccatttagctcctagaaagctggggtcatctcgtattccccagcaagtaccccagcaccagtgccggttcagagcaggtgctccacacacattcctgggatgagaccagcaccagaaatggctctcgggagcctcggatgctgctgggagtaagtgatcccggaccttaccgctaagaggagaaactttttttcaaagcatttattaatactccctccacccctcactccaccaatggggtgatcaacacttactgcttgctcttgttctgctaatgattaaaaccactttattttaatttg

SEQ ID NO: 149283 - DNA, 1001 bp, Homo Sapiens
cccttgttgtcgtttcgttccccggtcgcctgtgtgtcctgggacctgccgtggtagtctggtgcggcgtatctgacggctatgttctccacaggctgcccattcccgtgtgggtcagggtcttggcgtttcgttcttcgcgtgtcggaggttggcttccccagcgggtcgggtgttcgtaatcgctggacccatgggttgttcgctcgtcgtgacgtgctttgtggggctccagtacggtatatacgctgggggaatgttgatgcgttgcagctgcttatgtgacaagtgcgaataagttcgtcgagagggtttgcgacattctgttatgatggcggcaaccttctattcgataatctggcaacagtggtaagtctccttgcttcctgtattgtttatcttgatatgtaggccctaggctgaccgtgccagaataacaggttctgttgtgtgttgttattttcttctaatgcacacctactcctgggtattatcagtgcccctctccaggtcctgcacgggagaaagtgtagctgccttacaaggccctctgactatttggctccataacttaggaccgtgcctttcccggttccaggcctatccaacttttactgtttttcccacgggtcattgtttctcctgtctttgaaacttcgtaaagatctttagttcacctgtgcctggaatttttttcttttcccttccttgctaatatttgtcttaaagcccccagctgagacatgatttatctgctaggaagcttttcctgatgtcctaagtctgggtaagagtccccttttaggtactcttatagcatcctgcatgacccctgttacaataccttagtccgtattataattgcctgttcattattttatgtctcctactagacttgcacattctagtaaggagtatctgttttgtacattgttaatttccccaagtctgacacaacatttgacacataataagctccccataaatatttactgaattgt

SEQ ID NO: 149284 - DNA, 1211 bp, Homo Sapiens
gcggccgctgaaggggttggaggacgttcggtcactggcggagccactgctgctgctaaggcggccattggccggggctgctccgggcgggacgggggcgaccagccgcggggacttcaggcccatcacaggcttggaggaggcgtagaggtggcggaactcctcgtcaaacagctccaccgcctggcctgtgaacttggagaggatgttccggtgcacgtgtccgcagagccaggtgaagctgtaagatccagacaggacaaatctccagtccgagatgatgaacttctcccggatttggccagcgaatttcctgcctgacttggcacagtatatctctccttccacactccggatggaaatgttcttgaggtgactgtcagagatctggactttgtcacacatctcctggaagagcttcacacctccctggtccaggagcacacaaacgaacaccccacgcttgttggctgcctctagaatgtcacagaagatctccacatccgtgaacacatccatcaggatgaccaggacctggctagtccgggtgatgcagcggcggacgaggtctctgatgttgttgtgcttgacggtctggaagtacacagtggcgctggatttttccttcaggtagggcttctcagctgaggcccagctgtgcagtagggccggctcgctgccctctgaggccacagggaagtaggtgccggactgtagggagctggagtccagtcccttagggcctgcttccgcccctcccagggtgtctgggggacacgggggctccctggcctgggcctggatgtactgggcctccaccgaggacaagaagtccacctcgccttcctggctgagcacccgccagtaggcttcagaacccccatccaagagggcgtccgtggccagccgggcactctcgttgtcactaaagtcagccctggctggccggacccactggctcttgacatcttccagacgcttccggattttgcccaggtgccttgaccggctcatgcctcccgtccctgggtggtgctgggggaggctggcacgtcagctcctccagatgtgggaagcaaatggaacacaccacggaggagtggggctcccgcacccccgggaggccgcctgctcccaggaccggcgtgcagggcacctccaagaagtgatttccgctgtccgagatcccgggaatccggccggtccagcct

SEQ ID NO: 149285 - DNA, 1807 bp, Homo Sapiens
gggctctaaagggggtaaagggggtgctatagggtaaatacgggccctatttcaaagatttttaaggggaatttaattctcataggacgagtgggcattgaaacgtggtggtttgtgcctccacagatttttcagaagcattgtgaccgatagttattaccccgcggctcggtgttagcgggtgaaaggtggttgtggtctataaaccgtctccgggaacatgtgtgcatctcgtggttttataagcccataatgtggtggggcacagctctcatgtgagtgtgacaacgaacgtctcttgtggtagagtgatacattctattataatacccaacatgtgcggcgcgcttctacaatctgcggagagagtatcacattctctcgaatgtgtgtctctaacgcgtctcagaaggagagtctcgccgagagtgctcgccgcgtgtggtctctatagacgaaatatagagtcggggagaaaagtatatgtgtatagggaaagttgtgcacagaaatatatagtgctcgcgcgcgcgaatagctctgcgggtggtgtcaccctcgagatgagggtctctcgaagtatcaacccaagtgtggggggtgggccacaaacatgggacactctgcgagacgtggtcatagagagggagagcggagacatctcgcgtgtgaacacctctcgggctgcggtgggtaacagtggcctacaacaggggggatgttcgcgcggtattaggcgaggcaatctgggccgaaacgggcggccgacaagatgcagcggggccacccatacagggaacgtcgcaccgtgccggccgcggcgccccagcgcgccacaccacggcctccccaacagcaacgcggcggagtacacaccacttaaactcatctccccccgttgacgaggccccgtccctccatagaaacaccaaggttgtgctcacacacgcacctacacactcacacaagcatcaccacaggatacacaagaggcaccgctggccctcgaaaaagcgttctgctatcccaaggccgacaaacacaagcagccgcgcccccatatcaaccccagggaaagacccatcaggcgacaacacacgcacccaccacaactcccaccgggccgcacccaacacgttgcccacctcccactgacacaggggcgcgccgatccgaacacatcccactcacacaaacggccgtcgtacaactccaaaacaccccccccacccactcgaaatacaacacaacccgcacgcagccacaaacacgataacaacagctctcgctgtggtataccagacaaccccatccacctatgtgcggcgggcctcggtgacaccccccccaacaggcgcggctatcccggcggcgacaaccgcgcacgtgggagtcatcgaacaacccagacatcatctcccccagcgcgaaacaaccccgccacggagacacgcggccgcatcaaccaccaacgccggcagccgctcttatcgttcggacaccaaccacgaggtgatgccatacaacagaggggaggcagcccacaaaatcaatgagcccgcctacagcggcgcccacacaacacacgggatcctccgcgttcgctagcacacaaccgtgactcacaccggccgccccgcggcacgcgtcagtcgctcaacaacatcgtgccaaggcaaggtagaccagatcgcagccgcggcagctattcacatgaagatgaggacacagacacagagagccacatgatgactcatcacagtcgacccgcgatgccgtatcacaacaagcagcccagcccaccgca

SEQ ID NO: 149286 - DNA, 1346 bp, Homo Sapiens
cgccatatgcgctccccgacgctgtcgacctcgtcacgcagctgccgcgtagatccggccgtggttgttttgtgtcgtttggtgcttattctcttctatttcctcttcgttctttatctcctgcgacatcgagtgcagcctcataccagccggcttgtatctgttgagcactgcgcgagggggctgtgcgtgctgcggggtttgttctatcggtcgtcgcagcgcgtggattatcgcgctctggagtggggctgctacgtttttggacacgtcggcctcagagtgatgtgtggcgtgggcggcgggcggcctcgcggttctgggggacctggcggtaccaagtcttccgctttagggggttcgccgctcgcggcgggccgctgtttcttgttacgggctgggggacgttggcaaaggccgtctggtgtctattgccccgggagttttccctagggagaacccatgtttgggccccttgtttcgctttggcgttatgggggtcccggcgctgcccaagcgaatgggtcttgagaagggtttttcgaggggccgaggcggcttgacaagggtgctgtttttggtgggggtctttttgctcaagccccagctggttgctgtatttggtggagttgaccttaaacaacgccaaggaccctcacgtagaagacccccagcaaagaaaagggctatcagatgcttctccaacagcctgaggctcaggctccgtgggcagaacagttcccttcgtgtacccaggataggacgaaaaggtttcaacacggataaacattacaagccgccaggttccctcaagaccgtgaatggcctctgtcgcgcctcatctatccccacatgcggctggggactattatagatctttctggcctggtccacttgtaattggacagaagtgccttatcacatgcggatatcaccagctggtggcttggggactgtttggggagaacgtggtgtcgggctcactccgacgacgacaccggggtctcaagacgagcatcttgtcgtctgggcttgcacacgattgtcccggggcctgggacagggaccccgcttgttgtcctgcagccctcgacccgcacggggcgtcgagttgagcgccttcctctgccggtctctggcttatccttcatcggcctgggcgacgcttgtcagggctggccctcgaaggtgtcggcacgccaaatatctcggggcacctcgttcgacatccctcccagggccgccacccgggcagagcccagccagcctggcgtctcacggtgcgcgttggctcgcgtgtcccattgccaccgtcccccaggcacttgcaattcccctctgggtcg

SEQ ID NO: 149287 - DNA, 1640 bp, Homo Sapiens
  misc_feature (343)..(343): n is a, c, g, or t
  misc_feature (352)..(353): n is a, c, g, or t
  misc_feature (580)..(589): n is a, c, g, or t
cacaaatagcacttttaattggccactattggaagtctgaacttaaaacagatttctgggacggggggttcatattccattcagcctgcgtttcaactttatagcaccgtgtgtctcgttccccgaggtggttttttccagaaacttacgtgcgcttcaccagtgaaagcctccagtgagctttccccaatttcaaacttggggcctccttctcgagacatttttatacttttctcataaccgaaagaacctctcgagtgggagagaggaatacaaatagacagtggggcagagcccttttccatagtgtgtcttgttcctccaagtggcgtgctcgtggganactccaatnnttatgtgacacccccacttctctttctcaagagtctcatatgtgtgggtctgtgaccacaccctctctgcggggtctccagtgataattctccaaactacaactcttctcattctcggcggaaatgtgtgcgcgggacacccgtgtgtggggagtgacgtgagagacaaaataaagagaagggcgtctttctccggggtaactctgtgaaagtgggggtgagagagnnnnnnnnnnatgagtgtaaaacacccaaaacacacagagatacacagagacacagaaagagtcccagagtatcacacccaagctcggggggatgagctctgtgtgagacactctcacagaggggtggagaaggccttttcaaaatctcaagttgggtgctctgtgggcccaaatattttgtgtgggaaacccgagttgtgaaacaccacccaatttttctgggggctaccagcgcggggtcattcagagaaaactccccgagtggcgccccaggtgtgggaaaaggttttatagggcttccagaggggggcaagaggtttttttaataacgccgcggtggagaacaacacctattcctttctacgagaaatacaactctcccagggatcttgtagaagcatttttttcccccataataacaaatggcgccaaactcttctcccaaatcacaattttccttggggcgataaatctacacacggcaaagaggaaccttccactttctccaaaaaaacacacccaacgaggaacaccctttgtggaaagaaccccatttcccaagaattgtggccaacatttcgtgggggtccccccttgaggggagcccccggggggatgtggaccagaaccgcgtggttcgtcttcccccaaactatatttctcctttatttcttggcggcgaccctatctacgggcgtggtggccgtttctcaacctcattctcatttacccataattcttcttcttttacgaacaactctggtggtgccacaaccacactctttcctcctgtagggggcgcccccatttttgtgggcgcggcccttccgggaaaagggggggcgtgggtgtctttggcccacaccggcaatagggggtgctgtgggcacgaggaaagcgcgtggtcgtcgtacacgaaaatatcaccgagggaaatccccggaacccgagggaccaacactcggtctttctgtgggcacaacccatgcgtagcatcaatcatgctggcccccaaacaaaggcggcaatgagcacaaagcggtgcccggcggagaacagg

SEQ ID NO: 149288 - DNA, 1014 bp, Homo Sapiens
  misc_feature (862)..(862): n is a, c, g, or t
  misc_feature (876)..(876): n is a, c, g, or t
cggtccggaattcctgggatatcgtcgaccccgcgtccggccgtgactgtcgctccccgggactcctggacaccacccccatccgaggaagctgcactacccagaggaaattgcaagagaagtcctcgggcgcgggctccctggggaatagcaggccgagctttctgaattcggctctgtgggacgtttgggacggggaagagcagaggcctccagagacccctcctccggcccagatgccaagcgctggtggagctcagaagcccgaagggttagagacacccaaaggtgctaatcggaagaagaacttgccccccaaagtgcccataacgccgatgccacagtattccattatggagacgccggtgctgaagaaggaactggataggtttggagtccgccctctgcctaaacgccagatggttctgaagctgaaggagatattccagtacactcaccagaccctggactcagactccgaggacgagagccagtcctcacagccgctgttgcaggcgcctcactgccagaccctcgcctcccagacctacaagccttcaagggcaggggtccatgcccagcaggaggccaccacaggacctggggcccataggcccaagggacctgctaagaccaagggcccccgacatcaaaggaagcatcatggaagcatcacacccccaagcaggtcgccccaccaaggaggcacctccaggcctcaatgatgacgcccagatcccagcctctcaggaatccgtgggcacctctgtggatggcagtgacagctccttgagctcacagagttcttccctcctgtggagtttggagcggcattttgagtctgcaggtgaaaaagagggcnaggggggaggtcantgcctcgccagcagccgtgcaggcggcgggacacagacgagggcgctggaggtggctacaatccgcctcccaggcccggcccttggtacccaaaaagggggcttgcctggtacccagccccccttttgaagcttgcct

SEQ ID NO: 149289 - DNA, 1106 bp, Homo Sapiens
  misc_feature (25)..(25): n is a, c, g, or t
  misc_feature (33)..(33): n is a, c, g, or t
  misc_feature (184)..(184): n is a, c, g, or t
  misc_feature (195)..(195): n is a, c, g, or t
gtttccaggctcccctcccttcttnggggtttncggcccagggtttttccccgcttccaaggtttgggaccaacccattggttaggaatcacactggcaaagttattctgactcatccatcaaatgacttgggtcccttcgaatactagttctgtcaaactctaacagttggtctttatgctgnatagccttctnccagaccagacttaattcgcaattcttgatgaggaagaaaggtcccttgtaagagaatgtccacctttccagaattctccactcctgacatgagtttctttagcagtttctggctcttgtttgagtcacgctgtaaaatatcttgttcctcatgagtacacaccagagtgccacagaataagcaagggcctgagccttcttgttcacagacaatgcgcccacagatcagacagttattgatgagcttgtgcttctggcccaggcaatcacaagggtgacgaccagggagcaggactgcaagcctgtcctgtccctctcttgtgtataaattgacaaactttgtcttcttctttacggagttgctgttctcttgtgccttggccaaatcaaaaggtgttttaacctctgcagtcgtgtcaggttcagtaaatgcaggaacttcctgtctgtttctccctttcttcctaccccgctttagatggtcgcctgatttctgcccatctaaaatttcatcttttttgaagcactgctgcaaaggatccgaaatcaactcctgatcattcttttgccatttggttataagttcttctatgaattgaccttttttgccttcatttccctggaggagatcagtaacatattctcgtatctcttcagcactctcaattgacaaacgtactgaatgatctcctcgctgacatccaggccgaaagtcttccgcaactgctgggtgcaccagtgcaccagcggctccccggacaccgccccagccaccgccatcttccccagccggaaccagctgagctgcaaaagccccacgtcccggacgcgtgggtcgacgatatcccgggatatccggaccggtacagcctgctttttttacacacttgttcatagtattaattggcttt

SEQ ID NO: 149290 - DNA, 1292 bp, Homo Sapiens
gttaatttttcaaaccatcaacattttatttaataaaagcaactgagacattttctaaagtatacggtatatttgatgtattaattcttcaaaatatgtactatagaaattcttcaaccatatgtactaaaaatacaaagtttgtgaatctaaggtacagaaaacactttatacttcagtcacccaaaacaacagcttgtggtctcctccaattacacacagagggagagttcgatgccaggacagtccagatccaacggctacagaacccatgaggatgggctgagggtgtcctaaatgatgaatttgaaactggcttgccattttgccaggataaccagtggttgcaaacagattttcactaattgtggaccacctgaataagcaggctcgatccatgtgaacaggtctcttatttctgagcgatacactggaccgagtaatatcccaaaattaaccacatcttttccgtgcaacggctccaactttggaaggtgttttttaagcaccagtgtggctgacattaaatggcacttgttctgattcaaagagataaaatagcctgttgggccaaaagatcataaaaccggattgttccattcttctctgcaaccattagcttaaaagtctcctcaggatgccagcacacactcatgccaggagaatgaagaacaaaatgagctgtttgcactccttccaagttccaaatcctgcaggtgtgatcgtcactcacacttgcaatttcttggccttctttgggatcaaacaccaaaccattaatgaaatcggtatggccctctaaaaccttatattcatttttatcctgaagatctgaagtaaataatctaattttcatatcagcagctgaagtacaaaatttgattactggaggcaatgaatcaagtctagtctctgggctccaagctatgccatcaaccctgactccatggtgaaatgttcgaagtgttttatactgaatgccttcaacgtctgcttcttcttcctgaaacgtacacgtgccaatgaccacataattattgccaccatatgcaattaggtttcctgaatccccattctcaaagggattaaattctaccacatgcacataatcttcacaatccacagtgtaggcagcatttcttgaggcatcttgcttcatcttgtatgtcaaaattcaagcagttgtgaaaattaaatagccttctactggacaaggtcacgaaacgcagagcgccaggaaccgaccagaggcaggctggtcttccttgggggctgccgcgacgcgctgtccc

SEQ ID NO: 149291 - DNA, 1272 bp, Homo Sapiens
  misc_feature (384)..(409): n is a, c, g, or t
tccttttaaaggggggaagaaaaaaaatgccccccattccccgttttttaaatttaaggaaagtgttaaccctggcaaggaattatgtttcaaaaaaaatttttttgaaagggggaccccaatccagaaacttcaaataaaaaccttatgaaataaaaaacttaggggcttatattattaattgtaccaattaatgagttaaaaatgccacttaaagtctattaaagaaattggaaatatagttctgcaaaggttattcaaagaatattttttcaaatgtacaaacaacaataaaaccacacaaaaaaagccttgggcaatgtgcaactttaaccacttttaaaatggattcatttataccatttcaatgcaaagagaatatcnnnnnnnnnnnnnnnnnnnnnnnnnntcttcagtgtctgactcacattttgtcccccaaatcttcacatttaatagttacattttgaatgtataagctaagagttctaaatgtttctcaaatagtttgtgtctacatttatcataagaatcatatttgaaaactactctgctaagaactaaaactagtacttcaaacgtttaaaaataaaatcttcacaaaagttcacaattgtgttcatctcaatgtccataaattactaaaaaagaaacaagtcacatgttcagatactttttctcaggtatgagtctattctgatgtgtgccaagctgcaccttcaatatttggcactgacagtctatctaaacacaatttatcagcagaaaactgtaagaaattctataaacctttagccattcaaaaccatcatgtttcattttctctcctaacatgcaattcagttattccaaagtcatttgggggttgcaaggaggtgatttaggtgactggtacaaaatgaagcttatatgaaaactggttaaggattcaaagcacactagctctgaaatattaatcttaacaccagacataaatggggaggtacgacttgcacaaaatactttcaattactttggttacactcttcatgatcttgcatgtttagctgcttgcagtgcatgcatgcatcctctttgctacgtcataaacataggtgacgtctggtcgcttctctggatctgggttgatgcacatattaactaactgtcggagttattctgaatagtgatctgaaggaagaggtgggtagtcacactgttctatcttcttacacagtgagtataaattcattttgtcggacgcgtgggtcgacgatatcccgggaattccgg

SEQ ID NO: 149292 - DNA, 878 bp, Homo Sapiens
tcggggacgtagaaggagcagacgagtgagctggatgtcaggcaacatgcttagaaaggatgtgtagtgtgtaggcctctgaagacagacacagcaggggaaggctgaacattgttgggtgctcttcccagagacacttccaggtgggcacttccaggtggcacttccagagacattgggtggttgcacttccagagacatcaacccatggatgcaatgttcccagttctctttcttaggttttcttgaggtagttctgacaggctcttgccatgtctttcaagaagttaggaactccattcttggcggcccagttaatgagccaggacggaatttggccacccgggttatcgaagtaatacatgaaaactttgctccccttcttgccgtcactctcaatcgccaggctctgcttgtattgcttcacccggatcaccccagacctctcgccaagctgaggcatggaggtgctccgggccaggatcacatggatcttcctcccttccatgtccaggtctcgccgctgccgaaggtagacatagtctctgttggacatgggaaaagggtacttcacttcccagtagaccacagtctctccgttgcattcttgttcatagagttctttaacatactggtcccattgttttctgtaatctgagtccatatagatgtctgccagtagagttggtgagcagtcctccagaacaccaaagactttatactcataaagtccagtcttcttgtccagcagccggtagatgctgatgcccgaggtctccactaggagctgccagtcggccccggccagagcgggctgctggagctcggcgcaggcctcccagaactgctcctccgagaagcttccggcggccagctcc

SEQ ID NO: 149293 - DNA, 1848 bp, Homo Sapiens
  misc_feature (1387)..(1592): n is a, c, g, or t
ccccccttgtgtttatagcgaggttgagtgttgttttaaggatcaccagcaattctctgtaatccgtgcggttcgtttccttctaaaagcttttgccaaagtcccaagtaagttgtgtacagtaaaatagattatctgtttaagaaaacgcactagcaagattgtagcaaagtgtgtttatgcaaacaggtggtgcagagacagaggggcggacctttgtgggcagctggaggaccatcccagctcatgggccacgcacagatgggagcacctcagtgttttcagccaagagaacacaagtctcgggatccatgtggctccctcaggccctggacccaggcaggcaggacacccttgaccatggggcaggggacatcccagcatcttgtctgtacccccaccacctgcgtggcacctggtcctcagacacctgcgtggcacctggccctcaggcacctgcgtggcagctccacgggccaggcccactgtccagttgctcctgccctggagttggggccgtggggagggaaagcgcagtaatagctgagtgttcagaggaggggctgggctgcaggcattgctggttcagattggtgctctccacctggctgagtgaggcggcaggaagcagcggccggaagattcctagagcttagcagagaaggatgcgaaatccggcagccctttgacaccgtttgggaacgtcaaccatgccccgccatcggccaccagcacggcccccgtcacgtaggaagccagagggctggccaggtagagcacgctgtgggcgatctcggtcttgttccccagcctctgcagcgggctggcagtgaccttggtgctcaggctggcctgagggccacccagtcgccggagcccctctgtgccactgatggggccaggggcgaggctgttgacgcggatgttttggggaccccactccacagccaagtgccgcgtcatcgcgtccacagcggccttggcggagcctgcatgcacctggagcgcctgcccccggttccccagggtggcagtgatgttcacgatcacccctccgtggtcccggaagaacttctcatagagcacacgagacacattgaaggtgccgctggtatcgatgtccatcacggtcttgaaggcgttgaaggacaaggcgccagcggggcacaggaagttcccggccgcacagttaatgagaatgtcgattctgccaaactccttcagagcctggtccacggcggccatgacagctgggggcgctcggacgtccatagagagagggaggcagcgccggccggtggccccagccagcttcctggcggcactgaagctccatatttaggataggtgcaagttttggtgccggctgggcacagtggttcacacnnnnnnnnnnnnnnnnnnnnnnnnnnnnnnnnnnnnnnnnnnnnnnnnnnnnnnnnnnnnnnnnnnnnnnnnnnnnnnnnnnnnnnnnnnnnnnnnnnnnnnnnnnnnnnnnnnnnnnnnnnnnnnnnnnnnnnnnnnnnnnnnnnnnnnnnnnnnnnnnnnnnnnnnnnnnnnnnnnnnnnnnnnnnnnnnnnnnnnnnnnnnnngtcagcactcgcggcaggctcctactggcaatcaccgtatggcagccgtgccgcatgaaaatctcagcaatccggaacccaatcccagagccgcctcctgtgatgaaggccactttgtcccgcagcaggtccgggcagaagaggtggcggtacgcggggagacagtcgtccccctccacgtcgggcggcggctgggccatggcgctcccgtcggggaatgcggggacaacgggcgggatcccgggaattccggacc

SEQ ID NO: 149294 - DNA, 1045 bp, Homo Sapiens
  misc_feature (928)..(928): n is a, c, g, or t
ggcctgggtggcgaattccggacgaggctcctaccggcgacgtggtgccgccgctgctgcctcccgctcgccctgaacccagtgcctgcagccatggctcccggccagctcgccttatttagtgtctctgacaaaaccggccttgtggaatttgcaagaaacctgaccgctcttggtttgaatctggtcgcttccggagggactgcaaaagctctcagggatgctggtctggcagtcagagatgtctctgagttgacgggatttcctgaaatgttggggggacgtgtgaaaactttgcatcctgcagtccatgctggaatcctagctcgtaatattccagaagataatgctgacatggccagacttgatttcaatcttataagagttgttgcctgcaatctctatccctttgtaaagacagtggcttctccaggtgtaagtgttgaggaggctgtggagcaaattgacattggtggagtaaccttactgagagctgcagccaaaaaccacgctcgagtgacagtggtgtgtgaaccagaggactatgtggtggtgtccacggagatgcagagctccgagagtaaggacacctccttggagactagacgccagttagccttgaaggcattcactcatacggcacaatatgatgaagcaatttcagattatttcaggaaacagtacagcaaaggcgtatctcagatgcccttgagatatggaatgaacccacatcagacccctgcccagctgtacacactggcagcccaagcttcccatcacaggttctaaatggagcccctggatttataaacttgtgcgatgctttgaacgcctggcagcctggtgaaggaactcaaggagggctttaggtattcccgcccgctgccctcctttcaaacatggtcagcccaaccaggtgcctgcctgntgggaaattcccacctccctggaaaaaagaagggcccaaagccctggcctgggggttaatgaatcctccaattaaaaaccccttcaaaaccccaatttttcaaacggggaaatttta

SEQ ID NO: 149295 - DNA, 1194 bp, Homo Sapiens
ttggaaaagtattgtccagggttttttcttcatatcgggggcaatttatcccatccagatctttttctgaaaataattttgccagttggtacatcacaaacatcgggacaatgcaacaaaatcaccaaaatgaagacatcctatcagcccctcttgctcttgcatatcccgctgagatgggtgtgagggttttatagagatcataaaccatgcagactttgccttcatcttcactgagtgggattccaacagccagcacctgctgggctgacctgttgaaagaggcagcggctggaatacctaaagcctccttgagttccttcaccagctgccaggcgttcaaagcatcgcacaagtttataaatccaggggctccatttagaactgtgatgggaagcttgggctgcagtgtgtacagctgggcaggggtctgatgtgggttcattccatatctcaagggcatctgagatacgcctttgctgtactgtttcctgaaataatctgaaattgcttcatcatattgtgccgtatgagtgaatgccttcaaggctaactggcgtctagtctccaaggaggtgtccttactctcggagctctgcatctccgtggacaccaccacatagtcctctggttcacacaccactgtcactcgagcgtggtttttggctgcagctctcagtaaggttactccaccaatgtcaatttgctccacagcctcctcaacagttacacctggagaagccactgtctttacaaagggatagagattgcaggcaacaactcttataagattgaaatcaagtctggccatgtcagcattatcttctggaatattacgagctaggattccagcatggactgcaggatgcaaagttttcacacgtccccccaacatttcaggaaatcccgtcaactcagagacatctctgactgccagaccagcatccctgagagcttttgcagtccctccggaagcgaccagattcaaaccaagagcggtcaggtttcttgcaaattccacaaggccggttttgtcagagacactaaataaggcgagctggccgggagccatggctgcaggcactgggttcagggcgagcgggaggcagcagcagcggcaccacgtgcgccggtaggagggctgccgggcggacgcgtgggtcgacgatatcccgggaattccggaccggtacc

SEQ ID NO: 149296 - DNA, 825 bp, Homo Sapiens
  misc_feature (131)..(131): n is a, c, g, or t
aaaattataaaactacatagccccaatctcccaataaacattttcaaacccacctagaaaagcaaaaatgtaaattatggcctgtctaataaaaattgtgctttggaaatatatttgactactttgtccanttttacaaattcttgtttacatttttataactttcattaggaattttgaaaattgtgtttcgacacctaaaaatgtgttaccattgtaactaacatgtctaatatctaatttgcttgtataattttttaaaattattaaaatagaaacagactaaacctgattaaatgtgaatgcacactgcattaatacataagtaaccaaccaatacttcaatgtgagctaaacataaatcattatatttcagcttgaattctgtgcatttgcaggatttagattttacttagcagtaagtaataatgtaagtctaaatattattgcagtctaaaactaccatgttcaaaatgtggtgaacttagtaaacaaatactctaaagggtggttactgaaaatcatgttgggcatccagaaagtttgcttggtaccaatttggaatcaccaccaaagtgattttaaagatttggtaattttaaatgcttttaaactttggatggaattgatgagacctgcaatctgtagactattactgcaaaagcaaggtaacactgccagttcacgttaggcaagggtacccaacagtctgtaacatagtatttttgagccaattctgtttaataaaatccatgagagctatataaaaatacttattttttacagttaatcggacgcggggtcgacgattcgaagaatccgacc

SEQ ID NO: 149297 - DNA, 1205 bp, Homo Sapiens
gtgtgggagcggctgcgggtgccatccagagaagtgacgctggaaccagaggctgtgcgggaccgcatcaggcgggtcatgctagccgagggcatgtatcccatgccctgcacgaagtacttgaaggcctcagcgagcttggccggctgggagatctgcgggaggccgccacagtccgccatcttgaggagagtggtctttgttgggtccaattttgagttgcactccaccacggcatccactgcaggcgagctgtccccaaccaccaacagagcagggcactgcagggtgactgtgtgggttcccggcattggtcgctcaatctccaggtcgcgccggctgttgtaggcattgatgaacaggtgcaggttgccggggttcatgtcattcacaatgtgctggcggtaggtgtggaccacttccacgttactctgcatttcttccttcccaaaaaggtgggacaccaccatgtccggcagagcttgggtccatcctgagatcttggaggcggcccagtccatccagccttccgcacaagggttcacgttgataaggacaaggccctccaccatctcagggttgtttagagcaaatcgagttaggatgtaggcgcctgctcctgttcccatgccaataatgcttttcagcccaaactgttgaaggactccaggaagcatttcagccagctgatccatggaggggtacatgtaccctgcggggaaggaggctgcgccgtcctgctggccaggggcgtccacgtggcagacggcaaagtgctgggtgatctcctgcatgtcctcgtagttgaagagggggttgtagcaggttttgtggttcatgccgatgtcatggtaggtgaggatgacaggccggtttcccttgggagtcccacacagcgtgacgtgaacagagccatgtaaagtctcgatgtcctgctcctggacatcaaactcttgcaggaggccggtgatggtctcccctttctccaccaaaggcttcacctcagcgaggtctacatcctgcatctcccgagacatgtccctgctgtcacctgcctaacgcgagggagaaaggaaaggacggtgccgaggctggcggcccagcgccccgcggaagccgagggcggatggtgaactgacgagcttcagcaccagctgggagccaggcggacgcgtgggtcgacgatatcccgggaattccggacc

SEQ ID NO: 149298 - DNA, 827 bp, Homo Sapiens
tgatcacagatcatgcgggtgtccaacacacaagcggcatcagggatgtgggttccgcattgtcgtcattcaggtcgcgcggcttgtaggcatgatgaacagtgcaggtccggggttcagtcattacaatgtgtggcggtaggtgtgaccactttcacgttactctgcattcttccttcccaaaaaggtgggacaccaccatgtccggcagagcttgggtccatcctgagatcttggaggcggcccagtccatccagccttccgcacaagggttcacgttgataaggacaaggccctctaccatctcaggtttgttttgtgcaaatcgagttaggatgtaggtgcctgttcctgttcccatgccaataatgcttttcagcccaaacttgttgaaggactccaggaagcattttagccagttgatccatggaggggtacatgtaccttgcggggaaggaggttgcgctgtcttgttggccaggggcgtccacgtggcagacggcaaagtgctgggtgatctcctgcatgtcctcgtagttgaagagggggttgtagcaggttttgtggttcatgccgatgtcatggtaggtgaggatgacaggccggtttcccttgggagtcccacacagcgtgacgtgaacagagccatgtaaagtctcgatgtcctgctcctggacatcaaactcttgcaggaggccggtgatggtctcccctttctccaccaaaggcttcacctcagcgaggtctacatcctgcatctcccgagacatgtccctgctgtcacccctcgtgccgaattcggcgcgccgtcgacttcatactctctc

SEQ ID NO: 149299 - DNA, 230 bp, Homo Sapiens
ttttatctgaaggctgcagggatcaagtcttctctggggctggcacgtagaagagcatgtggctggtggacgggcatgcctggctcctcacctggcagtctcctgccctctaaccggctgtctcttgttcccctagtgccctcggctagcatgacccgcctgatgcggtcccgcacagcctctggttccagcgtcacttctctggatggcacccgcagccggaccagcta

SEQ ID NO: 149300 - DNA, 703 bp, Homo Sapiens
  misc_feature (18)..(18): n is a, c, g, or t
  misc_feature (24)..(24): n is a, c, g, or t
gcacgggtgatgcggttnccgggnttcatgtcattcacaatgtcctgccggtaggtgtgaccacgtccccggtactcgcatttcttccttcccaaaaaggtgggacaccaccatgtccggcagagcttgggtccatcctgagatcttggaggcggcccagtccatccagccttccgcacaagggttcacgttgataaggacaaggccctccaccatctcagggttgtttagagcaaatcgagttaggatgtaggcgcctgctcctgttcccatgccaataatgcttttcagcccaaactgttgaaggactccaggaagcatttcagccagctgatccatggaggggtacatgtaccctgcggggaaggaggctgcgccgtcctgctggccaggggcgtccacgtggcagacggcaaagtgctgggtgatctcctgcatgtcctcgtagttgaagagggggttgtagcaggttttgtggttcatgccgatgtcatggtaggtgaggatgacaggccggtttcccttgggagtcccacacagcgtgacgtgaacagagccatgtaaagtctcgatgtcctgctcctggacatcaaactcttgcaggaggccggtgatggtctcccctttctccaccaaaggcttcacctcagcgaggtctacaaccgcatcacccgttcggtaccgagctcgattgtatcatgta

SEQ ID NO: 149301 - DNA, 1042 bp, Homo Sapiens
  misc_feature (207)..(280): n is a, c, g, or t
  misc_feature (289)..(541): n is a, c, g, or t
  misc_feature (564)..(577): n is a, c, g, or t
gctgtagttttcccaggactgaaggaaagaggcagacaccacattctcctctgcaaagttctctggagaatgtgtgatgttaacactcccagctaagggaaagcaaagtctaaaggaaaacacacaggaatgcttccaatgtctccaagtattcctgtggtcaacagtttcgcagatccgttaggcccttaaagacaaggaggaagnnnnnnnnnnnnnnnnnnnnnnnnnnnnnnnnnnnnnnnnnnnnnnnnnnnnnnnnnnnnnnnnnnnnnnnnnnagacagaannnnnnnnnnnnnnnnnnnnnnnnnnnnnnnnnnnnnnnnnnnnnnnnnnnnnnnnnnnnnnnnnnnnnnnnnnnnnnnnnnnnnnnnnnnnnnnnnnnnnnnnnnnnnnnnnnnnnnnnnnnnnnnnnnnnnnnnnnnnnnnnnnnnnnnnnnnnnnnnnnnnnnnnnnnnnnnnnnnnnnnnnnnnnnnnnnnnnnnnnnnnnnnnnnnnnnnnnnnnnnnnnnnnnnnnnnnnnnnnnnnnnnnnnnnnnatgagccactgcacccggccacnnnnnnnnnnnnnnaaagaaaaatgctctgcatggattggagacacagcaataactactgttgccatggaagggttaacagtgtaggagctggtttatcagtccgctttgacataccgctaaaggaaatttatgtttggggggaaaaaggccctctgttcactttaaaattcagtgtggacttatgccaaagggggctgtttaagttgaaagaagccaagttaagtttggcctcttgcctggaatcacttgaattctgaaatttcactgcgacggacatgtgccttgtcacattttccattgcttaatcctgaagtttggtgcaagtctctctgcacctattaaaaagtgatgtatatacttccttcttattctgttgagttgtatagaattgtcttttgtatttaacactttgtaattttcacaatattttttaatttaaataaataaacacattttttccctcctgggaagtcacga

SEQ ID NO: 149302 - DNA, 1457 bp, Homo Sapiens
  misc_feature (205)..(219): n is a, c, g, or t
  misc_feature (242)..(242): n is a, c, g, or t
  misc_feature (247)..(312): n is a, c, g, or t
  misc_feature (315)..(315): n is a, c, g, or t
  misc_feature (318)..(325): n is a, c, g, or t
  misc_feature (327)..(337): n is a, c, g, or t
  misc_feature (945)..(945): n is a, c, g, or t
  misc_feature (1309)..(1357): n is a, c, g, or t
ttaggcgccggctatggtataccgcggggagatgcctcccgatggaaagagcgtgaggacactccgctctgcgatttttttgtgggaggaccgcccggtggccgcagagggtgtatatattatttctcgagggtccccaccccccacgccaatcccccgaagtttttttggggaacccgattttgtcgccttttgtgttttggtnnnnnnnnnnnnnnncgaaggaagagtttgtgaaaggnttttnnnnnnnnnnnnnnnnnnnnnnnnnnnnnnnnnnnnnnnnnnnnnnnnnnnnnnnnnnnnnnnnnnggnggnnnnnnnngnnnnnnnnnnntcgaagcaaaatacagtacaaatttattgactccaatcattcttagtcaacatttaagcaaactgtagacaatggaattgaatacaaataagcaatggattaacattagatagaaatcctattttaccatgaattttcagttcgaaaaagcttattcctaagtaaaatggaaaaatgacttactctgctaaggcatatgacaaaatacacagaattataaaaccattcgtttttcttttaaccataagcatatattcaatggaaaacttgaaatagccttggactaatgttctgaaaactagtattaactgagtataactgtgtgaaaaatctggacagcattaacaaatgaaagagcactgaattctgttattttaaagatttacagtaaaatactttggttcccaaaagactgtctctaaaaggaatttttaaaaacacctgacattgtaactcattttttctcctccagaatctaaacaccaattttgtcttctccccagtcacatgggaatgccacaagctggagtacccgctgagatacactgaaagagcatattaaaaattacaaaaaattaaaccttcttaaagtgctaaaacccacaaanaagccctaaatgaaaaacctattttttaaaaacttaaaggtttagtagccccgggttaaagaacccctttttaaaaaagtacggggtcacccttttatccaaactcaacaaagggatttttccccaatttattggcaaaaaattttcctggaaaacctagtcacaattggccaaacgtggactttggactccccacctcagatatccaattcttatccgcgaactcctctttcttgaccccctccaccccatattagctctctttccctgtaagaaactttccggagtatgaattcctacccttctcgagggagcctacaaaagatgcgacagctggggatataacatcaatgtgagccggatnnnnnnnnnnnnnnnnnnnnnnnnnnnnnnnnnnnnnnnnnnnnnnnnntgccgaaacctgcacccccataactcacaaaacattgttccgcccccactatatgtgatcgcaccgcgttgaaacgcggtaaaagagtgaccccaattta

SEQ ID NO: 149303 - DNA, 727 bp, Homo Sapiens
  misc_feature (579)..(579): n is a, c, g, or t
  misc_feature (610)..(671): n is a, c, g, or t
tgagccaccgcgcccggcttactacaagtcatagtttcttaaaggcaatgtagactccgaaaacttaatgcactcttttattgttaatacattaaaatccactggcctgtgttacacttttgaatcaatctttgagccatgcatgattttgtaacatcacggtgctggtcacttggaaaaatggttcattgaattcttccaaatgaaatgcatttcattatacaaatcacatttgttaatatccccaacaataaagctcatggtggagtacagattttcggaaattccaatttttgcttgaaagctttatcactggcaacactatcagttgtttcccttgaggtgagaggctcattccattaatttccagaaaatatcagccaaatattcaagtctaaataccgtaatctgctagttctttcaattctaaagggcatgccttgaacacagccaattcagcttgcaactcaactgtgtaactgcttttcctcaaggcacccatgcttcagtgcacagcagaggggctttatgcatgcttccagttttctcagaatattataaattctcaaggtcaacttnttttttctttttgagacagggtttcactccnnnnnnnnnnnnnnnnnnnnnnnnnnnnnnnnnnnnnnnnnnnnnnnnnnnnnnnnnnnnnngattcagcggattcctcttggcctcacccttcccaagaagctgggattacacggct

SEQ ID NO: 149304 - DNA, 964 bp, Homo Sapiens
gcaaggaagcctgcgcctcttaggtctgtggctggattcgctccctgtaagcccaggtcctcccagtggtttccatgaagggcacagtcaaacttggagccggtcagcttcttatagatggtcctggaggactcggccatgcactgggtgcttggctatccaggccacagctgagcattggtcaggaccaagtccctttcttcccgaaggcgctggtggagctttggaggcccgaagaggtagtgtcggaggtcggcgagcccagtccttcgaatagttggctggattcttttcttgaagggggaaaggtccacagtctggaagtgctgcagggcctcaactgaaggagattagctgcccaggctgctctgagctagcttggctccctgtctctggctggatggtgtccacagcttcccattcttcttgggctctgaccacctctgtactcacaacacgtggctcccattcataagcttctgtggtcagagcctggagaatgccatggttcttcaactctgagatagggattcctctgaaagccagaacactcttgtccttgtcatatgatggagaatatccagcagacaatctttcaccctgtccatctcttaattcttctttactatggaaagagcaagatttttcattcatgactcaaaatcatttgttcatgtgagctttgtccttgggcccagaaagcattttagtaaggtctgagatcagaagctatgtggagagccagagatccagttgctctacctttgccttccttggcagtcactcagactaagagtaagaaaacagtccctttgtgccatccgagggtgtaggaggtttctgtgagtgctgagagaagtcctctgaggtcttcgaagcctcagctctggctggagcactcctggggccttcagtagggacagttactatcgttaaaagagctttccaaacttggggtcccgcc

SEQ ID NO: 149305 - DNA, 1016 bp, Homo Sapiens
  misc_feature (43)..(43): n is a, c, g, or t
  misc_feature (47)..(47): n is a, c, g, or t
  misc_feature (59)..(59): n is a, c, g, or t
  misc_feature (119)..(119): n is a, c, g, or t
gaccgagaccaaggccggaaaaatctccttggcgcccatcggncaanggtctttgagtncccatccaccaggtagaagccagatgcagggagggccaaggaagccctgcgccctctcanggtctgtggctgatttcgctcactgagccaatggtcaggacccaagtccctttcttcccgaaggcgctgtgggagcttgggaggcccgaagaggtagtgtcggagggcggcgagcccagtccttcgaatagttggctggattcttttcttgaagggggaaaggtccacagtctggaagtgctgcagggcctcactgaaggagattagctgcccaggctgctctgagctagcttggctccctgtctctggctggatggtgtccacagcttcccattcttcttgggctctgaccacctctgtactcacaacacgtggctcccattcataagcttctgtggtcagagcctggagaatgccatggttcttcaactctgagatagggattcctctgaaagccagaacactcttgtccttgtcatatgatggagaatatccagcagacaatctttcaccctgtccatctcttaattcttctttactatggaaagagcaagatttttcattcatgactcaaaatcatttgttcatgtgagctttgtccttgggcccagaaagcattttagtaaggtctgagatcagaagctatgtggagagccagagatccagttgctctacctttgccttccttggcagtcactcagactaagagtaagaaaacagtccctttgtgccatccgagggtgtaggaggtttctgtgagtgctgagagaagtcctctgaggtcttcgaagcctcagctcggttgtgatgcgcaggtaacagagagctcaattcatcatgacaaccagtcagacaggggctgtgagcagcctttggacagaactttcgcatagccgttaaaagagctttccaaacttgggggtcccgccgcctcggcatcccgggaattccggaccc

SEQ ID NO: 149306 - DNA, 1688 bp, Homo Sapiens
  misc_feature (179)..(188): n is a, c, g, or t
  misc_feature (419)..(427): n is a, c, g, or t
  misc_feature (439)..(501): n is a, c, g, or t
  misc_feature (503)..(503): n is a, c, g, or t
  misc_feature (509)..(623): n is a, c, g, or t
  misc_feature (1367)..(1450): n is a, c, g, or t
  misc_feature (1469)..(1638): n is a, c, g, or t
gaaggacatgtggcgcccgtgtggagggggaaaatggttctcaaccgcgcgcgaaaggtattttgtcggtgcgtttgttttagccgcaatgtgtcggctgagaagagtgtttattttggtcccctcggggggcctcgaaattctgtggggggcggaggttggtcaccaaatttgtgcgnnnnnnnnnngaaaagtaaggggttcctctcccacaaaaagtttcccacaagctcgggcagtttttttcgccaattccacgagggtggtgtaaaaagggcgcgggcccagggtccttagtcttcataagttaccgacctccgcttattgaggggcacccccttttttgacaaaagaaagagcggggtgtaccgcgtatagacttggggcccccctgcgaggggatttttcttagaagcggnnnnnnnnntttgggcccgtnnnnnnnnnnnnnnnnnnnnnnnnnnnnnnnnnnnnnnnnnnnnnnnnnnnnnnnnnnnnnnngngttttnnnnnnnnnnnnnnnnnnnnnnnnnnnnnnnnnnnnnnnnnnnnnnnnnnnnnnnnnnnnnnnnnnnnnnnnnnnnnnnnnnnnnnnnnnnnnnnnnnnnnnnnnnnnnnnnnnncaccttaactttacataggacaagagtcccaaacatacaaactgatcacgaagttaacatatacacctcagacaggaaactggtagccaacagcctgcaagtcatctactagatgtttagatgtttccaaacaagcaaggtgtcatcgtgtatcaagtgtggctgtgagtgcagcagcagaggtagcagcatcacctatttccacgccagtaacagctccctgggtgcctcaataccggcacccggcagaggcatgtagacaaaacagaatctgactcggtccctgaagctgcttctctggggttgtcatggccattagctgccaagggagagcaggtgctgctttgagctggtaggattaggggcaggctgtgtctgagcactgcacgagaaaccatgctgccctcggacacagaagacatggggatgccagctcagaccaggggcaccctggcactctcttctggctgcctcttgtccatgaagcaagaacaatggctttagaatgtttttgttaacaggagaggccgacacttggcagggccatctcataccttggtgtctgggtgaagaagcccattgaaggaagggttaatcagagcaagaggaccatggttaccgggcacaacaagcttaagaatgacgccccaaagtccaagatgctacattaactagaaactgctttgcttaaaaaaggcaactctaggttgggtgcagggtctcgtgcctataaacccctctacnnnnnnnnnnnnnnnnnnnnnnnnnnnnnnnnnnnnnnnnnnnnnnnnnnnnnnnnnnnnnnnnnnnnnnnnnnnnnnnnnnnntgccgaagaccctgtctcnnnnnnnnnnnnnnnnnnnnnnnnnnnnnnnnnnnnnnnnnnnnnnnnnnnnnnnnnnnnnnnnnnnnnnnnnnnnnnnnnnnnnnnnnnnnnnnnnnnnnnnnnnnnnnnnnnnnnnnnnnnnnnnnnnnnnnnnnnnnnnnnnnnnnnnnnnnnnnnnnnnnnnnnnncccggccgtaatggccgaattcccgggcatatgtccggtaccgtcgactg

SEQ ID NO: 149307 - DNA, 2037 bp, Homo Sapiens
ttgcctgtgtttcgtgtttctgccccgtcgggggttctccttcgcggatttgttgcggtgccgccgccggttctcgctgtgccctgccttggggccgccccgggcctttgtgggctcggcggcacagctgcggtgccgggtcggtatccagcttccctcttgtgggactggaatcccagagtcttactcaggcgccattgggtcatccctctggctgagtggagtttttccgttagtccgtggagccgatttcaaacagtgggctgagaatatgacacaggtcccacagatgtagccttcttctgttttgataagagcaataaggcctctgaatggaaatgggacatcagttaattgaattatctggcattggaagttacagcagatggccttctaatacatgtggcatgtcccccttcgtacagcagagtgataacggactgagacagggctagaagcaccgtgtcccttcttatcccaaagcctgtcaagcatactcaatccgagcagggccacagctgccctcgttctttcgctcagaggactggctggtggccttggcttcactactcatttccagaggcttagctgagatgtagtcctttactttaatctccatattcttggctttcagagtggccatgtgcagcttctccaggaaatctggcatgccactggaaaccatccaactaacacagtagcgaggaaacaccgtttggggattgtcactgtatgttagtaagtagtcaaagccattctcatcaaatgacttgtggggacggataaccatttgggattcatatgatctgaccctgacgaattctggagactctggcacactcggatgctccacagcacgcgacaccaacaccatcatgttgttttcctgatccacactataccgccgaacataaacataatcccgtgagtacattggataaggaaaatgggttacccagtgaagaacctcggaaccactaaccacatccctctcaatcacctccagcttgattaccagggcatcccatttttttctatactctgtgtccagctgaacattgaagaactgccgaggtgtcacatctgtgtaggttccaaaaactcggtactggtaaaggtgggtgcctgtaattgggcgccgccacagcttaaagtgtttcttatccatcaccatttcccaacgttgctctttgccctctgaatcttcattcccttctgtttgggcttttggttctggagggtggtgctggactccagagctctgaaacatatttgacatttcttccaaccgcttcatctcattaatagatctctgcaactcctcctcctggatcctctcctcgtcccaaacgaagacgccggctaacgccgccatcaaggcagaggcatggccaggacggccgtgcagccggcgccagaggcggccgaggagaacgcggcgtgagctctcggagtagaggcggccgtagagctgcgcgatctgctgcgcgcgccgcacgcgcaggcccgtgacgaagcggcactgattggccagaagcgccagcaggcccccgccccgcgtccccgccagccaggcggccagcagcctccgcgggagcatgccgcctcccgcagggcccgccgcgagcttccggggcccaaggaaccagtccggaggggcgcaggcggtggtcgcagcgtccccctaaatggccggccacgaacccgtctcacggtcccgcggccaggagccgccgctcatctgtctctgcagccaccgctgaggaagagtctcctctgaggggagagtcggtcatggcagcagacgccgggatggctccgcgactgctacaccaggcactcctgggcccgggcagcagaccagtcagccctgtggctcctcggcgacctccagcgggcgcccggggccgggatgcagggcgcgcggacagaaacgagacagacagctcaggcccagcagcacgcaagctcccgcgcccggacgcgtgggcggacgcgtgggtcgacgatatcccgggaattccggaccggtaccac

SEQ ID NO: 149308 - DNA, 1886 bp, Homo Sapiens
  misc_feature (145)..(189): n is a, c, g, or t
tggccagggggcagtcggtgaaagattctgcgtacgggttagtggtttggggaaagcatacgtgtggcgccgcgggggccttttggtggggtgggggagggccgaggcacgagaggagatgcgcagggtttgtcccgggaaaacnnnnnnnnnnnnnnnnnnnnnnnnnnnnnnnnnnnnnnnnnnnnntctaaaggaagtgttcttgaagggttcttggagggtctcaaggcgcccgacaatgtgtggctgattggccgtcgcgcggtccccagaaagaaaatggagggtttgctttaaaaataaagacccccgcaaaaaagccggaccaccttgcccaacccagcccagtgtaacaggttagccattaacacagaataaagaaggtcccagccacacacgtcattactcggcagagggtgtccagcctggtcggccgacgtcacagtggatggccctgcgtggctgggacacagacagggagcaggcatggcacctgcgccacgcagagcagcaaggctgagcatgaccactggaaataaataaacatggtgccgacagcatctttaaattagtaagacgttagcacaaaacaaaaaagcacaacgactgaaaatgcacttgcttgttgtggtgggttgtgcttgaaaacacctgaagcccacaagtggaaaccgctggggacgtttgtcagtggagtgtggagaaaaagggacggaaaaatcaagtcttctgagacagtcccctgccggtgggaccctggtcccctgtggaattccagcacagcaggagggggagggggaagcaggcctcagtcagcaccgcgggacacggcccctaccttctgaagtggggtccccaggctggagtggggcacacagcaccaaggatcacagactggaccccccaccaaccttctgcggaggagctcccaccccagctcagacgcccagaagagacctgcgcagtgtgaagacggaccccagcggccccagccatttcactagcagctactttccacaacagacgctggcagcccccatgctcgcccacagccgcagcagccaacaggcaagtgcgtgccgtcgagaggccgccggctccctgtatccttgaggcatgtccacgtcccagagcaggaggttggaacagaacggcatcccgaggacccctagccgaggcgggaaggtaagaggctgacgtcgtgcgtgggccccgccggccccagtgggaagcagtggtgcgtgcctccagggagcacttctcctggacccggggccgtggctgcctacgatgtccactgcctcctggattcacacagcaatgcaccaggcaggtggggcaccagctgctgtccttatttgcagccaagagaacaggcccagagggaagaggtcttgcccaacacagtcagtccacctgcctgctggtggtcctcggcctccagaccgtgggctgtcccttggacgagtggaattcgtccccaggaaggatgcaggtcctatgacagacgctgtgaagtctgtccatgtgcagcgggaagcaacggggcaggggtgaataaaggtcttcattcctcaagcaagagagacggacatctggtcctgagtccccaactgttcatcaggtttctccgggcccactggatggtgaggggtcccggtgcccaggcgggggcggcaggctccactgggcacttgctgagagcttgcggcttgagcagccgctggtcagtgaagccgtgtccggcttcgttggctcccggcttgggacactcagggccgtgccacaggccagctcctccagcccctcgtgccgaattcgccacccaggcctcgctaccttaggaccgtatagtactgcctctttacacccgtttacatctt

SEQ ID NO: 149309 - DNA, 2817 bp, Homo Sapiens
  misc_feature (200)..(208): n is a, c, g, or t
  misc_feature (467)..(467): n is a, c, g, or t
  misc_feature (565)..(579): n is a, c, g, or t
gccggcccccccaagtttggggaaagaacaagtcggggtgcagttgcccttccccaaggggagagcgcgtttttctccccttgggaggcccgggggcgtcccggatgggggtttccctttggcgaatgtggcccattgtggccttggctgggggagttgtcacgcccatggccaattgtctcccccacgggaccagggtnnnnnnnnnccccacaaggctaggactgttccccttatatttttgccaagcgcccacaagggagaaaaccagggcgcccacaaggagaggggaaagaggagggtgtccttgtggcgcccaaaaacacccaggtgtccaggtttgccccacccctggcccattggctcggggttgggtttccttttcggggccctttcccaaggaacccccggtgggggcgttggttcccccttcggggaacgggaaggttggaaaattttacgtcccnctccaaggggaaagggaatggcaagggttcccttattgaaggccaaaaccgcctggtgaaagttctgttcccaatgtggcaggcggggaagcaaaccnnnnnnnnnnnnnnnaataaaaggttcttccatttccttcaagcaaagaagaggacgggacattgtgggtcctggagtcccccaaagctgttcaatcagggtttctccggggccccacgggatggtgaggggggtgcccggtgcacaggtggggggcggcaggctccactgggcacttgctgagagcttgcggcttgagcagccgctggtcagtgaagccgtgtccggcttcgttggctcccggcttgggacactcagggctgtgccacaggccagctcctccagccacagctgagcactggagtgacgctggaccacttggctccacctctggctggggggaagggaagcccgggggcttaggagggcagagccccccgagttccaggagggatcctgcgggggggtcttcttgttctgggggtcccttggctgctgccatggaggcagcgacagctcaggaaagtgggccgcattggccaggcttcggctgcctcccatagcgaaaaaaattcacggggaacaacagaaacaaggggtgccctagttccctctctgcaggcgggtggggactgggtgagagcccaggggcctccaaacgcaggcggcagagacgtgagcagtgcttggctctgtctcctagacaacgggcatcaggaccaggacaggacatgagcgtgacagggagagcggggaggtgcctaggccgggagtgggaacccagcaccggccagaaggggctgccgggcggtacagaggccaatgcattggaggctgagggtagctgcgacctctggggcaggggacactgctgtgtggagcccagggtgggcgcccacatgggtgcctggccgcggtgtgtctgcctttcttgtctctgtttctagaagactgaaggacagggctttgtctgcatgaaccagaactcagcctccaaaactggacacagaaatagccaagaggccacactgcccagaggccaggcctggtgagctaggggagatgccggcaccccccaaccctggggctgttccctggctcaggatggtgtctcggggctaggattatggtcaggagtccatcggggcctcaagcacctcctgggaggaatcacccaccttgcccagatcccccaccccctcccagtgccaccctacggctgagtttccactctgcaaaccctaaggcagagacataagcccacagggttggttttcacgaatgtcacaagcccatgtgtctgggcagctgtccggcttcagtgcaagtctgtggtagcaatgaggttccaagtctcagtagctctgtttgcccagggtctgggcccttggggcaggagaaaggaaggctcctgccttcccccagctccttaaaaaatcatcttagtggtgtcaagttgacccaaaatttaagtttaaaaaaaatatatatataagtaaacaaaggagggaagggaaaaagggcccaaggagaccaaaagctgctcctgggcaggagcacaggcacacctgggtccctggccctcagttgagggatgagattcgtaccagagttttcacagcagcctccactgcccgacctgggagggacggcgagggactgggatgggcagctgagctgtgggttgcggggaaccggagtgggttcgaggaggtgatctactttaactggcctctgcgcatgctcctccggcagccactcggcctcctggctatgtctcctgggggaccacctgcatgagcttctgacacaggacggtcgtggagaagatgccctggaggagccacttgggcttgtttttccaccagaccccgaagaagtagacgggcagcccgctgaggatgatggtgaagccgatgccacactccacgggtgtcttccagaaggagacggcgatcaggaagaggcaggccaggatgaagaacacaggcagggccaggttcaccttgatgggccgctcaagctcaggctttctgtggcgcagccagatcatgccgatgatggccagggccacgcagagccagttgaagaagctgaagaagttgatgaccggagaagatgtccttggagaaggcgtagagcagcgtcatcacacactggaagagagaggcggctggctgagccctggggcccacgagcagggctgtggacggccgtggtggccaccggggactgtccagcctggctgggcccagctgagcaccagggaattttgttttaaaggagatacctcatctgagcacatgcaaggtc

SEQ ID NO: 149310 - DNA, 247 bp, Homo Sapiens
ctcggtacccaacatcatcttcagcgcggaaccggtgagggctcgaggaggtgatctactttaactggtctctgcgcatgctcctccggcagccactcgggctcctggctatgtctcctgggggaccacctgcatgagcttctgacacaggacggtcgtggagaagatgccctggaggagccacttgggcttgtttttccaccagaccccgaagaagtagacgggcagcccgctgaagatgttggga

SEQ ID NO: 149311 - DNA, 1387 bp, Homo Sapiens
  misc_feature (87)..(87): n is a, c, g, or t
  misc_feature (107)..(122): n is a, c, g, or t
cgcgggaataaagaaagttgaggggaaagagtcgtggggcgcaaccggcggttgtgtgttgtaaaggggggcacagggtttttggtntgggtcgttttaggtcgtannnnnnnnnnnnnnnnaccggacactatgcggtgttaggtggggtttttgtggagttggctaagagagtgtttactggcaggggtttttgcgttaaatggggtcacccgggtttttcttcaaacgtggggccttttgttaatgtcgccggatgtggttaagtctgggttttgtatgggggggccccccggcggggggaatgcttgggacccacaacacgtgggggattggtgtttgccttgtggcaatggcgacaacaaaggaaccgcgcggtgtgcgggcaatatacgtgtttcaagccggggacaaaagtggggtgggtcttctttcagaggggtttgtcccggtggggccaagccctggttgcccccctgtgttcaagggaagtttttactgtggcccttttccctgggaaggggttcttggttccctgtggcctcgcccccttttctttcaagagcccgggtgggggggctggtgttttccgggctcccggttcggggctctccccccccacttgctgaagacccggccccattgagtgcatgaaggcgatgggtagccatgcaggaacctgccagccctccagcttgcggctgaaaagcatccgaggcagggttgggggtgggcggctgagaggccccccggccagctttcgtgggctcagccgtgtctgagttgtccagcagctgggccatgcagtagatgttgttcctgagcccgaggatgttcggcctcgccatctgcagcttctccaagtcctcgatgttcagcccagacctctccaaatcctgggccttggggaggcgctgctctaagtcggccagtctgtgcaggacgcagccccgtgtggccattgagggtctgcaggaagccccgcctgcccagccccctcagggtctcctcactggggaaggccccggggcgctccctgcagtgctctctcagtttaggaacatccaggccttggatacgtatataggggtccaggagtctgctggtgtcctgcatgagatctgtctgcttctggagctggccaaggagcacgcggtactctttcgagcagctgcctatagccgccatgctcgccatgcttggaaacaggagtgcaaggaccagactgagcagcgtcctctgtgtgagcagtacccccatgctgggtgcccgtgctccggcccgcgcccgctgggggtgacacccggacgcgtgggtcgacgattggaagagaattccggaccggtgccaggctggtgtgcgctttgtgtgtttttcttttgtccgt

SEQ ID NO: 149312 - DNA, 1308 bp, Homo Sapiens
  misc_feature (98)..(108): n is a, c, g, or t
gaacgtggtgtttttggagaggaaattttttggggggcctggactttggcatagaagacggttgaggaaaaggtgtagaacaaagggcttccctgaannnnnnnnnnnctttttttagggggcctggcccttaaataccctaaagtcccagtggtagaaacctggaaccttccgaaacctccccccaaaaggagaggagagcaccggattctcagagactggcttccacttgaacaggggaaggccaaattccctgggggcctgtcaacatcaactttcagtcttctcgcccttacaggaggcctctgactgtatcactattttagaaatattgctgccatgtaagcttctttcaaggtgaagcttggaagctgttctccaagtccatcctcagcagctgaggccacaacagattaactgaagagaccccttggcttcttcctcttgacctttgacagctgaggtctctgcagagggcctgaagtacccgtggactctttctcaggtgctgagagggttggggctgaggagaccagttgttctggctggtttacacattggctatcgattccttgcagggaagcactgtttgaggtatgaggatctccagcgccttgatgcttctgtcccacttggacctcttgtgtggtgactgccatatacagatcctgcagattcatgacaaagggctttccatcaccaatgctgcatgcctctggcagtttctctatcataaattgttccaagaaggaattttcttcaaatggttctgtcttcaatcgatctcgaatcagcgtagccccactctcctggtagtcttggatctctaggtctttcatatgaagtaacgttgctagctccctcacttggcactgtaatgccagactcatgcccatcagaggacgaatcaaatgttgggagaccagggaaggactagctagcatgcagtggaaattccaatagaaggggaggccagagagctcacttcgcacccgtagaatcagtgcatctgccacacaatcacaggagaaggtagcttcgctagggtgagcagcgtccttcaacaatgggcgaaggagattatccaaatgacagaggaaagctgcaggaggagcagtgagccgcttgttcagctccttggctcgctggctgaccacactagtgtccacctgttcatgccacacctgttgaagatctgaaaccaacaaggcatagccctgcttggtgataaaaaccttggccaagagggagttctctgcaagctgtagccacgcccatggctgcatcaacaggccttgctccagttct

SEQ ID NO: 149313 - DNA, 1114 bp, Homo Sapiens
  misc_feature (43)..(43): n is a, c, g, or t
gccttgagttcccccggtaacccccaggtttctttcactttcnctcctggtccatagggccaaggactttcccggtccgcggctgttctggtggtgacttggaaatgtggggactttcttcccccgaaggacaccctggctgggctggggctccccccgggggggttccatcactaccttcctttactaccgggcagcatcagtgctgaaactctggccagtgagctggatgaggttggagtccatgggggccgtggtgctgaccatatggacgttgggagtggacgtggagcggatgcgctgtaggggggcattggctggggcagggaaggggaagtgctccgggtcacagtgctgggtgcgggggctgggaccctggggggttagcaactcattcagggggcggttcgagggagcctcatgctgtctggagcctccggacaaatcctggacactgtggtagaactgttggcggttggtactcatgtcaacacagactgtggggaccttggaggaacaatgctggtggaacttgtagccacaggtttggcaacggaagccatggaacagaaacttaaggcagaagtcacagaacgccaggctgaagaaggtcttccgtacaaaattgtgcatggtcagcgggacatcttcaaggacctcgacaatgagctcctcgccatccaggggagcaatggctgtgtcccaggcagtgaccgtctttcgtcccttgatgagtcggtagaccacacagcagtcctgatttagaccccgcaccttcagggccttgtctagagagtcgtagacactcatgccatcccggacagtcaccaccgtgcgttgcttgttgggcaggtatactttgacggtgcccactgcccgggatggctcggccccattggcaggggggccccgtggtggctccatggagccttagattttgtcaagatgggctgaggtggggctgggcaggtgccatggggctcctgtcacgccgctacagccgccgccgtctccatcttgcggacgcgtgggtcgacgatatgcaaggaattccgggccggtaggtgttgtgtgtgagtgtaatggggattcgtaaataaattaataataaata

SEQ ID NO: 149314 - DNA, 441 bp, Homo Sapiens
cgctctctctgtggggatccgctccacgtccactcccaatgtctatatggtcagcaccacggcccccatggactccgacctcatccagctcactggccagagtttcagcactgatgctgccggtagtagaggaggtagtgatggaaccccccgggggagccccagcccagccagcgtgtcctcggggaggaagtccgcacattccaagtcaccagcagagcagcgcgagcggaagtccttggccgatgacaagaagaaagtgaagaacctggggtaccgggactcaggctattactgggaggtaccacccagtgaggtgcagctgctgaagaggatcgggacgggctcgtttggcagccgtgtttcgagggcggtggcatggcgatgtggccgtgaaggtgctgcaaggtatcccgacccgcacagagagagcatcgggag

SEQ ID NO: 149315 - DNA, 1541 bp, Homo Sapiens
  misc_feature (167)..(167): n is a, c, g, or t
  misc_feature (439)..(448): n is a, c, g, or t
tttcggcgtttaaaaaggggggtccttatttcccaaataaggagttgcattcagggtacaaagcccttggacgcggcagaaactccccccgtccagggttgggctcctttcccaaaagggcattcccactgaaataaaaagctgcttatccttcagaaaacacaaantttttcttttaagctgagtgttctggggtagtcagctgcctgcgccagcttggttagcatttgtggtctgccagtagaaaggggccacttctgcagtgttccagcagaacacatcctacgggagcctctgccgtaccctccttagccattcccccagaatccccagcagccccagtgtttggaaaccatcttggtttttctttcactttcgatttttcctccatctatgccagtttctacaatacttagagactgaaagaaatgactccagnnnnnnnnnngaccaagatttgtttgactttgtgtttatttttaatgttcttatatgtttatttcaacagctcaagggtaaaaagccccccgtggcgtctaatggggtcacaggaaaagggaagactctgagcagtcagccaaagaaagcggatcccgcggctgttgtgaaaaggacgggttcgagtaagtataccatcggatgtcttgcattccggcttcaagtgcacttggtggagctgggcctgtctgagcctgcccacccgtgagtgccagcttggggtcagctggagagatggagcggtgggcaccgtcatccttcctcatcagccacatagaaggacagtggcgatttcaacccagcttttctgactgcttgtaaattgaagcccagaactggtttgccacctgtgggatcgactcagcattttaaaataggaggcagttgtgagtgcaggtttcttgcagctccgggtggccctgggctccaggtcaggagacctcagctcctgtccctgatctgtggttgtcaagccttgcagactctaaactcagcatctttatctgtcagacgtagacacgtggctcccgtggttggtcgtcgtgattggaatagctgaggtaatacacggacctccaagcactagagcagtacgaggagttctgaggaatggttatcctgcggtgcctgtggtccacagcaagccattcttatcccatccggtttacttcccacagccactttgtaagcataggcattatcctctaccccatcatagaaatgagcacaagaattcaccaagagagtaagcagctcccccaaggctcacagctggtaaatcacagagccagagtgggtgccaggccttcagactccacatccagccggaaatagattgggcagagaagcattaagacatgagacactcagcctgcctggacccagcaccctcttcccttccctgtagtagatccagctagggcgatatgtcatctcttaagtgtttgtattggtgcggacgcgtgggtcgacgatatcccaggaatgccggaccgtatcagagggtgggggagatggagtgagaggattagtttgttgtttgg

SEQ ID NO: 149316 - DNA, 1811 bp, Homo Sapiens
  misc_feature (18)..(18): n is a, c, g, or t
  misc_feature (92)..(92): n is a, c, g, or t
  misc_feature (159)..(159): n is a, c, g, or t
  misc_feature (206)..(214): n is a, c, g, or t
  misc_feature (221)..(221): n is a, c, g, or t
  misc_feature (405)..(405): n is a, c, g, or t
  misc_feature (471)..(521): n is a, c, g, or t
  misc_feature (626)..(656): n is a, c, g, or t
  misc_feature (697)..(697): n is a, c, g, or t
  misc_feature (771)..(771): n is a, c, g, or t
  misc_feature (800)..(800): n is a, c, g, or t
  misc_feature (1119)..(1167): n is a, c, g, or t
  misc_feature (1251)..(1322): n is a, c, g, or t
  misc_feature (1758)..(1758): n is a, c, g, or t
ggcgtgggaagcacattntatacgatgatttcagtatcttcgtgaaccactggtttttagacccgtaaggagtacaaagggcgaccacgcanggggaaagaggtgttgaggtgaaggtgggacggggcaggcgctacctcggcacttgacgtttcctanttttacaggttggaacgtggtttggcgggttagtagcgatcgcctannnnnnnnnttagacnagcggattagtgtccgggcatgcgccgttggggcgggagcgttactttatggatttcggtttgtggtggataaaacattaggggggggaatgccgagaggaagtatgcgaatggggtggattttaaggatttgggtggggtgtatcgtcgattatgcgcgggtgtgaatatagtatttaggatntggcatcgggtagcaccgaaatggtgggaaacgcggtgctgctgagtttagtgtggatgtttgtannnnnnnnnnnnnnnnnnnnnnnnnnnnnnnnnnnnnnnnnnnnnnnnnnnaacggaggaaagggtggcggtttatacgaaaaaacgcgccccggcgatggtggttatagcagttcttgggggtgaataggcgctgtcgttagtggtaatcttaannnnnnnnnnnnnnnnnnnnnnnnnnnnnnngtatcaggcatgagctaaaaaccgggggggttcgacggaantgattggtggcgcggggaagctgtggcatttagcgagtggggggggactattgtgagggtgtttttattacggntagagtacgtgtaactacgtgtgaataanaggcgcgcggacttcgtgtatcacgtgtgccaaccgccggtggatctacagcgacatgtggagggcggggatgccgcagcggtagctagcgctgaggtgatgtgggatggattttatatgtatagagggcggtagtatgtcggtttgttgtttttgtgtttgagtacggtgtgtgactaggcgcgggtgaggcaatggcaagacacggggaaggtgcgggcaccgcggtgaaggttcattgcggggtgcgtcatgtggggggcagcgaatagggacgggtatagtgagtcggtgggttacggtcgataggataatggtnnnnnnnnnnnnnnnnnnnnnnnnnnnnnnnnnnnnnnnnnnnnnnnnnagtatttttctgcagcatgcagcaggtgaggttttcgattatctcgttgacgctgggacaagggttgtgagcgtgagggacgcnnnnnnnnnnnnnnnnnnnnnnnnnnnnnnnnnnnnnnnnnnnnnnnnnnnnnnnnnnnnnnnnnnnnnnnncggtggtcgtggcgggggaacgtgggtctcctggagggaagcacggtggggggtaattcctccgtctggggggagttgttccccccgatagtggagagtaaactccccagacccagtgctccccgtcgtacccccgcctccgcctcctcctgcctgcctgcccgctggggcgggcgcccagccgtctgtctgtcggttcgtcccccccgcctcgggggtcccgtccccgctcccggcccctgtgtgtgtcccagcgggagacgggcctggctccccaccccacccccggtacaggagtggggacctgggagctggcgaagaggggagtgggctgagggaagattggccctggggctgttgggagaagtttcagggactccctccgcaccccggcggtgtcaccactatccggacgcgtgggtcgccgattggcagnaattccttcctattcggggcgtgcagcgtgtttgcgctttgtgaccacagacg

SEQ ID NO: 149317 - DNA, 1986 bp, Homo Sapiens
tctgaccctaagagtaaaaaccatgggccaaggttaagagatcccggatttccccggaacacgcctgaaggatggagctccggaccttgagacaatatggggaagccagtaaaggcactccaggggtccagcatgcctttcctggtgacaatgatctgcttgggctgctccttccacaggcagagatcggatcagggcggccacctcctcagctgtccttccacttagccaactgccccaaacgcttctgtcccggcccacacggacgtgtggattatcttgaggaacagctgccctgtgcgtgggttgaagatgaagatggctccgttgatgggcttggttgtcaagttcccttcaaaggtcttgtgaatagtcactctgtagacgttggtgtcatccacaaaccagataatctggttggagaagagctcaccatagttctgagaagacaaataaggctcagtgggttcagatgaatagagctgtagccccttgcggatccgttcacgtaacacatacagggcagggtttgccttcatgatcttggccatggcctgttgtatgagaggcttgctgcctgggaaccagtttccataggcactgtgcaagttataggccaggtcaatggcgatgagtacacctgtgggcgaagggtagatactcatgttgtcggtggtgtagtccaggaacttggcccgggcgtagcgctcaatgtcgtgggaatcatagtccccccagcgcaactggatgtcaatccagtatttctgggtggtggtgctgtccatcacatccttggagtcagccagcaatgagggccgggagacattccacttataggaggcaaagagcaggatatctgcacaggaagagttcatcttatatgactttcggggatggattgtctccttttgtactgtctcaatttccagtgcatcaagttcctggtcaaacacctgacataagtccataacaatgctctcatggatcttctgccacaagtgagctcggaagatctggatgagagagatcttcagcgtggggatcttgccgtgcatgaagatacccgtcaggtctagctgcacctgaaagcctacatatacattggctcgattaatggtcggggaccaccagagggtgaatctacgattgggaatctggttcagtcctgatcgctgagcattagttagcttcttccacttcatagattcctcaaagccactggccttctcccagaaaagcccctcccaggtagggaagtaagtgcccttaaagagtgtgtgttccagaatgccttccacaccgcccagggcctggatcatgtctgtacggtagttgttcaggttccagagcttcccatcatgccgctggtgtgtccaccagaacggattctgcttcaaaacctgatactgcttaaagtcagttctgacacgccagcccttatcataagccagtgtgtgccggtccttctggaagagggtattgattcgaggaatgccacgatcccatgaatcttctaggtcttctaaagtcaggcgtctgttctgagcaatggcctcttgcctcttgagtgcgtactcagcccagacccgctgagaatcaatgaactcgctctcccatggctgtatgtagcggtacaagttgggaatgagctggtcttcttcatggctcattcctgaacgaaagtgtgtgatacctacatctgtctgtttggaccacctgaggtcggattgggggatgagcacatggcccattgagagcatgccgagtccacccaactccttaggggtgtagaacacaaccggggggaaccgacttggcatcttggagttgagtccaatcttgatacgtgtctggattttgttctcacacttcaccagtaagtccaagagctcttgggtgttcaccacagcctcccgaaagtagtcataaggccaatgagagctgtattccaccggacgcgtgggtcgacgatatccaaggaattcc

SEQ ID NO: 149318 - DNA, 1345 bp, Homo Sapiens
  misc_feature (1325)..(1325): n is a, c, g, or t
cgggttgcccgtgttggggcagttgcggtagggggccgagaattggagggggggttgtgaaaaataagtagtttctcgttatgagcgcgtcacgggactcagttttttggccctcaatttcgtggtttcccccgttttggggcccccgcacgaattcccggaatgggacccgggaaaaaggccccgtgttaagcatggaaatttttcttgaggccagttgttcattggagggttggaaagaggacccatttgggggcttcagtggggcttgaagggaatgaaattccccccgtattttttcccccccgtgagcaccacgcctggaaaaggggagttggaagtttccggatccctttgatgaccatttattgggggaaagtcccagtaagtgccaccttccagtggggtcccaggcatgcccttcctggtgagcaatgttttgcttgggctgctcctccacaggccagaagattgggatcagggcgggccacttccttcagctgttttccacttagccaactgcccccaaacgcttctgtcccgcccacacggaggtgtggattatcttgaggaacagcttggccctgtgcgtggggttgaagatgaagatggctccgttgatgggcttgggttgtcaagttcccttcaaaggtcttgtgaatagtcactctgtagacgttggtgtcatccacaaaccagataatctggttggagaagagctcaccatagttctgagaagacaaataaggctcagtgggttcagatgaatagagctgtagccccttgcggatccgttcacgtaacacatacagggcagggtttgccttcatgatcttggccatggcctgttgtatgagaggcttgctgcctgggaaccagtttccataggcactgtgcaagttataggccaggtcaatggcgatgagtacacctgtgggcgaagggtagatactcatgttgtcggtggtgtagtccaggaacttggcccgggcgtagcgctcaatgtcgtgggaatcatagtccccccagcgcaactggatgtcaatccagtatttctgggtggtggtgctgtccatacacatccttggagtcagccagcaatgagggccgggagacattccacttataggaggcaaagagcaggatatctgcacaggaagagttcatcttatatgactttcggggatggattgtctccttttgtactgtctcaatttccagtgcatcaagttcctggtcaaacacctgacataagtccataacatgctctcatgatcttctgccacaagtgagctcggaagatctgatgagagcctcgtgccganttcaccccgcctcatcctgc

SEQ ID NO: 149319 - DNA, 1104 bp, Homo Sapiens
ttgctcttccctctcttgttctgttgcgtctcggttttccgctctgatgtgtgcgtcgttctcggggccttacttcgtctcggtggctctctgtgggggtgtggcgtctccaccggggtcgttttgctgggtactcttccgggtgttctggggtttcatcttgcccgttccagctggggggctcccgtgtctggtggccccgtgcctcagtggttggatgtccccgtttcgcgagtcccttttggggtattccacggtcattggtgagtttagttcaggaggttccacgttccgttctactggcccagcagccagggacacctgagcagaagtcttgtcctctcctaggtactcggtaggactcaagggggcagttggattggaccttctcaatgccatgctgggaatctatggtggcgaccatgctgagtgtgtagggcaggtcctccacagggactataggagtcttcacattaaggcaactgtccttagacgacccagagaactggtatctaggattcaggacagctgggagcacaaagcgcagagccccatctgcttccagaggcagctcctgcacatacttcagggtgactgccgccttcgacccaggttggaggttacccacattgcaagagaagacatccctggagctgctgtccccctccaataagaaggcctggtggccctgggagatggctttctcatagttggtgcgggccttcatcttgtcttgtaattctgctacaattttcttcccatccaccaaggcctcaaagctgtaaacagcagagtcttcatccatggggaacacaaagaaggcctccaaaggaactttctcctcattctcgtagttcaaagttgcagacacaccagccacaaactcgtaaatgttcacgctcacagagatactcttcagcggcactggctcccggtggagggtgagtaggccacagaagtgcaccatggtgatgcaagatttcttcctctcctgcagcccggagcgctctgagtccgtacgcgtgggtcgacgatatcccgggaattccggaccggtaccagcctgcttttttaaacacgtggttctatattcactactcgtcc

SEQ ID NO: 149320 - DNA, 1165 bp, Homo Sapiens
ggaattcccgggatatcgtcgacccacgcgtccgggacagtgaacttccaggcaagagcttccttcttttgtctcacgagtttttcttagagctcttgcctgagctggcttccctccttcagacattgacatgagatcttaagcaaacagtcccaaacctcttaggggtgaaaaaagaaacatgccacttgattaggagagagacagcagtgtttgaactacagcatctttacactagcttgtgttttgtgctacgtataccagcttccaaaattagcatctcattgagccagagaagacaaggagatctccctctgggcatctggctttgctgcgtctctagagggttaggataccaggccgagttcaggccactgctagctttctcatactcccacaggctagaccagagatgccaagtcccaacagcactgagctgtgtgcactgtgccaggacaggagggtttgtgaactgcctgtcagggtacctgttagcccctgacaactcagtggggtgaagttttggaggtcagagtctgctttcgtaggctctttagacagcacctaccacttggttctccagcgtagactcctgggagcagccaactgcagccattgccatccagtggggagatgggttagggaggaggacgggctgactcctctcctgtaataaagctgacagagttctagaggattctgcttctctagtaactagacaggtgatacgcatttgcttgccacattaagggaaaatggtgtcatttgttgcagaaaaacaatggatacattttcttctggcctaaatgaatatttatgtgcaaacataggcaactgttaaaggctggaattttcaaaagatccaaacagagacttcctgcatcttctgcctttccaacagaagcggtgatcgtctaagtatgagcctgtggcttcctttgtgcatttgagcatgctgtaattaagatgagatcagtttcttagaaaaagctttcctgaatccctctgacgttgcctgggatctttctgttgattcgtcttttctggagattgggacagagcatctgtggtccagggaagttagtcctctggcctcaattctattgtggatgtgcgtgataacgcgggcattgcgtgcctcggggatgcctcttcgtgggtaccg

SEQ ID NO: 149321 - DNA, 1542 bp, Homo Sapiens
agccagcaccccggggggcttgcgtgtgcaccacctatgtggaccctgcaccctgccccctgctgcccctgccgacgggagggctggggaggggtcttcccttgctccgtcctgggctagctgcctggctccagccccacaccggccctgcccagctggctggggtggagcgggtgctgggctcaggcctgggggtcctgcagcagccccagcagggactccgcgatgccccaggaagtagaccaccctgtgcgatgccgaaaaggggcgcgatgaccagcgcgcggcagtaggcgcccttcaggaaggccgaggggccctcagtgccgcaggatcttcctggcacagtccaggatccacagagtaggtgtcctcgttgacgcctcgctgaagtgactggagccgcgtcttcaccacatcacaggggttgacggccacagcggcggcactcccagccacacagccggccaggaaggacacgtagaaaggcgacttctcctcggacgccgggcggcccagctggttcaggttggcaaagagcgggaagtacaccacagagaaggggacatccctgagcaggcgtggccccgattcccttttagagcccggcaatgccacggctccgcagcaggtcgcgggtcagcatgggtggccttgggccgaggggcagcatggagccctccactggagggctgggcacccccccatgggccgagagctggccactgggcagccaggatcttcctctgggcaggcaatgcgccctgcatcctgcagctggatcttcagcatctccatgggcgtggtcacgatcacctggcaggtgccagcccacacagcccgccagcatctctttaagcagggtcagcttctgcccgtccttagagagctgatgtcggaagaagtcgttggctgccagcttgatggccttctcgggggtgacgagggtcaagttcacagcagctccccggtacatgccgaagtagccctcggagcggacggtcttgatgaggcagtcggacatgctcgtgtacacgcgctggccgttctgctggttctgcagcctggtcttggccaggtcgatgggaaacacgcaggtgacaccgatcagcccggcgatgccgccattgatgagcttggctggcaggctgatctgcttatcagccatttaactcgattgcacccaggtaggagccgcagaggtggacgccaggccaggcggggtggaggtggaggtggaggaggccttgagggagggtgggacccaggggggttgggtggtgctccaccttcaggggaatttccaggcgtcagcaaccgccacttctgtccggcagcgccgttgcccagggccacgcggctggctcacacccacagatcctcagggactcgtaaccttcacctcggctttccagggctgggccatccaccaccgacccccgctccgccacctgcccgctggtcctgctctcactctgccccaggcactcacctcgtgccgaattcggcgcgccgtcgacttcatactctctcgcccctagg

SEQ ID NO: 149322 - DNA, 849 bp, Homo Sapiens
  misc_feature (43)..(67): n is a, c, g, or t
  misc_feature (141)..(141): n is a, c, g, or t
agaaagcttcctcgaggggccgagggcggccgaccatgttttnnnnnnnnnnnnnnnnnnnnnnnnntctgcaaagtcacactttaatccactctctggggaggtctgaggggttcctgggcagcagacctgggtcctggnaaggaggcatgtgggggtgggcactagttgtaggggtggaaaggcaccacattggtgcccctgcatgtcgtggatgcagcgcacggactgtacttgagggtgacgggccccaaagtcgctgctgtccttgtagtctcccttctccagcaggtactgcagcccacggtagccagggtactagtagccaacccacgtgccactccgcacccacacagatgacaccttctcctggtagccatgggcgtggaagctgggtacatcgtcatctatgatttccatcttcttcccggtgaagttggggttttcatagaggatgatcttgtgctcttggctgtccactttgatgggcctcaggctgctgagtctgtcctctggctgctggtccaccagtcccagtgggcgtactcgcccttctcaaacacaaactgctcgcccttgcagttggcctgttcatagctcacccagcgtgtagaaaaaaatgccccggagaagctgagctgcacgcagctcccgcctaagcagtcagggccatagacgtgagctgttttctccccaggacggggctccaaatggtccccaagccgccgcggtgccccctgaagcgggtcctgaaggaaccggacccgctttccttcttctcattctggactccacgccccccggccgtaatggccgaattcccgggcatatgtccggtaccgtcgactg

SEQ ID NO: 149323 - DNA, 1064 bp, Homo Sapiens
ggctttgggaaaaggaaagtgatgtggaatagagtgccccccagtcaaaggggtaaaggaaatttttttaaacctttttcccccaaggaaccttttaaaattatttccctatttcttgtaaaaagggaagataaccagtgtgattgccattcaaccagattttttagggaaacatcattttccccattaaatcccacagccttttcagttaatatcttaagggaatatttcttggaaatataatagtcacctacaaattcaagacactttgaaagattaacagccagtgattcctggctcacactatagtcaattgccaaaacttcaatagcatagcagataaaataacagcaaatagcagaggtactatgctaaacacttcattagctgagctgaaagcttaagcggcaaacataggttttcctcacactcttcaaagtgaggaatccaggaagaaagctaactactggaaaaacaaataaacaaacaacaacaaaatctttccttcttgtcttccctgggttcagagacctccagaaaacttctctgctgaagactgggaaacttttccatgcgtgctcatttctcttaatcagttttccttgtttccaccgtccaaaattttctggatgactttctttagaaaaggggcttctggatcaagacaaatttccttcccgttcttcagggaggctaccacttccaccttggagcactgtgggcctatggcgaacacttgcagattactgatcattttgggatgaactccctgcgtggtctgtaaacaaacgcaacgcagctctctcaacacagcagcggcaggaccagcgctggcgatgggccctggctgcgtcagcagcagcagcagcaccaacagcgcgcacaaggagctcgaaggaccggggacacgggccgcgcggctggacaggaggctcatagtggtcaagagagcgctgcgagcggtcgcgggttcctgaactgggtggaggagcggagattggaggagcgaagattgcggacgcgtgggtcgacgatatcgcgggaattccggacccggtaccagc

SEQ ID NO: 149324 - DNA, 929 bp, Homo Sapiens
ggtattcccatcaacaggaaatccttatgaaaacatcatttcccacattaaatcccacacctttctcagttaatatcttaaggaatatttcttggaaaatataatagtcactacaaattcaagacactttgaaagattaacagccagtgattcctggctcacactatagtcaattgccaaaacttcaatagcatagcagataaaataacagcaaatagcagaggtactatgctaaacacttcattagctgagctgaaagcttaagcggcaaacataggttttcttcacactcttcaaagtggaggaatccaggaaggaaagctaactcctggaaaaccaaataaacaagcaacaacaaaatctttccttcttgtcttccttgggttcagagacctccagaaaacttctctgctgaagactgggaaacttttccatgcgtgctcatttctcttaatcagttttccttgtttccaccgtccaaaattttctggatgactttctttagaaaaggggcttctggatcaagacaaatttccttcccgttcttcagggaggctaccacttccaccttggagcactgtgggcctatggcgaacacttgcagattactgatcattttgggatgaactccttgcgtggtctgtaaacaaacgcaacgcagctctctcaacacagcagcggcaggaccagcgctggcgatgggccctggctgcgtcagcagcagcagcagcaccaacagcgcgcacaaggagctcgaaggaccggggacacgggccgcgcggctggacaggaggctcatagtggtcaagagagcgctgcgagcggtcgcgggttcctgaactgggtggaggagcggagattggaggagcgaagattggaggatcccggacgcgtgggtcgacgatatcccgggaattccggaccggtcc

SEQ ID NO: 149325 - DNA, 900 bp, Homo Sapiens
tttccatacgaaattccacaccttttccggtaagactttaaggaatgtatgatagagataccatagttatccttcaattcaatattccattgaagactaataaccacgtgattctttgctcacaatatggtcaattgcccaagggttcaataacttatcaaggtacaataacagtaaatagtggaaatactatacttagtacttcattagctgagcttgtaaacttcagggagaagcgtaggctttcccccacactcttcaaagtagggaatccatgtagaaaatggaaaaaaacggacccttccttcttattcttactgggtccagggatctccagaaaactgctccgctgaagactgggcaattttatgatgcatggtcttttttgttactcagtttttcttgtttccactgtccaaaattttctggatgactttctttagaaaaggggcttccgggtccagacaaacttgcttcccgttcttcagggaggctaccacttccaccttggagcactgcgggcctgcggggaacacctgcagtttaccaatcgttttggggtttactctcagcgtaacgcgtaaacaagtgcaacgcagctctgtcagcacagcagagacaggaccagcgctggcgaggggccccggcggcgtcagcaggagcagcagcgcgagcagcgcgcacaaggagcccgaaggacccgggacacgggccgcgcggctggacgggaggctcatagtggtcaagagagggttcgcgggttcctgagctgggtggaggcgcggagactggaggatacagagcactttggtttcctcgtgccttctgcactccctttatctgcattcatccctcccgactggcaggaaactcaagctttgggatgctggggaaattccc

SEQ ID NO: 149326 - DNA, 1565 bp, Homo Sapiens
  misc_feature (86)..(147): n is a, c, g, or t
  misc_feature (912)..(995): n is a, c, g, or t
  misc_feature (1085)..(1103): n is a, c, g, or t
ggggagcggaggtggcggcggtcggcggtagcggtggccttggttgtcttccagtctcctcggctcgccctttagccggcagccgnnnnnnnnnnnnnnnnnnnnnnnnnnnnnnnnnnnnnnnnnnnnnnnnnnnnnnnnnnnnnngtcggtgagcggcgggggtggctccagcaacggctgggcccaagctgtgtagaggccttaaccaacgataacggcggcgacggcgaaacctcggagctcgcagggcgggggcaaggcccgggccttggagatggagaattctcagttgtgtaagctgttcatcggcggcctcaatgtgcagacgagtgagtcgggcctgcgcggccactttgaggcctttgggactctgacggactgcgtggtggtggtgaatccccagaccaagcgctcccgttgctttggcttcgtgacctactccaatgtggaggaggcggacgccgccatggccgcctcgccccatgccgtggacggcaacactgtggagctgaagcgggcggtgtcccgggaggattcggcgcggcccggtgcccacgccaaggttaagaagctctttgtcggaggccttaaaggagacgtggctgagggcgacctgatcgagcacttctcgcagtttggcaccgtggaaaaggccgagattattgccgacaagcagtccggcaagaagcgtggattcggcttcgtgtatttccagaatcacgacgcggcagacaaggccgcggtggtcaagttccatccgattcagggccatcgcgtggaggtgaagaaagcagtccccaaggaggatatctactccggtgggggtggaggcggctcccgatcctcccggggcggccgaggcggcgggggcgcggcggtggtcgagaccagaacggcctttccaagggnnnnnnnnnnnnnnnnnnnnnnnnnnnnnnnnnnnnnnnnnnnnnnnnnnnnnnnnnnnnnnnnnnnnnnnnnnnnnnnnnnnnttcgtcctacggtgggagcgactacggtaacggcttcggcggcttcggcagctacagccagcatcagtcctcctatgggcccatgaagannnnnnnnnnnnnnnnnnntggaggcagtagctggggcggtcgcagtaatagtggaccttacagaggcggctatggcggtgggggtggctatggaggcagctccttctaaaagaaaatttaaaatgcctgggagtggctataggggtagctctttcccaacagcccaagtggggtcaactcctaagccccaccccctcacacacaccgcccttccctggtttttgccccttggggggagccacttctaaggctgcttaccccttgggggtgggttccctctatttgcctgccaacctctcttgtctcctccctctgaagatggactcggccccccatacacatttttgggttaccgtccttgatggacccccatttttttattaatacctgggaccttgggccggtttttatacctaccaaaagtccttggtttcaatttggggttttttggggggaaagggagggaaatgcaacttgcct

SEQ ID NO: 149327 - DNA, 1098 bp, Homo Sapiens
  misc_feature (321)..(321): n is a, c, g, or t
aagggtgcggaagaacgtttacactaattgtggccagactgcccccatacgggggccaggcctatagtgggcaaccacagcggatatcgcaggttgcacccccactgttactcggaggctgggcaccggcactccctagcatttacgaagatgcgcgagatccccgtgtgaagcgtccccaagacaatggtaaggcctcttcagtaaaccgcaacaacccccgcccacatgcccatgcccctttccaggctgtggggcccactttctcatacatttggatcagtcggctacagttgtagatgaacatgccatccagatccncggtgttcaatgttgacaccaaaaacaaaattcagttccttaggttctttaagtgctcgctgcttggcctccttgatcctcttcttgacatcggcttctctgcgcagagtgatggctctgttctggacctgtcgcaacatcaccctggagtcccgcgtgaggtctccacctaggcgtacttctaatgtccgagctttgctctctgcctcccgcgccttctcttcagcaatccttgctacgtgctctgctttcttcacctcctgctccgcacgggtcttgaaacggcttgacgtgtacttgttatcatcctggtgcttgttcaggcagcaggacgatgcctcttgttctcgcaccttgtgcccatggatgaagatcctcatccggggatcaatattgagcacagcggcataggcatggaacgagctgccgctctggcttcgtgccctctggggacgtctctgccatctggatatctcttggatttgagattatgtctagttctggctctccattatccatgagtttgagattgaagatgatcaccaatgttccgctgtccccaggaatcttcataaactgggtcatcacttcctcctcagtgcggaatggagagtacttatagatgagttctgtctcaatggcaaatttctctacattgtctgtgacaggttcccgggtccgagcattccaggtgggcagtgggactatcacttcatcaatccttcttcctccggacgcgtgggtcgacgatatcccgggaattccggaccggtccac

SEQ ID NO: 149328 - DNA, 1128 bp, Homo Sapiens
  misc_feature (1037)..(1081): n is a, c, g, or t
tgggttgcgttaattcaagcgcctccgccacggttctttgtgggcgccacaattttgtgtctacataaatgtgtcggggttataaggggaaaaaactaagcgtaagggtggcgtctaacaccgcggtccttttacggtacaaacggtgggttttaaaacggtcgccggttgacataggaaaggatcgccgcggcgccatgaagcgcggcaagggacgggtcgcggactttggtgcaccctccattttcccccggatattctggccagtttacgggatagtggccccctgcagtttgggcggatttccttcttcgaagcactttcttgcaggaaaaaggtttcgttcccttcaagcttgtcgaggcgcttttggagttcggcgcaagcaagctccgcctcgtcggcgcctttgcgcgcttccatcagcgggccctcggcgtcctcgcggctcagcacctcctcttcatagcgcgcctgcaggttgcgcagggtctcctccagcccttcgcgctcgccctggagcgcctgcttctcgttggtggcatcttccgccgccaggcgcaggtcgcggatctcctgctcgtacagcgcccggaagcgggatggctcggagtgcttctggcgcagcaccagcagctcggcttccaggaccttgttctgctgctccagctcgtgcacgcgctcgatgaagctggcgaagcggtcattgaggtcctggagctgcgccttctcctgcgtgcggatggacttgaggtcgttgctgatggcggctacctggctcaggtcgaggttctccagactgggcatcaacgatccagagctggaggagtagctgcggcgcacggacagcgaggaagacaccggcgccgagtagctggagtaagctgagcgtgcggtgctgtagccgctgcgcacgctggagatgtgcacccggggcgtctccacgtagcgccgcttgtaggaggtcgagtagtacggctcgtagctgaaggaactcatggtggcggccggtggctccccggcccgcggcggcggtnnnnnnnnnnnnnnnnnnnnnnnnnnnnnnnnnnnnnnnnnnnnntcggacgcgtgggtcgacgatatcccgggaattccggaccggtccac

SEQ ID NO: 149329 - DNA, 1078 bp, Homo Sapiens
ggggaggttgtagataacttgttccttgacaccgggattttttgccccagggccacaggttttggaacctgtaggggggggcttagccaaaagcggacccaagtttttcccgagttaaaccgttgcacttttgcaatggccaaaaccatgcttgaagggccaccgggaacccatgaaaggagttcagtgtcaactgatgaaaagtcgtataagttttgcaattccttcaactgaatcatcagtgatgaaagagaagaggatctcatgaacgcccaataaaggaatgaggaccagtgttgattttgccaatctgtatttataatctctgaagcacatttgatgagctttgagcttagaaatgagaagcttgagaattttcaggaagatgaagaaattgactggttccacagagcatccatgggtcctcggatgattcccccagattttcttattccccatttgttgtccaagcaccctgtgttttcccgggtgtgcacgggcgaaaccccagggtacaacaaatagcacagggaaggcccaacccaccagcaggtatctgggccacagccgcctctcaggaagcactgtgggctccagcagcgtgtggaggtagaggccttcaaccagcagccataagtaattggcacccacaaagtaatgcaagagaacctggactgagcggcaggaggtggacatctctgacaggtaggacatccacccattctcattgtcaggcctcttggagtaagagttgtagaagacgacgtccttcaccagtacagccagggttctcaggatgaaagaagcaaacaagttcatgtggatgtagttgcgcgtgcagtggagttttcgaagaaacaagaggagggtgagagccaggaagagggagataagagagaaggagtatcccacggtgtacatcagctgcaaggttgacagcaaggcataacgatccacgttttgcttgaagctgtggttctcggagcattcggagtcatcctgccaaatatccgtggcgttctctatcgtccggacgcgtgggtcgacgatatcccgggaattccggaccggtaccagc

SEQ ID NO: 149330 - DNA, 1076 bp, Homo Sapiens
ttaggagggggtataaccgtggttgcgtggttgccgggtaattggttgaggccgatcaatttaaattcccttgtggagtcttgtccaatttaggggctttgtttgcacgtgagcaaattgttttttcttgggggtgcgcggaaaccgatggttcttccaaggaagaggtttggggttgatatttcaactgtggcagtggtttttcaactttgggtccagcaaaggataggtccttgggtggaatcgcaccttctttttcagccaaaaatgaacaaagtggggttctttaaattgtaaatgtcttagaatccttgacggatgccatagacgggccacccctgcccctgaattgtgagtatttcatcatcaaatgatggacagcagttccacccccagcagaatcccacgatgccaattttctgggcatgacactgttgtttcagatacttcaagatagcactgatctctctatcgatcttctgggcatttcttgttttcagccactcagggaagatagaccagtcgccagaggggtcccaaggctcttgccctacaaagaagtctggaacaatggttgtgtatccatttcctgagatcatgtcagctatatatctggtattgggcaactgccagccaaatatatcttgaatgacaatcacagctttgcctgcatcaacgggggatttggtgacataagccttgatgtgctcgacttgaacttcacggcctagccctccatactcaagtctgtggccaatgtcacacggacaaggataagcttcgttagccattgcagagatttaagtcgggcttgtcccgcggcctgagactgcgctgcaccgcgcggaggccgaacccagaggaggcggcgtggcgccgggcggggacgcgagagggacgtggacgcggcgaccgaggacgcggggatcctgcgggaccagtggctccagtcgtagcctcctgggagagccaagcccggagggggcggagaggtggaggagggaggcctgggggaagagaaatctgcaaagtcggggaagcctcggccgattcacacccagcccgcacctagcctt

SEQ ID NO: 149331 - DNA, 1409 bp, Homo Sapiens
gacgcctcggtcgggcgccccagtccatccgttgcgccccggcaaccggcaggccgaggcctccccccgggcctggcctctgccccgcaggtccgcctgtatccagagatggcagaacccacttccgctgctgtgtggacttcccgctccgccgcttctatgaggtctccctcctgctccaaggggaaggcgctgcacctcgtatgtccaaagcccgactgtggccggctggttatttcgacctgcatttttgccgattgttttattttctgtccagctcatgtcatctttcatctagaaacgccctcacgggaaatggaattgctgccagacgtggtggctttatctcggcaggaggcttcccgttctcctgtttcttgttgagcctttttgcctatttcctgctgtgtgagatattcttctagtctttgcaggccttcctgggaagacagatcaacaaaacagcccagaaattcccagtattcaacccagggataccccagctcatgagctagctcccttcccactctctcaaagcctctttccgggtccgacttcttgacgtggtgaaggaagcctgctttctctcgaggtggagttttccagagcttgcgaaaatcttctgccttggctggactcaggggccctgcgaaggctctcagggtcagtaccgggtctctggggctgcctccatagcggctgacgtgagaggcctcagccgtctggtctggggaccacagctccccgatgactggagaagaagtctcttccgctctcaggaggggcacgtagtagtggccctttaaatactctctgatccgctccttcagttccacagatttatttttgcttctttcacaaattacatcttcaggtgttttatcatatttattccttgagttttttacaatcaaatggtgtgacgaaagcacgttgactacatctgcatttccaaacttacaagcaaaatgcaacggtgtgtcatagcccatcttgtcgggggtgttgaggtacaggtccaccacgtaacggatacgcttctgcagcatggcctcgtcgtcatcagggtacatcagcctcatgaagtcagggttctccaggacgtccagagtcagctggcagatggaagcctggttctctttggcagcaacatgcatcacgttgtacctgcacccttcctgcacgatagtggggttgtctcctgagcctatcagataccgggggttgctccagataaggtcagaaaaggtgtcctcctctcccttctccacagctttccgaagcttggcggtgaggtcctgcgtgcggggatttttgtaactgttcgctcgctctttgttgactgtttctgattccgacaagcacctcgtgccgaattcggcgcgccgtcgacttcatactctctcgcc

SEQ ID NO: 149332 - DNA, 606 bp, Homo Sapiens
cgagtcctcacgacacgagtcctttttttcttccaggagcctgaacatgcgccctgccagcagaggtgtgtggtagtcgggcagcatgcgctcgcacagggccaccaggagccagaaggcctcctcctcactgccatagagcaggagcaccgaggtcacgatgttcattgcctggcagtagccgatggtggggtttcggaaggcataggcagtcagcacccgccggagggcagcaatccccagctcgttctggaaggcagggtgctcgggcatggagcggtgcaggtctcgctcgatctcctctgtggccaggctgtacttcccggtggacttctccaccagctcagcatagtacccggggtgagtcaccatctcattccaggccccggagaagaggagccacagctctccccggaggctctcagggatacccttcaggaccagtgcccgcgtcttggctgtgcggtacatgcacacgccacgcccgtactcgaagaagtggatgtgccatgactcctctttcatcttctccttggcccccttggctccaaggtcctcccggacgcgtgggtcgacgatatcccgggaattccggaccggtccagc

SEQ ID NO: 149333 - DNA, 1240 bp, Homo Sapiens
  misc_feature (437)..(445): n is a, c, g, or t
  misc_feature (462)..(462): n is a, c, g, or t
  misc_feature (554)..(562): n is a, c, g, or t
  misc_feature (706)..(760): n is a, c, g, or t
cggtgtagaagggaatattgatatgggggcgacgagaaaagtctatatttgggtgaacggcaaaggttgtgctgtaagaaatgaatttgttgtgggtttacagtaggcaaatataatatattgtaccgctccgcggcggttagagaagacagtggggggaatttgtcaggttataaacaacgggtgtatgggacaaaaagagctagggggtatagcacaacaggaaaatgaacggcggggtcggggaagtatgaagcgcgcggagtttaggtggtgggtgaaagtgttggggacagacgaaaagaagcttgcacaatatccgatggtaagtttcacttacatttgtacgggatcggtttttcggacctgaatgaagaggtaaatgattgtggaaaagacggtgtgaaaagaggggggagagggggagaggtgtaggnnnnnnnnngcagtttgagagtgganggtgaaggacacgttaagattggggaaaatgcgggcaataacgggatggtaatacgcaaagaaattttaaaaggaaggtggcgaatttcgtnnnnnnnnngagggggaagacgtagtgggggaagaggcggggggtgtgcgcaataggcgaggtgagggagtaaggggaggggaaccgtttgtgcgaggagagtttgagcggttgatcgcactccgcacaccgaagggcgctgccatcccgtgnnnnnnnnnnnnnnnnnnnnnnnnnnnnnnnnnnnnnnnnnnnnnnnnnnnnnnntgtgcccgggcccgacccgtcgggcgccccacagctgcgctggtgcgcgctcaggctgacttgcagctggaagctcttcccacacgtggcgcaggtgaagggccggcccccggggggcgccgcggggtgcttcttcagccctggcttgtggccaaagcctttggtccggccagggtatttacagggttcgttgaatggccttggggcctggctggggtccaagatggcctctccgttgtccggggaggagtaaggaagcccctcgggccccgtcctcgggttcaggcccactggcggtttacaccggaaattccagccccaccggacccctccgaagagccagtccccaggaggggtctcctcctgggccacagcaggactgagctcacccatgtccctctcaggccgggcgggctctcgccggacgcgtgggcggacgcgtgggtcgacgatatcccgggaattccggaccggtccagc

SEQ ID NO: 149334 - DNA, 1493 bp, Homo Sapiens
ggtatagataatgaggaatcctgggacatgtatcagtgtatcgtcgtgcagcttggatattttaacttctagtacaagtcgtgcgtattcaggttgacattcctctgtctgcatgtaagtgcatactttgttgtttgcgatcgactctctgtgcacgagcgtgccgtttcctcactgcaggggtctcaagtgaccagtgagcatcaagtatgcactttcatgctcacgagtcaggcctccatggcctcagcaggctttgttgccagccggttactcctgacggcgctgccttctgatgagctcgtacagtgccatggtgattcacttaagtggaagttcccctgagaacactctggccagttcagcctcatgccgggtatccagccctccaccacacgggccaggtcttgtccagttgttcaatcatggtatctttcttagcggtcgcagccacagccacaggctaattgttgctgtagctcgtaacactcgggtctgtcaggctctgaatatggcgctcaacaatgctttgcggcgggtatgctctgaatccaatgcatctctcagcccctgtaaatctgggggattgacgtggaggccctggccgaaggctggtgtagcggggaatacagctcctccagggcttgggctgagctagatggagacaagtcttgcaggggccgggtgttgagcaaggtggctgtgcatatcactgtcaaaggagtcctcttcccgtctctctgagccagcgccaggaatgagaggatcccgataggctgtatcacgtgaggtttggagcatggtctggagctgaccccgaacactttccatctcaaagatatgcttagaaccatcctttttcttcaagttcttttccaatccgactgacaagcttcgactcaattcttgggcgaagccgtctaacccttcatgaggcggggaggtggagggtaaatacagctgggctcgggccgtggcctccgcctgccggctgaggcgcaaagaagcatagagctgggaggtcacttcagacgacacttggttgagcccagggggttctgatgaatcactcaggagatcctccgccccgaggggtgaactggggctgtcagctgatgttgccatgaatacagggaagagacaaccggagacagcaaagagctgggaggttctgctttagcaaagtccaggaggaaaagttcacggagaaagacttgggagaagggaggaagactccacgccaaggatccttggtgaattaaggatatcgaggctttctggttagaggaaaggtttccaccagttccaggggccatgggagtgggcaaaagcatccctttccccagctcctgggaacagcgttaagagggtgcagcgcagagcgggtgcggacagaagacctactgtgggacaacagcgctgctgaagctcctcttcccgactacgagtgctggaagctgcctcgtgccgaattcggcgcgccgtcgacttca

SEQ ID NO: 149335 - DNA, 919 bp, Homo Sapiens
  misc_feature (29)..(29): n is a, c, g, or t
aaggggaccctggttttccgggtccttgncccgtgggtttgggcagtgggtggctaaggggaagaagaagcaccggctgtgtgtgcacggacgggagcgggcagtcaccgtggggcatcctgtctcactccggtgttgtgctgctgggcatcggggcagggtgggaggggctgagcctgctgtaggggcgtaaggtgaatccacacctgcagagctctgcagcccgtcctcagagctgggaagggatcctaggcacggctcctcagcttcatctgagaggcttggactaggggctcttaggaaatcggcacgggagtttgaaaaggcaacgtgctccctttgggaggtggccttcagacactgcggctggggctgcagggccgggctcaggcactgagtttagcagcatcggcgtgcactggatctctacaagctactgttaggcaaagctttcaggttagtctgtctcagggaagacttgtgagttagaaaagccgtctgcaaggccagctggtttttgtgtttctgtcattaaagacagagcgtgtgtacacacatacacacacaacacggtcctcaattaaactgcgtcagaaaaagaggaacgtttctgtaaaagcaaagcaagctgtgtgattaggtgttccgtattcacaacatcatcactcggattttcagtagtttcactcgcccccaggattcagtagctaacgtgacagtttccatgtccttttgcctagagctcgctggctggctggtctgacagcattcctgagccaggtattccagggcacggatccgagaaacccactcaaggaccacacagacaacacacacccaagagtctgaccgacagccgtgggggctgctcaacgacgacaaaccccggggcttcctcgctcactgcagcatgatgtcc

SEQ ID NO: 149336 - DNA, 1152 bp, Homo Sapiens
  misc_feature (179)..(230): n is a, c, g, or t
  misc_feature (368)..(393): n is a, c, g, or t
tgctgggagtgctcctgttctcccttcctatcggggtcctgagcctcctcagccccaggcttcccagctccatccacagccagagcctccgaccgactctcgcctttccggatctccttgtagccaaggctcgggtgggggttcagcactacagtggggccttcttcctcggggacagnnnnnnnnnnnnnnnnnnnnnnnnnnnnnnnnnnnnnnnnnnnnnnnnnnnntgcctgccaccctggctctgcactcaggcccttctctctgtccaccagaccctgagagaggccctcactgtccccctcggcctgtgggcctgggtatttctggctggggaggctggctggagggtgggtgttggtggnnnnnnnnnnnnnnnnnnnnnnnnnnccaggggcctgattgttcccctcagccttggactcctgccatgggctccgggagggcctggggcctggctccgtctgtggcttcaccacttttctctgcctccttggaatcctctcttttctccataacatccttggatgatggctcttccaccgcctctttcagctcggcctggctgctctggttctcaagaacctctgagagttcatcttcaaaaccgctgtgtttcttctgctgatgtgccctctccttggcgccttggagagcgaggtcttggagctccttcagtaaattctgatgtctcagaatggaaaggatccgttcatctcctcggagtgtctcaaaacattcctggctgacaggcatggggctgggcttggaaagtgtgtcggagatgacctcaacgatgcatttcatcacctcggtatcccctttattcatagggctgttcacagggagcgcagtgacttgcccggcgcagagcagaagagccaggacagcggcggagcgcatggcggacccgggcgccgagcagctggcggtgtggggccgggcacctaggcaccgggcgaggggcggctggactggcggccggggtcgggctgcggtggcaccggcgcggggctgggggcgcagctgcctcggcgtgcgtccgtctgtcggtcgatcctcccgcaagctcccctgcacggggctcgagcactgcagtggcaggagcctcgtgccgaatttacacaccccaggcctcgtacctagccg

SEQ ID NO: 149337 - DNA, 676 bp, Homo Sapiens
caattccattccagcgtaagctgctgttggttttctctaatttatccattctttggttgtcactgagaggagaggaatcgataagttcttcttgaaggacgtggtactcaacttcataagcttgtaactgtttagcgatgtccatttcaaatacctgattgatggtcttttccatctgtaccaagccaaggttgggtagcgtgctttttataaagtcaactatggtttctaggttttcatgctgcagaatcaagggcttatggcttcccaacagacttaaagccactttaaatatgacctctgttccctgaagaaaaatcatatcaaagactctggctacgaatcccagcgggaactgtgaggcaaacatggtgaggaaccagggggcagcgtagaggctggggccgatctcgtgctcctccaggtgattgtagaggtctctgtggtaatcatgacgcaacctcgagagctggtacatctggatctgtaaaataatcatgtctggccgatactgtttccgcagccccatgtcaaacatcagaaacttgagcattttaaacgcctcttcctcactcatatgaagaagcaaaatgcctgctacaaagctgagaccttggcaatatcccacttcctggtctagaagtgagcggacgcgtgggtcgacgatatcccggaa

SEQ ID NO: 149338 - DNA, 1176 bp, Homo Sapiens
  misc_feature (577)..(619): n is a, c, g, or t
cggtccggaattcccgggatatcgtcgacccacgcgtccgagcctgcgtatcgtggaaagggagagtggccactatgtggagatgcacgcccgctatatagggaccacagtgtttgtgcggcaggtgggtcgctacctgacccttgccatccgtatgcctgaagacctggccatgtcctacgaggagagccaggacctgcagctgtgcgtgaacggctgccccctgagtgaacgcatcgatgacgggcagggccaggtgtctgccatcctgggacacagcctgcctcgcacctccttggtgcaggcctggcctggctacacactggagactgccaacactcaatgccatgagaagatgccagtgaaggacatctatttccagtcctgtgtcttcgacctgctcaccactggtgatgccaactttactgccgcagcccacagtgccttggaggatgtggaggccctgcacccaaggaaggaacgctggcacattttccccagcagtggcaatgggactccccgtggaggcagtgatttgtctgtcagtctaggactcacctgcttgatccttatcgtnnnnnnnnnnnnnnnnnnnnnnnnnnnnnnnnnnnnnnnnnnntctataacaaaattttaaaatatatattgtcataatatattgagtaaaagagtatatatgtatataccatgtatatgacaggatgtttgtcctgggacacccaccagattgtacatactgtgtttggctgttttcacatatgttggatgtagtgttctttgattgtatcaattttgttttgcagttctgtgaaatgttttataatgtccctgcccagggacctgttagaaagcactttattttttatatattaaatatttatgtgtgtgcttggttgatatgtatagtacatatacacagacatccatatgcagcgtttcctttgaaggtgaccagttgtttgtagctattcttggctgtaccttcctgccctttcccattgctactgatttgccacggtgtgcagcttttactcgccaccttccggtggagctgcctcgttcctttgaactatgccctcacccttctgccctcacttgatttgaaagggtcgttaactctcccttacaggtgctttgactcttaaacgctgatcttaagaagctctcttcatctaa

SEQ ID NO: 149339 - DNA, 866 bp, Homo Sapiens
cttattcagcttccctgaagtgctgagtattttctgatgtgggtttctgctcttcacagcctggtgcttcaccttcgtgagtttcctctaatactggattcacgcttgatgacttctgtatttctctgctgggttttgcatgaaaacatgcttttcttgggcattggtaggaaaagtgagaaaagggaaagcccacggagacagaggcccaagggatatgacgttgaggtaaaagtacgacatgttcgccagggataccaagagttgagccagcaccgacccttctgtgtaggcggccagcgtgatgctcctgcagtagccgctcactctctggtagtgctcggggctgaccacgctgtatatgtaggcgtagtaggccacctcggcggcggtgaccatcccatagaagaactctacaacgtgcatggtcttcactccttggccaaacaacagcagcagccaggtaatgatgaaactgataccttgcaagatgatgactggcttgtagcggacataatcggtgaggacaaacacaggcagcagcagcaccaggtaggagtatgtccaaacggggaagatctcatttgttatctctgcactggtcaggtttttatctggtccagataaatatgggataaggaatggttctgagggtctcatcatggagaaaaaaccaaataagcagaggatcacagtggggtaaatccaggaactgcttagtgaagttctgtaacaatccatggctacagaagggagtgtctgttcaccaaatcgctcacttgccgcacgcggacgcgtgggcggacgcgtgggtcgacgatatcccgggaattccggaccgtaccagcgggttggtgggcgacatc

SEQ ID NO: 149340 - DNA, 2163 bp, Homo Sapiens
  misc_feature (51)..(51): n is a, c, g, or t
  misc_feature (220)..(237): n is a, c, g, or t
tcccttttaaggaagctcccgaataatgccaaataggttcctgcccactanttgacaggaggggcagagtaccaagggactcttacttatataagaggactacaagggaaagttgtagttatatttttgttgttaaaatcccctgtgcatgtgagggcagaaagctggtgaaaccaaacaacgccaggagcatgctctgtcaaacggctcttcatgtttnnnnnnnnnnnnnnnnnntcacaagtcatcttcagagacaacattaaaacataatggaattgaagcctgatacaaaaagtagagaaatatgtacagggaattcacagcccagaagggaaaggggacctcagcaggagccagtggaacccgggctattttacacagctaattttgagacaattcatatttagcacaaaagcagttatagcacaagtaacacttccctcctctggctcccaaataaaaagactcttgtcagtcttctgttaacactgtaatcattcttcaggggagcaggaatacctaagatggtcccaaacattgacacaaattttaatctcaaacagcttcacattctgaggatgacatatctgaagattgccatgatggcagcactgataactccagaaatggggactgtgacaaaccaggccataaaaatgttacgaaagagacgccagtcaacagccttcttggaccggagccagccaacagacacaacagagcccactttacaatgtgttgtactgatgggaaggccaatatttgatgcaatcaccacagtgagggcagatgccagttcaatactgaagccactagagggtgtgatcggtgtcagatccttccccatggtctggataactcttcttccccaaacccacagaccaacacagataccaacaccaccatagagtagaagccatattggtgttgccacttttgaagaaacatctcctgtgtcataaaccaaatataaagcaaccagaggcccaatggcattgcttacgtcattgccaccatgggcgaatgacccaaagcaggctgtaaggatctgcaggaactggaagaggagagagacttcaggcttatcctggtcataccattcttctagagagccattacttccttttctgtcacctagacccatctctgccttgacactcatgtctatctcagatgctgagtgaaggtcagacacagcattgcagtaactggtgtaactgtccattcgaattcgcttcttggagtctgcattaggccatgtcagcttctccatttcttcgcccttctgttcaccttctttggcacggaatgaatccagaggcatgccacatattgccatggtataggaagtatagctattattgcgccttaagggtttgtcaccggagtctcccatgcaatctcccaccttggcaagatgtaatttatggagtagctctttgtacaggccggaatccttatgcacggtgtgatactggtagtggccactggagtttatttggttgctgacggcttgactgaactggacaaggttcccattaggcaactgcactgcaccattcacggtgctatctatgctggtttcctctttcaagtccacgctgggaagcctctctctctctggagcttcctccaaatctccaagtttgaatgagactgttctctcctccaccacagcctggaggggcacagtggcaggccctacctcagaaacaggatgcttgttttcaatatcaccaacagacaactttgtttcttcatggtcttctttcaagctattctttttttccattaaggggctttcagaaggactacactttatttctcgttcaatttttctcttcatcctgggacatacaaagaaccagacgataagggcacagaaaactgcacatcccaccgagatgaggatggtaccccacagaggaagtttgtcaaagcccagcaacggtgctccagtatacatgatggaaaagaggtttattccaactgtgcaggcatagaaaactggcaaagctcgcaaaccattaggaactggatctgccttatggaggatgaatgcacgaaccaggaagaataaaattccagacataattccagaaagcagtggggacacgaaccaagacatcactggaatagaacacattaagaaaaaatatc

SEQ ID NO: 149341 - DNA, 1514 bp, Homo Sapiens
  misc_feature (166)..(166): n is a, c, g, or t
gagcccccccaggcaggggggtgtccaaagggggccatttcggtgccccatggccccccacttgctcaccagccattgtttggggcccgaagattaaggagttgggggtccgttccattgcccccagcaaaaagcagccaggggtgctggggcctccctgttctgnttagcacgtggacaggaggcgggaaagctcccccaggactcaccccctcttttaatatagggaaacagtcccctcaagaaaagagagaaataaaaccccgggaggatctttttccttaaaatttagacaaagccttaaagccaacagggcagagcgctgaaaacggttctgcttctaggtcaggcagggggaggaactccaggcccccgagtgtctgggcttcccgggggtcgtctaatcacaatcaccaccgtgagaatggccacaaccatgatttattaggttttacagattctgcaggggactgggttccacaaacctccagacctgctcctctttcccaccctaccccaccttccgcagggagctgcatggttctacaaaatggtccactggactctgtaactgaaaagccacctggcaaggggcccactctgatgggtaccgaagggccttggagtgttctagccacagagctgtgtgcaggcccaacagagggcctggtggggctgagctagggcccccgatgggcagctttctaccttaggtccaagcttagaacctggctcttggccagtctgcggaaaaataactcacgtcctaagctacatctacaaaaattgcaaaggctgagtacagccagcatctcaggctgaacttgctgctgcacgaagcggcacggaggcaccccactgtctcgccacctcacctttcaggatgggccaaacaatgaatttcttattcttttaggagaggtctgattttgataaattatttctaatttaatatcacagtgcatatctctcctcttgtcaaaggtcttcgtgatcattttagtgagaagaaacaaagaaaagtgggacaaacaaagctgcccaggacctagtgctggcagccggctcatggtccacatgcggatctgcagtaggggtcagctgggggccctcaaccagcaccctgttcctaagcacgtccagatgtatcctcatatccatgtcccttttggcagcttcctggtcaacctgaacctacccttctgcacagcctcgggtggctgctgagggcaatgagtgagctggggccacgggtcagcaggcaggcagggaagggggcttcaggaggctcatctggttggtccgagccagagccatcacacacagcctcctcctcagctttatctctacagggacctctgcaactctgcagcggccaccatggacattctgcagaaaccaggcccactggagtctgcagcatggcgccaaaggcaggcccagcacatccatgagctacggagtgcgggcagctccggacgcggggtcgacgatatcccgggaattccggaccg

SEQ ID NO: 149342 - DNA, 1139 bp, Homo Sapiens
gggtggcagtgtacccgtcattatcagcacatcgcgtgtgagtgcaccagctggtggcaaggccagctggggtgcagacaggtcctactggaaggagttcctggtgatgtgcacgctctttgtgctggccgtgctgctcccagttttattcttgctctaccggcaccggaacagcatgaaagtcttcctgaagcagggggaatgtgccagcgttgcaccccaagacctgaccgtgtggtgctgccccctgatacccgccctctcaacggcctagggtcccttagcaccccgctcgatcaccgagggtaccagtccctgtcagacagccccccggggtcccgagtcttcactgagtcagagaagaggccactcagcatccaagacagcttcgtggaggtatccccagtgtgcccccggccccgggtccgccttggctcggagatccgtgactctgtggtgtgagagctgacttccagaggacgctgccctggcttcaggggctgtgaatgctcggagagggtcaactggacctcccctccgctctgctcttcgtggaacacgaccgtggtgcccggcccttgggagccttggggccagctggcctgctgctctccagtcaagtagcgaagctcctaccacccagacacccaaacaggcgtggcccccagaggtcctggccaaatatggggggcctgcctaggttggtgggaacagtgctccttatgttaaactgagccctttgtttaaaaaacaattccaaatgtgaaactagaatgagaggggaagagatagcatggcaattgctgcacacacggctgctccagttcatggcctcccaggggttgctggggatgcattccaaaggggttgtctgaaaacagaagttggaaaccccttccccaactggccctctttccacctttccacatttattccccgctgcccaccgggttggccccttggtctcccttgcaggatttccaggaaccaccctttgggggcttgccgtggcggtttctggccctttggcccagggccggcccgaagggaatgtcaattttggtgggcctggcccgtccgttccccacccaacccttcggggggaaccacaaagagggcttaggggtttgggcacactg

SEQ ID NO: 149343 - DNA, 946 bp, Homo Sapiens
ggggctgccattgtcaaagagaagggaaccgtatacttctagggaggcaaatacatgcaggcggtgattcagtatgggaagatagtgtcctggttagagatggaatatggtttatcagaaaaggaatcgaaagcttctgaatcatttctccttgctgcctttctgaacctggccatgtgctacctgaagcttagagaatacaccaaagctgttgaatgctgtgacaaggcccttggactggacagtgccaatgagaaaggcttgtataggaggggtgaagcccagctgctcatgaacgagtttgagtcagccaagggtgactttgagaaagtgctggaagtaaacccccagaataaggctgcaagactgcagatctccatgtgccagaaaaaggccaaggagcacaacgagcgggaccgcaggatatacgccaacatgttcaagaagtttgcagagcaggatgccaaggaagaggccaataaagcaatgggcaagaagacttcagaaggggtcactaatgaaaaaggaacagacagtcaagcaatggaagaagagaaacctgagggccacgtatgacgccacgccaaggagggaagagtcccagtgaactcggccccctcctctcatgggctttcccccaactcaggacagaacagtgtttaatgtaaagtttgttatagtctatgtgattctggaagcaaatggcaaaaccagtagcttcccaaaaacagcccccctgctgctgcccggagggttcactgaggggtggcacgggaccactccaggtggaacaaacagaaatgactgtggtgtggagggagtgagccagcagcttaagtccagctcattttcagtttctatcaacccttcaagtatccaattcaggggtccctggagatcaccctaacaatgtgggggctggtaggttttacctttggacttttct

SEQ ID NO: 149344 - DNA, 885 bp, Homo Sapiens
tgtagattgatagaggaccacctccgctcctgtgctgttggagtcccgagaatgatgcctcaagaagagaacatacagctgcccgtatatggtagccattgcgatgtctctttcggaaaggctgggtttagttgacttaggcgcagctggtaattcaatctcaaatttgggcagcttcgacatagtgccagccctaaagtggaaaaggctgcaggacattctccaggaccgtggtagacagcaagatcccggcgctctcggggcagtacatgtaccaattcacattgagattgtggctcttcaagagtttcagactccgtttctctggtaatacctggtaaaattcgattccttgatctgttatgaagacaatttcagttgaactagtccagcagaatcctagaatgttggcattcttagtcttgcactcctgtgtgtattccagctgggaattatcagggataaaattacaaaaatccacagtctttgaggtcctctgaacagccaatatcttattttctaaggaaaacttaatgcacttcacttctcctttgtcatccattctaaatgagatgggattcctatcatctgggcctttaactaccacgccagtagctccaccagatcgaacagcaaaaacctgcttgttggcctcatcgaagaagacgcagttgacagggttcgccttctcgaactgcaccggccgctcgcacagctccagatagtagtcctcctcgcccatggcgggcgccgcgcccgcggcgggggccccgggggcggtcgccagagtggagcaggatgcgcggtggagcccggcccggactgtagcggcggctgccggacgcgtggtcgacgatatcccgggaattccggaccggtaccagc

SEQ ID NO: 149345 - DNA, 2899 bp, Homo Sapiens
  misc_feature (1091)..(1091): n is a, c, g, or t
acagcagctcgggggtgagcagagctagggctgggaaggtggagtgaggacgcagagacctagagccagtgtagatgatgtggcaacatggaggcagcccagccgtaggggccagacccgggaaaaggagaagatgaaggaagccaaggatgcccgctataccaatgggcacctcttcaccaccatttcagtttcaggcatgaccatgtgctatgcctgtaacaagagcatcacagccaaggaagccctcatctgcccaacctgcaatgtgactatccacaaccgctgtaaagacaccctcgccaactgtaccaaggtcaagcagaagcaacagaaagcggccctgctgaagaacaacaccgccttgcagttccgtttctcttcgaagtaagacaaccatccgggagcggccaagctcggccatctacccctccgacagcttccggcagtccctcctgggctcccgccgtggccgctcctccttgtctttagccaagagtgttttctaccaccaacattgctggacatttcaatgatgagtctcccctggggctgcgccggatcctctcacagtccacagactccctcaacatgcggaaccgaaccctatccgtggcaatccctcattgacgaagaggtaatctacagtgagctgatgagtgactttgagatggatgagaaggactttgcagctgactcttggagtcttgctgtggacagcagcttcctgcagcagcataaaaaggaggtgatgaagcagcaagatgtcatctatgagctaatccagacagagctgcaccatgtgaggacactgaagatcatgacccgcctcttccgcacggggatgctggaagagctacacttggagccaggagtggtccagggcctgttcccctgcgtggacgagctcagtgacatccatacacgcttcctcagccagctattagaacgccgacgccaggccctgtgccctggcagcacccggaactttgtcatccatcgcttgggtgatctgctcatcagccagttctcaggtcctagtgcggagcagatgtgtaagacctactcggagttctgcagccgccacagcnaaggccttaaagctctataaggagctgtacgcccgagacaaacgcttccagcaattcatccggaaagtgacccgccccgccgtgctcacgacggcacggggtacaggagtgcatcctgctggtgactcagcgcatcaccaagtacccgttactcatcaggccgcatcctgcagcattcccacgggatcgaggaggagcgccaggacctgaccacagcactggggctagtgaaggagctgctgtccaatgtggacgagggtatttatcagctggagaaaggggcccgtctgcaggagatctacaaccgcatggaccctcgggcccaaaccccagtgcctggcaagggcccctttggccgagaggaacttctgaggcgcaaactcatccacgatggctgcctgctctggaagacagcgacggggcgcttcaaagatgtgctagtgctgctgatgacagatgtactggtgtttctccaggaaaaggaccagaagtacatctttcctaccctggacaagccttcagtggtatcgctgcagaatctaatcgtacgagacattgccaaccaggagaaagggatgtttctgatcagcgcagccccacctgagatgtacgaggtgcacacagcatcccgggatgaccggagcacctggatccgggtcattcagcagagcgtgcgcacatgcccatccagggaggacttccccctgattgagacagaggatgaggcttacctgcggcgaattaagatggagttgcagcagaaggaccgggcactggtggagctgctgcgagagaaggtcgggctgtttgctgagatgacccatttccaggccgaagaggatggtggcagtgggatggccctgcccaccctgcccaggggccttttccgctctgagtcccttgagtcccctcgtggcgagcggctgctgcaggatgccatccgtgaggtggagggtctgaaagacctgctggtggggccaggagtggaactgctcttgacaccccgagagccagccctgccccttggaaccagacagcggtggtaacacgagtcctggggtcactgccaatggtgaggccagaaccttcaatggctccattgaactctgcagagctgactcagactctagccagagggatcgaaatggaaatcagctgagatcaccgcaagaggaggcgttacagcgattggtcaatctctatggacttctacatggcctacaggcagctgtggcccagcaggacactctgatggaagcccggttccctgagggccctgagcggcgggagaagctgtgccgagccaactctcgggatggggaggctggcagggctggggctgcccctgtggcccctgaaaagcaggccacggaactggcattactgcagcggcaacatgcgctgctgcaggaggagctacggcgctgccggcggctaggtgaagaacgggcaaccgaagctggcagcctggaggcccggctccgggagagtgagcaggcccgggcactgctggagcgtgaggccgaagaggctcgaaggcagctggccgccctgggccagaccgagccactcccagctgaggccccctgggcccgcagacctgtggatcctcggcggcgcagcctccccgcaggcgatgccctgtacttgagtttcaaccccccacagcccagccgaggcactgaccgcctggatctacctgtcactactcgctctgtccatcgaaactttgaggaccgagagaggccggaacctggggagccccgaagagcggctgcaagacagcagtgaccctgacactggcagcg

SEQ ID NO: 149346 - DNA, 785 bp, Homo Sapiens
agaggcgggtcatgatcttcagtgtcctcacatggtgcagctctgtccggattagctcatagatgacttcttggtgcttcatcacctcctttttatgctgctgcaggaagctgctgtccacagcaagactccaagagtcagctgcaaagtccttctcatccatctcaaagtcactcatcagctcactgtagattacctctgcttcgtcaatgagggattccacggatagggttcggttccgcatgttgagggagtctgtggactgtgagaggatccggcgcagccccaggggagactcatcattgaaatgttcttacttcgaagagaaacggactgcaaggcggtgttgttcttcagcagggccgctttctgttgcttctgcttgaccttggtacagttggcgagggtgtctttacagcggttgtggatagtcacattgcaggttgggcagatgagggcttccttggctgtgatgctcttgttacaggcatagcacatggtcatgcctgaaactgaaatggtggtgaagaggtgcccattggtatagcgggcatccttggcttccttcatcttctccttttcccgggtcttgctcgccagctctctgctccggtcgatccgcgcccgcgtgagggattcgatccgagacataatcggacggggggaccagggaggacgcggcgcggaccccggcgtcctgtattgttgggggaaggcggggggagatcccggaaattccgggccagtaccaacagcgtggaggggggggagggagggagtatggg

SEQ ID NO: 149347 - DNA, 957 bp, Homo Sapiens
taaagggcgcaattaattataggctcgcaaaatatatgtttataaaggtttagccaatttaggttcgtctcggatggttccagcggatcctaggttccaagggaaggctttcttttggtgagggcaaaagtgccccttatccgcgggtcctgccctgcgtgatacaccggcataggttcaaataatgtagaagcagaggcctttatctatggtagaaaatctcggccttcatccagtggcgttagggcttgttccatccgcagttccgtatggtaataatctggttctgtatagggcactttgcccaactcagagcagtccgtcagccgttagaaaagatttgtgtttcactcctggaagattaccctttgagatggtatctgtatccaaattgtaggtatcctggagacgtaacagagctttggctgccccaacctgatcttcatcattaggaaagtactgtctctgaatggttaggttagagataaagccatctggcatatccttaaggaccagattctccaactcactccactcagtattcagacgtttcattaatttgaatgcatttactggatgcccaacaaatccttctggatcttttgtcgctgtactagttagccgatctaacttctctgcccatttttttatttgttctaacttgtcctcttctgccttaatatagtgtttctttgaagtcgccagatctttctcagtatggatcaaatcagtcatctgaccaattgaagtaaaaaagcctggatgagccatagactggggaagcagaattcctataattaatatataccagatcatcttggaagatttaattttacaggatcacacacctggaaagtgggacgagagggcggcgcgctcttcagcccccagtcgcctccactcggagcggccggacgcgtgggtcgacgatatcccgggaattccggaccggtccag

SEQ ID NO: 149348 - DNA, 999 bp, Homo Sapiens
  misc_feature (67)..(67): n is a, c, g, or t
aaagggggggcgccctcagtggagagttgccctggctccgcgctagaggggtgacggcccgcggaancaccccggggcattgggttcccccccacggtgaaaagtaaaagttaggaacacgggcgcggtttggggggaaattgggattgggaaaaatgcgaaactgggactaggggcgagcatcttctctgggtggggccccagagggatagatccatgtggtcgcggggctcctggattgggaagggaagccctctggggttcaacccggtacaggggtttatttctgttggggttgtgggggtgccaccaatgtgttcgtttccttcgttgtgtcccacaagcagaggaagtcatacgtagacaaagcagatgtttaggttttctgttcagccaggcttcctcttgttcccctctatcacccccagataggtgaagttcagaattaggactgcccactgcggggggaacagaccctcccctgttctgagactaaccctgccatttactgccttctctatgtagtcttggataggttgcttcactgatgcaggcctcagtcttcctcatctgtactggaaataataaaacccacatcacagtgttgtgtcaaagatcatcagggcatggatgggaaagtgctttgggaactgtaaagtgcctaacacatgatcgatgatttttgttataatatttgaatcacggtgcatacaaactctcctgcctgctcctcctgggccccagccccagccccatcacagctcactgctctgttcatccaggcccagcatgtagtggctgattcttcttggctgcttttagcctccagaagtttctctgaagccaaccaaacctctaggtgtaaggcatgctggccctggtatttctagatgaggttaggttcctgggacaggagtgtgtattgaggtggagggaaggagctgaaagaaggcggacgcgtgggtcgacgatatcccgggaattccggaccggtaccag

SEQ ID NO: 149349 - DNA, 1511 bp, Homo Sapiens
  misc_feature (54)..(63): n is a, c, g, or t
  misc_feature (68)..(79): n is a, c, g, or t
  misc_feature (258)..(258): n is a, c, g, or t
ggggggtgttttttcccacaaggccccttttcccgggggtgggtttctcccctnnnnnnnnnntgttnnnnnnnnnnnntttctttttcttttcccgggttcccaaggcaggttccattccagggcccttccccccattgagggccttgccccctgggcccttccattcaggggggccaagggtttggccccaggggaggccctgggggtgatgtttgcttttgcagccgcccaggggttgagggcttggggggttcnccagccccctttcttgggcttccgggacttctgaggtgtggtgcctgaagcagcctcttttccacctgttttaggggacaacatgcctgctgcctgttggggctttgcctcctgcttgccatctgggttatctttggcggccagagtagaggaaactgaggggctggagtctagcttgtgagtgtcttttgaggcctgggaattggctggggttagtccaggggtcatataacctgagaggagagactgggatggcgccaccacatcatcctcgctggactctgctgcggtctcctccaccagggtctctgtcctggagggggtgggacctaccagcgtgtgggctgacttggccccctggggcccttcaccatcttcctcactccctgaagaactgtcgctgctgtcctcactgtcatctgagctctcaggggctttggtggcctgctggacctcaggaagcttaggttttctgagcttgttggtccctttggcctggacggaggtgctctggggacttgttgcagggagtgttcccacagcactgtcaacccccacttgaaggctgggtcctggcaacaggaggctgagcctcactggctttctgggcgaggaccttcagggcagcctgggtcagtgggagggaagctgggttcttctttgacacctgagtggctggtccctcctgtttcttgccatctgatatccgactggactccttgctgctgctggccccagccatgctggctttgggggctattcttgggtgggcagtgggcatggtcaccacattggttctgatgccaggagtcaagcactgtgtagcggggatcacgtcctcatcctcgctctcggaggaggagctcctggctgtgctctccgaggctcgggccttcctcggggtgcttgcagcctgggcttgtgcgggtgtagcagctgggccagctggactacgattagggtcgacaaaaatcagagggggtttaatcacctgggcagaggtcacagctgccggtgcctccccatcactgtctgattcctcgctgctgctccctgagtcatcctgcttccctgcctgggcagccgaaggccctgtcttcccaggaggtgttggggcagcccctttcctgggggactccttggcaggagccaaggcagctctgatctggtgggtcttccctgaaggcttcacctgagccagcgtctccgcctcctcctcgtgccgaattcaacaccaggcctcgtactagctt

SEQ ID NO: 149350 - DNA, 1465 bp, Homo Sapiens
  misc_feature (296)..(296): n is a, c, g, or t
gatcctcgtctgctacctgatcatcctgcttcctgcctggcaagccgaaggcctgtcttcccaggaggtgtttgggcagcccctttcctgggggactccttgcagggaccaagcagctctgatctggtgggtcttccctgaaggcttcacctgagccagcgtctccgcctcctcctcactgtctgactcctcctcactgctccctgagtcctcctctgggccctgtctgggcctgagcatcctgtagccacggccttccccacagatggcacagatgctgggcccctcgccaagancggtactgcttctgggggtttctcactggtggcttcaccattggatggagacctactgcttggcttgagcagctgcagtgacaacttttccaggggctgaaattgtcccttttgctgaaggtgactctgcgcggcagctgggttgcgctttggcctgggcttttctttacctgaggttttccacctgtgctggagatgcagctgcttcctcactgtctgattcctcctcactgctctcagagtcattcctgcttttcagctttcacctgggtgactgtaggccccgtcttcccagggagtactggagcagtcccttgccccaaggaccccttgacaggcactgaggctgctttcacctggaggcctttccccacagactttgcctgtcccacggttactgcaagacctgtcttctcttcctcactatctgattcctcactgcttgaagaatcctctgctggtctctgggtgcccccagccacagctggggatgagcctgctggagaagtcgcagttcctgctttccggggggcattgggtgcccactcgcacaggggcgaccttggcagatgcagtggtattggttttctttgggcaggccttggtctgaggaatgtttcagagctggttttgcctgagctgcagtcatggctgctggtgcctcctcactgtccgcactgtccgatgactcctcgctgctctccgagttgtccatgggcttttcagccttgacctggacggctacaggccctgccttttgagggggccccttggcaggactggaggtgggtttggcctggaggatgttccccaaggacttttcctgagccggggccacagctgtgggcacctctccatcactgctgtctgatgactcctcactactgctctctgagtcctcctcccacttccccacctgggctgagggggttgcaggccccaccttcccgggtggcactgggccggcgcctttccccaagggccccatgcccatggtagaggcaggtttcacctgggggcttttccccaagggcttcacctgagctgcattcatggctgccagtgcctctctgtcactgtctgactcctcgctgctgcttcttgagtcctcctcctgcttccccacctggacctgggcggctgcaggccctgttttcctacctcgtgcc

SEQ ID NO: 149351 - DNA, 1275 bp, Homo Sapiens
  misc_feature (1141)..(1141): n is a, c, g, or t
tggagaggggatgcccccgcggggcacgcagtttttgggggttaatgggggagttccccacgaggaatgtgtgagactcatgggggccggggggtgccataattttagaaaaacttggggggagggtcttgggtatattccccgcgcttctcagtgtaggccccagtttcccccgcgtaaccatttcccaggtttttcccgggaccggttttccccctgtgaaaagcccccttcgggttctcccctggggtaggggggcggttccctgggcgcccatttttgacccaagagagggttttttcttgggccccataccaggttcttttggtcccaagtttccaattcccccaaaaggttctttaaaaaaagggaaggaggacctttccttcttttgttttaaggggccatcctattttggaccaaggggtgaaatcctccaggggagccgtcctttttacccgaagctcccagggaagcccccgtcccttccccatcctcggcatctgacttagccggattgaaagtgttagaaatgaaaattcgcagcttccgtttttgcttgatgggacgtttcaaggcctcttggatatctagccgtttcctcatgatagtctggtccagtttcctttcaaaagccaagagatccatataggcctgggattctggtaccagttcacgaatcctttgaggtagaattttgtcagccatcttctttttctttgcattgtggtttcgattttggaccgcctgctgctggacctgctggatctgctgaggggcaggtctcttgcgggactgatccatccctgactgggccaggccaggtcggactgaagggttccccccatagccagggggtcccatggaaggtccctgaggtgtcattcggctgcctggcaacatacctggtctcggataggccgctccgggcatcggggagcggtacagcccttgacccggagccgggcccattcgcacaggaggccccggagttccgcccgggcccaaggcagcagccgcgcccgcccctcctgaggctccggcgccgccgcttggagccacagactggaaacccgcccgggccgccatcttcccggagccgccgatgcagccgcacaaagaaccggaaccggaactcccnccgccccccgagcgccccccgagcgcccgcctgttcccccggccggccggccggcacgggaggctcagggcagcgcggacgcgtgggcggacgcgtgggtcgacgatatcccgggaattccggacccggtacca

SEQ ID NO: 149352 - DNA, 965 bp, Homo Sapiens
  misc_feature (700)..(700): n is a, c, g, or t
  misc_feature (814)..(814): n is a, c, g, or t
ccggttctggttctttgtgcgtgctgcatcggcggctccgggaagatggcgtgcccgggcgggtttccagtctgtgcgctccaacgctggcgtgcgccggagcctcaggaggggcgggcgcggctgctgccttgggcccgggcggaactccggggcctcctgtgcgaatgggcccggctcctgggtcaaggtgctgtacctgctcccctgatgcccggagctggcctatccgagaccatggtatgttgccaggcagcctgaatgacacctcagggaccttccatgggaccccctgtgctatgagggggaacccttcagtccgacctggcctggcccagtcagggatggatcagtccctgcaagagacctgcccctcagcagatccagcaggtccagcagcaggcggtccaaaatcgaaaccacaatgcaaagaaaaagaagatggctgacaaaattctacctcaaaggattcgtgaactggtaccagaatcccaggcctatatggatctcttggcttttgaacggaaactggaccagactatcatgaggaaacggctagcatatccaagaggccttgaaacgtcccatcaagtcagccttgtccaaatatgatgccactaaacaaaaagaggaagttctcttccttttttaagtcccttggtgattgaactggacaaagacctgtatgggccagacaacncatctggtagaattggcacaggaccgccactacccaggagaccgatggctttccggtgaagcggccgggagacgtgaatgtacggtgtactgtcctactgatgctggattacancctccccagtttaaattaaacccccgcctagctcgactcctgggcatccatacccagacttcgtccgtgatcatccaagcactgtgggcattatattaaagacaccttaagcttcaaggaccttcaccaaacgggaagtttgtccatctgc

SEQ ID NO: 149353 - DNA, 1560 bp, Homo Sapiens
cagcaatgagcgctcttggtacgccaaggccaaaggtggacaatgttgaagaaaaaggagagtcgggcctcttggtacgacgggttccccacaggggcggcgcctcaaattgctccccgcaaaccaggttgcggggtgttttctcaacgaaggagggcaggcttttttgggcggggcacacggtggttgaaaggaaaaatggctttcatcttgggggaaaggtaggttggccctgcgtttgttgtgagatttttttaagttcctcaagtggcaagtggaccgggaagccttggcctgaaggccttcggtttgaccggagttcccaaggatggcgcccggtcagcaatgcaggccaaccaaggggtaggagatccccgggctcccagtcgctggctgtattccttcactctcttcatgtcagtccagatcagagactgccagaggtggcagtaattcaggcggaattcttccgtgagcatctggtaaagcccatggtccaacaggacaatctccgcctttcccgtgccggggtgcttccgcaccagtacattgccggggtggggatcgcagtgcacgaagccattgacgaagatcatctcactatacatcttgcccaggtggcgtgagatctcattgacgtcgatcttgttcctctccatgtagtctctgtcattgacctgcccgccatccacaaactccatcaggaggacccgctccgtggacaggtcccagtggattcgggggaccttcaagaagtcaaaatgcctgagcatctgggacaccttttcagcattcctcccttcattgaggaaatccagctccaaaggcaggttcttcttggcttcatccacaagccacataaactcaaactctgggaacagctgcttcacagccagaacgagcacctccatcaggagaatgtccttcgagctctgagcccgcacctttgggtgctggaccttcacggccaccgtccgcccatcatgcagcactgccttgtggacctgggccagggaggccgtccccagaggggtgtcatcgaagctctggaacaaatcatggatctccttgcccagatcttctcggatgacctggcggatctcttgcatgctgctctgtggagcctggctgtgcagtaccttcagcgtgctggtgtactcctctggcaacaggtagtccagagcccccaggtgctggcccaccttgatgaaggtgccccggttggcacagcagagctcacagagacgcctggcagagcgaaggtgcaccttagatctcagctgcaagtactcctctgagccataagggacactcttcagggaagtgaggtagtcgtaactgatgacagccgtcgtagcaactgctctgcccaccctgacagcgccaaagtcattagggtccaagtacttgttactgtagaagtagatgccagaggcagcaagagccatgctggtccacgaagcaagcttgagagcctttctggccatgtcgccagatccccgagggaagcagagccgcggcgcccggcttccggccgcaacccggtagcggggaattagc

SEQ ID NO: 149354 - DNA, 960 bp, Homo Sapiens
tacaggggtgggaaacgcccgccggcggtggtccatttgggcagaacacggaaaaggggcacggggggtctccatcgccgtgggtgcttcggccaagtctcccattgcgaggcgcgggggcaagcttttttcacccggtagggagatgtgttagagttttgcgggcgaaaggaaaatttttttgacgtgagggaaaaagaaaaaacgtcctgtgctcccccatccctggtacttaattttgtatgttggaaacttcttggaccaagagtgacagtgctaatctgcaatatttagtaaatcccttagtacgtataaatacacacccaaaagcccttccctccttctctaatggtaactgttgtataataaaattgtcaacaactctagaaagatgaaataaagattactatagcaatcttcaattaattcatttcagaaatcaaggaggcaagtcatgttcattttaaagatgacaaacttactattttgaaaatgagctcataaatacattagaactttgaatgtgctttattatgccacaaattcccaggagatttaagaaatagtatttctgaacaggaataataatttcacaaatactaacactttattgacaatagacaagtcttttagggtagtgcacatgtacttaaaaactaccttctaccaatctcaacactttttataaattttcaggtgaaactgtagcagatcctactttatttttcaatggttagtgtaaaattctgtatgtaaaataagtacatattttgagatggaagaaggactgcatgtgaaatgctttgcctaagttgtaaggctcctgtctttacgctatcattaaaggccaaaaaaatcactgctagaaatgttccccaaaaaattcttaaacagctcagtctttaaaagtatcggacgcgtgggtcgacgatatcccgggaattccggaccggtaccagc

SEQ ID NO: 149355 - DNA, 1230 bp, Homo Sapiens
  misc_feature (66)..(117): n is a, c, g, or t
  misc_feature (121)..(155): n is a, c, g, or t
  misc_feature (1025)..(1025): n is a, c, g, or t
  misc_feature (1029)..(1029): n is a, c, g, or t
ctattccctcaattattccccccatacccccaacccgaacaccacccaactcctatagggcgctannnnnnnnnnnnnnnnnnnnnnnnnnnnnnnnnnnnnnnnnnnnnnnnnnnnccgnnnnnnnnnnnnnnnnnnnnnnnnnnnnnnnnnnncagtcgacggtaccggacatatgcccgggaattcggccattacggccgggggctctgcgctgaggtgctgggacagccatggtttcagacgaagatgaattgaatcttctggttattgtagttgatgccaacccaatttggtggggaaagcaagcattaaaggaatctcagttcactttatccaaatgcatagatgccgtgatggtgctgggaaattcgcatttattcatgaatcgttccaacaaacttgctgtgatagcaagtcacattcaagaaagccgattcttatatcctggaaagaatggcagacttggagacttcttcggagaccctggcaaccctcctgaatttaatccctctgggagtaaagatggaaaatacgaacttttaacctcagcaaatgaagttattgttgaagagattaaagatctaatgaccaaaagtgacataaagggtcaacatacagaaactttgctggcaggatccctggccaaagccctttgctacattcatagaatgaaccaggaaagttaaagaccatcaggaaatgaaatcaaggatattggtgattaaggctgcagaagacagtgcgttgcagtatatgaacttcatgaatgtcatctttgcagcacagaaacagaatattttgattgatgcctgtgttttagactccgactcagggctcctccaacaggcttgtgacatcacgggaggactgtacctgaaggtgcctcagatgccttctcttctgcagtatttgctgtgggtgtttcttcccgatcaagatcagagatctcagttaatcctcccacccccagttcatgttgactacagggctgcttgcttctgtcatcgaaatctcattgaaantggntatgtctgttctgggtgtttgtcaatattctgcaatttcagccccatttgtactacgtgcgagacagcctttaaaatttctctgccctcagtgctgaaaggccagaaaagaaactgaaagtggctgcctggagataaatattttccccatcctttagagctggtaatagaattattataccggatctttgttgggaagatg

SEQ ID NO: 149356 - DNA, 910 bp, Homo Sapiens
cttttggggcccttgggacggctttccttggaaggacccaaaagggtaagcgaaccccccgggttttaaagccccatgccccaggaaggagggggggtaattggcttttttcttccactggacattaaagtctttcggctaattcccttttcttctttccattttttccttctagagttgaaaatgcagaattccatagccagccaacagcaaattcctgttctgttctgcggcagcatagatggctggccagctttaggggaaatttcaattattgcattgtcctcctgcttcatgccccctccaaggaggtaactcattgttgctttaaaaagttgttcagcattttcaagctgaccccgtataaatgctaagttggccatcaaatcataagtgtaagtgatggccttcttgttatcagtctgataggcgagacgaagagcgtcatgcaaaattaactcagcctcttctggctcatctttcataatgctcaacttggctcgcttcagcagctggatgatctctgcctcggcctcgtccgccccgtcctcggcagcggccccgtcggctccctgctgctcctcctcctctgccgcagcgggcctcgagaaccaggcgagcgctgccagcagcggcagcaggcctgggccccggccgtgcggcgcgactcgggatggcggcacctgcacctcgggccccggacctcctgccagccccgggagcaggcgcgcggagcagccccggcaccgccgccccgcggcccgcaggaagcctcggcccaggctccagctcaggagccggaacatgctcccgccgcgtccgacgcgtgggcgacgcgtgggtcgacatatcccgggaattccgaccggtaccagcctgctttttgtacaactgttctatattcacaccc

SEQ ID NO: 149357 - DNA, 835 bp, Homo Sapiens
  misc_feature (166)..(166): n is a, c, g, or t
aggagcttccagggcttttcttcctgggttgcctttcttgtgcttggtgccatgtgccacggaaggagaggggccctgcgtccccctctcccgacccatgccctttgcgccctttaccccttaaagcggggcatcgtactggtccaggaactcccgaatgggcccnggcagctgggtgactttctcataggagtccaggtggccgttgacggtcttccgacagagatgctgaagagtggccacgttggaggagaggggccggctcaacaccagggggatcttctcgcccccggagtagatgtaataggctcttctggggggactcccagggagtggctgggcagacggctgctcgggcacctcggaggagggttcagtaggtggcgaggggaaggagggggctccagggggcggcatgtagtggtgcaccagcttgagcacgcagtcgaagcggggcacgggctgcgtgctccggggatcgctctgcagagagaagctgcccccctcacactggatgcgcaggttcttggtcccagactgggtcttgacgctgagcgtgaagaagtggcgctggtccgagctgtcgcggatcagaaaggtgccggcgggctcggcactgagcagcaggttcgcctcgccgccggtcactgcgctccagtagaagccgctctcctgcagcttgcgcactgcgttcaccaccagctggtactcgctcttggagctgaaggtcttgaggcgcaggctggtgtccagggggcggctcatcccggcggcgggaaacttgctgtgggtgaccatggcgcacggagccagcgtggatctgcgcggcggcggc

SEQ ID NO: 149358 - DNA, 903 bp, Homo Sapiens
ttttaggacccatggcttttcggagctctgaaaatctgtcagccaccatatagcgaccgcgccagatttatccttctgctgcttgtcgaagtgtaggcatcaccaaagtctcaagtccatcctgagacaataactgggcaatactgacacaagcttccacagcaaggaggcgcactgaatcctgttcatctgaagctagactagtgaacagtggaacaatttcacttttcacactgtctaattccaaaacttttgcaaattcacccaatttggaagcagcagcacgtcgtaccattggtgtgtcatctgagcacaaggaacggaattgctgtctgatttctgctttaacagcatttgatgccctgggatagcaaacgctgaacaaaccacatgcagatgtgcgagaggtgaaccaatccccacttgctaagcgtttcaccagaggtacaaaataagcttccagagcaacaggagtatgctcctgggagatctgtctcagggactccacagccttgtcacgaacaacagtctcttccacagttgccagattttccaaaggaggcagcagacagtgggcaaagtcaggacctcccactaggccagtgaaatttcccagctgctcagcaagagctaatagtacctcatcttcatcataaattgtatctgtaagaaatggcaacaattcacttcgggtcctttctactccaagtgctagggcaattgttgataacttcttaatactgttgagtcggagctgcacgtcttcattgcggagctcgtcgattaaaaccgcgatcgggtatagcgaatcatctccatctccacccgctgctcctgggccggtcccgagctctgcggacgcgtgggtcgacgatatcccgggaattccggaccggtaccagc

SEQ ID NO: 149359 - DNA, 951 bp, Homo Sapiens
ttttgggcaaattttatttttccccagcctgggcagtaaaagatcccaggggtcccatctccatcaaaggtctgccaaatgttgggtgtccaaccccccatcatattttgaggtttttcccaatatagtactgacagggaagttttccatccaaaattttcccatatttcaaactggaaagtaactagtggtggccattcaatgtcgtcaggaataaatctgctgtaaaatcttcagtcagatcaataaatgcatgagatatgtggaattcgcattttacttgtagtggtcaatggtggatgccatgataaattccctccttatagtatctgtggctggttggattcatttgtgataccaaaaatatcaggaattagatcaccattgaaatccataattagtggctcatcttgaaaagtcctattgagtatggtcatattgttaggatctaatgtttgattttgtccccagaagataacagctcctaattcactcttggcataatttttgggaagatatgtcagaaggacatccatttgagaatctccatcataatccccagggactacacttgttatcaatgcactgtgattcttgaaagatacctttactttgggtttaaaatagggtgcattctggtctgccaaaaagacgattaagtcatttctttcccgcagcacgaagagatccgtactgcttgctcggagttgaggtccccgaaagccgcaagggtgccccaggcctcggccccaaagagctcggccgtgacgttgtgcagcgcccgcgctgggaccggcccgactcccagtagtgcaagccctgcgaggagcggcgagaagagggcccaggagctcgggagccggcccgccgccgccatggcagcccggacgcgtggcggacgcgtgggcggacgcgtgggtcgacgatatcccgggaattccggaccggtcc

SEQ ID NO: 149360 - DNA, 1007 bp, Homo Sapiens
  misc_feature (133)..(142): n is a, c, g, or t
  misc_feature (824)..(862): n is a, c, g, or t
  misc_feature (911)..(943): n is a, c, g, or t
cgaggggaagcccacccccatccacggatcccccccaaattgtgaaatccaataggccagttgggatttccccaggttggaggatctgactccccctcgggatttaggtcccacttcctgaggagaaatgtcnnnnnnnnnnccggggggcccacttaggggagagacttttgtaaccaaaaagccaagggcgaaggactttgggcggccggtatttccgtataaaaggtcttctctgggttgggggattcaggcatctgaggttgccagcccaggatatgagcgtctcccctaattagctgttgttgaaccagtggttagttttgagtatttgtatttaacttgatgttccagtacttgaaagcagaaaaacttcacatgatcatcactgtatgtcctctgggctagagcttctgcacacacctgccaggcatctggggaaatttttaactgctcaaaataggccagggccctttgtctaaagtctgaatcagcatttggatttagccctaatagagcctgttcatccatcctcgctgttatacttgtagttttctggttgtaataggcgtgccctctgatcccacagaagaatttataaacatcttccctatcactccatcccgcctcccagcctgcactccagatggtcagccagcggagcggagcggcgcggcacgcagagagctgggagagcggccctcgtccttgtcgccgtagtcctccgccacggccgcagctacaacgccagagacggtgctggccgggaccgcgcgcctctagtcgctctgcgtcccctggcaccttctcttgcgtggcgccgnnnnnnnnnnnnnnnnnnnnnnnnnnnnnnnnnnnnnnngggcggggtcggcgccccaggaagggaaagagcgcgagggccggctaannnnnnnnnnnnnnnnnnnnnnnnnnnnnnnnntgagtcagcgcgaagccggacgcgtgggtcgacgatatcccgggaattccggaccggtaccagc

SEQ ID NO: 149361 - DNA, 1053 bp, Homo Sapiens
gggaagaaagggggagaagaaaagaaatttccaccaccttcctgacaaaagcagcctttccactggcatgggcttatttcttctgccagcccactgagtcccaaatatttttcccccatttaaagaagtttgagtgaatgaagtcggggagagtggaagccacaagccaagaagtcaaaccatagccttctctttacccaacccagcccctgtgtccttaggagcagctggcttcatccgtcaccttgacactcatagtaagcaacatctttctttaaaacttttcttgttcttgctgcttttcttgcccattcttgtctttgttttctgacatcttcctttgttctgatttctctcattaggtcaaagaacaccttgtccacgttggcccgggtcttcgctgacgtctccacgtactgcacgccccactcttcggctttactcctggcctcctccacaggcacctgcctccgctcctctaggtcagacttgtttcccacgacgagcagtggaattttatcttcttcagccttcacacggagaatctgttccctgaattcggcagttgctgtaaaggattcatgttctgtgattgagaacacaagaagaaacccttccccactccgaaagtagttatctcgaatggctgcgtagtcctcttgcccagcggtgtccagaatatctatctgaacttcttccccatcaagaaccactttctttctataactgtcagctttggtaggttcatagtcttctacaaactcgtcatacatgaactgaagcgtcagggctgacttgccaacgcctccgctgccaaccatgatcaccttgtggagggccaaggagctctggcccttactcttgttggcagccatctcgctggtcttctgaggctgtgacacacagatgacccactgaagagcagggaccagtcccgccgcctccgccgtccgcacccggcccgcagctccgacgcgtgggtcgacgatatcccgggaattccgaccggtaccagcctgctttttttacaccactttctatattcacaatagc

SEQ ID NO: 149362 - DNA, 906 bp, Homo Sapiens
  misc_feature (71)..(72): n is a, c, g, or t
  misc_feature (74)..(74): n is a, c, g, or t
tttcaaggctttctttttttctgagtcaaagccatctttttctctggggctttcatcatgtaacagaaggnnanttccatggagaaaagcctaattgcataggggtctttctattttaggtttggtcaaacaaacgagcagtgcacaccttaacactgtcaacaactttacttttaaaaagctgaatatctttttcatacagtactgcagcctctgggttcagggggcttgctgtatcaatcttgtagaaaactctccttgcatacattaatacctgccaaatatgattatggttccgcctccattttgcaaatgctctcttcacatccagctcacctgaggtgggatcaactagcgggtgaaagacaggaatatcgaacaccaagcgtggacagtcaccatctggatagttatcagggatgtaaactgtaaacttaaatacgccatcttggtaaagtccatgccgtatgaatattactccaaaccacattaatgcagagcgataagatggctgcacatagacgcctggtagcttctgcttcacaaccaaggtaaattctgcaagaagagagtattccaggtagaagggtccataggacgcatgcgtgccatttgttgactgtgctgctggggcaggagatgtaggcttagttatgggcaaagcatttttgggaatagaaggcagctgtttctttggtgcagttcgtggaggactggttttcacgtcccctgttaatgtcttctcttcaccttcagatcgtttgcgtacagagcttgtagacatgctccagaaagggttcataacgtgtattccaaacaaagaaagtcagtggtgtatcatccaaatcttctgtcttcgcggacgcgtgggtcgacgatatcccgggaattccggaccggtaccag

SEQ ID NO: 149363 - DNA, 808 bp, Homo Sapiens
  misc_feature (188)..(196): n is a, c, g, or t
ttgtgggttttccagggtgactaagtttttcccctacattgaaaagagaagttgcccaaaaggtgcacaggaaatcatttttttaaagtgaatatgataatatgggttccgtgcttaatacaaactgagacatatttgttctctgtttttttagagtcacctcttaaagtccaatcccacaatggtgnnnnnnnnntagaaagtatttgttctacctttaaggagactgcagggattctccttgaaaacggagtatggaatcaatcttaaataaatatgaaattggttggtcttctgggataagaaattcccaactcagtgtgctgaaattcacctgacttttttggaaaaaatagtcgaaaatgtcaatttggtccataaaatacatgttactattaaaagatatttaaagacaaattcttttcagagcttctaagattggtgtgggcagatttttaagagcctagagtttagtcttagagaaagagtgaggagatagtaaggttagatagagccactgagtttcaagaaaaaaacatactactaagaatcccatatgttataatttaaagcctttacttttggcctcatgctgctaggtgaaagagtggttgttcacaggacttgtattttccaagatgattaaagatggtaaaatactatctttcaatgttatcaaaaaatggtagcaacttatacttctatttcaaagccatataaatttaacaaaattaaagtttgtgggtgtttgcggacgcgtgggcggacgcgtgggtcgacgatatcccgggaattccggaccggtcca

SEQ ID NO: 149364 - DNA, 772 bp, Homo Sapiens
cccataggaccattgcatcctgagcacccatcgcagggtctgtatatccttcctctctggtccctggaccaagttcatgagagtatctctgaagtgtcccgaggtctctgaatacatgtcctcttggagcttattgctgtattgcaagcagtaggcttctcgcatctggaaaatttctccatttgttcttgaagctagtatttcaatgaggcaattctcatcagtgcctactcccttcatggcatgccagagctcatgagcatcatacagtggtggtgggtacatgaggccagccatcacatctttgaagtgatccgaaagctgctccctcagatccccaatcaggtcccggccatacatgctctggtatgcctctgcaatcatcatcctttgtgcattgcagcgttgagtcagaatgttgatcagcatgtctttgtcacagtcaaatccttggagtgctcctcctagcatttgggcatccattatgggattgaaattgggagctgggaagatggttccttgcacatagtctccacaaaacattttgatggtaattgttaacctcagggatgaaaatatttgatcgattgcataaacttgtttcactgtgaagccagaaagaattaaggttcactgttaaatcaaatgtaaatatgttcactgttcacctcagactcaggcaagacggacgcggggtcgacgatatcccgggaatccggaccggtaccagccgtttttttaggggggggttgggtggttcatatgtgtggtc

SEQ ID NO: 149365 - DNA, 1297 bp, Homo Sapiens
  misc_feature (116)..(116): n is a, c, g, or t
aggaaattctgcctggccttaaggcctcctgtcccccctttgaaagttttgatgggagttcaaaaaggtgacttcttctttggttctggggaacaacccaagccccaagtccttcnggaaagccgcttgctcagtccaatgagcctactctttgcagaggatccaggggaactaagggtatgcctggggaaaaccccaaccccaaaatgagccagccagacagcccttgccatcagctctctaggcacagggtcagccattccagggccccaggctccaccatttctcctgactgctctgcaggaaggcctctcactcatttctgaaacaaaatgagagaccagacttcaagctctggccattaaaaatggccaggtcatcattttcatgttggggtaagctgccttaattatgttgattagaaaggccagaccacaataaaggggtcattctttcatgccatcctttttctttcctccagcccacaatttcacctcaaccacttgggaacacatacaaccaaagctgggaggtaaaatctttaggactttggtcatgctgagccctctataacccaagtgctgccagacttctttgaaaacctagtgtcctcccacgtaatatacaatacagtacatttcatggcattccatcacttataataagaatggatgccaaagaacaaagccaaaattagctgacaatgttataaaacaaaagcaaagtatacacactctatacacacgtatacctgcactcagcctgctgagtatttaaataacatccccaaatatccatatgtggactttggctggcctagagactttcaagaatattttgcaccttttctcaaaatacttttttttaaagaaaatgaactgtaacacaactactcatctccttacttatatcagtccctcccttccaccctccccactggggaaaaaactgttggggaatctgctagagaactggtatctgacagcaaactaagccgtggggtaaactaaaaagggactctgggtagaggaaaaaaatctaacctcccatatgtgaatgagagtatgagctaatacttcccaagaatgctaggaatgtgaccttcataatggaagcacagacttatgattatagttagagtcaaaagaaaacagtctggaaagggaactatataagacttttcctaaaatttcatacacaacagacttacaatgattttccagcaagtagagagtacttacccctcctttcttgacaccggacgcgtgggtcgacgatatcccgggaattccggacc

SEQ ID NO: 149366 - DNA, 1461 bp, Homo Sapiens
ccggggtctggccgcgttgggtgccgggcgcccgtggtgcggggcgccctgcggggggctgttcgtgttgtgcgacagctgggtgcctcagtgcggcctcccctgcagagcagggctcggtggggaaccctctgttctccaaacggccgcctcccaatgtgattcccacactctgttcggcaccacgtgacctggttaggatcttagccacctccggcctgctgtcccacggaggaagtggcgccagcgtccttgcgtggattgtgcttccctcgattggcgtagcaaccaaggtggaatcgtcggtactgttttcaccagcgtgatgccgtgaccctgccgccctgcacgggccgtccagccgactcggtggattagatcttggggacccgggggtgttgtggttgatgaccaccctgtaccggtagggatgtccagcccccgggagggccacgtctgttgcgatcaggatcccggtagatgctggacttgaacttggctagggcggcaaagcgttctttctgcttcatcatggagtgcagagccacggtggggaagctgaatttgcgcagcatcatgcacagaatctggcaggtcttgcacgtgttggtgaagatgataatggaccagtcctcgtgctcatcctggaagcgctggatcaggtggaccaggtaggcgtccttgaccttctcaggcaccagcaggtagcgctggtccagctgctccacggtgctcaccggggcctgtgcttcccagaagaagggctggttggtggccagaccctgcagctcccggagtgtgtcggtcagcgtggcgctgaacagcagtgtctgcctgcgggccggcacagccgccaggatggcctccaggtccacggtgaagtcagtgcagccctgttccagcagccggtctgcctcatccatcaccaggaagcggatcttctttatactaaaagtgttggagctgcgcaggtgatctgccaggcgccccggcgtggcgatgaccacgtgtggtttccgagagagctccagcgcctgggccaccatgtccatgccaccgacgatgatgcagtctttcagccctagaggcttccccaggacccggaactgctctgcgatctggtaggccagctccctggtgggtgtcaggacgaggcagaagatgccatagggatcctcagacagcttctgcaagatgggaaggacaaacgctgctgtcttcccactgcctgtcttagcacagcccaagcagtctcgaccctccaggatggcggggatgcagccgagctgcacgggcgtgggctgcttcaaacccagctgccgacattgttccacgagccacgatgacagcccgagctccgcgaagcctgccatccttgtggccgcttgtaggggccccttgtagggcccgtgtgatccgccgcctcgtgccgaattcacacacccagcctcgtacctagca

SEQ ID NO: 149367 - DNA, 1382 bp, Homo Sapiens
ggcgcagccggttccgggttcggcgcggggcggggatgtgaatcccgatggagcggcccgaggaaggcaagcagtcgccggcgccgcagccctggggacggctcctgcgtctgggcgcggaggagggcgagccgcacgtcctcctgaggaagcgggagtggaccatcgggcggagacgaggttgctgacctttccttccccagcaataaactggtctcgtggagatcactgtagaattgtagtggatgaaaaatcaggtcaggtgacactggaagataccagcaccagtggaacagtgattaacaagctgaaggttgttaagaagcagacatgccctttacagactggggatgtcatctacttggtgtacaggaagaatgaaccggaacacaacgtggcatacctctatgaatctttaagtgaaaagcaaggcatgacacaagaatcctttgatacctcaggtgcaggtgcatgggcgaggggccgatccccgggtccctccgtcgtcgcccgccactcaggtgtgctttgaggaaccacagccatcaacatcgacgtcagacctcttccccacagcctcggcctcttccacggagccttctcctgcagggcgagagcgttcctccagttgtgggtctgggggtggtggcatctcccctacaggaagttggtccctctgtggcaagtgatgaagtctccagctttgcctcagctctcccagacagaaagactgcgtccttttcgtcgttggaaccccaggatcaggaggatttggagcccgtgaagaagaaaatgagaggagatggggaccttgacctgaacgggcagttgttggtcgcacaaccgcgtagaaatgcccaaaccgtccacgaggacgtcagagcagcggctgggaagccagacaagatggaggagacgctgacatgcatcatctgccaggacctgctgcacgactgcgtgagtttgcagccctgcatgcacacgttctgcgcggcttgctactcgggctggatggagcgctcgtccctgtgtcctacctgccgctgtcccgtggagcggatctgtaaaaaccacatcctcaacaacctcgtggaagcatacctcatccagcatccagacaagagtcgcagtgaagaagatgtgcaaagtatggatgccaggaataaaatcactcaagaacatgctgcagcccaaagtcaggcggtctttttctgatgaagaagggagttcagaggacctgctgggacctgtcagaacgttgacagtgagttcctcaaacattaagccagcccctaccttcttggggccgggcagtgggtccctggaattacaagaaaaggccaggggggggcgcaagcccttctccccacctggtgcccaaa

SEQ ID NO: 149368 - DNA, 1122 bp, Homo Sapiens
cgtttaggtgaatatgaacagtttgtacaaaaaagcaggctggtaccggtccggaataccgggatatcgtcgacccacgcgttcgtctcaccccccctctcccaccataccctgcccaacggacagcctactgtgctcacatctcggagagacagctcttcccacgaggagacccccggctcccaccccactgtacggacacggagagtgcaagtggcctaggctgtgagaccctgtgtgaagacctgggccagtttatcaaatcatctcaacacagagcacgccctgtgatgaccggagtacagcccagtgccgggtacagatgcaggtggtgcagcagctggagatccagctcgccaaggagagcgagcggctgcaggccatgatggcccacctgcacatgcggccctcggagcccaagcccttcagccagccagtgaccgtctctgcagcagactcattcccagatggtctcgtgcaccccccgacctcggccgcagcccctgtcacccctctacggccccctggcctgggctctgcctccctgcatggtgggggcccagcccgtcggagaagcagtgacaagttctgctcccccatctcctcagagctggcccagaatcatgagttctacaagaacgccgacgtccggccccccttcacctacgcctccctcatccgccaggccatcctggaaacccctgacaggcagctgaccctgaatgagatctataactggttcaccaggatgttcgcctatttccgcagaaacactgccacctggaagaacgccgtgcgccacaacctcagcctgcacaagtgcttcgtccgcgtggagaacgtcaagggtgccgtgtggactgtggacgagcgggagtatcagaagcggagaccgccaaagatgacagggagccccaccctggtgaagaacatgatctctggcctcaactatgggagcactttaatggcccagctaacccaggccgccccttggcccgaagagccagactttcccccccctccctcaaaaaaacccctggggaattggcttgaaaccccctggggcttcccgccccaaagcaaggccttgtgcttgggccccctttcgaggcccccacccgt

SEQ ID NO: 149369 - DNA, 402 bp, Homo Sapiens
ttcctctgcctctgctggctcctccttcacctgcacctggtggctgtactggggcggggagaggcgaggagggctgctgctgccgttgctgggcagcggctccacgggggcacccacgtcatcgtggctgaggggcagcaggctgctggcggagccagggttcagcatgccagggctgttgaggagggggaagctgctctcggccagggcggcctggtagctggcattaagtgctccatagctgaggccagagatcatgttcttcaccagggtggggctccctgtcatctttggcggtctccgcttctgatactcccgcttcgtccacagtccacacggcacccttgacgttctccacgccctcgtgccgaattcaacacccaggcctcgtacctagtctag

SEQ ID NO: 149370 - DNA, 1001 bp, Homo Sapiens
acccgcaggttccgggggggttgcccccgagacccattcctggggaatgagttctgctgcaggagaacggttacctggcctggcttgaaagggccttggggcttccgagggccgccatgtccaggtgggcccttcatggccttgcaggccgctcgctttcctttggcgagctgggatctcccagctggttgcaccaccgtgcatctgtacccgggcactgggctgtactccggtcatccagggcgtgctctgtgttgaggtgtttgataaactggcccaggtcttcacacagggtctcacagcctggccacttgcactctccgtgtccgtacagggggtgggagccgggggtctcctcgtgggaagagctgtctctccgagatgtgagcacagtaggctgtccgttgggcagggtatggtgggagagggggggtgagaccttggggggagcggcaaacgaggtagcggtggcggccgtgccagtgaggtccagcccctcctgcttgacgctgtcctcggcaggctgcccgggggcaccctcgcccttccacagctggggcaggtctgttgggcaaacagcttgcggaagggtctggaggggccccgaggcttggttgggctgcaggctgaccagcccctgcctctgcaggttgagcaggtgctgctgctgcaactgttgcatttgcaggagctgctgctggaaggccagctgcttgttccccagtgcctctttgggctgcggtttcccagcctgctgctgggtgaggagctgcaggtggagctgctcctgctgcttcttgtagtactcctgtagctgctggagcatgagggcttgctgctgctggagcaaggcctgcagctgcgggggcgacaggatctgctgcatctgttgcggggtaagcatctgcggcgacatcatggccaccgacacaggcacctgcacagcagaggcagactgttcctcgtgccgaatcgccacccaggcctcgctacctaggacc

SEQ ID NO: 149371 - DNA, 1086 bp, Homo Sapiens
cagggtttccttaggcattcgggaagccctgggaaccaggcagaccttgcgggagttaccccagggcatccagtgagaaaatggcaagcatttcatccccccaaattttgatcagacccccaacacccaagccccaaagtcagtgtacgcggtgggcatctccgcggctttttcagtgggggtgcaaaccacaggcacttcccgacttcttggaggtgctggttccggctgagcctagtcccccacccccacccgaatcaggggtttaccaagggtctcttcaaagtggcagccgcactgtgaaagtgaaaccagacacttgaaaactgttctttcctctctctaaggttgctggctgatggagccacccgcaggggtcccgggggtgctaggaattctgatggatgttctccgaggacccttcgctgctctcgttgaggggcgtctccgaggtctcctccagctcctcgtctgccccctcctcctgaatggtgaggtgcacgtccggggaggaggactcggagctcacgctgtccccttccatggaacagagggtgcaggacagcgcgggcgccacgctctcctgcagcatgttcagcatcaggggcacctgcaccgacctcaggcccgacaccacgggcagcggcttcatggcctccccccagagccgctcctcgtctttgtacagcagcaggaggctggacttcttctcccgcctcttggatttcatgtagcccagcatgattccgatcaagaaaatgccgtagaaggacatgacaaccagaatgtagaagtactcgttgccattgccgctgccgccaccggccgcacgggactccagggggctgctggaggcggcggtgccggggtgcgtgctgttcagaggctccattttcagcattgaggctgcctccacagcaggggcaaggctgacagtttgtcccaagttttgaattcccaaatcgtccagtccaagagggttcttctgctctgtccggccggacgcgtgggtcgacgatatcccgggaattccggaccggtgccagcttgtttgttttacttattttttgctggttatgattgttt

SEQ ID NO: 149372 - DNA, 1406 bp, Homo Sapiens
ttttgttcctccattctttgcaggttgttgttgtgtgtattttcatatattttctcattgcgcttatttgcgtatgatgtattgctcatattatcgtgtgacatttcgacatgggatagtatgccgtttcatgcgaaaaggagcgtgataacttggcctacccagccatacgggctcgtcctacaggtagctgatttggatccctgtcatacattgcattcttccagcccatgatcgaaagttccacatagcttcgtgactgcagtcaaggtgcagggcccggtaatctactttcttgccttgcgagcatcagtctgcgccactgtctgccacgtggataactctcctccgaactgtaaagttccttgtcacgctcatgtgcagtacggtttcctcctcagatctgacatcagcttcttgtcaagggtctgctcgaagaaatgagaactgacttgctccatagagccctacagttttgctgcctgaacacgaaccacccaagagccatcactgaccatgtgacaaattttgccaaacgcatcatcaaactaagcgtattttcttcattagaaagaaggaatttgggacaatgctttcaggatagagctgactgacgacccagataagctggactgcagcactgcgcacttgttcatagtcatcagagagtaatttacaggcctgattataaattgtttggtgtaatttcagtcctctttcatggagctgcaacatggcttttatagctgctgttctgacacgtgggtcttggtcactgaagtaatcccctataatcttctggacatctctggcagctaggccttctgcatcttttgtgacacttttctccaaagagccaagattgccaagtaactgcaggcacttatttcttacaccatgagacgtatctgtcagatgcttgcaggccacatcaactaatcgcatttggatagcttgattctctggtagcttagtgccaattgcaagcaaagtatccagcagttgagctaggacttgatgagacttttcattctgcaggatgttgatggcatcatccataatgcagtctggtgaaaatcctgctgtctttgataataaacccaacaatgatgcaattttcagtctcacagatggatcattctccttgtaataatgttccaagagaatcctgactactccctctacgctttccgcctcgacaggcttcctggcaaactggagcaagtattgcaaagcatctgctggggaggtagctttacacagatctatgtggagtgctgcagatttacttggttttgttagtcggagtttcttacgtagcgatttcctcctgtggctgaaccactttcgtgaattcctccggacgcgtgggtcgacgatatcccgggaattccggaccggtccag

SEQ ID NO: 149373 - DNA, 1389 bp, Homo Sapiens
  misc_feature (30)..(30): n is a, c, g, or t
  misc_feature (37)..(37): n is a, c, g, or t
  misc_feature (50)..(50): n is a, c, g, or t
  misc_feature (95)..(95): n is a, c, g, or t
  misc_feature (137)..(137): n is a, c, g, or t
  misc_feature (143)..(144): n is a, c, g, or t
gcaaatttcccatggatttcaatccaggtncaatccnccaaagtcccttngctttttataaatttttaaaatgtgggattttaatatattttagnaaattaagtacaaatggcagcaaatatgacctatatatggcnaagtanncctggtgatttcccaattaataaatctgagagctgtttcccatacctgaagcctaacagccaatctgatcaaaatccaatctttctgtcattgtcagctacttattaaaataataagatttcatttctacttggaaacaaaatctttaacctgagtttccagtattcaaaatattgctatttagatgtcggatgcttaacatttcatgccaaagtctcacgtgaatgatctgacataagatagaacatactactcagcaacaaaaaaaatgcacaactgacacacagggatcaatctcaaaaatctgcagagaggaagaaggcaaagtacatactacagtattctatttacatgaatttctgcaatggaatagatctaatcggtaacccaaaaggcaaatctgtggctgcctagggctaggggtagaggaattgattgggaaaagggggtatgagaattttgggggcaatgaaaatatttgtatcttgatcgtgatagtggttgcacagaggtatgaatctgtcaaaactcaataaaatacacacttaaaaagggtgcaataaatctaagtaaatagtacctcaattcagttgatttacaaaacacaacatgacagtatattttaaattaaatgaaacattaagaccttattttttaaaaaaattaatgttatggataaagctaaagttccctctgaccaccctcccaatcctgatttgcacccctaatctctcatctatacctcctactcgctgttagaactttggtatggattcctctgaacctttaaaaatagatttacgtacattatatagccatagagaatgcatagtattgttttgtacatatatataatttgtatataactttctacaacttgctattttcactgagcattatgtttttgagaccaatccaggttaatatggatctagattatttcttttaactccaatacaataatctatcctatgactacatcatattttaattaggccattcctcttcaatatttagattgtttttccctactacaattcaccagtgtagtggtaaacagtagtcgccactggggtgaggacagaaccgcaggtggtgttctaagggttattagccttatttataagatgtagttataagatgagaatgtattcatgtttaatttacatatgataaatattgacttaaagaattttgagcggacgcgtggtcgacgatatcccgggaattccggaccggtccagc

SEQ ID NO: 149374 - DNA, 915 bp, Homo Sapiens
  misc_feature (813)..(813): n is a, c, g, or t
  misc_feature (877)..(877): n is a, c, g, or t
  misc_feature (880)..(880): n is a, c, g, or t
  misc_feature (893)..(893): n is a, c, g, or t
aggatgaagtgacggcgcgccgaattcggcacgaggggtggcggcggaggcggcggaggccagggaggaagatgtcgtaatgagcgatccacagaccagcatggctgccactgctgctgtgagtcccagtgactacctgcagcctgccgcctccaccacccaggactcccagccatctcccttagccctgcttgctgcaacatgtagcaaaattggccctccagcagttgaagctgctgtgacacctcctgctcccccacagcccacaccgcggaaacttgtccctatcaaacctgcccctctccctctcagccccggcaagaatagctttggaatcttgtcctccaaaggaaatatacttcagattcaggggtcacaactgagcgcctcctatcctggagggcagctggtgttcgctatccagaatcccaccatgatcaacaaagggacccgatcaaatgccaatatccagtaccaggcggtccctcagattcagcgcaagcaattcccaaaccatccaagctacagcccaatctcaccaaccagatccagcatcatccctggcaccaaccaagccatcatcaccccctcaccgtccagtcacaagcctgtccccatcaagccagcccccatccagaagtcgagtacgaccaccacccccgtgcagagcggggccaatgtggtgaagttgacaggtgggggcggcaatgtgacgctcactctgcccgtcaacaacctcgtgaacgccagtgacaccggggcccctactcagctcctcactggaagccccccaaccccactgtctaagactancaagaaaagcaggaagaaagagccttcctgggcctccagcccccctgtgggctgtgggctgaancanggtgggagaaggntggcctgatcccagaacaccgg

SEQ ID NO: 149375 - DNA, 928 bp, Homo Sapiens
  misc_feature (120)..(120): n is a, c, g, or t
  misc_feature (123)..(135): n is a, c, g, or t
  misc_feature (155)..(155): n is a, c, g, or t
ctttcaagagacgttccaaggagggtaagggagctggggcggtccagggggtggccggggccaacagtgaccccggcccagaatgggggcggggcctcccccaaggaacacagtgcgagnctnnnnnnnnnnnnntgccccacctctagtttcangcaggaagtgaaaacccaccaagagatcaaccagtaaaaataaaatctctagaagtcaatgagctcagtgttaacagtctccaaccacctttaaaaaacagagggttgacggtgccgtcgcttcttctgaagcatcctagagtcccacaggctgccctgttctccctccttggctcctgatctgtgggatgggggggcgcgcggtagccccgagggtcctccctccccagcacccagtgtggagggaccaggatctgacagccatgagagcgacaaaggagctttaggtgcatggagaactctgcatttcactgagttctcaggggcccatccactttaaaaacagatgtacgtatttacacacaaggtcagataggagctaggacagacagggctctagaaagtgaggtggggcgttcgccctcagccagccccaggacagggcagagtgagggctccgacttcgaggaatggacctgacgttcgtgccggtgtgcttatcactacgggcgccctccacggggcccccactgggagccaaggtgctgagccgagcgatgctcccgggggacgggacccggccgtccactcccaggaggacagcagaaattcattacgagacagtttcgggggcggggggtgcagaagaggtgaggggccaggttaagttcccaagataactgattaaaaaccaaaaaatttgatctaagtttaagcggacgcgtgggcggacgcgtgggtcgacgatatcccgggaattccggaccggtacc

SEQ ID NO: 149376 - DNA, 881 bp, Homo Sapiens
ggtaggagggaaaattcagaagactgggatcgtgttcggtttacagaatcaacaggcaacaggaaggaggaacacaggcagccaagcatgatgaggatacaccgcaaggtactccgtccaaacggccaagtcccgttgcccggatggggatcacttcaaaggttctcactgccagttctgttgcaacgtatttgtcttccttagaatctagttcgtgttaatgtgacttcttctcttcttgggacgaaggctatactgtgttgctatgtaactgctttcttgtgacaaattgaattttgtcctgtgtatttttatgaggtgcgtcatttctcgtcaatagtgctcaggctccccattatatctgctgatgctatgttccagatgggcttcagaatcagcggagtcaatttgaacttccacttccctccttgcttccttaatgtcggcctggtgggaagcagaagcagatcggcgggcacttttaggtggtcgaccgggggatcgggagcgtgaccttgatcgactccctcggcgtctggaaggggaactggaagttgagccacctttcctttgcctaaaggaagttaaaggcttaatatcattctctttcaattcaagctctgttccatctttatactttacagtgtaaagcctgggaggtgctgtcgtggctcagtaatttgtacttcataatagaagtgtaactcccacggccatcgacctcgttaccacttcaccatcggcgaaatttcctaccattggcactttatcgtataaagaacctgcgccaggtgtccggcggtgacacaggacggctaccacggagaatagtcgcacagcaagcccggcaggatccttaacatcccagaccgtacagcctg

SEQ ID NO: 149377 - DNA, 1303 bp, Homo Sapiens
  misc_feature (1249)..(1261): n is a, c, g, or t
ccgcgggtgcagtgggtcggttcgatcgccgccgggacctgacaccgcccggagttggcgtcccttctccctctccgagtgctgctcctgtcattgtggccatggacgataccctgttccagttgaagttcacggcgaagcagctggagaagctggccaagaaggcggagaaggactccaaggcggagcaggccaaagtgaagaaggcccttctgcagaaaaatgtagagtgtgcccgtgtgtatgccgagaacgccatccgcaagaagaacgaaggtgtgaactggcttcggatggcgtcccgcgtagacgcagtggcctccaaggtgcagacagctgtgactatgaagggggtgaccaagaatatggcccaggtgaccaaagccctggacaaggccctgagcaccatggacctgcagaaggtctcctcagtgatggacaggttcgagcagcaggtgcagaacctggacgtccatacatcggtgatggaggactccatgagctcggccaccaccctgaccacgccgcaggagcaggtggacagcctcatcatgcagatcgccgaggagaatggcctggaggtgctggaccagctcagccagctgcccgagggcgcctctgccgtgggcgagagctctgtgcgcagccaggaggaccagctgtcacggaggttggccgccttgaggaactagccgtgccccgccggtgtgcaccgcctctgccccgtgatgtgctggaaggctcctgtcctctccccaccgcgtcttgcctttgtgctgaccccgcggggctgcggccggcagccactctgcgtctctcacctgccaggcctgcgtggccttagggttgttcctgttcttttaggttgggcggtgggtctgtgtcctggtgttgagtttctgcaaatttctgggggtgatttctgtgactctgggcccacagcggggaggccaagaggggccctgtggactttcacccagcactgtgggggccttcagactctggggcagcagacatgctgcttcccatcagccagagggggtcagggctgccctgttgccaaacaactccctgaggcctctccgcaccacctcagcgggcaggaggtcccaccatgtggacagacatagcccaaggaggcaccacaggtctatgtgtgctggggggatgtccggtgccaccccaacgctgtccctggtgggttatttacaaatgaacatcccttccttccttccatttaatttccaannnnnnnnnnnnntccttcgggccggcccccttacccaaagcttgggctttggaa

SEQ ID NO: 149378 - DNA, 694 bp, Homo Sapiens
tccagcacatcacggggcagaggcggtgcacaccggcggggcacggctagttcctcaaggcggccaacctccgtgacagctggtcctcctggctgcgcacagagctctcgcccacggcagaggcgccctcgggcagctggctgagctggtccagcacctccaggccattctcctcggcgatctgcatgatgaggctgtccacctgctcctgcggcgtggtcagggtggtggccgagctcatggagtcctccatcaccgatgtatggacgtccaggttctgcacctgctgctcgaacctgtccatcactgaggagaccttctgcaggtccatggtgctcagggcacttgtccagggctttggtcacctgggccatattcttggtcacccccttcatagtcacagctgtctgcaccttggaggccactgcgtctacgcgggacgccatccgaagccagttcacaccttcgttcttcttgcggatggcgttctcggcatacacacgggcacactctacatttttctgcagaagggccttcttcactttggcctgctccgccttggagtccttctccgccttcttggccagcttctccagctgcttcgccgtgaacgtccatggccacaatgacaggagcagcactcggagagggagaagggacgccaactccgggcgggtcaggtcccggcggcgat

SEQ ID NO: 149379 - DNA, 936 bp, Homo Sapiens
  misc_feature (231)..(231): n is a, c, g, or t
atagagaggaagtgcccagaaaaattccaaggggctttgcacgtcccatctgggcccatggtgggcttggagacggccagtcttaaacgccccaaggaaggggagagcacagcgagtgcccagcctgatccaagggggccgagcccttgggggactgtgcccccaacacctgcgcgtccttgggccctggtgcctggtgcttggggcgtgcctaaggtcccccttgcaccntgcaaaccaggtgggcttaaggagcttccttcgctccaccctgcctgctccgatgaagtcctggggcagggaggagagcggtgagtagggtggcagccgccgcccgaaccaaaccaagagggcactttgcagagggggatgtaagaaccaccaggatacatgccagaggtcaccttaagggcacaaggcacaaaaaaagaaagcggaaggaatcggttgaacagtggaaagccccgccaaaaagcgttcctgatcggtaccaccctccgatagcttatatcgttacatagagaagtggggggaaaatacagcagcaacacaaatggaatcctggcttccgagacagtgtgcagacactcctgagctgtcagccccgcctgcctccccaaggacagtcccttaaaggtttgagtgttttgcttcacagcagagttcttcagtgtctgagaagtgacgccgttctgggtcttcttggatttgcacttggtaaacttgaaacgttagtagttctgttcgcacccaagaggaatcgctggggcaaagttgctctagaattaattgctgatgtaccttccatggaacatggatcggaggctttaaagcatcgtctacatctcttcggagttttgttgagaggcctccagtttcatctttttagagggtggccggacgcggggtcgacgatatcccgggaattccggacgg

SEQ ID NO: 149380 - DNA, 957 bp, Homo Sapiens
  misc_feature (62)..(62): n is a, c, g, or t
  misc_feature (335)..(383): n is a, c, g, or t
  misc_feature (844)..(878): n is a, c, g, or t
tgcgctgcgctgcgctgcgagggggctgctgctgaccaggtctgctgttctgccgcgtgatntgaccgccaggatggcctgacgattcttgtactgcaccatctgcagcgtgatctcggcgttccagccctggtcttgcgggcaccgaaagtcgatctccttgccctctgccatcaccacagtgaagtacatgtacttgcccttgcgctccacacagtccacggtcttcatgttggagaagtgcagttccttgagcttgaccggcggctcgaggctggcgacagcggggccactgggttgggacggctcggccggcccctgcccgggctgttgtnnnnnnnnnnnnnnnnnnnnnnnnnnnnnnnnnnnnnnnnnnnnnnnnntgggcgggataagcagcagcccttcctcggtgaggatgcaacactttttcttccagagctgcaacaacccgtcgctgcgcttctccagcacgccctccttcagcgctttgcagccgctactctccagcatcctcccagcataagaggggccgccgcttggctcggcctctccgtttccagccgcgcgggccgggggcagcagcagcagcctcgcgccgtcctcgccccagcggctcccacggccgcctgcccggagcgcgcagaggaggctaacacgcaggaggcagagcggcggcggcggctctgggtcccggcagagggacagccgcgtcctgatgcgccacaaggtcccggagctccgagctgccgggcctctgccgtcctcttgcgagcgctcagctgaacggcacccggaccgtaatggccgaattcccgggcatatgtccggtaccgtcgactgnnnnnnnnnnnnnnnnnnnnnnnnnnnnnnnnnnncgccgcttcctcgctcacttgactcctgcgctcgtcgttcgcttctaagcctaaggcgccctataggatcatcagtctt

SEQ ID NO: 149381 - DNA, 1119 bp, Homo Sapiens
  misc_feature (704)..(750): n is a, c, g, or t
acggcggaagtgcacgggccgggtctactaccgcgaggccgtgccgtggctgcagccgccctcaccgccatctgaaacgcgttgcgtccgtgtcttgagagtcgccatttgagtcacctagcacgccggctgagcgacgttatagacgtgcgaggtcggctgcgcttccggcgcccccgggtcgttcgtgcgtcaagtgtgaccggcgtggtgtcgccctcggcccagacggtaggccagctagcgcggtcctagatctcccggcaggaggtggcgaagattgagtgggtgagcccccgccctcctccttccggcttgcagtccgcgggctgaaagccccggctccgccttgagttcggcgggcgccggcggcgcggggggcggtgggtgcaggggcgagaaagcagccgggggtgcagcgcgccccttggcggcccccaggcgccccccgggcttcaggtagccgtactcggcccgggcttcttgcagttcttgcccccgtagtcgtcggagaagaggtcggagaggaagtcgtggtgctgcccggaggaggcgggcgcgggggcgggcgcgggcggagccgcctcgaaggtgtccgtggccgtggcgggcgccggggcctgcggcgcgcccagcggctccaggtacgggctgaagtcgatggcgcgctcgtggtcgccgatgctgcccagctcgccggcggnnnnnnnnnnnnnnnnnnnnnnnnnnnnnnnnnnnnnnnnnnnnnnnttgccgccgtacgcagcagccaagcagtccgcctcgtagtagaagttggccacttccatggatttaaaggcaggcggcggcggcggcagggggagacatgctgggtcccaggccaccaggcgttgcatgaacgcgggtgcccggggagggggcctggggctgcccgctccggccggcccgcaggtggcgcggcctccctgctctgagctgtcgccgctgcgtcgctgctgctgctgccgccgctgccggggtggccgctattagtgagggggctggtggctggaccctcgggtgggtccccttcccagtcccgtgcgcggctccggacgcgtgggtcgacgatatcccgggaatccggaccggtccagc

SEQ ID NO: 149382 - DNA, 885 bp, Homo Sapiens
  misc_feature (363)..(377): n is a, c, g, or t
ctggtaccggtccggaattcccgggatatcgtcgaccccgcgtccggaaaaacatcttggagaagaggacccattaaaactttaaatatctgtgggaaccatttttcctgattttcccttttttaacatcatggcaaagatgggtttttttccaacaaaatttaatttaatatctttccacttgaagattttaggtttgttttcaatacttaatgaatataaaactaaaggagaaaagccaacctgaaataatttaaactttatatgaacatttcgataagagtttgtggattttttctgtagataatatatttgatccagaactcaagtgcatggaaacatgattttgatttttaaaatctnnnnnnnnnnnnnnnttaaaatcatgcttccctctattgcagtatcagttatttagtcacagaatggtattttatgtaaattaaaattaggtgaatgcaatgcaggtaactggttttggaatggggaatgtgcagtgctttatgtttggggagttggagcagggtatcttttcatcaattagaaggaaagtttgaaacttctgattacctttatgttggtttctcttattatttgtctcttgctagatctgctaaaccaacccagcttgctcagagatctcatattgaagcaacatacaggcaatccacatctttctttccctttgaagtatagtcattggatgggatgagggacagggcctgttgggttcacagggccttgcactgcatgggcacatacttaaaagctcttgtgcatggaatccctgtctgttagccacaggcctctttagctctatacattcaaaataactactgtagtagaaaatagataagcttcagctgagttggcttttgatagtgg

SEQ ID NO: 149383 - DNA, 888 bp, Homo Sapiens
taattcttcttaggccagatcatggtggtcttttgcgtacctcaaaaacttatgactcgtccttgtgatccaactgctttggatcaaaataagctcattcccaccagagcctgagccagcttccaaaccagtatcacctgggttgatatccatcattgagagaatcatattaatatcctttgggaatgttatggcagtccctcttttcatcaatactacatagtcttccaaggctggcctcctcagcatgtactgcttaccgaaggaactcctcagtatctggccggggaacttccccacgatcttgccgaacgggactgccccccagttactatttaagagtccgaagttgttcaacctaaataattttcttaaattttgtttctccctccccagtctcagctaaaatcagctccccagcctgaaagggtctctctctggaagttgaacaagaaggggagacgtgacgctcttcgacctcggtagcggactgggcctgcgagagcatcgaaggatcctcggatccctggtgtgtgggaccgcaccggccctggtctccgctcgagtcctcgagctctcgaggtgatgactcttcccgcagcgtcggcagtctgaggttttccagtgacgaaagacatccagtcccaatgtccgagatgctcagagggagagatgggcaagactctgctcctggggctttcctttgtgccgcctcgtgctctctttctccatctcgcaggtctctaggcgaggacctgcaacacagtgaccgagctccctcgaagggctcctgccccaggccgtgcaggaatgaattggttccgagcccctgccgcaggcacagcaagacaggaccgcggcaccatgccattagcatagtgtttcgcg

SEQ ID NO: 149384 - DNA, 911 bp, Homo Sapiens
ggacgattcaatctggctgaaggccccagagccccacttcctccatacatggcgaacatgctatcagggagagctgcatggattccaaagaggaactacacgcccagccacccacagagagaatacaggccgtgacgtggacttggatgtctgagcctaatttgattgtagtttttctctcatcagttcggtgatcaagttcatcttcaaggcaagtgtaggagaagactgatcttgtcttctgtcaagcacatagttttcaagtcctccggccttagggaaggaagctggaggtccaagtgacaaaggctttgaaaacgatctaggaattcactaacaagaatagcaggctcatccaggggcaacatcccaaatcggtctggggatgggctgtctggccagaaacagaacttctcatgggcagtacacaaggctttcttcagctcagcacatcgttgcttatatctgtcaaagtcaaaagctggttgtaaactggcacagagaaaagcttgacagctagagcacttgagcatatcacattccactgtgacccagccatattttgcacagacgagtggagacagctcaaagggcttacctgcccatttcaaagaagaaaatgtttccactctgctaaagaaggcttctttgcttgtagattccaatgaaggttgttccgcttggggtgatccattaactgactgggatgtggcagacgtgtccttcgcgtccacgcctccctcttccggggcaatcccctcatctatcagctgccggattttctggggggtcccttctggggagcgaactactgcaccccaattcttttcaacccctacggcaaacgcttgtccctcacagggcgccggacgcgtgggtcgacgatatcccgggaattccggaccggtcca

SEQ ID NO: 149385 - DNA, 1126 bp, Homo Sapiens
  misc_feature (399)..(702): n is a, c, g, or t
ctgctgttagctggctgcaggttccatgcaaatctttgacgtggtgtctgcgccgactgcctaagatgggatgcgtggtcgcacggctaggcatcggcgctctgcgaccgcacgggtggcggcggcgcggagaagcgttccgggcgagtgggtgtgctgacgcgcgctggtaccatcgaatcggtgcgccactggttgggggagtgtgacgttccttctttgtggtcggcggggaagcccccgcctctcccttagtgcgggcacagcaccgggcggatataagctgtggccaccagtgggcccaccggcttttggcacatgggagtagcatctatagcatcttttctgggcaggtaccctcgggggagaaccagtgtacttccctcatccactggcacnnnnnnnnnnnnnnnnnnnnnnnnnnnnnnnnnnnnnnnnnnnnnnnnnnnnnnnnnnnnnnnnnnnnnnnnnnnnnnnnnnnnnnnnnnnnnnnnnnnnnnnnnnnnnnnnnnnnnnnnnnnnnnnnnnnnnnnnnnnnnnnnnnnnnnnnnnnnnnnnnnnnnnnnnnnnnnnnnnnnnnnnnnnnnnnnnnnnnnnnnnnnnnnnnnnnnnnnnnnnnnnnnnnnnnnnnnnnnnnnnnnnnnnnnnnnnnnnnnnnnnnnnnnnnnnnnnnnnnnnnnnnnnnnnnnnnnnnnnnnnnnntaagctggcatgttttaaggcagttacatctctaacttgatttaccagctatgcttgagggtccaaggagccaaaattgcagccaaactgatcttaaaggaccagggaatagaatggtcaagcatgtttccaagtttaacctaggcctggcacatccttgccaattgctcagatggcaagtgaggggcaactaagtgaagagaatagcaggaagacccacttggggtggacactgatgaaaaacacaagcagtatcagactcactgttttcaggattaaaatccccagatgccctgttattggtctatgtcactaccagtaggacaaaaggcaatgcttctgaagactagaatatgcaaggaaaaaattaaggtgcctgcccggacgcgtggtcgacgatatcccgggaattccggaccggtcc

SEQ ID NO: 149386 - DNA, 775 bp, Homo Sapiens
aactggctaggtactgaggcctgggttttaaattcggcacgaggccacaaccctgactgtgactccacgcctgcgcacgctgctgctgactgcgtgcatggatacatgctgtgaccctgcgcacccctgcggtgaccccttgagtgctcgggctggagccctggagagccctgcttgaaactggcttcccccagtgaagttgatgtggccaaacaatggacgatagccagagggctgttcccatggagccaggtctgttggcagatctggcccatattcatggccagtgggcacttgttgattgaacagacacctcgtgactgctgctgaatgaacatcctactaactgccccagaatcttccatcctgatgcctgatgtcggtagtgaatgccatgtgccatgcacctgcatggctggtccaaccctccagacaagatgaagcatgttgctgtgcagccttggatgctagcaacttcctgatgctcgatgccccccacaaatcctggactccagtgtctgctgtgcccctgtgccaggatgtgaaacagatggcttgacgactgtcagttgtttcatgcatgggatgtgtgaccaggggctgtctctctcccaagagcctcaagggaattgcttgattgcctcttccctcaccagatccctcaacctgacctttgccacacctcttcagccacagtcagtgcagaggcctggctttggccggcagactccagcccgcgagctgtgacgtggtgcctttgcgggatctgcgaata

SEQ ID NO: 149387 - DNA, 1093 bp, Homo Sapiens
  misc_feature (43)..(43): n is a, c, g, or t
gatgccttttttccaaactcccccttgggtgtaaggggccttntacctccattcttcctcccaggagcacacccattggctggttgctccaaggaagccccggagccaaagggcattggccctccttttgcttttccttgccagaaaacttggcctgttttcccccgggctatttttctgcagccccaggcccactgctctgtgtcttgcgacccggcagcctgctcagcgtcttcagcccccagtgtgaggcgtgcagggcagggagtgatacacgttgggggagccaaccatgggctgagagaacggctgggtgtcctccaacacaatgtttggaggagccagggaagtatctcgcagatcccgcaaaaaggcacccacgtctacagctcggcgggctggaggtctgcgggccaagccaggcctctgcactgactgtggctgaagaggtgtggcaaaggtcaggttgagggatctggtgagggaagaggcatcagcattcccttgaggctcttgggagagagacagcccctggtccactccctgctgaaacactgacagtctcagcctctgtttcctcctgccaggggccagcagacctggagccagggttgtggggggctcgagctcaggaagttgcagctccaggctgccgcaactgctctcttgtctggagggttggaccgcctgcggtgctggcactggcttcactaccgactcaggcatcaggatggaagattctggggcagttagtaggatgttcttcagcagcgtccgaggtgtctgttcctccaagtgcccactggcctgaatatgggccgatctgccaacagacctggctccatgggaacgccctctggctatcgtccttgtttggccactcaacttcctgggggaagccgtttcaagcagggctctccgggctccagcccgagcactccggggtcgccgcggggtgcgcgggtccgctgtatccagcacgcgtcgcagcagcgtgcgcggcgtggagtcgctgtcagggttgtggtcagccatcgtctcggccccgggccctcctaaccgcccagccagctgcaggctccgccttcccgcc

SEQ ID NO: 149388 - DNA, 731 bp, Homo Sapiens
  misc_feature (582)..(582): n is a, c, g, or t
ttttcggatgccgagacgatggctgaccacttccctgacagcgactccacgccgcgcacgctgctgcgacgcgtgctggatacagcggacccgcgcaccccgcggcgaccccggagtgctcgggctggagcccggagagccctgcttgaaacggcttcccccaggaagttgagtggccaaacaaggacgatagccagagggcgttcccatggagccagtgtaagtacccagcccactgaccccaaagggccctggctgcctcggggaggggggttgaggtctagctctgctctggagcccaccttgaggaaatctcaaggcagacggacagactggttgcttggtgctttgccgatagtctgttggcagatcggcccatattcaggccagtgggcacttggaggaacagacacctcggacgctgctgaagaacatcctactaactgccccagaatcttccatcctgatgcctgagtcggtagtgaagccagtgccagcaccgcaggcggtccaaccctccagacaagagagcagttgcggcagcctggagctgcaacttcctgagctcgagccccccataancctggctccaggtctgctggcccctggcaggaggaaacagaggctgagactgtcagtgtttcagcagggagtggaccaggggctgtctctctcccaagagcctcaagggaatgctgatgcctcttccctcaccagatccctcaacctga

SEQ ID NO: 149389 - DNA, 1098 bp, Homo Sapiens
  misc_feature (404)..(404): n is a, c, g, or t
  misc_feature (427)..(427): n is a, c, g, or t
  misc_feature (439)..(439): n is a, c, g, or t
ttcgtccttaggcccacgttccttaggttaaattggaactgttcctttttcgttggtgggttcaccacggttctcaccccttattgaagagccagacaacaggtagtgtgttcgaaagtccttcgtaaccaccttgcttaatgtccccagtcctttctttgggggccgtacccattggatataaccgagggatttcgtttcaatattagttctcttcccttccttggaaaaatcgagttagacaaagaaatgtgttttcttcctggggaaagtaggaatggaacgtctctgcgaaataactggttgtgcgtaagaggaatacgtggggaaccccccaaaataatagccttaatcactacagtcccttacttagggaaacctattgcaacaatctcgatttaacnaacaggggtttgggacttgtgcnaactcgaaacantatagtacctaagacacatggttggaattcccctaggatatgcaagtctacagtgtacctgtgtattgcctgtcatttaggttagaatccatggaactgtaaaccgtctgcagctacaaaggcgaaagcttccgtgttccctgtgctctgagcagatgcggactgtagtgacaagcgtctggcaagatcatgttgcgtgcaaagggatattactaggaaggcatcatggtctatggtcctggatgtatggacaaattcgaatagtaagtcgcaaacgagcgacattctactccttgatcatcccttagtaggttatggagagtaatatttgtgccattctacgtcttcaacgatgttaagtacatcgtcaaagctgctcataatcgttatttgctagagaatcattctggcgtccgtccgactttcccggccccgctggcgctccagagcacctagcccgctgcgcccagcaaccacgggagcacgtccgttccccgagggtcagaagtcggcgaccaggcgaagagccatcgcccggacacgaccaccgggcggctctggggccccgcaccgcgggcattcccggccccgcagtggccgcctcgccctcgcggacgcgtgggtcgacgatatcccgggaattccggaccggtaccagc

SEQ ID NO: 149390 - DNA, 1493 bp, Homo Sapiens
  misc_feature (117)..(117): n is a, c, g, or t
ctctctgaaagggcatcagaatagacacgagcttggggtccacttcagaaaggtctgcctctgggacatctggcgtgagactgagagatgtcttcttgagctgagaagcaaacgccnagggtgagagtcgtgggcagagggtccagctgaacttgtgggaggcagcgcacctttgcaattagtttactgtgctcttccaagagaaagctccacttcctggtcttgacatcatatcttctggaatccatctgtttaaaaagcgcaataaggtcctgtgaataactgatgtctgcctcgaagtaggccctggagatgagcatgcatcgccctttgacaaatgaaagggatggagctgatggaaggccggcctgtccctcactgctggtggagggtgactcgctgctgccataggcccattccagaggctgcaggttgaccgtggggaggctctgggctgctttcatcagggcactatagtcattcatgctgaagttccacgtcttggtgtcaggatcataattcttgctgggcagggtcttaaacactgcaatgagttccgcattgtacccaatcaacacctggaaacgatcgccgttccttacgcactttcccttctgagagttcactcctttttggactgaggaccctgacttctgctggagtcttccttctgtcctgggcggttacactctctgagctagaatggatgtaagaaatgttctgccccgaaggggaggtttttgctgtcttggcctctaacttagcatccctgggaggctgtccagaggaatgagctggtgtctcttgggaactctttggtttggccagaggcttatgagttgggttagcaaagggtgtgaacctgatctcaggtgaagcctgagcatgaccttgacctaactcataactcaagagctgttgtttagggacctctggaggactttgtgccaagggaggagagattccagtgagagccatttgactacgtggactgtggcctgggcaggctgtgggcatttcttctggctttttccatattccctttgcctgaaaactgtgggaatcatgaggtctttggtcagcattagatgagctactgagattctgttgcttgaaaatgacaccatggctcactggcttacaagactcccttgggaaattttgggatgggccttgcttggcctggaatgggttgccagcaatggaggtgcccgagctagtcctctgatgctgttctgccaataacttctcagctctgcgggccagagccttttgtcgattctcttcaatctttttcctctgctcctctgtaagaggcaaggacattttcacagagaaatgcttatgcaggaatgtcaacctttaattggaaagttggcaaaagcatggcgtgacacttgctaacatagtctttttccaacccagcctcaaggtaagcgggcgccacgccccctcgtgccgaattcggcgcgccgtcgacttcatactctctc

SEQ ID NO: 149391 - DNA, 1764 bp, Homo Sapiens
  misc_feature (132)..(141): n is a, c, g, or t
  misc_feature (207)..(207): n is a, c, g, or t
accgccccggcaagtccccattccccaaaaattttcccccccatttagttaaagcccttcccttgaacgttttaattcctgttggggaaaaaaggaagttctacttttaggagggttagagaagggcccggnnnnnnnnnnccaaagggaaagctttggatgtcaaacagtccttttttgcccggcccacgtcccttttgggttttnggcagctgtgtgcttccatggccagtgacccagcaaaagcggcaaggggtgccgcagccacggcgaaaagaaaagtccaagggtggaggggtgaacgtggagggacgtctgtgcaccctggcccccctgaagaactcacgtgcgtctgggggcacatgcggggggaaggaacgtgatcttcacacagaaaggggacagtttttaaccgttttctgttttcatgttctcatttaactgttggccggaaattgccggtaggctgccgtggcctgaccctactacgtgcacaactccgcaggcattaggggaggggtcatctgctctaattaggtaacaggggcaagtgggattaaagttttaaggcagttatattaagaagctgaggacaggattctggaaccaggtgggttttcagcgtctagccatgggtgatccagagcgactatctcttcctcccagcttaaaaattttggaaagcgtgccctgggcatcgactcccttgaatcccttgtgagccgatttatagtcggacgctctgcctccgtagccaaatcctggtctctggccttcggccccctttccctgcgacgggggtggtgtgcgaggcgtcacaatgttcttgaagaagtggactacggggttttcatcttgggtccggccgtgtgacttctggggcagggagccatagtgagcagttcttgccgggtggtgtgagtccttgccagagccccgcttgggcgcacccctgtcaccgccaaagaagcgcccgatggagtcaaggatgcccgtgtctctgtgccttgggaggaagccatgcctggcatggtccatggtacttgctgtggccaggtacttggatccgtgcctctgggagggtctcttctgtgacgccatcacatccaggctctcggaggtggctgcactgtcttcttggatggtctggagctcgtcggactcagagggcctgtctttgaaggtgttgtcctccctccccggggcatctcgggaaaagaggcggatcaagtgggggcggctccctgggtcagctgggtgggcatcctgccaggcattcttcgggtccgctgtgcgcttggagtcagtcaccgctgtgtcctgagaggaggtcccattgttctggttcgcatctgcctctccgaacacttcgttgtcctctgaggttgtccgtgaaagttcacccaggtttctctttttttcagattctcctctgttagtttcactattcgtactggccttctcggcatttaattctcgtttgcctgcgtggtttcccatcctgaatggattggctcttcagaggcggcgctgcgctcgttgctccgaggccgaggggcgccgcggggtccaaggccctgctccgcctgcccaggcccgggcaggctggtctcggcttcaagcgcccacgcgcggggtccccgggcagcctgcttcgccttccggggtcgggagacaggggccgccggggccggaggctgcttccggacgcgtgggcggacgcgtgggtcgacgatatcccgggaattccggaccggtaccagc

SEQ ID NO: 149392 - DNA, 1155 bp, Homo Sapiens
ggaggccacaattctggggaaaccgaaggcggttttttcttctttgggggatagaggggggaattgaggccctttgggggtgccccgcttgtgggaaaagagcccccttttcccccggcctgtgaggtagaaaagctccctgtgcccaggaaaggttcctctgggggaaagaggccctccaggtggggtttccaaagaattttgggtcgattccatcgaattttctggaggtggcagccttttagggccatggttgatggggctgcaagaatctggttttcccagccaaggccagctgggcttttaccttcgggccgggaatggaatgtgtgggcgtcaggagtttgttaaccaaggtgggtctcccatgggctgaggtgcaggcggcgagctttttttggagaatttagtaaatttgcagatgtagaggagagccgcttgttaatgacgggatcaacatatttcgaaagattcatggtggaaactgaccgcctgtctggatctgcactgtgggatgctagggctcccatggagagagcctccccacgaccaacggttatgcttctgttttggcttctggctcctttccattgtgcgccgtacaacagcttcgtggcgttctttgtcctcctcaagtctctgcctccgcttctcctccacagcagccctcctccgctcctccttctgcctctgctcctccaacttcttcttccgctcttccaggtgcttctcgtagtgctgcctggctcgctcttctctttctaaccacactatttctcttgcagctagctgtttctcccgttcctcacgtcgctcccgggccagccgctgccggtcatcaacacgtaacacaggcggagggtctggtttatttcctgagtggttgttattttgtcctgaaattgcagaggcagggcggctggaggcatttttcttatcttgcactttgtagctgtcgggtgctgtttcgcttcgcactgcgccgtcgccgcccctgtggccgtcgccgccagctcctagctccgccatggtgctccgatgacgcgcccggagagccgctccgccctttcctcggcttggctcccgccggcccccgcctcccaggccagccggacgcgtggtcgacgatatcccgggaatccggaccggtccagc

SEQ ID NO: 149393 - DNA, 1409 bp, Homo Sapiens
  misc_feature (291)..(299): n is a, c, g, or t
gggggtggggttcacagataaagtgccatgtagggtctggcgggcggtcgcttacgtaataaaatgtgtcactccatcatacgcgggatatgcgatcgattgaagaagtttagcttggggggaaattaggtttgacccccttatatcatcgtgggggaaagtgctttgaggggcagatagtcatcagaatatcgtagctaggggggccgggaagagatttaaaagtggccggaaggtggatccaattgtgtggggtggagtttggagcgcggctgccttagggcctaagtnnnnnnnnnttccaaacgtagggtaaggccctggaaatcctgttcccaggggtaatggggccaatccctcccaggaaggtttagggccagggcttttcagccgggtggaaaagccctaaaggattgccaaaaaaaccgagagtcaaaggaatagagagggctggagaagttccagggagccaggccagtgggcgttaggtgagaggcccttccttgccggacgaattcctgagtcccagttatacggcttctttcatgaatcagtcagggaatccaaaactgttggttgggatatcagctgtctcctttagacacttctgaagggcgcttccgagctgggaaggcaggaagtctgtgctggctgggggttggtctcagagggactctggggcttggacacaaaaatcgcggcgcactggggaggacacccggagcggtgggaactgcggtgtggacccgggagaaaagggggttggaggtggggggagatcgcgcggcacgcgttgcataacctgacctgccctcctgggctggaggcaggagtgacacctccgcctgagccgcagttcagagaaggctaccgcggcgctgggtcctgcgggacagccagcagggctggggtggaatggggggaggggaaggagccctgagaggagccaggatgggtctggacctggctccaagtcgcgtgccctacacaccccctctgcgctgcccagcggggcacggcccgacctcggaaggcccatccggctctcagaagtggccgctctaccagctgcccataatgctgccgaggagcctgtgccagtcccacggctgccgtgcagcaagcgggcggcccgactgacttcagccacgtcccctgcgtcagacaagtgggcgtcccctgcgtcgagacaagtgggggatccgcgaggcctgcaggggcgcagggaccagagtgctaagacgtggcatgacctttcagggagaactgcgcagagggtggccaagggtcacctccctcgaggggcgaagccctgagatgtgaggatgattcttaagacagcgcccttcccgccccttccaaccccccagaccaccaccccctcgtgccgaattcgccacccaggcctc

SEQ ID NO: 149394 - DNA, 1729 bp, Homo Sapiens
  misc_feature (26)..(26): n is a, c, g, or t
  misc_feature (37)..(37): n is a, c, g, or t
  misc_feature (70)..(70): n is a, c, g, or t
  misc_feature (1030)..(1078): n is a, c, g, or t
aaagacaggtgtaaccacttcattanaatgttcatanccctcatcagtcaatgtaatagaaatgctgacnactaaataagtagaattttgctcaatccttgtctcaccatttccaccaaccagtgcaagagcccagcattttttcctaaggaaagaaagaatgctgcctttgccttcatgtccaaccagccaggatatataatgaagtggcttcaccctgtaatgttgctgttgaggaggaagtgcccatgtgatggtcagagcatgaatttttctgattggaacaactctataaagtttgttaaatgctggtgtgtcaaaatggatcccgttaaatggcccaaagtttggtctggggtaacccatttgtttggtatctgagagaagatttcagtcacccactttttccaaagtatccagtgtttctttggattgaaccactaaagtcatgtaatgagaagagtagtaacgcatccagaattctctcaatctagcatgtgtatcaatattattctttcttggctcatgcttgagcgtctcagcatttccccaaaaaaattttcccataggatggccaggtctagcaaggcttccaaacaacatttcctttctgtttgcatcagaaggcctgtgacaagttgatattcactatcaacagcttcaacttcacggtcaattgcatctctgatcattagtgggtggatgaagaaactgcgcccatctatcaagagcttccttgaagtacttcctcatggacatcaaactgaatagacagtgcgttcacaactcagttgaggcattatcactacccccatgcttcttcaggaaggcatcaaatccattctcatctggatatttcaaactacccatgaataccatgtgctccaaaaagtgtgccagccccggcaggtcatctggatcagcgaaactcccaactccaacacaaagagccgctgcagactgtttttcagtagttttttttctagcttctgctctctcttctaattcttccaattcattatcctcagtnnnnnnnnnnnnnnnnnnnnnnnnnnnnnnnnnnnnnnnnnnnnnnnnnccctcttcatcgtcatcttctatttcagctcccagaatgttcttcatcatcatcttcttcttcctccacctcctcttcttcttcatcatctgttgtatttcctgttttaccttccatattacttaggtctgaaatcagaagtgcctgcaagccattctgtaatttgatgtatcggtattgcttggggtcgctgggagacttgacgatctcagggtccccagcattactgagagaccccctccgtccctcttcctcagattcatccgctcctagacgggcaacccggctgttctcgcccagatcctgtccattgggctgcaggtcagggcagctgcaggtagacttcgccttgttccttccaggcatggccagaataggaaagggtctggcagcagcagagtcttcgcaccgaccccgcgtttcgattccccagagcgccgcgagctcccgcccggcctcacacaacttcctccgggtggcacagactgcagcaacagtgactctcctcagcattcaccaccaagctggagcgatggacatcccgcttcccaggacccacctcctccgcgttctagaggcggtggcggccggccctggtgctgccgcagccgcggggaacaggcctgaacccctcccccaacccagtctccc

SEQ ID NO: 149395 - DNA, 1001 bp, Homo Sapiens
ctggcccggcttccttaatccccccaggtttcacgtttcacccagccaggttcttccttcttcctggcagcaacgcctttgtcccttgaagggtaagaatcaattgtctcccctttttgggaagaaatcaatggcatgctcccacgggaggcccctgcaggtcccggggcactgtacaggtcctgccgcctctgcccgaactcctcctccaccagagtgctgacaccaaactcttggtccatctcctccagtaacttggccctcttctctgccaggtccttctccttctgcagctgccggctcctctcgatccaggctgcagtgtcgtccagccaggggtcatcctctcctagggtctttatcttccccagcttttggttcagcaggcgcttctccttggcagctgccagcttctcccgcagctcctctcgctgtcgcaaggccatagggttgatgacatcagctgtcacgggctcctccttggtgcccgcctccttcttgatggcattaacctccaagggtttcagccccaactttgcccggagtttgttagtctcctcgatgctgagtgaggaggcatcgcctgagctagttttggagctggcagcggcctcgtagccgtcatcgcgcttctcccgcttcacgcgccgctcggagggctctgcctggctgcgctcccgcccgtgcgtgctgctccgggcctcagcttcggccccgcgccgcccgctcccgcgctcgcccccacgttcccggctccgcttccgtcgttcgccaccgctaccgccactgccgccactccggtgcttgtgttttttgtgttcccggtgccgcggcggctgctcggtggcacccccggtgccggccgccgccgtcgtcccggccgcctccttctctccgcgatgcttcttggacgaccccatagtggcacgtccactccgagcccggctgccgccgagcccagcggacgcgtgggtcgacgatatcccgggaattccggaccg

SEQ ID NO: 149396 - DNA, 1330 bp, Homo Sapiens
  misc_feature (131)..(188): n is a, c, g, or t
  misc_feature (1254)..(1254): n is a, c, g, or t
aggctaggtacgaggctgggtgtgtgaatcggcacgagggttcaatttgtggtgcagccgatggaattcggctctataattcactgaagtcaaggtcggttagaccccgtttaaccatctatgtctgccgnnnnnnnnnnnnnnnnnnnnnnnnnnnnnnnnnnnnnnnnnnnnnnnnnnnnnnnnnngagaatggcagtggggcaccctatgtttatcatgcaatctacttggaagaaatgattgcctcagaagttgctcgaaaacttgcgctggtgtttaatatccctctccaccaaattaatcaggtttacagacagggtcccactggtattcacattcttgttagtgatcagatggttcagaattttcaagatgagagttgttttttattctccacagtaaaagctgaaagtagtgatggcatccacataattttgaagtgatgtcttatatagactgaactgtattcagtaccaaatagtcacgcttaaaagtgtgtgaagactgaatccaagaagtcttgggattggattttaccatatgaaatgtttcatattgaaaacacaagatgacctttctaatgagctgtatgagaggtgaatctcctcactgtcactgccatagccaagcatcctcatgagagtgagcacatcggcacagcatgcatccagctctggaggccacggtgcaggcatagctgcctgctgctctggcagaggccagtaaatacagttcctagaagcagcctttgctgtctttttacactgtatgcggtttggaaatgaatgtagaaacttactgtggcgcatttacctttctgtgacaacttggcttttattgcctgaaccttatcgtgaacctgaagacgaaaatgcgcggacagtcgctgcttgtgctggcccaccagctaaatctggtatgcgcgaaagccattccctgtgcttgaatgtcccccacatgccgggtccacgtaaaaaaggttccggcaccctcctttgggacaaaaaatcatggcctggggggaggtactgcctggacatggaatcttggcccacctctgagcccaagaaacccaactgccggcacaaaaggccgccttgtataactacacttgggattgatctaaggaagatacaccctggattcaccagaggattcacgctggttacaaccctcttccttacgaggcacaaacgaacctaatgcgggagttctcgacactgacggtaaaaaacttatgttagtcggaancaccctttattttggcatacccagcgacatccaaattataagacacaatcttacaccgttcggcagcgttcacgct

SEQ ID NO: 149397 - DNA, 924 bp, Homo Sapiens
  misc_feature (39)..(39): n is a, c, g, or t
atgagcagggacgcccagcagttgcgcaccagcaccagntgctgtccagggggcagcacctggaagcagggcaagtacttgacgaagcgcagcgtcttcaacaggcccgctgaggctgcctcgcagaccacctgtggactcttgagcgccaccggccgcagcgcaccagaggaggtgtcccaccagggggccctcggccgctcctccggagccgcctgcgcttgatttgtgctcgtgggcacgcagtagagggtgctgccctgctgcgggtggtcttcaccgcaaaagcagcagcggtacagaagcgccgtggcccgcccgcctggtagcgcctctttaccccctggcctctgcgcgaagtaggagcggtcccaccacgcgccccctggtcgtgcctcgggcgctgccggagccacgtgcgtttgctttgagctagtgagcaagctgtagaggatgctgccctgccgcgggtggtcttcaccacaaaagcagcagcggtacaggagtgccacgggccgcccacccggaagccccgctctgcccaccccgggatcagagccgcacgaacagccccagcacggacccagcgtcgcctcgggcgccttcggtgccgcgtacgtttgctttgcgctcgtcagcatgctgtagaggatgctgccctgccgtgggtggtctttaccgcaaaagcagcagcggtacaggagcgccacgttccgcccgcccagcagcccctctctgcccaccccgggctcatcgccgcacgaacagccccagcactgatccaccagccgcgtctctggagcctcaggagccgcgcgcgtttgcttcgcgctcataagcatgttgtagaggatgctgccctgccactggtggttctccggacgcgtggtcgacgatatcccgggaatccggaccggtccagcc

SEQ ID NO: 149398 - DNA, 1614 bp, Homo Sapiens
gtggtaccggtccggaattttcgggatatcgtcgacccacgcgtccgcggacgcgtggggccgtagccagatccgttgaaatgagtgcagagaggtctcattgcgctcccgaacagacctgacgtagatccgaagtggcccgcgccatctcaactatgaggggacacccgtaggcggcgggagagggacgccgcgaggagccaataaagctccgcaaccggaagtgtcttctgggaggggtcgtacccggaagtgtggcacctcccgggccgcacccggaagtgtgatgccaccgccgctacggggaagtaatggtatccggccaattgagattcggagttaaaacagggatgtgcagatggaggtcggaggagacactgctgccccggcccccgggggcgcggaggacttggaggacacgcagttccccagtgaggaagctagagaaggtggaggggttcacgcggtcccgccggatcccgaagacgagggcctggaggaaacaggatccaaggacaaggaccagccacccagcccatcaccaccgccccagtcagaggccctgtcaagcacctctcggctctggagtcctgcagcccctgagaatagtcccacatgtagccctgagagtagctctggaggccagggcggggaccccagtgatgaggagtggcgcagccagcggaagcatgtgtttgtgctgagtgaggctggcaagcccatctactcgcggtatggtagtgtggaggcgctgtcggctaccatgggtgtaatgaccgccctggtgtcctttgtgcagagtgcgggagatgccatccgtgccatctacgctgaggaccacaagctggtgttcctacaacagggcccactgttgctcgtggccatgtcacggacttctcagtcagcagcccagctgcggggggagctgctagctgtgcacgcacagatcgtgagcacacttacacgtgcaagtgtcgcccgcatcttcgcacacaagcagaactatgacctccgccgcctgctggctggttcagagcgcacactggaccgacttctggacagtatggagcaggacccaggagccctggctccttgggtgccgtgcggctgtgttgccccttggccgccccgctgcgaagacgcactaggtgcgctcctccgacgttgcacagcgcctggcctggcgctgtcagtgctggcagtaggcggtcgacttataacagcagcccaggagcgggaatgtgctggccgagtgccggctggacccagctgacctgcagttgctgctccactggggggggtggaaccagccctttgcggcgggttgaggctttgggcaccctggggtggcctgcccccgctttcaaccctgaatgggttttttcctaccccctacgtgggcccccgcctgggaaggccttggcctggtccggcctgcctgccgcccttggcacccccaacggggaaagcctttccatggccaagggcccggcccggcccggggcccccgggtcccaaaaaaaggggatttcgatggcccccctgggggcccagggccggggccccctttgggggaagggttcgccccgcccttttccctctaagggccccccc

SEQ ID NO: 149399 - DNA, 918 bp, Homo Sapiens
  misc_feature (210)..(218): n is a, c, g, or t
  misc_feature (255)..(265): n is a, c, g, or t
tcttaaagaagttgccattttggagaggttgtttcaaaaacccctccgtgtttccccgccgggggggtgtttttattgtgggggggagacccccaggcctttttgtcctggtcccgaggtttttccttaggggaaacaaggctattgggcccatgttctccctttacctttagtgggggcggcggggcacccaaaaaaggaaggggtttnnnnnnnnngcgtgctcggagggggcccgagggcgggcccgacaannnnnnnnnnntaaaatattatattcaccgccgtgggagggaaggggaggtaaaaactggcttttgtttacaaggtagatttgttaaaatagttttaaaaccagtttgcagttgtaccttgaccaagatgtgaaggtttctgagaaagtatgtggccactgccatctaaaacatactgggtgctaaaattatcagcagccgttcttgttgtaattaaaacctcagctatacaacaaattgaccccaaggcttctccacgaaaaccggtaagttgtcaaattttcaagatcttcatgactatttatttttgaggtgtagtacttcattgccattacaggtgcatcaacagccttgataccctccccgttatctcgcacctcaattttatcaaatccatagttctccagtttaacatctacgcttgtggcaccagcatccaaggagttttcaataagctcttttacaacactgaccaccgaagtgatgatctgagaacttgaaaggagtcgaactgttgccgcaggcaattgtttcattttcgcttttaacagagcagcttcctgctagcgcgaggcaggcaattaccatccactagccgcaagcagccagcgtctcacccgatgcgcaggcccaaccccgcacccgcacccgcacccagcacccc

SEQ ID NO: 149400 - DNA, 1255 bp, Homo Sapiens
  misc_feature (1005)..(1035): n is a, c, g, or t
acggtttgccgcgcggggggaccccgggctaagttcccatttcctttccaggggccattggaggggtaggcctgcttgtgggccccgaacttgccatgtgggcctctgggtttttccgggggcgtggcttggggccttcgggacctggcgaagcctgttttttcctgattcccggcaaccccctgccaggtaggatttccggagccccctgttccctcggaggggcttcatttggggcctcccagtctgtggcccgtttcttgtcttctagcatctgctgttcaatccatgactcctccgatgtttttatggcatttcttcatcagagactgctctgcaaaccctggtttgaatgatggcaggcccagccccacaccaatggtggccttgttaggattcaccactgaattatagtggatattccgatggtagctaacacgaatgggttcgtcctcgttttgatgtatcccatggaatgtgttgatgggttctgtgctgtactggtacacctccacaggacggttgtacatctctgccatggcctgcatctcaatgtggttgccatggcaattgtttttccgcttcctgttaatgtaggtggtaaagtcctctgtgacatagttggagaagtagtcggcattcttcatcagatagtccatgcaatgctttcgcacaacctcatgcatgtcctggtctccatacacctggtcagctacagcccggaagagacaggcgccatcctccttcatctgcttgatgatgaagcccttcttgtctcgtagggccttttcaaaccaatgctcctgctgctcgacagtggcagggtccatagcctcgatgcgtgctgcagccgcctcatactcgtcctcactgttgtagcctgcgccgacctcctcacgctcgggactgcccccgccaaccgcgccaaccccgggagcttgacgtcgccgcttgctgtgcccaggcccggagcagcagccgcccacgcctacggcaccacccacnnnnnnnnnnnnnnnnnnnnnnnnnnnnnnngccgccgttgcgcccagcgcgtcgccgggaccgccgccgggaccacctgggcccccgcaaggaggtggagaagcctgttgtggccggggacccgccactgcaccaggcggcacggccagcgcccagcgatgaagagcgcccggcggtcctggtagcgggccttgaggcggtggcgaagctcgcggacgggcccccacgacgccggagtcacggtcgcgat

SEQ ID NO: 149401 - DNA, 1008 bp, Homo Sapiens
agcccagaaatttcttggtttccaggggtccatttggggaaggggttcactgaccagcaaattcgggcgttgggctggaagtgctcaatagcggttgggggtcacaacccggaagctgaggaccaggtggttgtggggttcccgtgaaccccacgcacgatgccagcaggggaaggtcatgttcacctccccagttactcgacccaggcagctggggctgtggccacggaagtaggcgtggacatactccgtgaaggctgtggctatgggcagggcatcctgggagcccaggaccacagggctcggaccccgggagactcccgtgtcctgtctgggataagaagctgggcctttccaaggcagtgctggcggttgaagagcccagtggggagggggctcagggaacgagacaggtccccattgctacgtgtgagagggcaggacactttcctagagcggaagtctcctgggtggggctgccaggccctccctggctgtggggtcagcaggtgcaggcatcaggtctcctccggccaaggcctccagcccccaggggcctggagacgaggcgaggggctgcggcgagtctggcagaggcggtgcccggatacccctggcctctgggggtggcgccctacagctgggcgggctctgcggggtgcctgggcgggggacccaggaatctggggaggggccaggtgccgcgtgggacggagagtccaggccggaatcctccacgttttcgggcgacgaggaggagaaaggggaggggctggaggtgaagcccaggctgctagagccttggggagggaagcgggcggtcagctccgaccctcgcccactcagagtccctgcccatcctcctgcaggccacggccacgtcgagggaaggtcaggggggcccccattcaaagtccttgtgcacgcccccaaggctacaccttctggtgacttccctcggacgcgtgggcggacgcgtgggtcgacgatatcgcaggaattccggac

SEQ ID NO: 149402 - DNA, 871 bp, Homo Sapiens
  misc_feature (715)..(810): n is a, c, g, or t
ctctttgagtacatacttctcaagattttcaactgtcttttccttaagggagcccttgtaatgaacccagtcaacagcatctcttacatcctggaacatactccggtaggacatgaagaggtccccatcgttaaatcctgtttcacaactggtatatctgggacaattagtaaaaaaatctactaggcaggccaacaggtaggtctctggtaggttgaatagtgtgttcagaatgtaaaatctttcagtatcatctcgctggataaatttatttggatactgttctctagtttctggtccccttataaagttaaatccatgtgcacagaccaagaggtttccataggcatcgactttcaaaagatttccatacagtgtgtcaaagacaagtcccctggtagggaatgtagaatcataagcaaagctgagcaactcctggggatagccaatagaaactaatctctccacagtaagctcaaaaccaagggactcatactctggggacttgtacacagcaagggtataatccatatcaaaaccaaaacactttatcttttccattgctaaacttcggttcacaaacacccgatgataggcttctcgacgatactttttcagggcatgcttatccatgttagcaggcatatctgctgcattctgtaaccgatcactccaggaggttgacattttattttaactgtattttgtattactnnnnnnnnnnnnnnnnnnnnnnnnnnnnnnnnnnnnnnnnnnnnnnnnnnnnnnnnnnnnnnnnnnnnnnnnnnnnnnnnnnnnnnnnnnnnnnnnggctcggacgcgtgggcggacgcgtgggtcgacgatatcggaagaattccggaccggtcca

SEQ ID NO: 149403 - DNA, 913 bp, Homo Sapiens
ggggggctgcctttcaaaggtccctcccggggtcctttggttcccccgcttaaggggggggacccttccacctttttcggagggtgttcaagaggccccccgtggggttcatgggggtccaccagcccgctgtgctgaggaaagccggtggctcggcccaaagtgggagaactgagccaccggggccggggcagggggcagtggcccccccaacagccagggcctgcatggggccgctgggccatagctggggctggttcctcatcctcatttaggtcatccatggcggttgactggagctccagtgggtcgatcacaatgttgggctttggaagcaaggtcatctttgagggtcttccgcaggtgcgagaggaggcccccccaggcgctgcaggtcaaagtagtccaccttgccattatagaagacctggggcgggatgtaggcctcctcactgaaggaagcatgaggattggaagccttgtattcatcccaatagtagcgcagggcagagatcagccggtgtaagaagcagaccatgtactcaggggggcagagcatgggcatgttcccccggccactggcgttctcctgcagaaacttgcgaaacttggtcaggaagatatacctagaagcttcacccccattgtcatctttattgtccagcagcagcttcaggatctggacctgtagttcttccaccacttcgatgcgcttcctgagccgctgacagccccgttcgtaggctcgccgccgcagccgctcctctgcggtctcctccttcatctccgtgctctctttgccctccctactggagcagtggggccaccaggtggtgggaatgagctcctgcaggccggcctcctccacacgcagcggacgcgtgggtcgacgatatcccggaaattccggacc

SEQ ID NO: 149404 - DNA, 603 bp, Homo Sapiens
  misc_feature (1)..(1): n is a, c, g, or t
naaaaggcatgagccaccgcactcggccaatctaatttttaaaaacaccttttcctcactggctggagcacgttctactttactgggaactgaatgaatgtgcaactctaattacagcccctccgaagtgcagtggcttgggaaccttcccgttccgggaggcggcctgcagagccctcctcctacaagtgtgagcacagggtcagggttccatccaagcgagcacctgcttcctattttccgactaatttcggtcccctgatacggaatccgggatcctgcagacaggcagcgggtgacagcaagcacaagggtgttcgatgacacctggagaggtcaggagagccagtcctgcggtgcagaggaagaaacccagcacagaggccaacagagccagccccagcctctggaggcctgaaggtaccgccctgccgcgcgtgggcactgctccctggcgccgtccgtccactgaccatcgtccctcggcccggccgcccgcgcggggcaggcaacgcccgaccgggggcctcggggaccaggaggaacctgcggcgttaggagctgaccggacgcgtgggtcgacgatatcccgggaattccggc

SEQ ID NO: 149405 - DNA, 1014 bp, Homo Sapiens
cttctcgatgtgcacactccttccatctgtcgtcttttatattatctgtttgtgacccccggtgtgttatcgcccctgtgtgtaatctaaactgctgccaatcaacaacctatattcccgcgttcgcaaataccagacgggtccatacggacattttgtcttcaggaccagatttgccagatacctcttccgtacttcacaccttattttgccttgtcagtttctatctcgccatagtcttctcacttacttctcacccaacttttttttcccatctctgaacctgtgcccatggtcctggtgggagagagggcaggaagaagtacctgcatgtgagggggatatgagctaccaggagcctgagcagaaggtgtaggtggcgaagcagtggcagcaggggttggtgctggggccgcttgtggggtaggtgctgctgaggaatccagtgtataatttttaaaggcctcaatatcctcaggcttgccaactgtgatacagatgatcgctccgatgggaacatccctggtaccttcagcaacaagtatctttgccatataacactcctccaggctctcaaatccaacagtggctttatcagtttcaacctctgcaattaggtcaccttcattgattttgtccccctcttttttttcccaacgggctatggtgcctgcctgcattgtgggggaaagagaaggcaatggaaccttctgatgcgggggaagactgtaatagcggcggccgggcgaccccaaaagctgcagcagtaagcggttccgcggcgtggccccagaactgggggtccagccgcacagtgcccggaccccgccataccctgtagtcacgctgttgcgacgagcgggagccgggccagatcgcgaggtcactcgtggagttccgggtacctcctgcaaggccgtccaccgagcctcgagtcccgcccatggggctacattctgagcccgtcgcccacgcgtccgcggacgcgtgggtcgacgatatcccgggaattcc

SEQ ID NO: 149406 - DNA, 1116 bp, Homo Sapiens
ctggatctagaggatccttataggcaggacactgtgggaggcggacggctgtgcagtgggcgaactcgttttggatggtcgtctgaatgaggttgtctgtctctagatccagcgcagcagtggcctcatccaggaccaggatcttggatttccgaagcagagccctgcccaggcacagcagctgcctctggcctatgctcaggttgccaccaggcctctgtcacttcgtgggataacccaagttgcaggctggccacaaaagacttgaggtgagccagctccaaggccttccaaatctcctcatctgagtagttgttgaaagggtcgagattcatcctcaggcttccagagaacaggatggggtcctgggggatgatggtcagcttctctcggaggtcgtggagcccaatggaagcaatatctactccatcaatgataatctgaccaccggcagcctctaagattctgaagaggcagtttgtgagggatgactttccagctcctgtcctgcccaccacaccaatcttctccatgctaccgatgtcacaagtgatccctctgaggaccagatccagctcaggtcggtaccgcacttggtagttgttaaactggatcttgcctttgctgggccaatctggcggaggcctcttatcagtcacccagggtgcctcattttccacttttgtgtactcagttattcgctcaacagccacaatgttggtctctatttctgatgtcatcctcaccagccagttcagggtttgtgtgatattgagtgcattggacagaacaaagccaacagtgtccccacttagggtatctctataaataaccatcatcaaggctgaaaagaagacagtcaggttcccaaccagctccaggcgaattgcaagccacctgttggaggtgatccaggaaaagacacatttctggttggtgtcaatcctcacctcattgtgtttcagaaatcgctgctggtgctcaaaggcacggataactggcaaacctgatacggtctcgctgaagtgagagtagattggggacctggtgacagagtccagacgcctcagccggacgcgtgggtcgacgatatcccgggaattccggaccggtacc

SEQ ID NO: 149407 - DNA, 868 bp, Homo Sapiens
ccggtatcgctattggccccatgattgacagtataggccaggaaattttgaaagtaattttggtccaggactctgagatttctaaccctggctgtttcaatgaaactgcattcgcactggtctgaaattgttgtataccctgtttcaagtcccaatttccagataattttgctgttaccatcaaccctgccacttgcttgtgacaaagatcctaatccaaagggtgacacaacagatctttcaccaccatcttctactttaaaatagtgtgtagttaatgaaaatagaactttgattgctaaagactaaacaagtaggcaccagactaagctgatattcatttcctgtgtaggcttcataaaattgtagtagacttcagttactagatacacaactgtagcagccactgtgaaatccaccagccactggtattctggaaagtaatgcaatgctaaagtatccacttctgtaactgactttgtttctagatgaaggtcaatatcctttggaatggttaatggcttactttcaatgtgaccattatatttcctatcttttttggttttccctttttgttgtttccctgcaagaattcttaattcttcttctgtaggatgttgataccacctcaaactgccattacagagtagccatcgagcaagagaatagtgaggtataatcttctgcatgacactggccatcaccatggtaacaaccagctgtatacctatcacacccatggcgcctaggataggtcgtggaccagacaccctggagtttgccggggcagtcccaaacctcttacctcccggtccttgagccgagagaccggacgcgtgggtcgacgattggaaggaattccggaccg

SEQ ID NO: 149408 - DNA, 908 bp, Homo Sapiens
taagcccattataccattcccattccttttttatcaagattaaggatcccaacatcgtgtgcctttttcaaacttgaggaccagagtttttattgtctccagctctgaagtacagatttcccaagcttccccaataggtccacgttatctcgcaataaggattttttctctagtgaacagatggtactgattgctcttgagttgtcaccagtgtgcacaaaagcatacgctttgatccacacagagagccagtccaagttaggcacggtttggatcacattcattgtcatggatgccacctctgccccttttacagaaagggacaacaagcctagaatggcatcaagggctaatgggcactgcctcagcacctccttatagctggtgactgaagggcgctcctgaccagccttcttgtacaggtttgccagcatcatgtttattttgggagttctttgtcttgaagggatcccatcaagtatagcaatggcatctttatcttgttttagcattgtataacattcagccattttgtatttcacttcaatttcagatggaagacactgactttgtggagtagatgcagaatttccagttgaaggtctcacttttgaagttttacttagcgctttcttctgctgtaaagccatggtatacttactcacagcattccgatattccttatcatgaaagagagaatctgcatgatacaccaaaagctggtacttctgaggtggggagaataactcagggttgttattactcattgtaagtaacaagctgctgaggagccgcacgttggagtgcagccccgcggccgccatgtcccgcacgtggtctatcacattcatcctgctctgcaaagccgccggacgcgtgggtcgacgatatcccgggaattccggacc

SEQ ID NO: 149409 - DNA, 1404 bp, Homo Sapiens
  misc_feature (41)..(103): n is a, c, g, or t
  misc_feature (122)..(178): n is a, c, g, or t
  misc_feature (577)..(577): n is a, c, g, or t
tttccaccagacaccctttttttgtccttaaaaagtttccnnnnnnnnnnnnnnnnnnnnnnnnnnnnnnnnnnnnnnnnnnnnnnnnnnnnnnnnnnnnnnntcccaaggtttaaaagttnnnnnnnnnnnnnnnnnnnnnnnnnnnnnnnnnnnnnnnnnnnnnnnnnnnnnnnnnaactttcaaaattgggtgggtaatgggtgggtggtgctccctttcttgggggggttaaagaaggcccttttttcctggccccccccttggggggcggcttctcctttgcttttcccgccccaggggctcttaacaggtctttcagtccctttccccgctctttctcacccgagggtgggacaccagcagggggtttcaccactttccttgacctcgatgctgaccgtctcccgggttcttgggcttcttgatggggagtacggtcttctgccacagatcggatagaagactcccttcccggctttctttttgggcttggcggccaggcggctgcccccacattccccgggctttgggccccgtttcttgggaatggcctgagggtcggcctcagctttntggtttcctgccggggcgtttgatcaccatgacctgggtggatgtggtggccccacccccctcagccttgccccctggggaagtttgaaaaggcatcttgacaaggagcttcccaggacttttctccaggacccttttcacctgcacaccctctgacgtggccgccttgggtctcgtggtgccgctccctttggggcgtccccggcctctgccagttcctggagctttgggagatttgggcttcttaggtggtttctgctctcgccgggaggggctccctctcccagttaccgtgaagtcaaaatcattagggtccagggatgtgtcgcctaccttttcgaagtacgcaatcaactccactttagagcgaaaggcttttccctggggattgatcaaatacacatcatacttcccagcagagcggccagatttcctttgcttaagcttccgtgtccagccttcaggcagggtggggtcatcatacatgggtccccggtcacggatgatggagcgccgctgtttgggggaggcagaagcttccggcacagccggggcggagcctgacccttctgatgtctctgctttgcctgcctctgcgggctcagcagagtggtgggctgatggctgcacgggctcatgcttgccctctttctcttctttcttatctttcttcacctttttaaacttgaggggtttgtccttgaggccctggaggtcctggtcttctgacttttcttcctgagccctaacatcccagctaccatggaatcctgttggagctggtcttctgacttttcttcctgagcctcgccattcaacccagacct

SEQ ID NO: 149410 - DNA, 840 bp, Homo Sapiens
  misc_feature (77)..(77): n is a, c, g, or t
  misc_feature (115)..(116): n is a, c, g, or t
ccccctttggaatgggtttccaatgggtcccttttttccaagccaaaaagccattcctgaaactttcttcctggggnctctccatcccccgagagtcatccccctcagactcagnnagggtagaatctttcccctttgtatcaccctgtctaccagtctttctttctttcaaggaattgtttttttctcattctgtaagcgtgcgctagaatacaactgctcggaagaactgtttttatctggtttgttggccagcttcttggtggggaactgaaaggctactcgaagaccaatactacttcttctagacctgcttcttctaggggtagccttatcttcttcttcatcttcctcttcctcgctcaccaaagatgctttgccatcatcactcaaatctgactccacgaccattacttctgggttagtctttccattcagatcactctgcgtaaatcctgcaaaatcctcagtctctgagtcagtgtcctctataaaaattcttcttagctcttctgtgaagtatttggaatgaaagcgcacatcctgctgtttccctgactctagtgagtcaaaactatcgcagctctcctctgacgagagggtttccatgggaacatcatctcggaagccaacaaactcttcatcatcactgggggcgttaaagatgtcagccacttctttagggatctggtagcgagtcgccaactccattcttcctaaccgggctccagtctcctcccagcacgcggccacgggagcccggactcaccacggcccggcgcaccaagaacgccccggacgcgtgggtcgacgatatcccgggaattccggaccggtacc

SEQ ID NO: 149411 - DNA, 451 bp, Homo Sapiens
  misc_feature (46)..(58): n is a, c, g, or t
  misc_feature (124)..(167): n is a, c, g, or t
tccgagtagctgggactagaggtgcacgccaccatgcccagctaannnnnnnnnnnnnggtatttttagtagagatggggtttcacctggttgggccaggagggtctcgatctctggacctcannnnnnnnnnnnnnnnnnnnnnnnnnnnnnnnnnnnnnnnnnnntgagccaccgggcccggcccaaagatccctttttaaacagtgcattttggagtctgtagtggtgaccttttatttttccctaggcactgaaaatgaagatgctggaagtgactatcaaagtgataatcaagcaagttggattcatcgtatgataatggccttggtgagtgattcagctttattcaataccagagaaggacgtgcggggaaggtacacaacttcaggcggggctggaatctcaatacatcttatccacggtctccttggagtgacttggccacac

SEQ ID NO: 149412 - DNA, 2206 bp, Homo Sapiens
  misc_feature (394)..(394): n is a, c, g, or t
  misc_feature (814)..(814): n is a, c, g, or t
  misc_feature (1839)..(1880): n is a, c, g, or t
cgtgaaaattggcccgcttctattgattcggctgccggatcccttatggtgaaaacctttgttgaaattggaccttctttttgaaatggtggcactgtgttcttcttctctgtgagggaaggaagtgtctggcctctggtgaacacccaaatctttctgcgggtgtacctcgcaaaatgtgggtaagagtcgagtcgctgcgttctgtgaagtaaatttccgaagactgctcgaaagttccaaattaggagggggaatatataatgaagcctgtgtggagacatgactgcaatcacgatctgttggcaaaatcttggttccacaaaaagttaacctggcatcaaatcactgaagctaggtttttcagcttccaatccctctggaagacatgtgngaactgcaaccaggacatgactgatagagcctgtcaattgggacattcctcacggccacctggccttgcatgttgacacagtacttgttgaacactgagttgatctgggcatcctgaagggccccaaaatagcagtgtctggcgatagtacttggaccaattattgaggctccacatccgcactcgagaaaagtctaccccatgtgagtccaggggtagtaggttcatgtgattcatcaaatgcaggacatgctcccagttctgcatcaggtaaatgtcagcttgatcaatgatgagaagctcgatagaagacagaaagtcaaaatctctcttcttctctccttctccaccaatgatggtcctcaagcccaggggggaagcaatgaggatatccgaggagtaaaacggggcatagagtcngggatgcttctctgaagtattgccactcccaatcctgaagtggtcatcaatattgcccacaaatacggcttcataatcctcaggcctcttcaagttgggtggtctctcctcgggatctgatccatattctccctgaaacctctttttgttgctcacaatgattttcttcttgctgtcaccctcgaggaggctgatgaagagctgcaccacccgcaaagcagcttcccggaatggcaccactatcagtaccttgggccttgttaacccttggtctctgaagtcatcatcatcacccactccaaacttctggcttcggcgtctgctattgttgccaagcacctgggcattggctttgaggatgtgatttatcacatgcaggcaatacacatggcggatctcttccccgttcttcagagcagtcctttccgggtagaacaggtcccggtaagaatttcataattaagaagagttttttctggaggggggtgaatgggctgcttgatttttggggacccagataggaactggctgttggtcttagtccaggtggattccagaggcttctggagatgaagtgactttaagtcaatatcctttgggggtttaaatgtttcccaccttctgaaccttagaggaaaagaaaagctggcccagaataggccatttaagctcgtgggtagttttgggatttgtggcaacagcctgaattgctttttctttcagttctttgttcacatgttgaagaaatggatcttgagaggctttcaaagaagagttgtctccactttcctcttccagaaaattggtttccaggctgaacagtgactcgtgttttgcatctgtgaactcttcaggggatgtttgtgatgtgcccggtggctcttccccatcttcttttccctcagggtcagcagataaagctacattctctggactttcagtagactctgcagccatctcttcttccacactgacatcgctaccaccatcttcatcgttcatttctgcatcatctacaatactgnnnnnnnnnnnnnnnnnnnnnnnnnnnnnnnnnnnnnnnnnngaaacattctttaatgtagcaagtagtctgtggtagccagaaacttgttctggttcactctctgagtcgctttcagaatctgaagaatctgaactctctgacagttgacaaatctgtggctttgcttcctttctggaaaccctgtcatagaagggatgctcctcgccgaaatctcgaagatgtttcttctgctttttagttagggtgttgagtagctggctctggctccggctcccgcgtttgcccatagcgaaaacgtcaagtttgcccacttgcaagcggacgcgtgggtcgacgatatcccgggaattccggaccggtccagc

SEQ ID NO: 149413 - DNA, 951 bp, Homo Sapiens
  misc_feature (240)..(240): n is a, c, g, or t
  misc_feature (252)..(252): n is a, c, g, or t
  misc_feature (308)..(308): n is a, c, g, or t
cttccagtaggccaatagacctttttttaggggttttccatggccatcttggttttgtcttggccccaacagggagttttccaatttactggctatccagttgatcatttcacccggaggctttccatcttaggatgctgctcctccattaaataatggacttgacaaaagattcccaaatctggctggttctcttttgaccggttacctttgacactgacaccaagggcctgcagatcntgaatcattaangtgggacttcaaatgtcagaaattccctggtgccatcaggtgtaagaacaatatcntcatcttctgctttcagttcccttgggtggaaggcgtcttcctggcgaaagaccagaaggctcacagttccttccatcttggtgcttctcaacagcgaaacaacttcctcttgggatttgcccactaaatctactccatttacctctataagtctgtctcctgccttaagtcggccatcctgaatggccgccccccgggggagaatgtttttcacatagattggagctgagccacctattgttacatctctggaagtgatgctgaatcccaaaccttctgtacctttcttaagctggatattaagcctcttgcctatttttttggtgttataaccactgcttacagtcgtactaaatacattctgaggtgccgaggctggagcggatggtggttttcccgaggggtgtgcgctatgaggtagtcttgagtgagagtctatctgctcaggcgggtggttcagtcggggtgctctctgcaccgtgtgaagccctgcactgttcacactcctgttgtcaatatactggctgtcagggctaaaacggcttgaatagtaattgttcttctcactttgggatagttgttcatactgctctttatttgctgcaggaaccacatggaaccgcatgatggtgtaccacgact

SEQ ID NO: 149414 - DNA, 877 bp, Homo Sapiens
ggtccggattctcgggatatcgtcgaccccgcgtccggggtccagaaagtgatcgctgccgtggtcgccatggggaagtcggattttcttactcccaaggctatcgccaacaggatcaagtccaaggggctgcagaagctacgctggtattgccagatgtgccagaagcagtgccgggacgagaatggctttaagtgtcattgtatgtccgaatctcatcagagacaactattgctggcttcagaaaatcctcagcagtttatggattatttttcagaggaattccgaaatgactttctagaacttctcaggagacgctttggcactaaaagggtccacaacaacattgtctacaacgaatacatcagccaccgagagcacatccacatgaatgccactcagtgggaaactctgactgattttactaagtggctgggcagagaaggcttgtgcaaagtggacgagacaccaaaaggctggtatattcagtacatagacagggacccagaaactatccgccggcaactggaactggagaaaaagaaaaagcaggaccttgatgatgaagaaaaaactgccaaatttattgaagagcaagtgagaagaggcctggaagggaaggaacaggaggtccctacttttacggaattaagcagagaaaatgatgaagagaaagtcacgtttaatttgagtaaaggagcatgtagctcatccggagcaacatcttccaagtcaagtactctgggaccgagtgcactgaagacgataggaagttcagcatcagtgaaacgaaaagaatcttcccagagctcaactcagtctaaagaaaagaagaaaaagaaatctgcactggatgaaatcatggagattgaagagg

SEQ ID NO: 149415 - DNA, 900 bp, Homo Sapiens
  misc_feature (27)..(27): n is a, c, g, or t
cgttcccatacctttgaaaagttttantcccatagaaggtggagagaaagccatgtggcttcttagaaagggactggacaccactgaatggtgttgacagggccccctgtggcctctcaggtggaaaagcactttccggggaactgtggtttctttataatggctattcaaatacggctgaataaactcagacactcccgggcccacgtagagaggggctggggcacgccctgcagggggcccctgtggctccacgtctttccccttgcctgtctccgtgcttaatgcctgccgctgtcttagtcttctgggagtatagggtaccacacagtcctcacattttttcttctgaaaagagctgccatttttacctacggtttcagactcactttgagcacggaaagatgacttgggaaagttcctggagagttttacttgcttaaagcgggcagctgccaggggcatgtggctggctggaacatggctcgtccacagagaagaacaagaaggctctttgatggggaaggtgacttgaggctccttcccgggccactgtagcctctggctggggcaagatccccgatcgcttctcccaagctgagccaatggaaggcgatagccccctgggtcttcacaggagccatgctttgtgggctgtgcccctgctttgggcacatccagtgtaccagatgcaaaatcctgcccaggtggtctggccacaccagaagtgtctttctgctggccggtagcattaaaacttcctgcatgctctgtctcagcctccgagtccgaatcatcatacgctaccaatgaagccattaaagacagagttcttgctgtcattcaaagccaaaccaccggaagcgctcggttctccccggaggcagaccggccagcaca

SEQ ID NO: 149416 - DNA, 1183 bp, Homo Sapiens
gtctctatggagcggaagtgagtggcgtgttcggatggagaggagtagaagagggctgaagaatgagagtccaggatagattgtggaagtgtatgtggtaaggtattcgcagaggataggggacgggttgagggggagaggtcgttgtgcggcggaggtggtgggagctagttgggggttggagaggtcgtggtgagcgggagttcccatagtatcgaggttggagatgggtgggcggcacgcgtgtagccgcagtgggagtgtgacggggatgtacacccaccggatgattgtgccatgggtccacgggtgttgtggagggggtgtgtgatcgcaggtgttggcgcccaagaggggggcaggtgcccagggagaggcctggaagtcaagggccgtccaattgccaagtttgctagcgtatttaccttctagcccccccagggcccttggtcacctggtggatgtccagcgagaaggtggtccggctgatcatgaacttctccatctggatctcccgcagcggcctcttgagcagggccttggtcatggcgttctgggctgtcatgcgtggggctggttcaaggtctgtcacagtcatcaccgacagcaccgggtcccagatgcgaaactggacatcggctcccacggacagcacagccccgtccttagaggccagcttgcagggagggacgttgaaggctcgtgtcctcagatccaccctctgaaaggagtcaatgaagggcaagagcagaaccatgccaggtccctggggggtgcggatccggcccaggcggaacacaatcatccgctcgtaggtgggcacaatcttcagggcaaaccagccagaaatggggaaggtgaccaacagcagcaagaaccccaggaaactgatgaggccatgacagaggcaggagggccagctctggggtacatcggcccctgtccccacgccgccccgctccggggacaagcagcccttctgcgagcccagaaagccgaagctcgactgctggaagcggtcaaaatcacccaggggcagcgcccggtacccagacctgccgagcatggcttttgacaggagacacgccccgcgcctccgcgcggcgccctccctggccagtgggccctacgcggccccggacgcgtggtcgacgatatcccgggaattccggaccggtaccag

SEQ ID NO: 149417 - DNA, 882 bp, Homo Sapiens
ttcctcgtcctgtagtgagctccaggaataggcgctttggtccgctgggcaggacgacattgaactggtagcaggcccgacttgctgaccagggcctcagacaggaagggctgtagagcagtcagtagcccctccgccagaggctgcttcggactggacctggcaccaacttgaggggcaggtggctcaacttcactcaccatctccacggtgtctgctggccccggggacggggcacctcctgccattgagttcatgcttcctcccaggaagtgcagggccagctgctggagggtgctgtccaggttgggcccagctgggctgtcctggggcggctggagcacggcctccactgccagctccacgcggtctacctccagcccccaggcctggtcacatcgttgatctccagcagaagctggtcgctgatcttgagcttctccatctggatctcccgcagcggcctcttgagcagggccttggtcatggcgttctgggctgtcatgcgtgtggctgtgttcaggtctttcacagtcatcaccgacagcaccgggtcccagatgcgaaactggacatcggctcccacggacagcacagccccgtccttagaggccagcttcagggcaaaccagccagaaatggggaaggtgaccaacagcagcaagaaccccaggaaactgatgaggccatgacagaggcaggagggccagctctggggtacatcggcccctgtccccacgccgccccgctccggggacaagcagcccttctgcgagcccagaaagccgaagctcgactgctggaagcggtcaaaatcacccaggggcagcgcccggttcccaggcctgccgagcatgggtttttgccagaagcccttcgtgc

SEQ ID NO: 149418 - DNA, 1374 bp, Homo Sapiens
  misc_feature (55)..(55): n is a, c, g, or t
  misc_feature (77)..(77): n is a, c, g, or t
  misc_feature (337)..(337): n is a, c, g, or t
  misc_feature (388)..(388): n is a, c, g, or t
gaacaggcgcggggcacgctccttgcaccccccgtcatctacacgtcccactacntcccgcggatcccctgcatgtnaggacacagagcggtctcctcgccagcccccccgaggtgcgcggcacgcgtgccgacagttgagcggcacgcgcgctgattagttcactcgccacgctaccgcgggcagcgggagtcgcggatagatcgcggggggcggaggcgtcccgggggccgcaggcgtctataagttgagtgtctgtacaccaccggggggcctggtgggggggcgcgtcgttgctgcggcggcaaggagggacgcgagacgcgtggtagccccnaaaacacggagacgtgtggagcaaagggaggcacttcccccaaatggcgtnacggaacagcgcacgacacagccagcgcggtagtgcggactagacatggcgccgtgcaccgcggcagacacttggcggcacgttactcgggagctagagcagcagagtgtatgtagaggggacgtaagagggggcggacgagcctgccccaggcacagcggggcacctcttcctagtaggatgggggggtggtggggagggtaaggccggagagggacatggcgtaacgagcggcgaagcgtcccccgatcttgcgccacagaaggccgcggggcaacacccagggcgctcagagggcaaccagcgcccgggaggcgccctttttcccgaaacctttcggtcggccctgcgcccaactggcctgcgccggtccagtggaataaaaggcttcctggagtcctgtgaaatggaccccaactgtggcaagcctccgggcgggaggaaggtgccggtcccgacggaccggtggtgctcacgagcccgtgcgggctcattcggggttccccccagtgcaggtgcaggggcggtggcactgtagggagactggaggccctggatgtgcatgtccgagggcaggttcagcttcactgaatggccattgttggtcaggagaaactgcttgttggcaggcagattgtagccttggaactcgaggggcgtgaggctggcgtcatactggaggatgtcactgtgcaggtgtatgggggactgcagcaggcccccacacgacgggtacttcttggaccagctattctccccatcaggaccaaaataagtccacttggaaccgttcactggggccgggctggaaggctgttcctttaagatcaccagcaggagcacggccgccgcgtgcaggctgcgccggggcatcttcgcgggctcctgcggggcgggcgcgggctgtgccgggggctcccggtggccgctcgctctccagctgcacaccgggaccgcgtgcgcgcagcctgggtgccgtggcgagt

SEQ ID NO: 149419 - DNA, 777 bp, Homo Sapiens
ctgcacccaggtgtctggcgcttcctgacatcatgaggaacagcgatcgacgggaatgatgtacatgcagtatttcgtcgaagaaggccttctgctcctgggggttcttggcccttctgggcctgttccatgtccaggcgcctcaatgacggccgccgtctcaagggcctggggctgtggtggcggcatgcagactgcaccgaggtgttgaacagctccaggtccacgtcctccaccgtcatggccccggcagccccacggggtgcgtcaccaccgacacgcccagccacgttgccggccacatccacgtgcagggtcaagctggtccgacaggtgcgactccaccagggagcacgcagggacaaaggaggagacatagccaccagcttccaggccatccagggccccgggtcgccttgggatccggacccggtacaggccattcagggctgccacatcccggagtcggccccagctcctcctcgctgagctgccgctgtgacagggacaaggtaccatcctgcctggttccagagcagtgagccccgcttccggaagttggcactgtcactcgatctcaaatgagtgctccagcagcagccccaccgtgccacaggcctcgcccctctcgaccttccgccccagcccctcgcgcaccagtcccggcccggcagccgctgccccgggctcgactgggcgctgctaccagccatcagcccgagcaggagcagccgggttgccccagcgctggctgccgccatctcggcttcttcccac

SEQ ID NO: 149420 - DNA, 855 bp, Homo Sapiens
  misc_feature (104)..(104): n is a, c, g, or t
gtttctggcgctcctgacatcatgaggaacaggacgacgggaatgatgacatccatcaggcctcctgtgcggtggcgcgggccctggcgcagcaggacgcaggnctgtgagcaacacgggccccccccaggatgatgtgccagtatttggcagaagaaaggacttttctgctcctgggggttcttggccttctgggcctgttccatctccaggcgctcaatgaaggccgccgtctcagggcctggggctgtggtgggcggctgcagctgcaccgaggtgttgaacagctccaggtccacgtcctccacctcatggccccggcagcccccagggtgcgtcaccaccgacacgcccaccacgttgccggccacatccacgtgcagggtcagctggtccgacaggtgcgactccaccagggagcacgcagggacaaaggaggagacatagccaccagcttccaggccatccagggccccgggtcgccttgggatccggacccggtacaggccattcagggctgccacatcccggagtcggccccgctcctcctcgctgagctgccgctgtgacagggacaaggtaccatcctgctggttccagagcagtgagccccgcttccggaagttggcactgtcatcgatctcaaatgagtgctccagcagcagccccaccgtgccacaggcctcgccctctcgaccttccgccccagcccctcgcgcaccagtcccggcccggcagccgctgccccgggctcgactgggcgctgctaccgccatcagcaagagcaggagcagccgggttgccccagcgctggctgccgccatctcggcttcttcccaccagcgaagggacggc

SEQ ID NO: 149421 - DNA, 1625 bp, Homo Sapiens
cccactgacatgtaactgtttataattttgagtctcactgagctcttgatgacaaggaatggctgaagaagagggagctgcagagacttacgtagttccccaacctgcaggatttcacagagcattttggtgagctcaatgggaccttgcggccaaaggggcattcatgtttgtcttcccggctactgttctccaagacaatctgtcgggggaagagaaagggaggattagggagatgaaggaggaaggcaggagatgtggcaccaggactgagaaggccagctcccctgcctttacccggatgtaggtgtcctggtggactttagccaagtacagcatgttgtccaaggccagcattccaggaggagtctgggtaaagtccatggctggattgatgtggttggtaaatcccagcattttgtagtcctttgtgtacatggctttgcgtttttcggtcccactcccaggggcattgctaggatcagactctgcgtcaaatgcatcctcctcagttcaaatatgatgtccctttgagcctggtcattggggtccatcttggtcatcatcctttcttccagaaggttaaaggttaggacttgaaggacatatagctgatgggccatctcagttttgatggggcggttccctcggaatcacagtgattcagcgattatacgagcggaagatgcttctgtgcaaatgcatttgccatatcctgtcgtttgtcctcaggagccttcagaaaaggtgcattaatcagtgcaatggcgtaggtctgaatctcctggttggagacctggaggtgtgagatgagctgtcccacggtgatttcctcggctatcttctggtacagactctggctgttcaagaccatgctctccaggatgtccagggacctctgaaggattgacacgtccaccatgggctggctcacataccctgcaatctgcttaataaaggtgattgaaaccatgtcccaggagacaatgccatggtccatgagctctaggaaggcagtcagggtgaatgccagcatctcactgtagtgggacaagagcttggttccactttccacgagccttgtcagcacaatgatgccatccatgttgatgaactcagtagcgaaagtcacgtcggcagagagcttggccagctccttcatggcatccagccgggtctccatgttggatgactgggtcctctccatcagctggcgtgcagcccgggacggggagatagccagttgtaagattgtcccattcttaatgtcactgcgagtctgttcggtgatgtacagctgaggaccatctgcataacggagggtataatactctgggtttggcaacgaccacccatcacaaacttccttgataatggatgccaggggccgtttctggtcgatttcaaggagctgggcgttagcacctggccactcaatggccactttgacaatgtctgacggtggtggcatcgttcccaatgggctctaattctgcgagacaaaaacacagacacggctgccagggcgcagacctaggcccagctcccgctcccgggtctccgctcggcggctcctcccggacgcgtggtcgacgatatcccgggaattccggaccggtccagcc

SEQ ID NO: 149422 - DNA, 921 bp, Homo Sapiens
ccgaaaattagggccgggggtggggccaggtttgggccaaattacgtgtacccccgaagttaagaggtttgattggcgccaggcctaggcccccttgatggaaggaggggacggcccttttttccaccaggccattggccaaattcctgccaggaggggggggcatgctggtgaacgtgaggatgggcagcagggcgaacgggagcagcaggctctgcagcacgtggagcagatcattgaggcccgacaagtccttcagggtcccggaaagacagccacgagcacggtgggcaggatggcgcaggagcgggtgaggaggacacgggcgaagcgtgaccaccgcagcctcaggaagccctccatcacgaactgtcccgcgtaggtgcccgtcatggtggagctctgcccagccgccaggagacctatggcccagatgtagagggccgcggggccgaacaggcagcccaggatcacgcccccctggtaaatgtccacggccacggtggcgttgttcatggggaagatcttggcgtagtcgtggaggctgctgttggcacagatgttgaacgcagcctggttggttttctggtagaaggcctgcccaaagacagccatgacaaagaggttgatgataaaggagacggacagggcgatggtggcctcaatcaggaagtacatgttggcttctctgatgtccgctcggcgggcccggtctatctctcgagacttgaccagggccgagtgcaggtagatgttgtggggcatgatgatggcgccaacaatgcccaccgcctgcagcagctcggggtggccgcagcccgggcacgagggcaggaacaggccccgaagaagcgctccctgctcaggacgcgcggacgcatgggtcgacgatatcccgggaattccggaccggtaccagcc

SEQ ID NO: 149423 - DNA, 1139 bp, Homo Sapiens
  misc_feature (289)..(289): n is a, c, g, or t
cccctccataagggtttctcggcccggtgtgaaactccgctggttcctgaatcaggggttattttccgattggaattgccttccccacattcccttacctttcaaaagggcttctcccccagggggaattccgctgatgctgagtcaaggctgtgttggagcttaatcgtttttccacactcttaccattcataaggtttcttccccagtgtgcattcgctgatggacagtgaaacttgagctgcaactgaaagttttcccaacattcgttccattcatagagcttctnccgcagtgtggaacctctggtgctggcggaagacagagctgctactgaagtccttgccgcactcgttacattcatagggcttttctgccagtgtggattctctgatgctgaatcaaggctgtgtctgaacttaaaccttttccacattctttacatttaaatggtttctttccagtgtgaattatctgatgccgaataagtaatgagttatatctgaagtattttccacattctttgcattcaaaagacttttcaccagtgtgacatttctcatgtcggtggaagtctgccatttgaatgaaatatctgccacattgtccacattcataagatatctgaccactaggatttgtctgatttgtagtgagttgtgtgctgacgctaatattttttcctaatttctcaaacttctctccattcttgacctcataggcctcatggtgcctggctgaggtatctgtgaaatgtctcctctttgactttgtcttaattatccaatgaccttgtggctgctctaggctgctcccaaagtcaaggtgctgggaaacattccctggcaggccccccaccatcagtctgaaggactctgtttctttggacacatgatcctttggagttaatccttccttctcagttctggcctcatcccctggcgccaagcggtctggaacatggctggcgtcccagcttcacacactgcctcagggttcggagaagtgaaaccggaccgcgaacctcttcagctcggaccgcgaatcccgcgcggcgcaggcgcagataaagcgtggaaattccacctgccgcccggacgcgtggtcgacgatatcccgggaattccggaccggtccac

SEQ ID NO: 149424 - DNA, 862 bp, Homo Sapiens
ttttttttaatgttgaagactccactcagtcatttgagctccaggaagccttccctggccacccataagttaagagaaaagcccctcttctgagctcccagagcacccacttcatacctatgctatagaacacaccgccaaggacggaaattatccaaaggtttgtgtccattgattgccatgccaggcatccagctctgctgaagcacgcaggggccctgacttcctcattaggtattctcaacacctccaccagcagctggtaggcagcagagctattgttactgagctgcccacggcaccaatggatctatgaatgaacctgaacgtcttccctggagaaaagcacttgcttgtcaagggaggaacaggggtctgaaatgctaacccctgccctatagtatgggtgtgcatacggtgcaccttccaaagcccagagtggcattcttattacatcccggaaaccccctggtcaggggcttttggggtgacatccaatatgtaaataccagggtcgggtcctgctgagtggcataacagtgccatatgtgaaagttccaccagcagcagagggctctttcattagtcatttcactgcacacagctgtaaggaatctggcgaagcttgatttggctgggaggagtgcattttccacttgtaggcgtcttgaaaactttcatacctcctcctgggtgagaaacacagttctgtccatgcttaattccaccttgcttgaagatgatgctgttcttccacactatagaaaactatattatctgacagcagaagcttcaaaccagaatataactttcattctggtggataactcatcaacggacgcgtggtcgacgattcccggaa

SEQ ID NO: 149425 - DNA, 1085 bp, Homo Sapiens
taaaattccaattgccaaggaaaaaaggattccaaggttaaaaaaattatattccttttgggtttaaaaaatccatcccccttttataaatatccatttgtaatcgtaaattccacaggcatgtccgccgcagccccaaagtaatcttttaaatgtcattatacttgtagtattacaatgttttttcagtccagtatttatggaggttcactcggctgcagcaacaaaatatttcaactctaggaaagagtgtagccttgtagcattagcccctttgacaattttcttacaagatttttactttagaaacctccgacacatgtagttttcttcagatacagtatatccaaactttttatagaaaccaacattttgtggtagacattcaagggtaatcttgtaacagttcagtttcttgcttagcaaagtaagggttgataataacaatttgccaagctgctttcctctgcattcatcactaacaacaacatcttctactcttcctctcttagcacaggaatggatgaatttatgttctataatcagagttgccgtagcaacaatctgtcctagagtcacatcttctacaactgtaacataataatccccagatttcttcatatgctcaaaagatttcataaattgttcagggctgacaactccagtctctgttagctgacccaataccttaaaaaaacctctatttaagtcagcagtacaaagaggcctcaaaaccaagccttctccaggatgtgttggggaaatggctggagaaaatgtagctgtattctgactccagtccacttctttgagtagacttgggtcaaacataggagtttcatcaggtttcatttttctagtaaggtccgtagaggccctgcggtcggcgctcctagccaggcgcgtcggactctcccccaccagtgtgcacagcaccggatccggatccggcttcagcgccagccccacctcctcctccaccgcccgcgccacagttgggaaccgcggcccagacgtggcagcgccaacgcctccacctcgcctccggacgcgtgggtcgacgatatcccgggaattccggaccg

SEQ ID NO: 149426 - DNA, 792 bp, Homo Sapiens
acaaccctttctttccttttcccggttttttcccttttaccccgccaacaggatttcccttgggtttggccgggagggcccctttccttcaccaaaggccggggcctttgggaagtagccagggaggaactttgggagcttggggccgttgagaagggggaggtccctgtccttttcctcccttgtgatggaggggctccctccgctccacaggccggtcccttgtctgagcctggagtccgggcggcctcaggggggccggacccaggcaggaaaggtcagaggactgcggtgcaggcggccccatgggtccggtggggaggcgaaggctggtggggcccctgggctttctttctgggcaaagacggcgccggagttgaatgtgggtctgcccaggcctccaaaggccccgttggagagggcagccaaagaggcgaagcttgtgggacgcccaaagggatcaatgtgggtgctggggctcaggaagggtccgtgggccccgggagctgccgtgaaagggttggctgcagcgtggacggcaccagtcgcagtgaagagggaggccgggtgggagagctcctgcccagggggcagggccccatagggccccggaaggcagggcaggaggtcattccgaaagtcaagcttgtgggagtcacccttcattttctcctggtgtctcaggatcatgtaatccacacgcacgtgcatggcacaccacttgccataggtttcctcaaaggtggccggaaatggtacggggagtctgtgtcccccagcagagagagcgtc

SEQ ID NO: 149427 - DNA, 952 bp, Homo Sapiens
  misc_feature (48)..(48): n is a, c, g, or t
  misc_feature (54)..(54): n is a, c, g, or t
  misc_feature (239)..(239): n is a, c, g, or t
  misc_feature (635)..(696): n is a, c, g, or t
ttgggcccttcccaagagtggctggggagtaccaggcggtgaggccantggcgncccggcccccaaaggaccaattttctggagaccccccacccacccttcagacccacacattctgttcatgttaaaaacaaagaaattaacaacctctaaagctaaggacaatgattctgtaaagtgcaagaatggttcattgtttccgcttttgtggatttcatgttaagaatacttaaaagaanagggtgggcgggagtaaaccaggaccccagtcatatatttgatcaagaaatgacccgtatggcaaaggtgagacgtggaccagccctcaggtgtctccaactctgtgcacaccactgaggtaggagctctagaagaaacgcagaccctctcaggggggttaaggtttcctcttggcaaatgagctgggggcctgagacagtcatacccacgggctgcatgcaactttgcatgcaacttcacgaaattctagagctgtatcacatcagcgatggagaagggcaagatccaagacaaagccacatgaggcgaggtcctggtgctgccatttgttgtccagcacaaatcaaggggccggaggaaagggatgaggtggaaaaccccggcaggcattctannnnnnnnnnnnnnnnnnnnnnnnnnnnnnnnnnnnnnnnnnnnnnnnnnnnnnnnnnnnnntgccaggcttggcagatgcgcaggacagggtctccaagtgcccgtggcgctgccctatactccaggcatttatcctagaggccaggatgccaccccctcccctcccctcctgggcactcagaatccacggagacaccaggaggtctaaacctcatctgcagctgcccctccaggtttgggaccagtggacggggttccaaccacgggctccggacgcggggtcgacgatatcccgggaattccggaccggtaccac

SEQ ID NO: 149428 - DNA, 758 bp, Homo Sapiens
  misc_feature (40)..(40): n is a, c, g, or t
ttgggttgggtttctctccctgacaccagcttcctgcagngcctgtaagttctgctttggggcacacatcgcagagtgcctcaggtcatgaaagggaatgctgaagggaaaggtggtgtcttccggaggcacacagtacatcttacaggttacacacgggcaggctggagcaggacggggggcagggctcagcagcatacctcagggtaccctccagagttgccttgggaaggggggcggggctggaaaccaacgggaggggtgactgtccatcccctccgacgggagtactcaggcccagcacccattttctctgatgagcttcccagtgccttctagaccaagttccctgagggaaaaagccaaacagatggaaagagagggagcagaaagggaaagcaaagggtcaatgccctgcagatcgtgatgagctggcaggcagaggcagacagagcgccgagggcgagccttctgaatgggtaaggcaaagagagccgcctgctgaggggaagggggaggctctgagaacgccagggcaggcacagaggactcgaacacagctggcctctcccagggaagcactggagaaggggaccttcgggaagacgaggccccagaggagagggcgtgagaagactgtgggccccaaccggcccgtggtggcagattcaagccaggaacctggcccctcggctacagcctcgtgccgaattcgccacgccaggcctcgctaccttataaccgttagagttactgcc

SEQ ID NO: 149429 - DNA, 909 bp, Homo Sapiens
ccgaaaaataccttgtttttaatcattcccattcagcaatagtgaaaatgctctatgtacaacattggctctgaataacacatttcatttctgcttcaaacctcctatgctgtctatcgctgttttgacgactgcatagctcaacagaaaaatgcgtcccattgacgtctcaataatttcccaatcataaaagcttttattttaagacaagtattatgcaaatacaggatggaaatcagactcactgtaattgggatgaaaaggcaactctaagaagaatgctgtacatatgacacctattgcatttttatgcactagtcttgcattcccttccttacttcctcgtctttgaagtgctaaaggtaattacactaaaaagttaccaccaggcttaatatgagagaaccatgtgtataagaaagcaagactttcagataagcaatctccaaatattttctattttatatgcatttatgatttttcttataaagagggagtgttttatgtgcaacacctgcaaatggaaataaatctacctttcactcaagcccaaataatcaaatataaaatacagacaatacagcaaactacaatggcagcagtgattcttagggcagcatgtgcaaaatccagtattttgctatctacttacatcactgtagtcagaaaagaaatgtgccaaaactacctttcccattccacttgaactggttccccacaatcccaacaaacatctcctgtgacattaagttgtcatcagcttgcgtgatccccagttcactcaaccttttcttctttatctggcctttctgtgtggaggcagcaattagttcatttacaatttcacaatttccctcgacttgctcagaagggtcagttcttgcacaaagctccattttaccagatgca

SEQ ID NO: 149430 - DNA, 1066 bp, Homo Sapiens
ggaattcccgggatatcgtcgacccacgcgtccgcccacgcgtccggtagtaataaccaccgtgtagacaagtgggagggaagaatagaatggcactgtccagctctgggctagccagatcaactcccccacccgtcttcttcctctgtcccagaatggaaaatgatgtatggtcagtcacgctgaagtatagcagcgactgtgttaagagagagcagtgactctctcttctagagaagaggttttcaataacagggcttggaaatgaactagaataggaaatagatcttttcagatgctgctttcccatgtaatacaagcgtttctacagggtaccagaggtgtgaaatatgtgacacttaagaacagtgatttttattgggaattttcttagggttattacacttaaagcaacaaccaactagtaacagctccaggaaaggggaatgaatcaactcttggttctttcctgaagacggcagtgttgtggataagtgagtttttaatgccctggcagtggctacatttgacactttagaaaaaataaacatatttaataatttttgtttctccttaggaataagactgtagaactgttttgtactgtgaattacggatgctctttgaaggaaagaaatatcgattctaatgttcttcagaagttctggcagggataagcaggacatcgactggaacgtatgctaaatgaaagcagacaaatttctattttcttacctgagcaaatattttattgaaactgcttatgtatgtcaaaggagcccacaacttcagctacacaactttttgtattgaaagaactcatactttttgtagcttttatttcacatttaatttaaagtgacttttagcactaaaatgcctagaagattttactccagacctataaggaaatgtttagtttttatggaaaatgacaagtcgatggttaaacttctcatgtctttggtgctttggccctaatagcactggacaacaccacgaccacctggaaacatatttttggaagcaaaactttaattttatataacgtatgctatggagagct

SEQ ID NO: 149431 - DNA, 964 bp, Homo Sapiens
  misc_feature (372)..(905): n is a, c, g, or t
gcgcccggggcctagctgttaaaaaagcgaccgcgcttatgaggggacccccttttttccaaagaaaaggtctgggtacgcgtaaaagttgtggccccccttgagggggattattttgaggagggggccgcccccgtcgtcttcgcaccgagctgggagctgcgtcaatggcgtgggctgtgcttcccgcccatgaatcccatttaatggggtgggcactaaactcattcccgaatgttgtggaaccatgaccacaggtctgtacccaaaacttcgccggtcatccttaacaaaaacttgtacccttcaaccaataattcgcccttcctcgcttcccctcacttgctgtctctagctacctttcattaagtnnnnnnnnnnnnnnnnnnnnnnnnnnnnnnnnnnnnnnnnnnnnnnnnnnnnnnnnnnnnnnnnnnnnnnnnnnnnnnnnnnnnnnnnnnnnnnnnnnnnnnnnnnnnnnnnnnnnnnnnnnnnnnnnnnnnnnnnnnnnnnnnnnnnnnnnnnnnnnnnnnnnnnnnnnnnnnnnnnnnnnnnnnnnnnnnnnnnnnnnnnnnnnnnnnnnnnnnnnnnnnnnnnnnnnnnnnnnnnnnnnnnnnnnnnnnnnnnnnnnnnnnnnnnnnnnnnnnnnnnnnnnnnnnnnnnnnnnnnnnnnnnnnnnnnnnnnnnnnnnnnnnnnnnnnnnnnnnnnnnnnnnnnnnnnnnnnnnnnnnnnnnnnnnnnnnnnnnnnnnnnnnnnnnnnnnnnnnnnnnnnnnnnnnnnnnnnnnnnnnnnnnnnnnnnnnnnnnnnnnnnnnnnnnnnnnnnnnnnnnnnnnnnnnnnnnnnnnnnnnnnnnnnnnnnnnnnnnnnnnnnnnnnnnnnnnnnnnnnnnnnnnnnnnnnnnnnaattttgccggacgcgtgggcggacgcgtgggtcgacgatatcccgggaattccggacc

SEQ ID NO: 149432 - DNA, 1701 bp, Homo Sapiens
  misc_feature (182)..(182): n is a, c, g, or t
  misc_feature (200)..(200): n is a, c, g, or t
  misc_feature (213)..(213): n is a, c, g, or t
  misc_feature (362)..(362): n is a, c, g, or t
gcttggccccccggaagccaaggagggggttcaaaggggtgcggcagggtccccggcccatccaaggcatccaccacgcccttgcccgtgggggtcgtagaagccgctcccagccagggaaacccaccggtggtctttccctcccgcccagactgggcccacggaggggcccacgatcttgnccagggggcagcgtcagnggtgaagtctttncagcaccttcgaaagccccgggcggcaggggtagctgaaagcagactgttctgaaaatgtaaccggagccacggcagctgctctttggggacgcagcagccccccagaccagtgggatgcaggggttcagggccatgtactcaaagacnccgggcacctgcactcagcccccggaccacctgcccaaacaggacagagaggttggccatggacctttgcactgtctgggaggccaccaggaaggacatgaggtctccccctgtcagctgctgtccggccacaagggagcccccaataaatagggtacccaagaccatgcagttgaaggcgatgttggaaagcccttggaacaaggcgatgccgcggcccagctcctctgcccggcagcggcaggcttccagctctgccccatagcgctcctcttcccgttgctccatggcgaaggcacgcacagtccgcacattgcccagggcctcgtctgctacgcccattgccctggcgatctgctcctgacactggcgagacaattttcggaggcctgagcccatcagggtgcccactcccatcagggctggtgtggccaccatcagcagcagcgtgaggcgtgtcgacagcatggacagggacaccaggcagcctgccacctgggtgcagcttcgcagcccctgggagatgacaagcttgaaggatgacttaaactcctgcacgtcagttgtcaagcggctcaccagctgccctgtcttattggcgtcaaagaaggtgatgtcttgtcggagcagggagctgaagagggccctccgcatgtccacagccatgcgctcgccaacgtgggacagcagcaccaggtacccgaaggtcagcagtccctggacaccatagaggataagcaggtgggtgctgagattctgggactcagtcatgaaactccctacgtggtcccttgtgtacttggccacgacctctaccagctggcccaggagcagggggatctgtacattcacgagtgccgcacccaaggccagcacgacggctacccccaggaccagcaggtgggggtgcagaaactgccagaagagcttccagttaaagcgagaccccacgacatggggtgtggagctggcaggaggggcctcttctgcctcacacagggccacaaggcagaggtggggatgcttactcagtaccatggggcctagcagggctcccccaacccagcaccaggcagaggggctccatctgggagctaggggggctcgagggaggtgggcccagagctgggaccgcaggtgggccacggcccggaggagggaggagctgcggtagccatcagagtacctgacagctgagaatgtctggaagcggaggggcggtagcagcctgcctgggaatgggccaccccgaatcccgacccgaaataaatgcaccagcatgctgacgcggtaaaacaggagccgccggcaatagcagtttcaccctcatcccactgag

SEQ ID NO: 149433 - DNA, 742 bp, Homo Sapiens
  misc_feature (74)..(91): n is a, c, g, or t
ggtaccggtccggaattcccgggatatcgtcgaccccgcgtccggactagttctagatcgcgagcggccgcccnnnnnnnnnnnnnnnnnnaaatatttaattcccatttatttaaagtttcgtcagtctgtgtacactatttatattaaaaacacaggaagctggggctcctagcaaaaatatacatttcaattttggagattgttcagacactgagaagagctgtatcctcagcaccagacccgggtgggggcagggacgcggcatgtggccggggagggggaggtgggttccagcagctgtcccttcatagccttggcctgaaaggaagcaccccaccccccatcagttgggtaggtggggagcgggaagaatcctgccagcagagagtgatcctggggcatggaagggaggctgcagcgcccataggggcaggggctgggcactttcacccagagtcacacacagaatggctccttgggaggggagaccaggcaggaccccaggaagcctggggctttgacccccaggtcctcctaccctctgtggcctctgagacttccaacccagccccccttggccccctgccagggccccgtgaaggggttcttgcgcccgctttaaaaaatggggcatggccccaaacttggggcttttggggcccctggctccctgaagggggaaggggacccccttaaaccctggggaaaccaagggggaaggggccagggaaaccccctc

SEQ ID NO: 149434 - DNA, 922 bp, Homo Sapiens
  misc_feature (832)..(832): n is a, c, g, or t
  misc_feature (869)..(869): n is a, c, g, or t
agcccagacaccagccagccagtggcgttcctggctcctcgggattttccttttcctccgaagctgctgattcatccccaggctggagtcaggctcagctgtgtggggctgggagcatgggctctcaggctgctgctgagtggaggaattgggcctcctggcgagtgtgtcctccagcctctctgtgatgctccatggagtgggggtctgggagtggtgagggaagggtggcgcatctcagagccctcgcaaatttctggccagaaatgtgggggtatgggcgcagcttggccaaggccatgctgcaagggccagggtggccgtccttcctcactcctgtctggcctccctctgcagggtgcttcaaggatgaccgcatcgtcttctggacttggatgttctccacctacttcatggagaaatgggctccccggcaggacgacatgcttttctatgtgcgccggaagctggcgtactccggcagcgaaagcggtgcagacgggaggaaggcagctgagcctgaggtggaggtggaggtgtaccggcgggactccaagaagctgccaggcctgggagaccctgacatcgactgggaggagagcgtctgcctgaatctcatcctgcagaagctggactacatggtgacctgtgcggtgtgcacacgtgctgacggcggggacattcacatccataagaagaaatctcagcaagtgttcgcgtcccccagtaaacaccccatggacagcaagggggaggagtccacagatcagctaccccaacatcttcttcatgattgacagcttcgaggaggtgttcagcgacatgaccgtangggaaggagagatggtctgtgtggagctggtggctantgacaaaaccaacacgttccagggggtcatctttcagggctccatccgctacg

SEQ ID NO: 149435 - DNA, 1430 bp, Homo Sapiens
ggattcgagtggcctcgcctggctgcggctccagcactggcgtgccatcgcagaccccggtggcggtggacaggtaggcacttggcagcactccgagggctgggcccggccggggctctgcgcaggctccgcacgcggctaggtcatcaggatgggcttctgccgaacttccaggatgtctgttaaaatccgatgcagcggcaacgtgacgtaggttaagtgtgcatagagaaggaagtttccatctgctctgttcagcttcagccaggacccgaccagggaccgtcctgtgcccgacagggaccgagaccgcaggttggttggattgtgcagatcggctccaccgtcgtcctcccggaagaactcctcgctgtcgttggccgagtgcgacttcttcatctcagcgatccggttccggggcaccttcctcttgagggatggggagaagaaggcaggcccggttgttccgttctgggttggggggtgtgctgaaggaggtcacccgctcgtgcatgggcgaagctgggctggagtcctcttcagtcccacagggggatgtgtcacctgtagacactcggctgaccgccatctcggcgtggcccttgccctgggggcccttcatgcgcaccaactccatgttgctgtacttgtagaagccaaacgacatcttctgtgccatgcgggcggccacgctcacccggttgtcatacaccttcttgagcgcctcgtagcggatggagccctgaaagatgaccccctggaacgtgttggttttgtcactagccaccagctccacacagaccatctctccttcccttacggtcatgtcgctgaacacctcctcgaagctgtcaatcatgtagaagatgttggggtagctgatcttggactcctcccccttgcatgtccatggggtgtttacatgggggacgcgaacacttgttgagatttcttcttatggatgtgaatgtccccgccgtcagcacgtgtgcacaccgcacaggtcaccatgtagtccagcttctgcaggatgagattcaggcagacgctctcctcccagtcgatgtcagggtctcccaggcctggcagcttcttggagtcccgccggtacacctccacctccacctcaggctcagctgccttcctcccgtctgcaccgctttcgctgccggagtacgccagcttccggcgcacatagaaaagcatgtcgtcctgccggggagcccatttctccatgaagtaggtggagaacatccaagtccagaagacgatgcggtcatccttgaagcacccgaggccgcagacctcgcggcgcaggctaagacggccgcgctcctccgctatggcacgcagcatgtgctgcagcgagcgctcctcggcctcggcgccgcccgcaggctcggggcctcgtgccgaattcgccacccagg

SEQ ID NO: 149436 - DNA, 885 bp, Homo Sapiens
  misc_feature (141)..(141): n is a, c, g, or t
  misc_feature (216)..(334): n is a, c, g, or t
  misc_feature (555)..(633): n is a, c, g, or t
  misc_feature (712)..(723): n is a, c, g, or t
gcagtcgtatttattttaattcataaatacattaacatagcagattaggcaatttgttaggtaaattacaaatacattagaaatcatacaaaagtggccgggcagggtggctcacagctgtaatcccagcactttaagganggctgagttgggcggatcacgaggtcaggagttgagaacagcctggccaatatggtgaaacctcatctctactannnnnnnnnnnnnnnnnnnnnnnnnnnnnnnnnnnnnnnnnnnnnnnnnnnnnnnnnnnnnnnnnnnnnnnnnnnnnnnnnnnnnnnnnnnnnnnnnnnnnnnnnnnnnnnnnnnnnnnaaaagcaaaatactcaaggacttttaatataaccaccaacacagtgtgccttctggccaagcagagtcacttctgtggttcttaaagtatgaatgaggtgaaagaatgtgcattcctagctaaatgccaaattccaaagcctttagtacaaaaacagcagactttctgcaaaacaggtcgacttttaaaagaggtatgagggctgggcgtggtggcttatnnnnnnnnnnnnnnnnnnnnnnnnnnnnnnnnnnnnnnnnnnnnnnnnnnnnnnnnnnnnnnnnnnnnnnnnnnnnnnnagactctcaaaaggaggcatgaaatgcacctcaatcttttgctccaagtctgccaaagattgtcaaaccctccctgttnnnnnnnnnnnntcagtttacctactctcccttctatataaaggaccctaaaattaaatgtcaatgccaaaatgcgaagtgcagatcgtcttctctccaaataagagttacttggaatccttaacaaatccaaggagaagaagcgaccactgcgaatctgtctccaaaaagccc

SEQ ID NO: 149437 - DNA, 1260 bp, Homo Sapiens
cccggggagggcccccccagggggccccctctgggagagccgggtaaatccacccccagggtttcgactgcaaattgaccccttctcctttcctgagtccaaggaggcgcgataggccggatggccccccgggggggcgccaatttcttcagggtagtgtccgaatttataaataggccaaccggccaagtagaggattccacggggagccccccaaaattttctcaaccggggatagccctccctataaacggggggtgagggttctctttcccccgggtattttgccttccagactttctaccataatgatcggttagggaaaggtagaaatccctgaaggtccttgattttccctggaaccctcgcaggctgcgagacactcgtaaaaggctttgaagaagtcgggaagggccagctccatgtctgtgatggatgttctccagttctccccgttgtatgcccgcactgctcggatgaacaggctttcatatgacttggtttccaggtctttaatgtagtcctcggcaccaggcaggctcttataatatgccatgttcctcttcatcatttcgtcatcaggatgcttcagtagaaaggtgtgagcagcggcgatggctttggggagattatttgccttgaagtaagcgaactgcaggaacttgtagggctcgcggcgctggaagtccgccagcacctcgcggctgggctgggactggcggaaggctggcaggccctgcttgcagcgcttgaggcagtgcgcgcggcgcagcaggcccccgaagaggcgcagctcgggatagctggcgaggccggcggcgggctcgggctgcggcgcggcgctgcagttgcggtggcagaaggcctcgctgtcgcgcagcaagcggtgcagccgcaggctgatctccaggtagcccacgctctcggcccagtgctcgccgctgtacttgtccagcgcgtgccggtaggccgactcgagcggcatcagctcgtcccgtgggaagctgcggaagctgtagcgttcgtattgggcgcgcccggcgcgcagcgcgcaggccacgcacagcagcgctagcagcgccgcggccccccggcgccccggctccatcgcgcccggcgaaaggaaggaaggaagggacgcgtggtcgacgatatcccgggattccggaccgtacagcctgctttcgtacacggtcatagtactatgcctctgggaggaggtggttccgtgtggatagtttagactaggtcggcgcagtc

SEQ ID NO: 149438 - DNA, 1135 bp, Homo Sapiens
  misc_feature (11)..(11): n is a, c, g, or t
  misc_feature (104)..(187): n is a, c, g, or t
cttccctttancctcccctcctctcaccgcgatcccgcaccggaccggtccggattcccgggatacttcctggagcggcggcggcagcggcttcccgggcaccnnnnnnnnnnnnnnnnnnnnnnnnnnnnnnnnnnnnnnnnnnnnnnnnnnnnnnnnnnnnnnnnnnnnnnnnnnnnnnnnnnnntgctgagccccggccgccggcccggcatgggcgtctcccgcgggccctccgccggccggggctagggccggatggagccgcgggacggtagccccgaggcccggagcagcgactccgagtcggcttccgcctcgtccagcggctccgagcgcgacgccggtcccgagccggacaaggcgccgcggcgactcaacaagcggcgcttcccggggctgcggctcttcgggcacaggaaagccatcaccaagtcgggccctccagcacctggccccccctccgcccacccctggggcccccgtgcagcgagtcatagcggcagatccgggagtacagtggacttggagccgagtcagcgacatatggggagcacatctggttcgagaccaacgtgtccggggacttctgctacgttggggagcagtactgtgtagccaggatgctgcagaagtcagtgtctcgaagaaagtgcgcagcctgcaagattgtggtgcacacgccctgcatcgagcagctggagaagataaatttccgctgtaagccgtccttccgtgaatcaggctccaggaatgtccgcgagccaacctttgtacggcaccactgggtacacagacgacgccaggacggcaagtgtcggcactgtgggaagggattccagcagaagttcaccttccacagcaaggagattgtggccatcagctgctcgtggtgcaagcaggcataccacagcaaggtgtcctgcttcatgctgcagcagatcgaggagccgtgctcgctgggggtccacgcagccgtggtcatcccgcccacctgggatcctccgcgcccgggagccccagaatactctttaagccaagcaagaagaagaagagggcatcccttcaagaaggagttcccgcaagaaaagggccttgaggaagggccgcctgggagaccctttcatcattcagg

SEQ ID NO: 149439 - DNA, 1079 bp, Homo Sapiens
  misc_feature (106)..(123): n is a, c, g, or t
  misc_feature (146)..(250): n is a, c, g, or t
  misc_feature (305)..(366): n is a, c, g, or t
  misc_feature (412)..(437): n is a, c, g, or t
  misc_feature (586)..(857): n is a, c, g, or t
  misc_feature (984)..(984): n is a, c, g, or t
agcaaacacacaacggtaggtgacgggcaacgggagcgggcagttggtaggcgaggggaaagaggtgaacacaaaggggaaatgcggaaaaaaggaaggggcgacnnnnnnnnnnnnnnnnnnttgcggctgcacgcgacgcaaannnnnnnnnnnnnnnnnnnnnnnnnnnnnnnnnnnnnnnnnnnnnnnnnnnnnnnnnnnnnnnnnnnnnnnnnnnnnnnnnnnnnnnnnnnnnnnnnnnnnnnnntatgggaatcggcaaaaacacaccgggaagggaaacggaaggaacgatagacgannnnnnnnnnnnnnnnnnnnnnnnnnnnnnnnnnnnnnnnnnnnnnnnnnnnnnnnnnnnnngaaagagggggaaatgtacgcgagaacaagaaaactaacgggaatnnnnnnnnnnnnnnnnnnnnnnnnnncattaggcaaaggtggaaattaactagaaacaggggtagaaacggagcatgcaagtaatataaaggctaggagggcataagtagctcaatatgtaagcaagttttcccaggcaagtcacaggagttggcataatttttcttgttgttgnnnnnnnnnnnnnnnnnnnnnnnnnnnnnnnnnnnnnnnnnnnnnnnnnnnnnnnnnnnnnnnnnnnnnnnnnnnnnnnnnnnnnnnnnnnnnnnnnnnnnnnnnnnnnnnnnnnnnnnnnnnnnnnnnnnnnnnnnnnnnnnnnnnnnnnnnnnnnnnnnnnnnnnnnnnnnnnnnnnnnnnnnnnnnnnnnnnnnnnnnnnnnnnnnnnnnnnnnnnnnnnnnnnnnnnnnnnnnnnnnnnnnnnnnnnnnnnnnnnnnnnnnnnnnnnngtgtgcccgggcagatttcacataattttaatgatcaaattacccactcagtaaaccacaaaatcctacttaggaaaagggtctataatatttattttgaatatggaaccatagttctttttccctnaggttgagaaaaccgggacgcgtgggtcgacgatatcccgggattccggaccgtaccagcctgcctttttgtaacaactgttcatattacaagct

SEQ ID NO: 149440 - DNA, 933 bp, Homo Sapiens
  misc_feature (116)..(116): n is a, c, g, or t
cagtcccttcaggccgtttctttgggccgggggacctccctgatctggtccgggagaccccaggaaatcccccagaatccaaaatgggccggggctcccggtaactgaatcatctncccggagtctccttaatggtgaaaggccacttgcaggggtccacgccggcccactagccacactgtcttcactcgactctgcctcagtacacccagggctgccttcgtgatgtccgttctctccaggtgctcaggtggggtcagtaggatgcgggccacgtccagagccacgttcccctgccccagaatcacggctgtgtcacagctcaggtctggctccagctcctggttctcaggaagcccgttgtaccagcccacgaaggcccgggcggagcacacacctggcagctcctcaccaaggaatttccagggcccgatggtcctctgccccgtagctcagcaccacagcgtggtaggcctcccgcagctccggcaccgtcacgtccctgcccacctccacgttgccccagaaggcacagcggccagaatgggccgtctgggtaaatgtgttgatgacattcttcacctcggggtgatcaggcgccacaccaaagcgcaccaggccaaagggcacaggctgtttctcgtagatgtccacgtgggcctgggggtgctttagcaggtgttgggccgtgtagaagccagctgggccactgcccaccacacagatctggggggtcttctcctgtgtggagaaatggtggcagaagctcggggtgctcccggcgggaggcagccgggtccgaggccacgccgaccagccccaccagcgccagcagcgcgaagccatggctgggaacagcaacctgcaagtggatctgttcctagctaccggacgcgtgggtcgacgatatcccgggaatccggaccggtccag

SEQ ID NO: 149441 - DNA, 953 bp, Homo Sapiens
  misc_feature (156)..(156): n is a, c, g, or t
gtccccatcctcctatttaaaactcagccagagttttcttttagggcccagaggctcctttttctgggttttcaaaaacttaaaatttgatttttaaaggttttttcatgtaagtcaaaacgtatcacaatctttgcttcagcagggaaatgaccntttgttctgattaacaatatttccaaacatattctgttcatggcactgtttcacactcttctgaatactttgattttgcaagtgatgctgcagaggatcatcaattttcctgatttctatttggtactatgttcactacttgggtgacaggattgagcttctagtgaatcctcggcatcaggcaatatatccatgagacaaacctgcatatgcacctcctgatgcacctcctgaatcagaacagattcgagagtagatttcatcttctgttgtgcaagtttcttctccttgttccaatttggagagtgcatctggtttgctggcttgataccccactgccaccaggttgctgtagttctccaacatcacgtcccggtacaggtccttctgagcagggctcaggagttgccactcctcccaggtgaagtccacagccacatcctccagtgttagggattcctgggcctgcatcattgtctcctaaatttgggaaatgactgctaacttggacgttctgtatttgtctcttctgaatcagctctaaatttcggttcaaaaacttcaatctccaatcaaggatgtccccagaaatgatgacacccaagtcttggaaactccgcctccttccttcacttgatttctcttgttctcagcacctgtgggttcccagaacttggtgggctccggcctcatctctcggcctcctcagtgcctgacggcgactatccagggtcggagcccacgcgtccgcggacgcgtgggtcgacgatatcccgggaattccggaccggtaccag

SEQ ID NO: 149442 - DNA, 937 bp, Homo Sapiens
ggagttcccaaaggccccctgtttcccctggttcggttgggccaccaggccactctccctccctcaggggtttgttttctgtagccaggctcttttgggcaggcaggggtcaggagcacggagggcagacccaagacggacccaggcatctctggggaggcgacatcccctctcaccgcaggcccagagacaggagctccccagcagtgcccctcaaggccagattcgcaagtaggtgcccgtggagcaaacagagaaaagcgggaacacgcgctcctggaagttgacgcggaaggtgtagaggtggcgcatgtcctccacagcgtagaaggacacggctcccacctccaggtccagggccacccgcacgcgcgacaggtgcccgcagctgaggggcgaccgctcggggctggtcacggcccagtactggccgccgttgagctgcagggcccagacgccctcctcgggagtgaagggcgtcaggccctttcggcgcacgctctcgcgggccacgccaaaggcccagccgtccttagagcccacctccacctcccagtgatgccggcccgaggagaagccgcaggacgccaggacgcgggtgttggtgtcgaagcggcaggggtggttgggcaggtcctgggcccgctcgccgaggcgcacgctcttaagatccagagagaggatgaggcgcgggttggccgtgtcgggatccaaggtgagctccactttctcctctttctccagctctccccgaaggtcctctttgaacttcttcagcatcccttttaagacaaaggtcttgagagaaacattccagactttattcttcatctcagaagagactgtggttggcttggggccaggcacattgctacacccggacgcgtgggcggacgcgtgggtcgacgatatcccgggaattccggaccggtaccag

SEQ ID NO: 149443 - DNA, 1170 bp, Homo Sapiens
ctttttgctgtcacggggactctgtcgtttggttgcctcggttgttcggctttgttctggggttctagttgttcttgttccgcgtgtgttttgctgctttttgtgttctccgccgcttgtgtttgtgggtctttgtgtgtgcgcgttgttgttccttcccgtgcactcgttgtgtggcaggtgccatgctcttgtggaggtgagttgtttcctcgttgttttgcgtctgattggctcgttggcttccgttcggcctccccgtgtgagttgggtccacgcgagttccgggtgtccgcgactgctgtgttgcacggcgcttgctgccgttgatgggcatcttgatggactcttcatagttggccacctccatggatcgcagagagactatattccgtgtgcacctgcgtgtcatccacggaccagaagcggtggaactgcaggtttttcaggtaccattcggaggcggacaccatctcctgatcagtctggtttcccacaatgtggtcgatcatctccagactgcatttgggcagtttaggaagtagggggtccatgaacgctggggcctcatatccaggcaagaattggccgatgtagttcatcttctccaccagggtgtgtgtggtgtccccatacgtctgcagcacagcaaacttcaccttcccaaacttgtcttgctctacccagggctcccgcatgattttggcgccccgttcccgtgctttctgcacgatgtagtcacaatcttccacctcgaacgcaatgtccttcactccgtcaccgtgtttcaccaggtgatcgcccatctctttgttccaggggttgagcgctgaggagaggacaaacacaatcttcccttgtttgattacatggctgaccacctcccgggaaccggtctccaggcccctgtaggctagaggttcaaagcccatcttgctgcagtagaatgacgcggcctgcttggcgttgccaacccagaaggtcacagagtggaagtggaggaatcggcctctctcaggctttgcccctttgtcactgtaagtcgtcatgattgatcttagtcaaacctcctaccgagcgcgtgggcggacgcgtgggtcgacgatatcccgggaattccggaccgtaccacctgcttttttacacacgggtctatagttactactgcct

SEQ ID NO: 149444 - DNA, 1534 bp, Homo Sapiens
  misc_feature (1434)..(1445): n is a, c, g, or t
agtacataaagatgttagctttttgtttttcattagatgcaagaagatgcaggctcaaagtctggttggacagccaggctcaagcaattgggtaaatgtgtcggaaagaaaattagacattggaggatcaagaccataagacactagctcattagagatcaagaattcaaatgtgacattcatattcgtccatggccagcacagattcataacacgaattccatttaacatctttatgagcatttaagacatgcatttaaataaagtttccttatcagctaactctactggggcaaccgttctaaagggatccacatcttcaaattacaatggctggagagttacatgaatgttttgtgtttgggggtggtctcaggggagcaggggaaaagacatggcagaggaagttggtaaaagagggtactttctcctgaggagaggcagaatgatcacatggattttgttggtgggaatgctgccattgcagaatgttgggatattgattacagaagcctagtttcatgcaattttctttaagggggatagaaaataggaactactttaaaaaaatcaaaccaggcacagtacactcaaaattggtgtgtcaacacccctaaaatgatactagtttggtgaggttgtgaataacctctccctggttatgcactctcatgggatgtgcgtttgatgtgggagggagagtcctcctcacctcggaggttcctgaggaggactttcagcttctgcggctcattggtgcgtctcctgttgaagtcagctcgtgggtgtgtttgggcacagtggtctgtctgcaggatgtggaagaggctggccatgttaggcccaattttctccatcaggctgtctctgattgtgctgactgtgtcttcatcacattccagcaggcttcggacaagtctgttatagtatctgttggagaagtgattgggcagctggacgacctcagtgatggcttcagggttccgcttggcgatgctgcacacattcagcttgctgtagcactcttcctgcacctcagcaatcatcctttggaaagtggagcacctccgaatggcgaggaagaccttggaggtgaccccgttggcgatgcattttaagctctctttgacgaatgcttttccctgagtgtcaaatttagcagcgctgtacaagaaggatttacagatgtcatacatcccatctgtgtcacaggtggagttttccaggcatgcaaaagccccgcagccgacctgtagagcactgttgaggcaacgaaccacttcagctgagttttgagccgccactcgggatttcctggggctcacagagtcattctgctccgcctcatgggttgcagaagcactgatcaccagcaccagaagcactgctgagttttggagcattctctgagaagtttccgctaagttgttgggnnnnnnnnnnnncctgcccccctttcctctttccctctcctggcttgagtgaagatgtggatctggatacactgaaagcttaggtgaggatttgatgagga

SEQ ID NO: 149445 - DNA, 1411 bp, Homo Sapiens
  misc_feature (62)..(71): n is a, c, g, or t
ccagcggttgtccccccctttggtttccaggaatttcatattccaggggttgtgcaaaaaannnnnnnnnnactcctttagaacccagggtaggttttttcccaaagcaaacccctggttatgatatgaaggccggtcgtaggtgtttggcaaaagatttgaacccggggggtggcagaagccttgttacccaggggattggggggctgatgagagattgggccccaggtcacccttaaggttcaagagatccctaggagtggggtggtagaacccaggcctgtgagggaggcattgttattaccccaggcgtgggcggtggggctgggccaagcccacgtatgtctttcctcctccattttctatcttttgtccctcgacattgtctgtctggatccttatgcactgggggatccgagtgtccaggagcttcggcttggcaatccactgttgcaggtgcagtgtccttgggcaaggaccatggttatgtcaggccctccacagatgatggtgaaaggtttgggattcgctcaggtccaagggtcttgggctgttgtcaggcgctgcagaccccggcgtgcccgtgccagcaggctctccccgtgtagctgctgtgccagccgttccagggcctgcagctgcgcctggtgccgctcctggcaccgttgcagcctccgcacccggcgttgcagtgctcccagcactgggcccagcccggtctgggcctgttgggcagggacttcaggttgtgaccgctcaggagttggcgcaggggccaggggggtcaggagcatggtggccacagtcttggggctccccgatgtggggcccagcaccactaggcgcactgggccagagactgggatggcagggctctggggcaggggtgtattcttctgtaggggaggcggcggcgagactggcttctgggtgcttcgggtcctccgctgactcttggcaggtggtccccgggagaagatggagggcactgcatcaggccgcaggtagcgcacaccccagcgccactggaagcaggagggtgtgaagtgctcgctgcacaagtgctggtggcagctgggcacccagtgctcacagcccatgtgctgcagccaggcctgcagccggggaccatccttcagtgggaacttgtagaagctcacagggcggttgtctgcacccaggcggcccgcagtgttggagcagttcggcgccctgcagtacttgggcatggctatccagcccccgctgagttttgccgggtcagcggctgcactttggttctcgcggagcgccgcctaaccccgccccacccgcgctcgccgcctgcctcacgtgacgtccgtggagtctcgcggacgcgtgggcggacgcgtgggtcgacgatatcccaggaattccggaccggtccagc

SEQ ID NO: 149446 - DNA, 946 bp, Homo Sapiens
caaaagatcataatctttcggggggagcgcctttcccaccatcccgggactgggttttggggcgggaagggaccgttcttcgggatcggggggctaagaaatgcatttttctcttggtgacgccattttatgaaatggccttgatacaagtccaatattttcattgggggggaaaacggaaggccaaagctggggtttccccattcaagttcaatttccctgtccatcaggtccgatctttactggtttatgttcattcccaaggattggtgagatgagccgacttagtgaagggtaattcacgcctgcaaatccagtcaattttaaagacacctccccagcattttagcactcattcctgctggaagcacccagtgtataggagatcctccgtgatgtgattctgaagaaagtcttgcaaacccttgaaattttccactctctctgacagaaaatattaagataacactccttgcagatctaaatgcaagatttaatttcttctcatttacagggagcgtggaccatacacccttcgctttggcaagagacacattctcatggttgttactctttatgaggaaaaatcttgcatcttgaagcacatatttgaagtttactggtttgatcttttcggacagcacgaacggaagatgataatttctcatgcttcttttctgaacctgcatatgactctgatgcagagcttccacttctatcaaaaacaattggagatatgcctctagctctcttcctttccttctttttctcatctgatccatctgtgcctgaaccagatctgacagacccatctgtgaaggaaacagattcagaaccagagtcactggcctcacttcgagtgtcataatcatttccctcctctttctggtctctctcataccggacgcgtgggtcgacgatatcccgaaattccggaccggtccag

SEQ ID NO: 149447 - DNA, 609 bp, Homo Sapiens
  misc_feature (21)..(22): n is a, c, g, or t
gaagaccagactcaaaaggtnntgctgtcatgatgacacttgaacggttggagcctggaatgggtaacagagctgggaatgagatagagcggccccgtgtgtcattggcaatcctgacggtatcaaatacccgcttctgttgggctttttgtttaaagagagaagattcctcatccaaactcagctttttacgcatagtcccctcaatctcagctgccaaagattccccagtaaaagctccatatgattgggagaagtagagatgagcagtagggccagatctactacgaagttcctttatttcttcttgggattcatgtaacattcctagacactccatattcctgtcttgtaactcgtgcagctccattgtcagttgccgttgggcatctttggaagcttgcaggtgaagttttagttcttccttctcaatcacatgttctttaagtttatgctgaaggtctacaatctgtgacaaaagagaggaaagctcttcttggtatcgaatcagctcatcactcttccctgacaattcttcagtcattctggacatctgagcatttgtttcacgaagttctttaacacagtcgctgacaagctgttgttcct

SEQ ID NO: 149448 - DNA, 1820 bp, Homo Sapiens
gcaaaagcgctttcgttccaaatccattggatgcgtcccatcgtgtccccagggatttccaggcccagatattaaatctttgggaggaggtcctggcccactgtagcgaggtctcacttttttattctggttctccttggccttattcttcttgatgaagttggccataggtcccccctctctttccctgttctcttagcatcctatccagattttcgtcatcaatatagcgggccagaggcttttgcatctctttcactgcatcctccacattttgttgctgttgcccggctctgggcaagcccttttccccactgggcatacagctcatctctctctgagtccttttctgctttcctcctttgctctaaacgttcgagtttcaaattcctcttacgaccagacttatctcgaaatacggtttcagcatattgaaattcagcttcaaatgccatggtttcttgatcctgttccttgagctcctgctgttctcgctgtatgtcagttaacaccaacccagttttagccccagaatacatgtgtgcagccttctttccaggaggctgactccttcgaggcggggacaggtcagaatcagaagatttggtcctctgtctcctccttggtggagagaggtcagaatcagagctccggtgtctaggtctattccgtggaggtgacagatctgaatcagaatcctggtgccctggactttgtttatgccgtggagaagaaaggtctgaatcagttgctttctggcagtcacctttggaatcaagctgcttcttgtctccaaaatgggattttgcttgcttttttcgtggaggagagatgtcagggtcatactcatatttgctgttctttgggaatgacaaatgggaggctcctgactccttccaatgtggagaagtcttgctagaggctctttctggggctttaccacttttggttctgggcagggaataagtgacattaggagccaaatcaggggagtcatgacgggcccttctgagttgctgtgtgtctgaagagccaagagtcctcctagatgtgtcaggggagttgttattggacccttctgggtggaagagatatctgaggaaccatgacgggctcgcctaggaggtagagggatcttgtgaattcatgacggactcttcctaggagatgcacctgaagaattatgctgaggcctccttgggggagaaggatctggagaatcatgacgggccctccttgggggtgaagtgtctgaggagtcatgacggatcctcctgggaggagatgtgtctgagtcatgacgagcccctctgaggggagaaggatccggggtgtcatgacgggccctcctaggagatggatccggggtgtcatgacggtccttcctaggagatggatctggggtaccatgacggaccctcctaggagatgaatccggggtatcgtgacgaaaatgtctgtttgagggtaggtcttcgttgtggcctcccagaagcttccatttggcactggaacgaaaggcctccatctgctttacctcttctggccgctcatccacaaactctgccaccacaggcaaatcgtccatcatcttcctcttcctccttttctagtttggttgtggagatagctgtccagctcacatcatcatccacaatccgcattcccttgccgccggccccgccaggcttcggccgctttttgcgacgcttgcgaccggactcagatccccggtcgacgccggcatctgccccggacaagtaacgcttcagatactcggccttggaaagcggcggagctgccgccatgcagcggcgggg

SEQ ID NO: 149449 - DNA, 914 bp, Homo Sapiens
gtggtgaacaagccgggttcaatggaggtccagcattccccgggggtccaggtgccgttgaatgggcccccattgcaaaaggtccttcatttttcaaaaggcgtgggctgcttaaggaagctaccggctacctggtctctggtaggaggaggccgttcatttcctaggtactaaaggccaggttctgggagggaaggatgcaaaaggatcccattctctgggaggacgaagctggtttcgctgggtcccccgggactcttttctggagattcgctgccagtatcggggggcaggcacggcaggtgaggccagtgaaggcagcggagtcacacgtacatccttcccagttctgttacctgcacactcaaaatactctgcaccttgtagcagtatatccacttgggtccaagtatttccttcttaattcatttttcaaagggctttgaggcactgcaggtgctaaggcccaagcaactgactcttcctggtctgacgtggcatcgacctcaccgctttttgaatcggctcccaggactgtgcggtgcgagggaagctcaggaccccaggctgcagcttgcacggagccatctgtcctgtccgcgggcttcatggaggagtcctggatctctcctttgtttctttcctttattagtcttccaccccaaattctcaatccctgtggcgtctcgtaggtcagcgtggccatttgcaccaccggggtgtcctcgaagggctggttgtacttctctatcagccgctgcatgcgcctctggaagcggcggcgactggccctgagcttctgcagcagctggtcgtcttccgcgtcctcgccctccatggcgcgcagcgtacccagcatcggacccagccagtacccaagcgcggacgcgtgggtcgacgatatcccgggaact

SEQ ID NO: 149450 - DNA, 1207 bp, Homo Sapiens
  misc_feature (180)..(247): n is a, c, g, or t
  misc_feature (1185)..(1185): n is a, c, g, or t
tgtgtgtcattgcacgtacagtctcatcagtagtctgtcggcagactgcagtcccacatgcgagttgtgtgatggctcaccgtcagacgctggcatgcgtcaggagtttgctggcaactcagtgtcatcatgcagcatctccttagtccagctatcaggagctgagcagaagaatgactnnnnnnnnnnnnnnnnnnnnnnnnnnnnnnnnnnnnnnnnnnnnnnnnnnnnnnnnnnnnnnnnnnnnagactccatctggttggcctgcccaggcccatgggctgcctctagggccttgtacaacccctccgacatcagcaccaagaagcccgtcaccccatccagcggctgtgccccatggatttctggctctgcgatgattggtttggacttggcagcgctgagaaggtcaatgtccgtgtagccatatttaaccttgtaatccccgatccgccgggtgctctcctgcccacagatgatccccacctgcttgatctttccagcatccaagcccagctgcgaaagacggaagagctcatcctcgttctctgtggtgtggtccacgttcagctgtgtcacctgcaacccatccactgtcgatttgcataaaagtgcacggtttgtaccgacattggcgacgtagagcttgttgttgagaaggaccgccacaacggccatggcccctcccgaaatttccctctctaacgtcttgagtctctcaaggatcttctgatactgaggaggcagctggtgctgagggactccctctggcaattgcgactggaggcttgccttctcagccaaggcgtcgtcaatggactccaggaagctcctctccaccacatcgaaggcctgcagcagcacacgccgcacatcggcctcggcgtgctcggcattcagctggcccagcaggagctctgcggacagccgctgggccacgaagttggtcactcggttgccatcatagccgttgaagaccccatacaggaagcagttgttctcactcctgaacttgagccagctgtcctctggcgggtggctctcagtgcccttgccatcagcagagtagctgcggttggaggctgagccaaccccagagaggtggcagagaggcaggtcatctgtccagcttggctgctgctcactcgcagcaagtcctcctctgccccctcggccgaatcggnggccgtgattcttcatttccca

SEQ ID NO: 149451 - DNA, 1027 bp, Homo Sapiens
  misc_feature (562)..(602): n is a, c, g, or t
  misc_feature (790)..(839): n is a, c, g, or t
  misc_feature (855)..(855): n is a, c, g, or t
gttacgcgtcggatttccgggatatcgtcgaccagcgtcgccaagcgtcggtgcagattctatggaggtgacacctatcatgaccagaaagtcgctggaggcgacaaatgatcccgtccccatcccagacaagaggaggaaaccgtgcggtccagcccagcgtaaactattgttaacagatgaacagatcatggaggatctgagaacattaaataagcttaagtcacccaagagaccagcatctccatcctctcctgagcactgcctgcaacacccgcggaatctccagcccagaggttcgaagctcggatagaagatggcaaactgtactatgacaaaagatggtaccacaagagccaggccatctatctggagtcaaaggacaaccagaaactgcgctgcgtgatcagcttctgtaggagccaatgagatctgggtgaggaagacaagtgacagcccccacagatgaggatctagctgggcccagcttcacgcgcgggctcttcgctgactccgccggcgctcagctgcttgactttctacagtgctcttctcttgaccnnnnnnnnnnnnnnnnnnnnnnnnnnnnnnnnnnnnnnnnnctccttaatagaaaaatgttaacttactgggaatagctactcagccttggaaatggagagcactgcagtgaattctttagggcacttttgtggccggatgcttccaactttgtcagtcttttctgcctcaacttcttccagacatcagtcaccatgagactgttttactttcaggcgtattggggggnnnnnnnnnnnnnnnnnnnnnnnnnnnnnnnnnnnnnnnnnnnnnnnnnngaaaacctcctctgantttgaaagggaccagctatttttattgattatctttaagtctctctaccatggagaagagcaggaagggatacactctccagtgcattttcatgttttgaatctgattagtggatcacgtagctactttccctgtcgcgtccaattcactatttgcccagaagcttggggca

SEQ ID NO: 149452 - DNA, 1242 bp, Homo Sapiens
tcccccatgtgctgttctcacaggccatcacgacaacagcttgcttgccagggatgcgctggccacggtagttctcatagtagcgtcggttcatctgtctagtctctagtgtggccagacccctggggccagctacgctcgtgggcattttcaatcagctcgttggcaatagaagcagggacagccattttccccccagggagcgcttgatttacagcctggagcccagcatcaggagtcgagatcatccctccccagcgggtcactcttgctggctgaagggagttcaccccactctaggatctcgttgtattcaattgtctcctccaggttctgaaggttggggttgacactgcggattgcacgcatgtatgcctttagcagctggatgtctcgcttctgctccgccagctggtgtttgtgttcagctgacgtcttctccagctctgcgatgcgtgtctgctgctgctgtaccactgagcgcaggtgcttaatgcagttatggttgggcagctcatctttgggcatctccaggccacagccctgttcacaggtcacaggccgcttcgggttgtgctcacagtcgctgaggtgagacatgaggttgtcaagccggacaacggcactacagccgaacacagcgttgtcacaggcaatctgcagctttgacaacatgttccgcatgatccgaggtactgggcgcagatgggcgaccgtcacaacactacggtccactggacatgtctgttgctgagagaaccactgggtgatgcaggcgttgcagaaagcatgttcacaatgaggtgcctgtactggctcctccaagactccactgcaaatagggcagataagatcttcgtcaacatccccctggaaacgggttacatcataccccatgtctcatcactgaaacccaggtccttccaagtgttggggggcaggttccctgttcacaaggctccaaccccctgatgcctccactcagtgccactgaagagattctcccagtaacccatcttgttggctattctccgactgagtattccttcccagtgacaagctccatcgcccaggggatgaatgtgatgtcacaatcaggagtactcgccctggaagcggcctggagtctccgcaacctgacccagtcggagctgagggccgcagcggccacagtactgccctggtgccgggtcccagcctctcccctcgtgccgaattcggcgcgccgtcgacttcatactc

SEQ ID NO: 149453 - DNA, 938 bp, Homo Sapiens
gtcagcaaccagtgacaccccaaagccccggagactccccagagttgactcctttcatgtgatctgtgtaaatatagatatcaggtatgaacttgttgaggatgctccttgcagaatccacaatccggttcgccatctgaggtgacacacgtacagagtacgccattcctctaatacgtttgatttttcctggatctgtgagttgaatgggcttcaagaccttcctcacaggacatgagaaaaccacttcgcctcctcctccgggaggcattccccgtcgcacaatcttcagttcaaatgattcaccatcaatcccaaattgtttcaacaaagggagtgctgttgccttaagaacatcaactgaagggtcaacctgatcattggtcactcctcgtagaactatttttaacgggtgcttcataaatggagccaagcaaagaagactctccaggtaatacccaatgccacgaaggacgctacagtcatgttccacagatccaccatacaggaggccaggctgataatataaggttgttcctgtttggtttatttcaattcgagaaccattcgttattttgtccaatagccttatgaagctggcttcaaaatctcggaggcccgggttgtcgtctctggcccgaatctttcggattttgacggggcgcccgctcagggtagacaggaccagacgttggcgcaagaagttgcaccctgcgtagctgagggagtgcgcctgagtcgccatgtgcgcgctctccgaagagacgtgagcagcccgagagcggcgacttcggacagacgcgggactcgtgactccgatggtggtggtggcggcgacaccgacggcggcggctcgggctgcctccagcagcccagacgcgtccacgtggtttggaaccctcgtgccgaattcaaacccagcctcgtacctagcctaa

SEQ ID NO: 149454 - DNA, 1019 bp, Homo Sapiens
cagcccacggccgtaggcccatgatgaagagcatggtggccagacaggggcaccaggtgaggtagccagccgggtgctgccaggggctgcgccaagtccccccaggactcgcgtttccaggcccgcagtgctgttggggctcagaggcctggggccaaagtggattgtagcagccccagagtcaggttaggcagcgaaacatgatggccgctgagacgaagagcagcagccttgcggccgtgcgaggtccatggtgaggcggcagatcagcacggacaggagccggcacggccccaacgatggctgcgctcgtccttggggggcagcaggacagcggtgactgtcgaagagtggactcgcagggtagaccaggatgggcggtgatgcccgctcagctgctgcaggaggcgcatcaggcaagtccacggtgatgggccggcacacgtggggggccccgtgcctcagcccacgatactcggctgctctgtctccggacgttgtcctggatctgctcgaactcccagtggacatcgacgtccgtcccacgcagccaggccagcgcccgcagggcctcttcgtgccttgccccgagagagcaggaagcgcggcgagttgggcatgaagctgagcagcaggatcatgatgagcacaggcgcctccccggccacagccagccagcgccacggcagcaggaggccaagggcgtagagggacagggatccgcacactgccatgagctggggtgtggcccccagagccccacgaacgcctgggggagcaatctcagacacgtacaccgggatgcaggcagctgtgagccccccggcgaagcccgtcagcgtccttccgagcagcagcatccagaggccgtgcgcacccgccatgagcgcatagccggccgccgacggcacagctgagaacatgatgctcagcttccggcccaggaggtcgttgaggatcatggcactcaggcctccggccgctgctcccagggtgaacacggacccaaaccaggatcg

SEQ ID NO: 149455 - DNA, 865 bp, Homo Sapiens
gccagcgccggggggggctttcctcaagcgggggaccggacccccgcgggccttcccgcgcggcaggggccaagcatgaggtcccttccgggttcttcctggcgggaatggggtctttcccagccatgaaccgcgaagggggcggttctcgggtgtcgaaggcgggtgggtcaagtgtggaaagagtggcttgctggggttcggtctgttcctgtcgaagcactggaccaggtagcgctggacgtcctccagcctttgcgggtcgcctcctgaagtccgggaagtgcttcttgatgctcgcggtgttcaccttctcccccaggaggtccatcttgttgaggaagagaatgatggagacgttgaagaagagcttgttgttgacgatggtctcgaagatgttcatggactccaccagccggttggtgcgcctgtcctccatgaggacctggtcgtactcgctggaggagaccatgaacaggatggacgtgatcccgtcgaagcactggaaccacttctggcgctgggaccgctggccgcccacatccaccatcttaaaggggatcttcttaataacgaagtcatgctccacaattcccttggtggctttcctagccagcaggatatcttgcttactaggaaagtaattcagctggccgatccggtccaagttgtccaggaagtacttcaccgactcccccagctgaaactcgcttctccggctgaaagcctccctgatgccagaatccctccagagtgcgctcagggccgggacgtacagctggaaggtggccggctccacaggcagccccgccttgttctcgaaggccatcagcccacgcgtccgcggacgcgtgggtcgacgata

SEQ ID NO: 149456 - DNA, 555 bp, Homo Sapiens
gccgcgtgttgctgacggtcgtcgtcggcggggcccgtgagcgcagggcgggcagcggcgcgcgcgacgcggagcgcgaggtctggaggcgtatccgtgacatcgactgcgctgttggtccgtgagcggcgcgcggtccggcgcctggtgaagatcctgctgctggtcgcgggcgagagctggaagtccacgttcctcaagcagatgcgcatcatccacggccgcgagttcgatcagaaggcgctgctggagttccgtgacaccatctttgacatcatcctcaagggctcaagggtttttgttgatgcacgagataagcttggcatttccttggcagtattctgaacatgagaagcatgggatgttcctgatggctctttgagaacaaggcggtgctgcctgtggagctggccaccttccagctgtacgtcccggccctgagcgcactctggagggattctgggatcaggggagctttcagccggagaagcgagtttcagcttgggggagtcagtgaagtacttcctggacagcttggaccggatcgggccagct

SEQ ID NO: 149457 - DNA, 1052 bp, Homo Sapiens
  misc_feature (935)..(959): n is a, c, g, or t
tgtctttccctgtccttgctctgtctgccctgccccctttttccgtccgcggagccggtcccttttttgggcttttatgcccgttccgaccccagacccggctggtttcgccggatttcgggcccccggggctttttcctaggtcctttcgctggttcacactcggggcatgagagctggaaaagccactccccgaggcctccacactttgttctcctggccctgcctccaagagacagcacagaactcagagagggcacatccaggaagaggccccaggcgggcctgctcacaggtggaccctgctgcaacgcagggtcaggggccacctgcagggggccacccagagcactgagctggattcaagtgagcctcctttcagggctctccactgacttggaaagggctcacaggccagtgtttgaggtataaatatctcgcatggggcaagagtcacatcagcttgctggccttgacatgactgcaaggctggacagacacacaggagtgttacgaggtacaagctaagggactctgggctagcccagaggccagtgaggagggccaaaggggaagactccacatccagggtcccttccgtgcccagaacagtctgggaattaggaaaacaggatgcaatcagagtcaactgagcaacaggcaaaacagctgatctggatgtctttcctcctctcattttcatggttccctttatccacatgtttcctaaaccacactagaacacttccttctccggtgagaacgagagccagtgctaacccccataccacctttttgccccacagagagccccaccaaccctcatcattagcccttattcacaggtcctggaagtgggcggctcctctccagcatgagtcccacagtatctgaaggagagactgctgcttcccaaacaggctgctggagcgcannnnnnnnnnnnnnnnnnnnnnnnnggtcctttgtggcattgtgtttggcaaaacttgcctccaaaacgggggcgcccacctgggggtgtgggttgctcaacttttttcccggggggg

SEQ ID NO: 149458 - DNA, 1231 bp, Homo Sapiens
gggcgagtgcagccactctgacgatcagtaacacagagcacccccagttcaacattccctttggctcaagcgccaagtccccgctcccatcatatgcgggagccaacccccagcccgcatttggggccgctgaggggcagccaccgggggccgccaagccggcccttgcccccagctttggcagctctttcacttttggaaactctgcagccccggccccggctgctgcacccacacctgcacctgcgtccacgatcaagatcgtgcctgcgcacgtgcctacgcccatccagcctacctttggcggtgccacgcactcggcgtttgggttgaaagccacggcttcggccttcggcgctcccgccagctcacagcccgcctttggcggctccactgctgtcttctccttcggtgcagccaccagctccggctttggagccaccacccagaccgccagcagcgggagcagcagctcggtgtttggcagcacaacaccatcacccttcacgtttgggggttcggcagcccccgctggcagtgggagctttgggatcaacgtggccaccccaggctccagcgccaccaccggagctttcagctttggagcaggacagagtgggagcacagccacctccacccccttcacagggggcttaggtcagaacgccctgggcaccaccggccagagcacaccgtttgccttcaacgtgggcagcacaactgagagcaaacctgtgtttggaggcaccgccacccccacctttggtcagaacacccctgcgcctggagtgggcacatcgggcagcagcctctcctttggggcatcttcagcacccgcccaaggctttgttggtgttggaccgttcggatcggcggccctttcattttccattggtgcgggatccaagaccccaggggctcgacagcgactgcaggccccgaaggcagcacacccgcaaaaagtagcctttggtcccctgtccctgttccccccacccccttccctaaatctggaccttggcacgtgctaggaaagagccttggacccctcccgttgcgtaaagcaaacctaccccggaatctctggctttcagccgccaagggggcagtgggcagcccctgggggccctttttccctttctggagggaagcacaaagccttcaggggaaaggggaaacaaggaatgccggagggcccaaagccccggggacctcttacttggaaccggtt

SEQ ID NO: 149459 - DNA, 1126 bp, Homo Sapiens
tgccgccacagtgcccaggccctcgccatccgcctctaacctgaggtcaattgccccatgcgcccagtgttcttcctacccgagtcccgctggccctggagacctctggcccaaacgtccaggatcccacactgcccttgtcaccattggaccaggaggcccaggagaccctgaagaccagtataccctcctgctgccctttcctgaccctctggtccctccgctctcccatgatcacctgtttcaccacggaggtccttgggcctccaggtaatccacgtttcccagctcgaccaggtgggtcctataggaccccgagaaccccggatctcctctttgtcctgcatctcctggagcacccacagggccaggagttccaggggcaccctgagagcctggcagacctgcaggcccagggtctccacgatcaccacgttcgtccaacagcaccatcccgtcctggggtaccatcattgccagctggaccttctggtccaggttcccctacaggaccattggagcctgggggccccacaggtccaggtggacctttatctcctgttgcaccagttggtcctacttttcctggtgttcccgctgggcctggtagtccgggcatgcctctctctccacgttgcccaggcatgccaacaattcctctctgcccggctcgttccagctggaccagggggtccatctggaccaggttgcccatcttctcctgggtcccctttgtctcctgggccaccaggggggccagctggtcctcgatctcccacacgcccatgagagtccagggtccccacgaagacctggaggtccctccttcccgggttcccctaggggtcccgcaggtcctggagctccagcagggcctggaggtccaactctgcccgcagaaccaggaaatcctgtagcaccaggcggaccttgggttcctcgaccaccttttagtccaggaacaccattaggaccatgagggccaggggatcctgctaaaccttgtggtccaggagaaccagcatctcccttctgtcctggctctccaggttcaccttttactccaggctgtccgtcaggaccctgcggacgcgtgggtcgacgatatcccgggaattccggaccg

SEQ ID NO: 149460 - DNA, 1588 bp, Homo Sapiens
  misc_feature (332)..(332): n is a, c, g, or t
gcttctcggggggctggtttgggggcccgaatgttcctggagaagggccacgtggggtaggggcctgtgattcgaatccagtgcccgaggtaggacttggagggccagggggccacgagccatggagccgtccttctgctggtttactctccaggaagcgcgatgagaaggcggggggacagcacaaggcggtggcgtcaaccgtgtgggcaaactgcagctccccagcctcggtctggaacatgatgtggaggcggcggctctggaagtctgtgcagttggaagcactggtgacttctccaaagcggcctcggcctggcatccaggcctcnaatgtcaaacttgcgggtaggcggggaggcccagttcttgggtgggcatatccaggacccggaagtgcaagcccagctctgtcaagatctccatctgaagggacaggaactcctccagcagctgtgagctctgctccagcccagggcctgtcaccccaaacatctccaccttggtgaagtggtgtactcgatacagcccccggggttcctgtcccgtgtttgtctctgcccggtagcaggtgctggagcaaaccatcctgactggcaggtccctgaaggccacggtgtggtccatgaagtagcctgcaagccccacctccgctgttccagccaggttgagatctttgaagcgggcagggtcgatgttgtaaatttgggatgggttggcatttggtgtcatcccacagccttcaaacactgctccgcggagaaggtctggcaccgtcatgggggtgaagccccggcggagaagcttgttgaatgtgaagttgaccaggccgtgctgcaggagggctccagccccgcgcaggtaataggaccggtggccagacacgtgggacaggcgcttctgacggatgatgtcgagtttctcgccaatttccaggtggccccgaggttggaaggagaaaactggcttgtctccgaccatgtggagcactcgagcctggctctcatccccgacgggcacgtctgggtgggtctggttgggcagcttcagcgcctgcaggtagaactgctcctcaagctgggcctccctggggtacaggtgaacaagctccttccggatctcccggccacgtgcccgcagaccctggtacttggggtcctgctgcacttcaccactgtcctggtttgccagcagggcccgcactgcctcagtcacagctgccttctcttcctccaggctccggatctgctcctgcagctgcctcagctcctgccatgtcgagatgatcgcgggcaggtccgccgagcgcagctcccccttgcggagctccagggcgtgtgcggcctcttctgggcatgcgcagaaccgctctatgtccagctgagggagtgcgctgtagccctcgcgcgcatactcgtacaggaggttccggtttcgtttctctgtagtgaaacttctccttggactatcgttggagatgcagcctccccggggccggaacccccgacgagtcagcaaaggccacaagcgccgcgccatggacgcagccatcttggaccgggcctcggccgattcaacacgcagcctt

SEQ ID NO: 149461 - DNA, 1345 bp, Homo Sapiens
cggctctgtggggctaagccaggtaggagccaagctagaagacaaggctgtggctcccgcaccacgggcctcgtggtgggcactgtggctgtggtggtggtggctgggcagccaaagtcggcgtagtcaagctccaggagcagccggccagcgttcttgggcgggaagtggcagcgcgtctcctcagggctggccagtgtgacgtggctctcgcgcacccaggggccaaaccagctcagggggcacacgcagttgaaggggttgcgggcagctgccagcagccgcaggcgggggaagaggcccgagaggtcgccaggcagggcctgcaggcttaggttgctcacatccagctcctgcagggcagccaggccggccaggtcctcgggccgcagctgggcaatgcgggtgttgccggccagccgcaggcgcgtcaggccccggaggcctcggatcacaggtggcactcgctccagctggttgtcggacacatccaggtcgtggaggttgcgcaagcggctgaagagcccctcgtccagctgctgcagccccagaccagccagccgcagcgcctccacgttggcagtgtccaggatgccgggctccagggccaggaggctgttgtggctgaggtccagcagcagcaggcggggcaggcgcagcgggggcagtgcccgcagctcgttgtcctgcagcttgagctccaggaggcggtcgagcgtgtcgaaggcaccaggctggatgtggcggatgcggttcttgcccaggtagaggcgctcgaggcgccgcaggccacggaaggtctcattggtgatttcatgcagcctgttggctgtcaggtccaggttgctgaggttggcgagtggctggaagaccccgctgggcaggctggcgatctggttctgtgacaggtccaggagctgcaggcccggcaggccggcaaagctgcctgcgtcgagcatggtgatgccgttctcaaagacgtacagccccaccgtgtcgggtggcacgtctcggggcaccgtggtcccctggcgggcagtgcagaagactgtctgtggctggctgcactggcagccggatgggcagccctgcaccccaggccccagggccagtagcaggagcagcggcagcagcagagggaccctggagcacatcttctgtcccgggaggcggcggcggcgcagggagccgggcggggcaggccgcggcctcagtctttcctggcgggtcgggcccgagggggtcctgggtcccgaagcaactgcgttcgagtccgcgtccacccgccccgggctcgggctcccctcgtgccgaattcggcgcgccgtcgacttcatactctccc

SEQ ID NO: 149462 - DNA, 1484 bp, Homo Sapiens
tggaccggtccggaattctcgcggaatcgtcgacccacgcgtccgctggcttcctaggcagcctggtacctgtagtggtggagacactgggagatgcttatttttgaccgcaaaagaactttgcccagatcgccaacctggtgtcagaggacgaggcagccttcctggcctccctggagcggggtaggcggatcattgatcggactctgaggaccctggggccttcagatatgttccctgctgaagtggcctggtccttgtcactgtgtggagacctgggactccccttggacatggtagagctgatgctggaggagaaaggggtccagctagactccgctgtactggagcggttggcccaagaggaggcccagcaccgggcacggcaggctgagccagttcaagaagcagggattgtggcttgatgtccatgcgcttggggagctgcagcgccaaggagtgcccccaactgactgacagccccaagtacaactactccctgcgacccagcggaagttatgagttcggcacctgtgaggcccaggtgttgcaactgtatacagaggacgggacagcagtggcctccgtggggaaaggccagcgctgtggcctcctcttggacaggaccaacttctacgcagaacaggggggcccaggcttcagaccgtggctacctggtgcgggcagggcaagaggacgtgctgttcccagtagcccgggcccaggtctgtggaggtttcatcctgcatgaggcagtagcccctgagtgcctgcggttaggggaccaggtgcagctgcatgtggatgaggccgtggcgtctaggctgctggcgaagcatacggcgacccacctgctgaactgggcactgaggcagaccctgggccctggctcagagcagcagggctcccatctcaatcctgagcagctgcgcttggatgtgaccacgccagagcccattgaccccagagcagctccgggcagtggagaacactgtgcatggaggcccgtgggtgccaggatgaggctgtgtacatggaggaggtgcccctgggctcaatgccaggtcctggcctggctctctggatgaggtttacccagacctgtgcgggtggtatcagtgggggtgcccgtggccatgcgttggaaccagctccaagcagagtggagagctctgtggagctatgctgtgggacgcactgtacgtactgcggctgaggggactggttatcctcgggggacgcaaggcaggggcaggaacggctgctggcgtcatgggagtgggccacgcgccgagagcagccaaactggccggaaggaagcgccaggacgtgagtgggccgatggggagcgcgggtgcagacatgggggctgaggggagcgcgacccatcgggggcttgcaccgaatgcgggaacacaagtgggagaacggaagcggggtgacagcatggggggaaacaccagaagacggcagcggacacacag

SEQ ID NO: 149463 - DNA, 1231 bp, Homo Sapiens
tccccgtttcccgctggaggggcccctgatccgttgatggctcttcgccggtccgccctccggggcctattccctccctacccgctttacaaacaggcctgtcctaaccagcatcgggtctcttcagcaggagaacccccgcgactggcccggctacctgggacacacgtctcttgccctgccccaccaggtaccacggtctgaagctggcccccgtgttctgcgtagaagttgttcctgtcccaagaggaggccacagcgctggccttttcccccacggaggccactgctgtcccgtcctctgtatacagttgcaacacctgggcctcacaggtgccgaactcataacttccgctggtcgcagggagtagttgtacttggggctgtcgtcagttgggggcactccttggcgctgcagctccccaagcgcatggacatcaagccacaatccctgcttctgaactggctcagcctgccgtgcccggtgctgggcctcctcttgggccaaccgctccagtccagcggagtctagctggacccctttctcctccagcatcagctctaccatgtccaaggggagtcccaggtctccacacagtgacaaggaccaggccacttcagcagggaacatatctgaaggccccagggtcctcagagtccgatcaatgatccgcctaccccgctccagggaggccaggaaggctgcctcgtcctctgacaccaggttggcgatctgggctgagttcctttgcagttctggataagcatctcccagtgtctccaccactacaggtaccaggctgcctaggaagccaggtggtgcctttaagatctccatggagaaacgcacagctcgacgcaggatccgacgaagaaccagcgggggacctgacatcccagggaagacgccatcagagatgcagacactgagtgtgcggatgtggtcagccaccacgcggtacgctgtgtctgtgcgcccctggtctgccacccctactcggcccaagtaagggggtgccctgcagccctgctgtatggcgttgagcagcggggaaaagaggtcagtgtcataggtggagtgtttgccttgcagcacagccaccagcctttccaggcccattcctgtgtccacatgccgctggggcaggggctgcaggcttccatctgcctctctgattgtgttgcatgaacctcgtgccgaattcaacaccaggcctcgtacctagcctaa

SEQ ID NO: 149464 - DNA, 1922 bp, Homo Sapiens
  misc_feature (187)..(283): n is a, c, g, or t
  misc_feature (337)..(370): n is a, c, g, or t
tacgtggatgggactctcttccacgacggtggtgagtgggagtttattggaggggcggtgtgggcccccacgcgggggggtgagccacaggtgccagaggctaaccgggggatccacaggaatgttatcgttagggtatgggggagtttgttataactttaaaagcggagggcgaccccgggataannnnnnnnnnnnnnnnnnnnnnnnnnnnnnnnnnnnnnnnnnnnnnnnnnnnnnnnnnnnnnnnnnnnnnnnnnnnnnnnnnnnnnnnnnnnnnnnntggttcctgggggccttccccgggacgggtgtgcaaaggtcgcgcggccacaannnnnnnnnnnnnnnnnnnnnnnnnnnnnnnnnngttttcccgcgaccaggcaggcgccccggccggggttcaggcttgggggagtccccaagagctggctaacccgggctttggggggggaccgggccttcttggggctccttcggggttccaggttaggcccgcgggggggttacccatggagtgccgggggtgtggaaggagatcctaagggggatgagtcatcggaatccaggtaccatggggcttcgtccatgcgggaccttctcctcccattctgggcttccccaggcttgggggaactgggaccccaagcccagcatgctcgccgctctccattgcttgagtcctccagacgtcggggggactggcggccccatgcctggcctggctctgcaggctccaactggatggctcggaaccggggaaaggtgggcgaatccccaggcccgacctcgaagacgtttctcctccggtcaaggccgggtgaggcctgcacggtgatgcggtgcttgaagtcgagtggcatgctgatacgctcgccgccgtcgcgcgcccggagcttgctgcgcttgaatgtcccgcggcggcggcgcacgtgcggtcgctcgcggtccacctgctgcagcagcagcgtcagctcgcgctcgaacacctctagctcccactgggccagcaggtgctcgcgccgccgcagctgctccgcctgtgaccgctgctcgcgcgccgctcgcgtcagctcctcttggcggctcagtagttccttttccttggctcgcagctcgtcgaagagaccctggatctcgcgcttccagctttcctgcatggaatggaaggagtcccgcggcatttcccgtaggacctgtgcctccagcgcctccaactgctgcaggatggaggcgaagtcgggcctgcggtgggggtcctgcgcccagcagtcggccataagctgtgcgaagggctcggggcaggtggatgggatgggcagtgtgagcttgttaacagctacgccataggccacagcaaggcagtcaatgccacggtatggcacctccccggtcagcagttcccacagcagcaccccaaaactccagacgtcactgcccttagagaaggtggaggccttgataacctcaggagccatccaggcgtaggtgcccgcggcactcatttgtgtggttttgtgccactctcgggccaggccaaagtcggtgatcttcagggtcttgtgctccatgtcgtcactctcaatgggctgcagcagcaaaatgttgttggacttgagatcacggtggatgacgggcaccagggcctcgcagtgcaggtagtgcatcccacgggcaatctgcacagcccagttgaccagcacatggggaggcacgcgccgcccggccagagctcggctgaggggcccaccggctgcatactccatcaccaggcacaggttgggctcctccaggcacacagccttgagggcaatgatgttggggtgtgccagcatggcgaagagccgggcctcctggcgaacgctctcggccggacgcgtgggtcgacgatatcccgggaattccggaccggtaccagc

SEQ ID NO: 149465 - DNA, 1481 bp, Homo Sapiens
ggggcagctgggccagccagaagggaagggtgaagagtaacttctatccaccccagcattgccaaccagtgttaccggtgatggctcgggctgtccagcagctgtgggcagggtgagggctggtctggtcttgaggacttgtggccccaggtgggcagagccaggccattgagccaggcggtctccagcagactgcggaagcgggccttcagtgtggggccaggtgggctggcactggtagcaggggtaggggaggcaccacaggactcttccccagcaagctgcctctgctttctccgggccaggggttggtggcttcctgcctggcttcctgaccttgggggccggtgacttctgagccagggctaggctctctggctcatctctggccacagtgggctctgaggaggacacagctccagcctcagtgtcaaagtcacctgtcacttgctcacacagctccggtggccactggggctgccccatgctcacccagctggcggcgtacacagtcgcgccactgcaggccgagaaggtcggggtaaatgtccggcagctggcgcagcgccagtaacttcagcatgcgtgaggtgcagcctggcagggcgagctcccgcagtgcccgctcctccgacagcgtggtgggccgcagctccacacgatgctcctgcagcacatggtccacagaagcgggtggcagccgagggaagagccgctccttcaccaggtgaatgggcacgaagatggcgccagctcgcaccacatgggggaaggggcaccggtgggtgcgatcgaagcgctgcagctgagacagcagcttggccagcagcccctgcacaccctggcagtcctgccacgcagcctggccccagggcccagccgtctctagccactcgcgaagcttctctggaggagagtgggcgacggagccagaaatagcatcacacagggacgcatgtagtcctgtaaaatgctgctccagggagtcccctggggctgaagtagatgctggagcagggcctgcaactggagctggagctggagctggatcccgggctgaagctggagcctgagctcgagccggagcaggggatggagctggatcaggggcaggggaggccacagctacggctggagggctgggcagtgccaggctgaagcaggtcacagacaagggctgttgagcgagaatccgcagtccaatgggcccagatgtgggggtgggtgcaggctgtgtgggagcaggagctgaggtgggcgtggacgggaccacggctgcaggcaaaggtgccggacggaggatcttgaactttcggaacatgaatgccacagagctgtggaagttggtccttggcatggcatctgtggtcactggcacccaggcaagcctggtgcttctgtgtctatctttttcaggcctggcagatctgacaccatgttgcccacatctggcacatccatggctgcagttggcggccgca

SEQ ID NO: 149466 - DNA, 1428 bp, Homo Sapiens
acggcatcagcctcgtgtctccatcgtctcccgcaagttgctgctgttcttctctggcttgttcctggttttcagcttccgtccttctcaagaggtgtccttatgccttctcctttctcacttggagctggagtagcaggtttagaggtgcagggactgttggtagcagaagcctcaggagtggtgggagacgttttggtaggagaaggaggcttctggaggagcgctttagaatcgggcgctggggtcaggcatcagtttccggcattgaccaacgcccattgatgtgctcaaactcctgcaccttctttttgacgagagacctgactccaatgcgggtcaacacctgctggcgactcagtccctcccgagggaccccatcggcaaaggtttcagagccgtctgccccaggctcacacagatggcgcatgaacaaagacacataggccttaaactccttctcagtcttgcccctcaggtcccgcaccagccactgtgtggtgaaggcatcctgtggtggcatcccccagcgcatcacagcattgaggaaagccttccgctgacgggtgttgaagcccagcaccatcaatgttgcccccgactcgggccagcagtggaggcagtggcttatctttctcattccggagctgcctctttgactgtctacgcccttcaggacgttcatcgaagtcttcatcctcctcctctgaacccaccgagtactctgactggttgtcttggtcttcctgagcagcatcattgtagttaacttgcttgcgaacccgcttgcccttgcctagattccgggctaggtcttcctgctgttgctcatagtgatgcctcagcagcttctcccagtagtcagggtccacattctcctcctgcttgatgatctctcgctcaatttcctcaatcttgtcttcttcccgcacgacgtactgtgccaccttgaaggagctgagatactcattcatgttctgcacgtcagtgtcctcagttgcatcctggttccggtccaacagccgagcgatggcctcattgtcataatgaatcacactgctgtcctcctccttgttctccccctcgttttcatccttgaatagctcttcagtgccaatttgagaatgtcgtcaagctcctgcttggacatggagcctgccttggagcccagcccaggccgcacaaccaggtgtgtcagcatcatctttctcttggccacttgtgtgattcgctcttccactgacgcgcgagtcacaaaccggtaaatcatcactttgttggcctggccaatccgatgagcccggtaaaggcctggatgtcattatgggggttccagtcagaatcaaagatgatgacagtgtcagcagtggccagatgatgccctcgtgccgattacacaccccagcctcgtacctagccgtatgtttt

SEQ ID NO: 149467 - DNA, 940 bp, Homo Sapiens
  misc_feature (106)..(106): n is a, c, g, or t
  misc_feature (129)..(129): n is a, c, g, or t
  misc_feature (207)..(280): n is a, c, g, or t
  misc_feature (296)..(333): n is a, c, g, or t
ttggagtttggtgctggctgcagctgaatggaaactgctgttgcaggggcatgctgctgctgaaaggggttgaagctgctgctgagggcgatgcagctgctgtganggatgcaactgttgctgtggaanctgtagctgttgctgtgaaaactgatgcggatgggcttgctgctgctgctgctgttgctgtgaaaatggatgcggcgnnnnnnnnnnnnnnnnnnnnnnnnnnnnnnnnnnnnnnnnnnnnnnnnnnnnnnnnnnnnnnnnnnnnnnnnnnaggtgtaaaactgggnnnnnnnnnnnnnnnnnnnnnnnnnnnnnnnnnnnnnntagcatgtgtgtctctggagtcactttcacttggctaaacagcactgcattggcatttgtatgtccctgctggctgtgattcagctgctgttctaaatttttcgtaggtgctgaaagagtctgtaagatatgtgctacatttgatggccggttcatctgctgaatgtcagcattattagtaatattcctcagtgtccgtacagctggactccaggtagctatcatttctgatctttcagaactttggaggttttgtccagcagccattaaattaccccggacctcagggggcaaaatgttacctgggacgggtgggacattggcacacaagttaatcaacccaggctcctttccctgaggcagcctgcgttttgctgcagctaactgtgggacttcggccggggtccagtttaaatttctctcctgtttttccggtgatgaatctgaagaatcatcaaacattaattcccctttagatttttcagtgttggatttaggtgaaaactgctggtcacctgaaggagacccttcttgagagctggcagggcttgacttctcatctcggacgcgtgggtcgacgatatcccgggaattccggaccggtacc

SEQ ID NO: 149468 - DNA, 626 bp, Homo Sapiens
  misc_feature (35)..(35): n is a, c, g, or t
  misc_feature (46)..(46): n is a, c, g, or t
acacattttcttgatgccagactcactgatgcgcntgaagtactgngcaccattaatgaggatgcaggagatcaggtggcccaggccttcgaagatatactggaacttgtgctgctgaaggctggcgctcatggcctcttcaatggcgctgatatctttgttgagcttgaccaccagggggtcataatccatactttccacattagccacaatggcatagttcccctcctttgcaagagggataagatagtggaaacagtgaaccctcacttccagatgtaagacaagcaagcagcggtcagccatatcctggaacgatttggcaagttcactgagagtctgcatgatctgctctgacactggggggagatccgtgttcgtgtggctgtcttgagcaggagaaagcatctgggatgtagaaagattggagaaagctgactttgttcgacttgccaaccattccaggctttcatgcatgttggccaaggctttgaggtcactgacgtcacgaaggatgtcttgtggagggattaatttatcacccaggttcccaataagaacttcagactccttgccaaaagctgcccttatgaaatcttcttcctcctctctttttggcggccgca

SEQ ID NO: 149469 - DNA, 1032 bp, Homo Sapiens
  misc_feature (172)..(172): n is a, c, g, or t
ccattggtttattcttttctcaagggaattcctcaatagtgcacctttaatgagcccgccccagggtaaagagccgtagtaaagacagggaaaatccttgcttaagggtcttccacataattcatccctggatctcctttgctgttgctcgtttcattgccccagcagaaanctgatagaagaaacctgtactccagcagggccgtctgggggatctgatagttggtcatgggtttcctgaaggaataaatcttctggaggataaactctcggatcttcgtcactgccttgacccgggagccgatcgagcacgcctctgacatctgcgcaggctgctgtgcctctagcttcctgctctctgactgcggctgccttggcatccagctcctgtagctgctccaagaacctgggctctgtcactggagcctccagaattgccgtgaccagagcagaaggcaccaccagaccatcaacaagctccccaagtttcccccgaactgcctggcgatttcgaagtcgaatgttcatggctcctgactgttcctgcagtgtccggatctcagagctgatggagctgaggtcactctgaaaagctcccaacatctgctccattcgctccaggacagcatcacaggctgtgatctggttgtgtagagatgctatattctcactctcttgaatataatcccgaatggatttctgttcaatctgctgtagctccagctcaacttgctttgaatagtgacggagatctacacccgttttaagagcttcctttactaactcatcctccagatttgcctgaatgtgaacatccacttcatccaggatgaattcatcagaagtgatatccaactccccaagttgcagtggttcctggagcccaggaccacccgccagcgggccctcttcctcctccatatctgaggtcccagcccgcaacaccagttcccgggccgcagccgccatggtcgcagcggcggccggacgcgtgggtcgacgatatcccgggaattccggaccggtaccagc

SEQ ID NO: 149470 - DNA, 1006 bp, Homo Sapiens
cggttctttcacaaagggcccgtttggggggattcggttagttggtccgggggtttccggaaggaaataattcttcgggaggattaacctctcggatttttgtccactgccttgacccggagccgatcgagcacgcctctgacatctgcgcaggctgctgtgcctctagcttcctgctctctgactgcggctgctttggcatccagctccttgtagctgctccaagaaacctgggctctgtcactggagcctccaggattgccgtgaccagagcagaaggcaccaaccagaccatcgacaagctccccaaggtttcccccgaactgcctggcgatttcgaagtcgaatgttcatggctcctgactgttcctgcagtgtccggatctcagagctgatggagctgaggtcactctgaaaagctcccaacatctgctccattcgctccaggacagcatcacaggctgtgatctggttgtgtagagatgctatattctcactctcttgaatataatcccgaatggatttctgttcaatctgctgtagctccagctcaacttgctttgaatagtgacggagatctacacccgttttaagagcttcctttactaactcatcctccagatttgcctgaatgtgaacatccacttcatccaggatgaattcatcagaagtgatatccaactccccaagttgcagtggttcctggagcccaggaccacccgccagcgggccctcttcctcctccatatctgaggtcccagcccgcaacaccagttcccgggccgcagccgccatggtcgcagcggcggccattccccgcagcctcacttccggcaactgtcagtcccggcgagtccgttccccggagtggagctacaagtcccaaagggtcttcctcagcgcgaaatcgttcccagatatttgagttaagttgtttgactccagctgtcccctttcagctctaaccacttcacccaactgcaaatatcccgggaattccggaccg

SEQ ID NO: 149471 - DNA, 1089 bp, Homo Sapiens
ccacaaaagcttaaatatttcccacgggtaaaggaggggaacccggccccgtgtttttaaaaagaacccctttcttgtttaaccggggttccaattcttacaagtttttaattgtttggaaagggaatggaacctggatggctttggggaagcccccaaggatgtgtcttctgccctcaggttcccaggggatgggcggtttccagtgatccaagcccaggtcacttggtaaaaggttttttgtgcccatttgcagctttaaggattccctgacttgactgagtcagatttttctctgaagatttacggagctgcccccatcatacagaaaagtgagtacgtgcaatgctaaacataaacagttgtggaatgcactgtccattggtttttacatcaataatttttactgatcaatttataaaccaaaagcttggttccacgcaaaaattcatgatcgacacgtgaaatggtttatgacaaacacacctgtctctggataagaagaatttcgaaaacccgggtccttttgcaactgaatctctttcaaactgaatattgatacactttctggtaaagcatgtattcttggtcccagacttcgaaagtacacatgtttcatggcctcttcagctgaaggtcttttcttagattcatactgaagaacttttgttatcacctcaattccttcagagtctatgctgggtgcgtggttaattagagcgctgtggtttatattttggaaagttgtagttcttgacctcctcatttgaagaaatagctggtcaagtttcctgagatggagttcctatgcagtcggagaattaagtgcagttcatcttccacggttgatcctggaaataaaggtcttccagaagccatttcaaagaaaatgcaaccaacaccccacatgtcaatctgtgttgagtactccgaggaaccaagaagcacatcaggtggccggtaccatagtgtgacaacttcatttgagtaggtctttgtgggaactgacttggctcgggctagtccaaaatctgctagctttaattctcccggacgcgtgggtcgacgatatcccgggaattccggacc

SEQ ID NO: 149472 - DNA, 1026 bp, Homo Sapiens
ctttactcagttcacagagggtctctgcgtgccgtagcggccggggctgcggtagccactttagatttgggcaaggactttagattcgggctctgttctgtttccgccgtcctgcttcctgccgaggctggcccaggcagccgcgcttcgaaggacgccgccgggagctgcggagcatgcgtggagtggcagtgctaacggctggtgtctcgcactgttggcctgtgaaggtacgtgaagctgaaagcctggaatggctggaaaggggtcatcaggcaggcggcccctgctgctggggctgctggtggccgtagccactgtccacctggtcatctgtccctacaccaaagtggaggagagcttcaacctgcaggccacacatgacctgctctaccactggcaagacctggagcagtacgaccatcttgagttccccggagtcgtccccaggacgttcctcgggccagtggtgatcgcagtgttctccagccccgcggtttacgtgctttcgctgttagaaatgtccaagttttactctcagctaatagttagaggagtgcttggactcggcgtgatttttggactctggacgttacaaaaggaagtgagacggcacttcggggccatggtggccaccatgttctgctgggtgacggccatgcagttccacctgatgttctactgcacgcggacactgcccaatgtgctggccctgcctgtagtcctgctggccctcgcggcctggctgcggcacgagtgggcccgcttcatctggctgtcagccttcgccatcatcgtgttcagggtggagctgtgcctgttcctgggcctccttgctgcctgctggccttgggcaaccgaaaggtctctgtagtcagaagacacttcgcccacgccgtcccaggcacagggatccgctgtcaagagacttgacgtgttgcttgatggacatcccactattgagcgaagatgtttccacttggcccggaaggcaaaggtagccatggatacaaccactgtagcttg

SEQ ID NO: 149473 - DNA, 944 bp, Homo Sapiens
  misc_feature (26)..(26): n is a, c, g, or t
  misc_feature (66)..(66): n is a, c, g, or t
gggggtcagctcaatctcccttgccntgttgcatttacagtgcgcccttgctcatccagggatcangtgtgtaggtttcgtttggtcttttaactccaaccttcggggggggagcaatgcccatggcatggagattagccaggcccaccatgttggcattgccgatgagtcctggcttcagtgccagctgggcttggattcgagcttgcagttcagctgctttccttgccttctcaatggcatcattcatgaaagtggcagcctgggagggctgaatagtgttgccaataggaagtcgttctggttgggaggaagaaggagtctttggctgaggtgtaggggggctaatgaagctcagctgttttttcctctcctcgatttgtcgtgttgctgcctccatcatctgtttgatctggagcttagtcagcatgccagggctctctgatggaggcccagggatcacctctggctcttcttccacctcctcaaaacggggtattcgtcgcttctttactcctgatgattctttagagatctcagagtcatcaccaaacacctccggtggtaggctttgggtgacatcccctcttcactaggagggctcgtgttttgcaaggacatatcctcggccaggggcgagcgcttcctggaactcctttagctctcgttttctgctcctgtcactgctagacttggaatgcctagagcttcggccttcctccacagcctcaaacagtttgtccacaaatcggagagtagaatcatcaagaaaaggtttcagatgatcggctgccttcttcttgtccatgcccttccccacacagttcaatgctgctgtgaccaccgtaggctctgagaaacccaggaccctcttcactgtcttctctatccatggtttcagctcatccagctccctctttgacagtgccatttttcaggaaaaa

SEQ ID NO: 149474 - DNA, 1056 bp, Homo Sapiens
  misc_feature (56)..(56): n is a, c, g, or t
  misc_feature (59)..(59): n is a, c, g, or t
aaaacctttctgttcccctttctgccagccctagggattgagtccacattcagcancanggactctctgggtacagctctcttagggaagacacaaattgcatggtgaagtcagttatatcctgcccgcctttggtccctcccaggaagacggggcatgttttctgcttgagaggtgctgatgtaccagttggggaactgggcagactcaaattccagcttgttattgatttctatcttgttgaagacaaatcgcttttccatcttcttctttgggtaatttttgggatctacactctccagctgtagagtgggcttatcatctttcaacacgcaggacaggtacagattcttttccttgaggcccaaggccacaggtattttgtcattactttcttctccttgtacaaaggacatggagaacaccacttgttgctccatatcctgtccctggaggtggagagctttcagttcatatggaccagacatcaccaagcttttttgctgtgagtcccggagcgtgcagttcagtgatcgtacaggtgcatcgtgcacataagcctcgttatcccatgtgtcgaagaagataggttcttcttcaaagatgaagggaaagaaggtgctcaggtcattctcctggaaggtctgtgggcagggaaccagcatcttcctcagcttgtccatggccacaacaactgacgcggcctgcctgaagcccttgctgtagtggtggtcggagattcgtagctggatgccgccatccagagggcagaggtccaggtcctggaaggagcacttcatctgtttagggccatcagcttcaaagaacaagtcatcctcattgccactgtaataagccatcatttcactggcgagctcaggtacttctgccatggctgcttcagacacttgagcaatgaagattggctgaagagaatcccagagcagcctgttgtgccttgtgcctcgcggacgcgtgggtcgacgatatcccggaattccgaccgtaccagcctgcttgtttaaccactgtttatattcacagagctgttgtgtg

SEQ ID NO: 149475 - DNA, 981 bp, Homo Sapiens
tagaggaaggcgccacagggaggtaaggttcgctgcgggggcaatgggggtcctggtaaataaggggggagaggggctcaggccccatttttttaactcttgggagacggggccacgccagcgcaggcgggtgttttcccaaaagggaaggcacccaagcttgaggagaaggttttccagaggagtttgtttctcacgccccaatgggaggggtgttccagggaggaagggaccacgcgtgggccaaaaagccccggagggccggggaaaagaagccagaaaggagggccgttggggcttgaagccatgggtggggcaacggggaaggaaggtggggtgggcagacagattgcctgggaccccacccgtgcaggggcagaggaggattacggggatccttgcaggccccccagccggggctgaggcacagagacagtgcaggtgggcaaagggaggaggacgtggagaaatatttttggaggcatgccctgatgaatgagcccaggatgcacccttagtgtcagtgtggagctccttccttggctgtgtgattagctgaactcgggggtattttctggacattgagggtgctacacccagagtccaggacaggctaagtgagcactagcagctcctggcccacctcaaaagcaggagagacaggggagactgaggaggccggggcggaaggggaagccaggaaggtaggagaggccagggaagcagaggaggcctgggaggcaatggaggcaggagaggctggggaggttatgtcctttccatgattctgccctcgatcctaggaccctgaactccctgagcttccccaccccaagcgctggaaccaggttgcacaatggtctccccactaagctcctgatggcagcccctaccctgctgtgctccctgtttcaaccctaacagctctcacagtgggcggacgcgtgggtcgacgatatcccggaaattccggaccggtcc

SEQ ID NO: 149476 - DNA, 985 bp, Homo Sapiens
gacgattagatgcgcgttggtccgaatgtatcgtcacagtgcgaatcgagtccggcgtttccagtgcttccgtcaaagagcggtgtggaatcgaatctccgtacggggaacaccgatgattcagacctccgtcatagtggcagccatggtgcggctgcatgccaaaagtgggaagaaccacactcgtcggatctagagcgggagcacccgaaacctagaaacgttaagctgtggttgccggatctcccgtgcgggcctcccacaatggtttctcgtagtgtcgcacacagggccgttagaccacctgacccgcaaaaggtctgcagcgcgcgacaaaaagcggtatcccccacgccagcaggagagccccgacgtctgaggaggaagtatcggcacgttccttcaaagcggggagggcggtaccaccttcccttgattaaatccatcgcttaggggagataaaattgtgactcccaagtatgcagtattcaacgactatcctctgaaaagcctggtggcgtcctgggattgcatttctgaaagacatagtcatccttctgacagtcaaaccagcccagttttgtgattgtggcatatggctgaataagtgcttgtgtcacgaaagtagccaaccttcggccgagtggcaaggtagttgagcacatagttccgaatatctattcgctgttccaatggtagggggttgtttgtgcgtgatacaagcttggtaaggcatgtagctgccagtaactgggagtaagaggaacttcctctttcgaggagtagctggcacttgctcaggcaatcagggctgttggtaaattcaaccaaggctttctctgcctggagtcgagtggttgtgtctgtggtttcatacagctgtttgcacagattctctagttgggccaggctctgcacatgatccgccattttgctccattcatgctcctctccggacggacgcgtggtcgacgattcccgagaa

SEQ ID NO: 149477 - DNA, 1596 bp, Homo Sapiens
  misc_feature (298)..(339): n is a, c, g, or t
  misc_feature (1567)..(1567): n is a, c, g, or t
  misc_feature (1583)..(1583): n is a, c, g, or t
aagcgtggggggagacacgcaacgactgggcggggcaaacactgggggagcaaaaatgcgaaccgcgtcaacggtgggggcccgcacaggcgggtacctgacggggcgcccatgggccactagtgcgcgggcaccgtgcggactgcaagggcgcgacgagtgggcgtgggaggacgggggacccacggaagtgcgcgtgtggacagtcgcagtgcaatatgggggtcgggcccgcgtacaaggggtgggcagggacagggggtcacccgaaaagtggacaaggggaacaggaaaggcnnnnnnnnnnnnnnnnnnnnnnnnnnnnnnnnnnnnnnnnnncgcaaacgaccaggggtgcaaggcatggggagaagggggagacggggggacaaaaagtgctggacgggcaatacgggcccaccggtggcgtaaggagtggagggggggaaaaaacaggggcggcaggggaacggccgggggtgaggccgcaatggcaggcaacaaggcagatggtgggaggggcagggacaggcacccaccggatcacgctgctggcactctggagagaccctcctgcggaaagagcaggcggcctcggaggatctcctcggtcctgctcgaaggggatggtccccacacaccatatcgtagagaagcacgcccagcgaccaacacggtggccgagcgcccgtggtatcggtggtagcggatccactccggggggctgtacactcgggtgccgtcgaagtcggtgtagaccgtgtccttgagcagcgcacccgaaccgaagtcgatgagcttgagctctccggagcgcaggtccacaagcagattttcgtccttaatgtcgcggtgcacgaccccgcagctgtggcagtggcgcacggcggccagcacctgcgcgaagaagcggcgcgccagcggctcgtccagggcgccgcgctccgtgataaagtcgaagaggtcctgcgccggctcgggccgctccagcaccagcaggaagccgtcgggccgctcgaaccagtccagcaggcggatgacgccgcgcgcgccgcccgccagcgcccaccttgcgcagcagcaccacctccaggggcacggtcgcgccgcccaggctgccccactcggtcacccgctccttcaccacgtgcttcacagccaccgggagcccgtcggcgatgcggctacccgcgtagaccgtgccgaagccgccgctacccagcactgcgcccacctggtacgccttctcgaagctctccttgtccgccttggctggctgcaggatcttcaccgggaggtggtccacgccgccgggcccgcagaggtgcgccagggagccgaacttggagagcagcatcgcgggcgacggcctccccggagccccgagccccaggcgccgaagccgcggccgatccgggcgagcggcgcgccggggacaccggccgtccgagcccgaggcggtccgcgcggcgcagtgggcccggaaggcccgcggggacggagtagacgcgcagcagcctcgtgccggaaacgccacccaggcctcgctacctaggggctgagacgnacccatgacgggcccncccggcgcttttt

SEQ ID NO: 149478 - DNA, 1236 bp, Homo Sapiens
  misc_feature (1068)..(1112): n is a, c, g, or t
ggtgcgcgaaaagagaccccccgtggcttgccgcgaagcaatccctacgggacccgaaaagggagttccggccttgggtttgggacacaaaggaggatccccctttctctcaataaacgggaccagagggcaggggccggttgtggacaccccacatggacgttcatgctgcaacagatgggcctccgtgcccagaccaaacccagttaggattgacaatactcgggcagggctaccctggagctcatagccgccgatgcaggagaactcacaggtggctccataattatcccccgtcgctggagcacttccatgtaacccttctctggggcattgagtttgccacagcgtttgactcttactttaaactcgaaatttgcaaagtgcccttattctcagctctgtcatagactgtgtactggatcttgctggtctccttctggaaagttggagcctggggggaggccttttagaatgacatcagtaagaaattccatctgctgtgtctcttccttcggggtgtctcccaggacaccccggacttgtcagtttgttgggttctgcaatgcgttccttcacacttgggcacttgattctaggaggttccatatccacacaggaggctggccggccgctccaggccttgttgtccatacatgtgacggtccgctcccctttcaacgtgtatcctggtgaacaataatactcacaccgggagttaaagtaggcaccatctacacacttaaaccctccatttgctggcatggcaagggtaggacatcgcttttgtttgcagatgaccttgtcagaccatcgtttgtttgactggcagatcagtagggaagagccatgcagctcgtagcccttctggcagggaatgtcgcacctggttcccagggctgttttgtagtatcctccttgaggggccctgcagtacacatccccatagttcacgttgatgggggagcaccacggggtatctttatatctagggtgtgaatacccgacttcatcgtcttctagtggtgagtctcccgatcctgggaagctgcggctgggcgggacgcnnnnnnnnnnnnnnnnnnnnnnnnnnnnnnnnnnnnnnnnnnnnncgggccgatgtgcggggctccccatggcgagcgggccggacgcgtgggtcgacgatatcccgggaattccggaccggaccagctgctctgcggcggcagggcacatggacaaggagaagggagg

SEQ ID NO: 149479 - DNA, 912 bp, Homo Sapiens
ttttcatattccaagtactgcaagtagtcatttttatttattccaacagctttggaatttgcaggaatctttgcgtatttaaccaacaagtccacataactcctctgctctctctgtgagaaacgagagaaacgaggataaggaactcttggttttggaagaagaaccattccaattgtggttttaactttttcctttgcttgagttgctgaactaactgccggctcattttctacagaacttgctgaggcattcaaattttctcctatacgtctgttggataaaacacgtagttcttttaaacttggagccatggaatgatctttataattttctcgagagaaaaatgtcttaaggccatttttgggggaaatatcccaattcagtcctggttcacttatgaccatcttggagctcatcttcctagatttctgcttcactctagctcacagttcacagatgcctggctgcgaaggctccaagaggcaggatccctccagaacttactcagagacatcatcaggactacaaatcaggcttgatctctcatgttcagtacttctcctgtgaccccaggcagactgataaagtgacatgcgagaacctaatcaaatttaggagtcggtctctcggcaccgaacgggcccgaccggctcccacttaatctacctctcacacttcgacccagtgtggagctgggggggaatagtcgaggaaggcaaaagaaacggctgagggaaaggggacgcaaagagaggggaaacaaggttccagaaaagcaggtaaaagggcaagcaaagcaggggtaggagccgcgcagagccaggagcaaagggtcctggcccggccgccatgttccctcctcccggacgcgtggtcgacgatatcccgggaattccggaccggtccagc

SEQ ID NO: 149480 - DNA, 1006 bp, Homo Sapiens
  misc_feature (108)..(108): n is a, c, g, or t
  misc_feature (184)..(184): n is a, c, g, or t
tccttggggaatgggggaagttagggcttggagaggggcctgagggaaaagggggaatgtccaaccccaaggagtaattttggcaccttccccagaagggtagagagnggagccaaaagttggctgggggcgtgggcccttggcgggggagcttccttggcttgactggggaaagaccaggctntgtcctttacttttggccctcaacacattctacccagaggccccagacactgaaaatgggggctgggatcgtgaaagaggaacggcagctcttcagccatccaaggaagccgctgcccttgttcttccggctgagggggaaggcagacttgctctggggttgcgtcatcttgctggccaagtagacaaagggctccaggagggagcgccggtccgccactgacacctcccacagcttcaccttctctgacttggcccagtgctgagccacatctgggtctacacgccgctgctcctgtaagtcacacttgttgccaaggaccacgatggtgacctccttcttgtccttggatttgtcaatctccttcttgagcagctccacacgctgaaaagactctctgctatctgtgctatagaccaggacgtagccatcagtgcaagagaagcagtgtcggggcagttcggccccatctcggagcccccgggtgtcatagaaacgcacctgctctcgcaccccccggtctgtctcaatggagcccacgtagatgtcctcctgcgtctcgatcatctccgaacccactacatggttcccatacagaagctgctccaggattgaagttttgcccacagacgcctggccacacacgaccaccttgcagctcttccccatgcttagttttcaacctcccggggcccccgcagcaccagccgggccctccgagctcgcggggaccaggggaggggcagcgccgccgcaaaggctccagtcttcctccagagtcggcctcgtgccgaattcacacacccagcctcgtacctagcc

SEQ ID NO: 149481 - DNA, 1176 bp, Homo Sapiens
  misc_feature (54)..(54): n is a, c, g, or t
  misc_feature (136)..(136): n is a, c, g, or t
  misc_feature (189)..(189): n is a, c, g, or t
aggaaaaatctcagccatgctgaagagtgcccttaaatataaaaggtgaccatnccctgtacaacctgtacactgacgcttcaccaactcatgctgtggatgagagggcagcccaggataaataaccttttctacncaaggattagattccaggaactgggcaactgccattccgtttttgaaatgctnttccattcggacatgtagagtcttcagacctcgattgcagaggtaacaatcaataggagatgggaactgctcccaagagagttttgcaagaaacgaagtctattatgaaggctttcacaattaacagacaccaggcccattacaacatcactgtggccattcatgtattttgttgcagaatacatagaaatatcagctcccagagccaaagggcgctggaaatatggtgacataaaagtgttatccacgaccaaaataatgtctccatgcttatggacaatatgtgcacagccttcaatgtcaatcaccttctgggtggggtttgtgggggtttcgatccaaacaagcttggtttctggtgtaattgctgcctctagtaatttgattttggaacaatcaacaaaagaaatctttaatccaaattcagatgccacttgcctgaagtacctgtttgtacctccatacacatcatccatacaaataatttggtctcctgcttttaaaagatgggtaatagttacagtggctgctaaacctgaagcaaaggccaaacagtacttagccccatccagtgctgccactgctttttcaaggcaattcctagtgggatttccagaacggctatattcaaaacccgagtgctggccaggcgccccttgcttgaacgtggtggacagtgagatggggggcactacagccctggaggtccattgctctggatcctggcccacatggatcgcctgcgtggcgaaatgttggaagtgtggcaggaaaccttgtgaggaggcgtctttttcctgcatgctgaaccgcgaaagaagaagagaggaaaagaacaccgaagatataaccagtcgaagccgggtgtccggggttgggagagacagaaggatcaggcgagaaggagctaaagcacgcaggtagagccgacggcgagcgccggacgcgtggtcgacgatatcccgggaattccggaccggtaccagc

SEQ ID NO: 149482 - DNA, 1109 bp, Homo Sapiens
  misc_feature (51)..(69): n is a, c, g, or t
gtgtggagatgtgttgccaacgccctctagaggagcaaaggaagccccctnnnnnnnnnnnnnnnnnnntttgtcctatggattaaaggcgcccaccgggaaagggaaaggggcagaaaggggtagaggtgtgttttcattgtaagaatttttggggagaggtgcgctttcccagaaaagcattcagccaatggtttttgcaaggtgcaaggggcagggggactttttcccgggtgccgggtccgtggccatttttggtttctttgccatttcagggtgggcagggtaaattttctttggtcatcggcttcatcccaccttgtggccatatcaaccacagtcccttttctataacatggggcaggttcattatatgagtggatggtggattcagaaaacaaaatctcatttttgtttggtgcaagagttgcctgtaatctcccttggggttgtactgggtgttagtccagattgttgtataagtccccgagaaactgtattataaagatttgtgatgtgacaatatgcttgtcgccagctgaggtagtcctttaaagtttggttgctgggatacaccacgactgttcggtcaaaggcctgggggttccagaagggggctggtcttcaaagtaatcccgccaataaaacccatagctggaggcaaactgggaggccacgtgagtcatgaacttactggctcttcttttaaaccaattggttttccgcttgaacacaaagctgtactcatcactctgtccatacgcgatcacaatatcctctagttcttccatcacagtctgcgcacatttggtcatcagctggagagcacggctgtcattgggttttgcaaagttgtgcttctcagcaaaccgatggaaattccggccgtccagccgcactaccacccagcagtgtgccaggcaggtgtcgtcagcctcgaagtccctcacgtactcgaacttgctttttgccatggtcgcccccaatctcaggtaccgtctcagagtgatggagatggtggccaaggaatcgtgaaccttaactttacaggcgccccacattctacacgcggaaaggaaagggccagatagccccgccccggaagtccc

SEQ ID NO: 149483 - DNA, 822 bp, Homo Sapiens
gttttgtgtggcagggggaaatttttttgggcgatccacttccttcccacctttttgccatatgcaagcccagtgccgtttccttatacatcggcgggtgcatgtattgataggtggatgtggaattcaggaaaaccaaaatttcattttgtgctgctgcaagagttcccctgtaatctccccttgggcttgtactggggttagtccagattgttgtataagtgcccagaaagctgtattataaagattattgatgtgacaatctgcttgtcgccagctgaggtagtcctttaaagtctggttgctgggatacaccacgactcttccgtcaaagcctggtggatacagaaggggctggtcctcaaagtaatgcggccaataaaacacatagctggaggcaaactgggaggccacgtgagtcatgaacttactggctcttcttttaaaccaattggttttccgcttgaacacaaagctgtactcatcactctgtccatacgcgatcacaatatcctctagttcttccatcacagtctgcgcacatttggtcatcagctggagagcacggctgtcattgggttttgcaaagttgtgcttctcagcaaaccgatggaaattccggccgtccagccgcactaccacccagcagtgtgccaggcaggtgtcgtcagcctcgaagtccctcacgtactcgaacttgctttttgccatggtcgcccccaatctcaggtaccgtctcagagtgatggaaatggtggccaaggaatcgtgaaccttaactttacaggcgccccacattctacacgcggaaaggaaaggccc

SEQ ID NO: 149484 - DNA, 907 bp, Homo Sapiens
  misc_feature (53)..(85): n is a, c, g, or t
  misc_feature (308)..(343): n is a, c, g, or t
gcgtttggtcctaaaaagaaaaatgggattagtaaatccaagtgtaggggggnnnnnnnnnnnnnnnnnnnnnnnnnnnnnnnnnaaagcggacaacaatgcgccccgctcgttccggtagacgtccgaggtaatcatctcaaccacgacgaacccagagagaggggccgagatccccacaccacggcactgcacgtgttccctccaccccgctcccctcctgcccccgcccccagacacgcccctcaattatctttcttcctaaagtttccagtccctactcaaagttgaggtcactcagtgcaagnnnnnnnnnnnnnnnnnnnnnnnnnnnnnnnnnnnncacctaacgtattgcttatttcgcttctagaaagttcttggctttgaggccagatgtcttcacctcctctgaagttattgctgtaagagtcagtgtccgtgccaggatgcagggctgccctcactgcaccaggacaaacgtgcctagggagcagggcatcaggtcctccatctcacagtccccctgcagcagccccaggggctcacaacctggggccagcctggccaggcgtggtgggggcacagcggggagggcggtggggccggtgccaatgtgcaggtgtgtgtccaggagctgcgccgctgaggccaccggggacgcgccggtctgcaggagtgggggcggcagcagcgggagccccgacgtgaggagggtgctggggagcggggcagccccagggccatcacagggggcgatcacaaacggggcaggggccggctggggggcctgggagcagccgggtgcagcggccgggtggtgctgtaactggagcagcctctgctgctccggacgcgtgggcggacgcgtgggtcgacgatatcccgggaattccggaccggtcca

SEQ ID NO: 149485 - DNA, 1011 bp, Homo Sapiens
tctcctggagttcgcgcccctggtgttccccgtccgaggcccgttagtcctggggatacttttccctttccccaccgaagcatccctgcacactgggccagcaagccggcaggccgtgccctgccatttcctctgggtaaccttgatgggacagccatgcccgggtcaccatgtgggcttgagcagggtcccctccaaggtatacatgatggtcactcagggcccttgtacacagcaggccaagaccttctctgtaacatactgacaacgtttgaggtcgtggtctccatcaggcaatatttcaggttccacaataggcacaatgccattctgctggcagatactggcataacgggccagcacgttggcgttctccagaatggcaagtgcagagggtgtacgctcactgattttcagcacacagcgccacttggcaaagtcagcaccatccttcttgtattgggcacagcgttctgagagcccatccagcccttgagtggtggtttctccatcagtcccagctagaggcaccacacccttgtcaaccttgatgcccacgacgatgcccttatcctggatggttcggacgaagggaacaccattatcatctttctggtagagggtctcatggaagaaaatgacgcctccaatgcactttttcacacggtcatcagcactgaacaggacctggcggtacagccggcggttctcctctgtgttttccaccccaatttggctcagccgcttggccatgctgcctacagactcatccgcagccagaatgcctttgcccggggctacaatccgcagggcaatgtcagacaactccttcttctgctcagcagaaagggctgggtacgagtgaggcatggtgacagctccctgtgcgcagccagttagcagccgcagccacaagcacagctcgggttctgatccgcaaacagatgaggctgcagccctggctcggacgcgtgggtcgacgatatcccgggaattccggaccggtaccac

SEQ ID NO: 149486 - DNA, 648 bp, Homo Sapiens
ctgcaacactgttttgcattaaagtctcatattgtttaccagtaattgcttccttatgctgaaataaaactttgtttgttcattagttttctgtatatcccatttggttttgaaagcagctcttcatgttttccatattcagtaatttttccttggtcaagaacagcaaccatattagcattcttaatggtggacagacgatgggcaataactaacaccgttcttccatccatcagtcgatctagagcttcttgaacaaggtactcattttcggcatccagcgcactggttgcttcatctaggagaagaattttgggattctttagcagagcacgggcaatcgcaatccgctgtttctgcccacctgagaggagaacacccttttctccaaccacagtgttgaacccttgggggaaattccggatgaaggccactgcattggccacttcagccactctctggatttcctcagcggtcacagaggaagggtcatcagcaccataagcaatgttctcagcaatagagcaagaaaacaaaatgggttcctgactcactgtcccaattttggatctcagccacactgggtttagctgacggatgtccggacgcggggtcgacgatatccggagaattccggaccggtaccag

SEQ ID NO: 149487 - DNA, 513 bp, Homo Sapiens
  misc_feature (126)..(126): n is a, c, g, or t
aaggaaattttctaactatatgaactgaagggccatggcttctacagaaaatatgtttacatcaaatacaatcttgggaagaataaaaaatagctctcctattccttacagggaaggctataaacnatattttattgtactgtttttataaccagagtaaacctttggattctgtcatggattgaattgtgtaaccgcaaaatttatatattgaagtcctaaccccccagcacctcagactgtgacttttgtggacataagatccttgcaaatgtaattagttaagattaggccatgctggagcagggtgggccccaatccaacacagctggtgtcactacgaaaaggggaaattttggacaccagcacccacacagggaggacacaggtgaaggcagagatggggcgaagtatccacacaccaaggaactgaaaataccaccagcagcccccagaagcccctcgtgccgattcgccacccagcctcgtaccttaagaccgtatagtactgcc

SEQ ID NO: 149488 - DNA, 2088 bp, Homo Sapiens
  misc_feature (208)..(230): n is a, c, g, or t
  misc_feature (291)..(306): n is a, c, g, or t
  misc_feature (1058)..(1093): n is a, c, g, or t
gcctccgtataaattgctcccaccaaattgtttaccttttggggaaagagggcgtttaaacctcccaaaggggagaaaaatggtggggcgtggaaacccctgtgggaaaagccaaaaagtgctttcccacatgaagacccaggaaatttgccaccccattggcaattccccaacgtggggggccaaccagggaagactttttgttccnnnnnnnnnnnnnnnnnnnnnnnccactgtggttccattttccctttaaataccggataggaatttggtttcctggaaggtccnnnnnnnnnnnnnnnntcccaaataaaaatggcaatctctacactttaggtttcttgttaggtggatcttgaagactaaacttcggaatttcaccagaaggagcatatggaattctctgttgaagacacctttttgccaattgtttcaatctggaagccaatggtttgtagttcattgtggagcccatccaggacacgccgtccatcgaagataaaggctggctttagcatttttttatgaatgcgttcataatccaattccttaaacatgtcccactcagtgcaaataacaacagcatgggcaccatcacatgcttcatatggatccttggaaatggtcacgagccgggacacttggtcatcctctgaaacacctggatgagaaagatccacaactatttgttccctaggtacttttggatcatatatatgtagatgtgcaccttcatccatcaaatatttgctaatatatatactagaagattctcttgtatcaccagtgtcctttttgaatgcaaatcccaaaatagctatcttcttatcagttactgtattaaacagactatctatgatccgggaagcaaacctcctcctctggtagtcattcatgtctatgacctgctgccaataacgagctacttctggcaaattcagagcctcacagagataaaccaaattcagaacatccttttggaaacagctcccaccaaacccaacactggcttttagaaacttgtttccaattctctggtccattccaatcgctgnnnnnnnnnnnnnnnnnnnnnnnnnnnnnnnnnnnnacagagcacttatggagttaatgctgcttattctctgggcaagaaaagcatttgctgccagtttggaaagctctgaagaccaagtattagtggtgaggatcttttctctgggaacccagtgctcatatacagcacacagggcctgcacagctctctggccctctggagtttcatcccctccaatcagtactctgtctgggttctttaggtccttgatggctgttccctctgccagaaactcagggttggacagcacctgtaaattcaagttgggttttgtgtttgcatcaaatatgcgacggatactttctgctgcccgcaccggaactgtgcttttctcagtcacaattttgtacccatttgagttttgcacaatgcgtctagcacaagcttcaatatacttcagatctgctgcccggcctttccccattccataggtttttgttggagtattcacagaaataaatacaagatcagcttctttgatggcatcatcaatattggtagataactaaaaagattttttcctctgacaggattctaccacttcttttagtccctggctcataaataggaagtgtaggagaattccacgcatctgattcttgattcattgacatcaccaaccgttaccctgatttcaggacacatatgagcaatgacactacatgtgggtcctccaacatagcctgcaccgatgcgacagatcttcttaatttcaaacatgattgtaccactttcccagcagcaagcgcagggaccgctcctatcccgatcgttcggacagcaccttcctacgggccgcgctgccgcagcttctccacccgcgccccgctcgatctgagctccctctcggcgcacgcccctccctcaggctgccacgcgttacactctgagtcccgggcctgagcccgtatttaaaggcttttgcctgcgaaggcggaggcttcattcccccgcagccaggccctccatgactctgccctcagctgcat

SEQ ID NO: 149489 - DNA, 1253 bp, Homo Sapiens
cctcggcgggcggcgcgctgccgggttgctttgtgctctcttggtgttcctgttcttgtctgtctcctgctctcgttcggttcttcgtcttcgtgtttctcgcttctgtttgtctgttctcgtctctccggtcttgttttccgcccttgtttctttttgttttccctgtgccacgtggtttcgttctggctgctctccctcgctctcgcgggtctataggggccctactttcctttgctaacccccctggttgtcccgaatgtgtctggggcctcggggctccaatgtcctgtggcccttgtcattgccccggtttctgggctcccttcgtgtcctggcaactccagcgtgatgcggtctgtcggcacgggagccctgcgccgggattctcacggtaattgaaaggccgaagtaagtgaaggattcgaatgaagtcacgaggctcaaaggagtgtctgcggccgtgtctccgagacgttgctgaggctgggcttgggctgcacgacctgggcggtgtcctgccgaggcctcgctggcgccaccgaagctgggcgacttcaccatctgcggctcgaagccgtccccggaggctgggggcgcgcgctggctgaagatggtgcacaccgggaccggctccgcaacgggaggctcctgctccgggcgcgcagcttcgctgcctgggacctcgcgggccgcgtcctgcctcggggcccctccgctactgggtgccgcgtcctcgggggcacagtcgccgtcggcctcgccgctgggactcggggtgcccgcgggctccgggcctgggtcgccttcccctccgggctcagcttcgtcccgcactcggcccaggtcgcccgcgtcgccctcgctgttgggggagtcagagatgaggacgctctccatcatgtgttcgttcagcttgtccgcgagaggactcgagccttccgatgcggtctcgttctcttcggatccaaactcatctccgccaagatcgatggtttcctcctggaagagcaacccctgctcctccggaggcgcgagctgaggggggtgcggggcctccggggccggggtctcctcgccgccgccagcgtcctccatgaccctgccacccgcccactggagctgggctaaggggtcacctgcggccgtgaccacctcgtgccgaattcgccacccagcctcgctaccttagaaccgttagagtactgccgtcttttaagctgtgtttggacaactggctatccaatgtggcc

SEQ ID NO: 149490 - DNA, 1177 bp, Homo Sapiens
gaacctgactatgaagaaaaggcccaggaaggctttcagccccaatagtggcacataagtgaggaagaagcggacgtagaaggtaatcatccaggccaagtccacccacgtcatttcgctggataacaaaatagaaaatataccactggaagtagagaggcagcaaggctgggggcccaaattaggaagaagtatttgtgctggtggttgtacggcatatattttttcttctgtttcccaagctccacagagaggatcattcccacaaggcaaaagaagaagggatgcatgttgatgtctgggtctttgcggaagcagttgggcattggcatggtgctggaagtgcatgtggttccaccaactggcgggggcccccttcaggtggccaatcacaaaatgatgtagcagatggttccactttgaggtgctgaagaccgacaggtgcccaaagtcatgctgcagccagccagcctgggcctgaactgcactgagcagcaccgcacagaggaggaagggcaaaaaggacgtcccaaagacccaaagggtgagccaggctgcaccatccagcagcaagatgtgcagcaggtacagcaggaagaagacatggttggccttcatgagccccatccgctccactgtggcccgcagctcccggaactcatctgtcagctctttattcttggtgggctcaaagctgggctgctctggagacagttctccaatcaggagagagttcatatacttcttcacaaggcccttgttgatgtggaaggccacaaagggatccgtggcatcctgcccggcgtagtggctgatgacccgggagccccctggatgccggcgggtgaactcgctgatgttgtacaccttacggtcgatcactagccaccgctcctcgcaccctgagcgctgggccacctcgtcccaggtgaagtagcgcggggtaggtccctgagccgcggtctcggcggccaccgggtcgggggccatagctggcctggcgacgccgcgcgccgggccagcaggggctgtcaggcgcgtgctcggggtccgcgggctccaggagtggatttgctggcgcgcgcccagagccagcccgacgcgtgggtcgacatatcccgggaattccggaccgtacagcctgcttgttgaacaactgttctatagttcactaatt

SEQ ID NO: 149491 - DNA, 2368 bp, Homo Sapiens
  misc_feature (2352)..(2352): n is a, c, g, or t
ggcacccacgtcaccacctgcaccaggcaaccccaattctctgtgtttgggctcctaatcacccacccccatatggctctgtggcccttcccccttggcctataattagcaggtgcccaacgccccccaggtatggggcagcccgcgggccctcccgggtgtggagaagacaagagccaaccagggagctgagggcgcccccgccggaggctgctgttggggggcagggcgtcctgcccgtctccccgccggggcagtgacgccttccctcgcctctgctggctggaagggactaggtggccggctctgccctgcgtcccaacggcggggtctcttctgtccccggctgcccgacggatcccacgtgcaggcagcggcccggacccgggtggcagtgccgggcgctgacggcgctgggtggggccgtgggtccattctgtgtggacaggggcaagggctcacggcccagccacctcaccccagtcctgacgtgttctgaagcagaaggaggtgctaccccagggcccggggggtggggaagggttcaggaagcctgccagaggcgggcccagcggcagcgctaaagttcagtttgggccgcatacgccgcccgcggccaggagtcagcaggtcatcacgtttcagtgtgacaggggctccgagtgtagcccgggggccgggcacgtggggtggggcggccagggaaggggttcacgtccccaatgccgatgagtccaaactccggtgaccgacaaagccacctgtgctggggcctcagtctcctccggatccccgctgaggtccacatgcctggagatgaggggcagctccttgggcagggcgaagtccacggccagccttggactggcgtctggctccggagcagtgacagctggctggtatgaggctgggtcggccagggctgggggccgatgggacaggggtacagcgggggactcatccagctgctggaaggaacacggccctggctccgaggacgggagtccatcagaggccactccgggctcatcgagaccaccggccgtgccatccacgctccagtggatctgtgcgcatcccagtcagggtttcttgcctccgggcgcggacggccggggccatcggggtcgctgccatccaggtcctggtctgcgtcccgtggttccggacggggacgtacttcctccggcccagccgcgtctgctgggcgaagtagtcgtagcgctccgacttcttccacaggtagtagtactcgacacactcgcccactgaccgtgtgcgcaccttgttggcctggatcaggtgaaagttctttccatgcacacggaagccgtgctcaaagttcctgcactcctcttcactccaagcacagagcccatctcggatcaccttcacgttgaaccgcagccttcgcagggcctcctccacattgaagttgcatttcaccaactcgtacagcgcctgctcactgtctttcacggcttctccctctgggagctgaggcccggccatctcgtgccaacgccgcttcaccgccctgtacaggaactcctccacctccctctcagggaggacgctggggtcccagagcagctggtcttcgttctcgtagatcttctcacagtgccggttcaagtgcaggttgctgaggtcagcttggaactgaggtcccaccatgatctccttcttacatttgttggcaggaagagagtcctcctcggtgtcggaggaggcagaagagccaggctctctgtcttcatcagccaggaaacgagatccactccggttagggaagaggtcggaggcctcgtgggaggtcacggacggggtgaggtcgtcagcagatgattgcgtctcttgcctcttcttccccgtgaaagcaaatccttcgctatttgttctttgtccagggtcatgtctgggaggttcggggccacgtcaccaccctcactctcccggtctgaaatggggtctgacgcctcgtagccatagagcgcaagcagctcatcaaagggcatgtcgttgctctgggagatgaagtccttctccagctcctccttgggcttgtctgggcacctcgaggcctcctcgcactcccccctaacactgtagttctgtgacaggatctctgcgaggttgaactgatggtctccagagcccatggacaccactgctgttgtctgcaagcccggctcccctgggcacaggctgtgctcgaggcaggagaccacgcgaggactctgcctccccagcgaggaggcctccgccacggacgcgtgggtcgacgatatccggggaattccggaccggtaccagcttgtttgtggcgaaccccggcgggtgacgtaaganaccggcacgcgcccat

SEQ ID NO: 149492 - DNA, 909 bp, Homo Sapiens
  misc_feature (70)..(70): n is a, c, g, or t
  misc_feature (520)..(566): n is a, c, g, or t
  misc_feature (573)..(574): n is a, c, g, or t
cctggggtctcaaccccaaattccactgagggcagcctccctgacgtgtgtgactagccagtaagggtgncggttgatggcggcccgggaaaccgagttcgaggtttcacatggccaagtctggcttctgattctgctgccctgcaaagaaattgtgctccagataactgcaccggtgtctctaatgcctctgattcactctcaggcccctcaaaggcctgcagtgatatcactaaaaggtgaacacacctccattagcacctaacttccaccaggaagcggctgaggcactggggaagcctacgagctctctccacgtcaggtgcaacaacgccgaggaagttgctgagagtcagagttattgtaggcttttgatttttaaaaatcaaaattgatctgcattacatctcaatagactcagataattctcaccaaaatttttgtaatgtgtttaagtagcactggaataattcaacttcatttaaatatattcattctatcatgaaaatatttcatacannnnnnnnnnnnnnnnnnnnnnnnnnnnnnnnnnnnnnnnnnnnnnncccactnnctgtggttgtatggcttgaaatagtttcattgctttgaatatgtacgcacacatttggcaaaagaaaactattacaatttagtatttttaaaattaaaaaaagtgacaacgagtttccaaattcctgaagggaaagataaaagaaaaacaataataatctatcaaggtaccccaagtagatgtaaatttgatatactttgtgaacctttgatctgtggcaaataaacattacaactgtcagtcttgcaacatagttttgcttgtttttctaaaacaaaagatatctggattctaagtcactactctcggacgcgtgggtcgacgatatcccggga

SEQ ID NO: 149493 - DNA, 958 bp, Homo Sapiens
ggccttttctttgggaaataggaagggccaaccctcccctattctgcccccccagggtcatagagggcgacacggtaggcgtcattctgaccctgaaagcaaaggccttctccccttggggtagtcccggccccctgttgatgtccagattcatgtgtttcaaaggccctgcacgccctggccggagcgcatgtccccccaccatggctttcttgtcccatcccccagacacgaaggtgtttccagtttctgagggggccaggtccaagcagaggacgtcagccccatgtccgtggaagctctgcagcagctgcccgctctccacgtcccacagggcacatgtgccatcgccgctcgctgtcaggatctgcatgtcagagttggtgaagctgcaggccgacaggtagttggtgtgcatagcaacagacttctttttggcagccatgttttcatttttgtcaaacgtcaaggggtacacagaacacttattatccaaaccaccacaagcaatggcacatcccgatggggcataagcacatgccatcacccacgtgcagggcatggtgaccgcgtgctccttgtttgtggtgaaggaatcccacacgatcaccttcccatcctgtgacgagctcacgatcctcctcttatctttgcaccagtccatgcacaggactttgttcccgtggcctttgagggtccttctggtcttcatgacaaactgccccagggcctccacccgctccgccacctggtgcagctccacatcgtgcagcttggctcgctcctcctccagcttgcccttgaggctctcggcctcgctcttcagcgacgccagcgtctcgttctcgtgcagcccctcggttgccatcttcgcgcggggacgcagcggagagggaagcggagagcgggaatgcgctgagccgcggcgggcgccgctccagcagccgtccccggcccc

SEQ ID NO: 149494 - DNA, 1023 bp, Homo Sapiens
ggaggagcgacgcacaatgtgccccgaagaaaagcatgacacggggagtccatctccgggataccatgccctctcaaagaatttagccccactctggggtatgtccccgtccgggccggaagccgcccactgcgcgaaacttgtaagagtctacccggttttcaagcccaaacaggattgaagaccggaccctgctgagacaatcccagaccgttgataagcttaatcattgtatccagcaaacagcaggcgaccactgagggagaaggtccacgctggatgctccaaatatgatgctttctttgggaatagatggcaacctccctatctgccccgcaggtcattagaggcgacacgtagcgtcatctgaccctgaagcaaagtcatctccactggggtagtaccggacactgttgatgtcagattcatgtgtttcaaaggcctgcacgcactggccggagcgcatgtcccacaccatggctttcttgtcacatcccccagacacgaaggtgtttccagtttctgagggggccaggtccaagcagaggacgtcagccccatgtccgtggaagctctgcagcagctgcccgctctccacgtcccacagggcacatgtgccatcgccgctcgctgtcaggatctgcatgtcagagttggtgaagctgcaggccgacaggtagttggtgtgcatagcaacagacttctttttggcagccatgttttcatttttgtcaaacgtcaaggggtacacagaacacttattatccaaccaccacaagcaatggcacatcccgatggggcataagcacatgccatcacccacgtgcagggcatggtgaccgcgtgctccttgtttgtggtgaaggaatcccacacgatcaccttcccatcctgtgacgagctcacgatcctcctcttatctttgcaccctcgtgccgaattcgccacccaggcctcgctacctttaggaccgttatagttactgccgttcgttttacaaacctgctttttgacaactactgt

SEQ ID NO: 149495 - DNA, 1124 bp, Homo Sapiens
ctggagatggggcgcgataagtgggggggcgttgtaagtagcgcgctcgggattaaatggggcggggggttaaagagacagagtttgtaagagggtgcgttcgaagtagatatttaatgctccacctcgataacgctttgaggattaagtaatggagggggcgtgcgaatgtggtcggggatagcgtgatgggggatagggctgactatagccaaaaccattgggaattgttagggaaatattgggggaaagattgtcccatgggattgattcggaagggaagtgttgtttcagagttcccatgcaagtgcggtttccacattttttcccctccagggaatggttaattcttatcccggtggttttcgtacgtaagcacagactttttacacaggcattaggtatattgaatcaaaacattgttttcatcttgtgggcttaaaatctgttttgttctgttctgcagccaaaatatgcttcatctgtccaatcatacaatttaatggtcctatcaatgccagtatccaatttcatctccatttgttcaattatttcttttttcttctgaaggcattcagataacttaggagaagagcttattagtggcataaggtgatcattaaactgtttgtcaaaaagatgaaaaatagtattggcctgttgcacaacgtccaaaaaataaagatttgcattcctagaatctgaagagggaattccagcaagtcctgtttccaaagcataatcaatatgctcaatacataaaaattccacaagaatggtaaaaattctgaaggcattccttggtaagtcagaaggatcagagagcctatgacatctttcaaaggcttgtttggtttcttgtaaaagattaaccaccacttcttgggatagaaaagtctccccatgagtatcgatacttggcccaagtggtaagttggtacgctgtctaattctttccttcaaatcttgaatacctcctgtgccaatggatctcttttgatggtttttcgaatcataatagcgctgtaggatcatagcacttctgcttttcaaatatccagtctccacctcaatatagtcggacgcgtgggtcgacgatatccggagaattccggaccggtacc

SEQ ID NO: 149496 - DNA, 984 bp, Homo Sapiens
gtcctagaccccataaaatcttcaccactgtacctgaaccccactggggttactaaccactggccagtaaagacccctcctcccactctagcccctgggtacctggtacgaggtgacaggcttatggaagctcttgagggcattgatggccttggcatagcccagggccctccacttgtctccctgaacactgtaggctttggccagaacttccagcttctctgtgatatggaggttgtgattggtcgccttctggcttgagggctgtgcacagacccacttatccaggacagcaggggctgggctaggctcacaatctccctcaagggaggtggggtagtggccactgatgagggcttccagatcagctgcactaacctgggtttcttccccatcactggcttcatcatcagagatgggctgggcttgggtgtttggtgcctctgtttgcctttatgcgaggaggacgacacagtgcctgtgtagggagcgagcgaggacggagaaagggcttgtctgaagcaggagcactcatgaggatgtccaggacggatatagaacgcaatcctgctactgacccttgctgggctagtggatggttccaagtaccatactggggatgaagatgctgaagtccagactacagtccaccagcctcctacttcctgaaaggcagcaaggctcagaccaggctgagcttacaccaagcatgagcaacccgggggcagcatggggatagtctgagaaggacggagggctcgcctcatagtccatgccttcatccaccacaatgtgagtgacacctgggccctgggacagggcatagctggccgccatgctgaacaatctgcttctcacagagttctgcccgggctcgtccaatgccagtgcgcacaacatgggcccgaagggagctcagccactcttctgcttcttctcccggacgcggggtcgacgatatcccgggaattccggaccggtcca

SEQ ID NO: 149497 - DNA, 922 bp, Homo Sapiens
gtggaccacatcggggcagtttggtcccagctccccagatgttggagaagagctccaagacagcacgctctcactgatatggtccagcttccgcaaatgccccgctctccaggatctctatgattttctcagccatccgcttcccagtccctgggattgtgcaggcctccgtgggtttcttccccatcactggcttcgatcatcaggagatggggctgggcttgggtgtttggtgcctcttttgccttttggggaggagacacaggcctggtgggaggaggaggaggagaaagggctgtctgaagcagggcctcatgggtgccaggaggaatagaagcatcctgctctgccttgctgggctgtggatggtccaagtacctactggggatgaagatgctgaatccagctacatccaccagcctcctctcctgaaggcacaagctcagccaggctgacttcaccagctgagcacccgggggcagctggggtagtctgagaaggcggagggctcgctcatagtccatgccttcatccaccacaatgtgagtgacacctgggccctgggcagggcatagctggccgccatgctgaacaatctgcttctcaaagagttctgcccgggctcgtccaatgccagtgcgcacaacatgggcccgaagggagctcagccactcttctgcttcttctccctcttccctcctaggaatctttgcaagtacttttgatgatgcatcagcatgaattttctgccgcttgggaaatgccttcaagatacccctgggatccattgaagtatggctggatcccggcctattggagcgttggtcagggctgcagcagagcccgacgcgtgggtcgacgatatcccgggataccgaccgtaccagcctgcttttttaacactgttatagtgtccatgcgg

SEQ ID NO: 149498 - DNA, 897 bp, Homo Sapiens
  misc_feature (189)..(189): n is a, c, g, or t
agtcctccccaccgttgaagtccttgcagcttgaaagtcgtttgggagccttgggcggaccacagcccgcatggtgtgagcggtgttgttctggtagccgggcactggggtgtcgtagggcatggccagcaccacctgtgtgtccagccacttcacgccgtcgggggtgtgctccaccgcgtccgtagnaagtgcacgggaagcatatactcaggccgcgctttctcccaggggttgccgtagcgcagccagtcatcggcctcctctacctgccagccattgacaatcttctggttaaaaatcccaaattcatagcggattccatagccgtatgctgccaggcccaaggtagccattgagtcaaggaaacacgctgccagcctccccaggcctccattcccaaggccagcatcttcttctatctcctcgagttcctccaagtctaaccccaactgatagatggcttcatcgcaggcattctgaaggcccaggttcaccatcgtgttctgcagcgtgcgacccatgtagaattccagggaaagataataaatgcgcttggggtcgcgctcgtagtagtgctgctgcgtgcggatccagcggcccacgaggtggtcgcgcaccgtgtgcgccagcgcgaagaagtagtcgcggggcgtggccacattgcggtccttgaccagcgtgaagtgcaagtgccggttgaagctcttccgcacctcggccacgtcgcctagccccgccaggccgcgcacgctgatctgcttccgcttctcgctgtccgtcagcggcttcgccatcgcgccggcggaggcggaggaaaagagatggaggaggaaagcggcggcacacgcgcggacgcgtgggtcgacgatatcccgggaattccggaccggtcca

SEQ ID NO: 149499 - DNA, 1158 bp, Homo Sapiens
  misc_feature (230)..(239): n is a, c, g, or t
  misc_feature (482)..(482): n is a, c, g, or t
cgcactgcactaaggcttttacacccattctcccaatttgtaaaagttccccttttgttccccaaaatccccaaaaggggcccccctttttgtttggaaaagttaagaatacgttacttacgttgcagttctaacaacgttattgggaaaatggctttaaaaaacccttttgggaaaaaggggggcccctttccaaccctttgggaaagggggggccctttcccaccctnnnnnnnnnnaaaagggtttttccccaaaaaatttttggcccctgtgcccgatagtctacaataactaagtgatgaagaccccaaaggaaaaccctttgggaaaaaacccccagcgttctgtcagaactgtaagccctgttaaggctttagaggcttacttctccttggccccctttttaatttgagccttctgaaacctgctgcctgtggttcatcgatgtcctacaggggttggaagactagtttatctancaatgacaactgccttctagttataccaggctctttagctgcatggcagagtttgtcctgagaaagatccttgcccagctcagccgtggcacacacgggtccataaattaagtcctccttgaggtggaatgcatttctggcacataaacatggctgcctggtgtctcttttcaaacaaatgggactgtgctctattctcaacaagtgtcagagattcttgtttctcttcctcttgttactctttaggaacctccagcctagaatagtcaggcatggaccatccaaacacaaattgctaagatgctttctggcagcctcagaaaccaggaccatacgcctggctaagtgatgagggggtcacacagccttggctcttttcactgtacccgaaaagaaaggaagctttagtaatgaaaggattgctgccaaaatcctgtttcccccttgcagatcttacagaaaacagccacagaatcccaaggcatcagcaccaagagagcctgtagaaactatctggtctaagctcctgaagcccagagataagaatgacttaacccaagctgcacagcctcttaacagtccactgttaaccccagaaacagatgcattgaattgaaaggagacaggaatcctaatcctcctcgtccgaatcggcggccgtgattcatctcttccc

SEQ ID NO: 149500 - DNA, 1486 bp, Homo Sapiens
  misc_feature (238)..(238): n is a, c, g, or t
  misc_feature (243)..(243): n is a, c, g, or t
  misc_feature (298)..(298): n is a, c, g, or t
taaaccctccttcccgccatgtttgagggaggcctgggtgaacaggcccccagtgccctggagtcccacaacacggccccagggccaccagaagccaaggccaagcccccctgggtggggaggcccaaagtctcttccccactttctgggtggtgagcccatcactgagcccgtggcttcgcatccaccactacacccaggagagggtgatgacaggagggggtctgcttcatcatcncgctnccctgtgggacctgtgtcttcagtgaattaatgagtttggggccccacatccccntcagctctctttggaggctctgggcaccctgacccttggcctggcaggtgcacccactgccataggcatgcgcatagccggtagtcttctcagtaggcagggcaggcaggcacggcgattcttcacaatgggcaggcgccacagggcctcagatgtcggcgcccagctctgcgcactgcttgtctgagatgtgggaggccagggagtctatgatgtccagcagcagctgctggctcagcgaccgcagggtgggcaacttggagaccttggtgaactggtgcacaatgatgtgcaggcagtgccgcttcatgtccagtgcctgcgttttgtcagctgcctccaggatctgcaatggcagggaccttgaggcgctgcccctttcacccactcagtgggagctgcagccatgtgcacggggctggggggctacctgcagcacgttctgcaccgtcacgttcatctccaggttctgcttgcagtacgccctgcagcccggttgttgtagaaggcccgtagtagtagggggccgcaaacaagtagagcgagtcctcgggcggcatgttgacctcgccgtagtagatgtagcgcagcatggactcgaaggcctgcctgctgggcaccatctccccgatggagatgttcacctgcccatcttcgggcatgaaggaccggaacatggcttcaaagtagctggagcgggcggccaggatagccttgtgggctggccgtgggtgcccgtcaagcaacagagtgatgtcacagaattccgcgcccgctccctccaggtatgccttcatgtcctggatcagagatgtgccaatgtccactggctggtccaagggagtgcgagggggcggctgctgcttccgccgcacaatctccactatcagtggtgtggagaggcgctcgaactccttcatcatgatcacctggttgaagtgggactcctttaccacgaagttcaggcagtgctccttgagttggctcagctgcagccgggcggcactctcgcacacaaccagcacgttctgcaggtccacggaggcctcgatgtactggcggcacagctgctccagacggcacaactggaagctcagtgccagtttgtacacatccatgatgagcagcacatcctccacatgcctttccgtgggcggacgcgtgggtcgacgatatcccgggaattcc

SEQ ID NO: 149501 - DNA, 1010 bp, Homo Sapiens
  misc_feature (985)..(985): n is a, c, g, or t
tgaactccaccttccccgtcactctggcgagcgggcaggagtccttcctgggccagctaccgctctattcgtcgggctatgcggacccgctgagacattaccccgcgccctacgggccagggccgggccaggacaagggctttgccacttcctcctattacccgccggcgggcggtggctacggccgagcggcgccctgcgactacgggccggcgccggccttctaccgcgagaaagagtcggcctgcgcactctccggcgccgacgagcagcccccgttccaccccgagccgcggaagtcggactgcgcgcaggacaagagcgtgttcggcgagacagaagagcagaagtgctccactccggtctacccgtggatgcagcggatgaattcgtgcaacagttcctcctttgggcccagcggccggcgaggccgccagacatacacacgttaccagacgctggagctggagaaggagtttcactacaatcgctacctgacgcggcggcggcgcatcgagatcgcgcacgccctgtgcctgacggagaggcagatcaagatatggttccagaaccgacgcatgaagtggaaaaaggagagcaaactgctcagcgcgtctcagctcagtgccgaggaggaggaagaaaaacaggccgagtgaaggtgctggaaagggagggaggacgcgaggggaaaggcctgtggggagccgagggcgtcagagagacccgggaaggaaggctctcgggtgggggagccaggagacctgctctccggcgcagacaggcggggcccagcgctctcctggacgcccccgcccgcacagctcccggcgggtgctctgaggcctcactactcgagcccacccagcatcccgcgcgcccttccttcccgaggaactcgcctcagcctgatcaggcttcctggtgagaactgaggagcggactcacttgatgtttcctggaagcagagcaaaatgctcttgtncctgtcgcgtctcattttgtccatg

SEQ ID NO: 149502 - DNA, 923 bp, Homo Sapiens
  misc_feature (214)..(214): n is a, c, g, or t
taccccatagtcgcggcggtgatagggcttcttgccagcgtgcctccccattggctgagtgagatgagggtccatgccaaagacttcgaacaagtgagcgtattcagtggacttctctccaagaccggctctttccatcgtcacaccactgggcgtttccttcccaaaaatatcttccataagaagtgaccacttggttttagatggagtctcncaatctgcacaagcgccctggtgagcgcccctctcctctgtcctcggctcctcctcctgctccaagtgtgagatgaggctgggtttgccgacctgataccccagtgaagtgaggttgctgtagttctccagcattacatctttgtacagttttctctgagaagaatccagcaagggccactccttctcggtaaagtccacagcgacatcttggaaagtcaccgattcctgggaaccaacactgggtgtgtgaggctccagaccactgcacacgaacaggtccaaattctggggacaggaatggtcttttgaagaaacaggaaattctgagtcctggagacaggtggaatcctgggtggacgtggcaaatgtgggggacagagctgccatcctcagagaatggcagtcagtttgcctgagcagggcaccaggacaaccagaaagctactctcttgctctcacgtgactctccaagctggcatacgactgggaataggatcgggggagcggaggtgacggaagccgccgccgatgcgaagagaagttcatacgggaggtccagtctggcgtggggacacgaggggtccccaacaggccgaaagaattcgccgctgacccctccttggcccatgtgtctcggggcaatcgactccagagagtaatggcggacgcgtgggtcgacgatatcccgggaattccggaccggtacc

SEQ ID NO: 149503 - DNA, 1261 bp, Homo Sapiens
  misc_feature (189)..(189): n is a, c, g, or t
gcaaaggccagggagttttggtaggccttcaaggatgtggaatgtattgcagaaaggctgtaagtgtctgggaaatttaatgttttccaacacatgctcaggtgccattgagttccaaggagaaagcatgattaaaaattcgatggtagggaagttgctgaaaattcactctgacgaacatcatgatcntgaaggagaactcccactactataccaaggaccttgttcagcagattaatctttgtgacagtgttggtggcctcccctgagtgtttcacgagcagtgcaatgagtcgaacaaaggcatccaggttgtgatagcacttggctcggatcatggtgggattggcagcaggattgtgctgctgctcagcctgagcacggtaactgatttcaacacacatttcagtacacagacgaaagaaccttgttatgagatcatcggtcttccagtattccttgctggtggcttctgtccaacaaatgcagagaaagcttttggtactgtcgcggccagctgttgctgaatggtagagattcacccattccttcagaagatactctgccttctctcctcagggcctggagggtcatcatactctgaggcttgagagatcccagaatgcatcataaagtttgggcctccatgagcacgatcaatcattgcttcatagttggatcgcactacttccatcagctggggcaatccttctggagcattgcctctggaatgagcattaatcctcatgagggtttcaatggtgtggaacagatctgcctcagtaacatgagcaacactcctttcatccaccagcaggatttttactaactgcatagcaaatgccacagccatgtagtttaagccattctccattgactgcgctaggtgaagatcatactgctgcatattaaccaaatgattgcgaattagcagctccacagcctccacattatatttatattcatctcgacattcaattaggcaccttgtgatctgtttgttgcaccatggagacccatatgcccggccatcctgcagagcttttaggaccaagaggtggcattccctgtagcgcagcagaaggtcagcatcagcaccacttgtggcatctagtaagccctctacagccttttggagcaatccaagagcagctatggcatcccgagagtttcgagataaaactacaacctccaagagacttcgaagagcctgagccggacgcgtgggtcgacgatatcccgggaattccggaccggtcca

SEQ ID NO: 149504 - DNA, 923 bp, Homo Sapiens
tcggggggcgggggaaccccaacgggaccccccttgaaggggcctcctgccgccaagaacaagctgccagagcgggagcaagcaacagttggacaggctccgcaggcgcctagcccagcttggccctgccagcaggtcacggacatcctgatataggtggcttcattgtagcgcctcaggttggctccagcagagtgtggatggcccacctcgggcatcgccgaagcccctgggctgtgccccgcttggcccgaaccgtatagcggtgaaaagttttgtgtgtcaccacttctcttccttgaaatatagcaccagcaaagtgcccagctgcagccatgagcaccacgcagtctctgggacctctactttgcaggttctgtagcagcagttctgcctcttctgggggatcctgatgagggcctaggacacagcggtaggcataaagaaactggccctgggcattctggttaaagcactcgatgagggttatagcctgggggtcggctcaacttctcaaatgtagccctctcccgatccacgtgtctgcaagtcctcctcactggctgagtctgagtcttctgatcccgagatgctggaaagatctcctgtggagctctgcttttcaaagtccagggcagacaggagaggcttgtccttgagacgttgctttaggttaaaccgatgccagtcaagcttataatgttccctcaggctcaggccctgaaagaccggagcatccgcgctgaggtcaaacagggagatcgacgcaggagccggggctgcatctggagccggcgacatggctgagcagaaattatttagcagcagctccacacgtcccgggagctgagcggctcgcaagtcctcaggtcgatcctcgtgccgaattacccacgcaggcctctacctagctacgttccccc

SEQ ID NO: 149505 - DNA, 1210 bp, Homo Sapiens
  misc_feature (14)..(14): n is a, c, g, or t
  misc_feature (26)..(26): n is a, c, g, or t
  misc_feature (67)..(67): n is a, c, g, or t
  misc_feature (314)..(314): n is a, c, g, or t
ctgatatctccctncctttaggcctngaaagggttccctgccttaatgtagaaagattttggggggncagtgcaggaggggcaggaaagctcaagtggtgcactctcacccttctgaagctttcggggagtagcagtcatgggcagtgggtggggtccatgaggacggggaaaaaacccttgatactctctggggctgaggagtctgagagagtgtggctgacccctggtcctcatcatcatcatcttcctcctcctcctcttcttcttccacctgaatttgcagcacttctcccagttcacttccctcccctncccacagggctctcagtggaagcagggctttcagtagaagcagaggactgtactggggtctggaaaggcgaagagcgaatgcaccagcctcctgtagaggatgtagtggaaagaagggcatggtaggagtttcctccacgggctgaaattccaccacctgaagtttctaattctctaagaatttctgagcactgatctactacctgccacatttgaaggccactggccacaaggagatgagcaggaagagcatccagtggcaggcggagacgccctgaataaatgagctggagcagcccctcgaaggcatcggcttcaatgacactcggtagagtgagacgaggcgcatcccccagaagcagcttgtcatggaagtaaggagaggcagcagctaacactgctttatgagccctaagttcccggccctgcaccaggagggacacatcacagaactttccctctagcctgtggcggttcagagattccagcagcgacgagctatgctgtgggaactcgatctggattgtccgtggggctgggttgcaggtcggggaggcgggtacaggcggcaaaggtgttggggtttccatggcctcctcgaaggtgacaagaattgggaagaggagaagggcttgggggtagactccacgcgggatgaaggctgcccagaacagctcctgccccgccgctccgttccgcctcacagtgcccacagaggtctgctcccgggaagccgcggtcacccggacaccgcgagtcccggcccgattgtccttcccgccgacacgcccccgccgttacacacgcggcgctgccctcgcagttacagtgccgctacagctccgtcccacctcgtgccgaattcggcgcgccgtcgacttcatactctctccccc

SEQ ID NO: 149506 - DNA, 1243 bp, Homo Sapiens
  misc_feature (41)..(41): n is a, c, g, or t
aaggacgcgaggcctgggtggcgaattcggcacgaggctantcatcttggagatgaaagtgtcagccgagataaaaaatgacctttttagcaaaagcacagtgggcctccagtgcctgaggagcgactcgaaggaagggccatatgtctccgtcccgctcaactgcagctgtggggacacggtccaggcacagctgcacaacctggagccctgtatgtacgtggctgtcgtggcccatggcccaagcatcctctacccttccaccgtgtgggacttcatcaataaaaaagtcacagtgggtctctacggccctaaacacatccacccatccttcaagacggtagtgaccatttttgggcatgactgtgccccaaagacgctcctggtcagcgaggtcacacgccaggcacccaaccctgccccggtggccctgcagctgtgggggaagcaccagttcgttttgtccaggccccaggatctcaaggtctgtatgttttccaatatgacgaattacgaggtcaaagccagcgagcaggccaaagtggtgcgaggattccagctgaagctgggcaaggtgagccgcctgatcttccccatcacctcccagaaccccaacgagctctctgacttcacgctgcgggttcaggtgaaggacgaccaggaggccatcctcacccagttttgtgtccagactcctcagccaccccctaaaagtgccatcaagccttccgggcaaaggaggtttcttcagaagaacgaagtcggggaaaaatcatcctgtccccgtttgccaccactacaaagtacccggactttccaggaaccgcccggttgtccaccttacattttgggtaagttggctccaagactgggggtggcgcgcagaaacaagaaccacctatcctgcctggagggacaaaaaagggggaacgggggaatcccccctgtctcaaacgaaggagccgggctcaaggcctcccgggcgcccgccttggggaaccccagggagagggttaccttccggcttacttacccagggtcagggcgggggcccttctggcgccccccccagagaaagcgtgcttgggttgactctcgacaacgggttccgtgaccaagagacttgggtcataagggtccccctaaagttgaacccacccactgtagcgcctgtttgtaatacatagatcttatagcgcgctcgtagtaagataggctgcgccgtggagtcgacctaggagcc

SEQ ID NO: 149507 - DNA, 1379 bp, Homo Sapiens
ctcacacaacacctcaaagtctgaatcttcacactgactatattaaaactgcaagcccacagaattatcaaggaaccagaatgagataatcagttaggagttcccacagttaatctcaatccgtctttccccagttcggataagctctaatataccctgatgtggatgtagaaagctacactggagcaaccgggtcttctgctgaatttgtcatcaaataccaaggggaaacaaggtgggtggattttattctcaaaaagcctcagaagttactctattataaagggacatggctgaataggtaagaaacggattctccattgtgagttctcctgatggcttctgcaaggatcatagagatgtcaatcacctgtattttggagcaatgcttcatcttgtcctcctgaggtatggtattggtgactactactgcctcaaagcatgcgttgttgatgcgagaaatagcagggccgggagaagattccatgagtcaagatggcataaactctggtgggcgccagctgagagaagtttgtcagctgcatggcagattgtgccacaagtgtcaggcatgtcatccacaaggatggccacccgatccttcacatctcccacaagcaccatgcggtccacttcattggccttcttccgttctttgtgaatcaaggcaaagtccacattcagcctgtctgcaatggaggtcactctcttagctccaccagcatcaggtgagacaatagtgcagttcctccactcagagatattctcccttatccactttaggacagccggctctgcatacaaattgtctactgggatatcaaaaaagccctgaatttgagaagcatgtaggtccatggtgataatatgatctgcacctgctacagatagcatatttgcaacaagcttggctgagattggcgcccggctcttatctttcttatcctgccgggcataagggaagcatgggatgactgcagtaacccggctggctgaagcaatcttgcaggcattaatcatgatcaaaagctccattaaattgtcattgatttcgccacaaccactctgaacaatgtagacatcctctccacgtacactttcaccaatttccacacaggtctcctggttgctgaatttcttagtcaccaccttgcctagctccaggcccaggcggtcagcaattttctgagataagtcctggtgggagctgccgctgaagattttgatattcggcatcctggccaactaccctaagcactccactaagcgatcacggctgctgcagagaccggaaccgaagtcggccacagactcaataccaagcgctttgcgttgctactccgcctcgtgccgaattcccacccagcctcgtacctagc

SEQ ID NO: 149508 - DNA, 1245 bp, Homo Sapiens
gtgttttttgcctttttgttcttctttcgttgttgtgctcgcttggtgccgttgtgtcgtcgaggtttgtgttgcgcttttgccttctccgcgttttggtgttcgtgttcgtgtgtctgggttggggcatgggtcctgcagcctgtgttggcttcaccttagcggtcgcttctctctgccttgttggaggtcctgtgctgcgcctcttttggtggcccaccccaggcctcccgtccttgctagccacctccctttgggcttcaacccattccttccggcaggagactgaggcacaccgagagggaggaatggagaggagacgagggagggcaggtggcagcacaaatgaagcagaggtgagaggcggggcaagccactccacccccacacccaccccagagaggggcgaggaagccacaccatcacgcagcatgtcggggggacaaggcggggtttaaggctgaggggcccggggcaggcggggcctcgggcctcagtcaaagccgtgccagtcgctgtgctctgagtcgtattccagctcggcgcccacacacttgacaccatccagcagcatgggcgtgccgtggtgccggtccatgacgcgggcctgcaccgtcacgcgcacacaggtgccagtgccaccttcgcaggctagcagtatctcctctttgaggacgccctctttgtgcgccgagtactcacacttgacactataaccttcagggacgggcaccacgctgaggagcttgaggtgcaggctggggacaggtgcctcgcggacatccttgctcagcctgtgcactgggggcagagtgaaggtaatctcatacctgtgcaggatcttcaggaagccaaccttgaccagaaagctgctgtcactctcctgggtgaccatgaccaccgagtcatgcagcttctcatcaaagtggacgtggctgtgggatccttctgcatcgtggcctgccgcaaagcggatactccggactctgggcttgttgcccttgttggctgcagccatggacgccctccctgccacgcagctcctgccagacaccgccactcacgctcagcagcctcccatgctccagggacaccagcgggagccttgcggggtgcaccccggggccggggagggcagggacgaccactgcagcggcggcggctgcaggagctcaacgccgagcacgaggaagggagccccgcgccgccctcgtgccggattcgccacccaggcctcgctacctt

SEQ ID NO: 149509 - DNA, 1056 bp, Homo Sapiens
  misc_feature (1044)..(1044): n is a, c, g, or t
ggtttgtagtgggggccagtgtttgtgttccccacccagttaaggccttggggcccttttagggtattggaaagggattcatattttttctaaagggggggttggggaagcccccaggggaccctttccaggggaaatttttggctttttccaggcagcgccaagggttttcaatgaaggtggttgcaaggattgtcccggggccttggttttggctgaatccccttcagggcatcatgttccagaatattcatgcatcacaggtgcccggcagctcaaggtcaaaaatgtgactcccttcgctggttggttactgtctttgccaccccccctttgagtgtcgaccttcaaactgccgggccaggaggttgccaagccatcgctctaataaaggggtaatgccacgcatgaaaaacagccagattcgccaaccggcagcccagaagccacagccaggacccttccctacagggcccgtgttgaaacgataatagatgagatgcttcaggtccttgcacatgcgaatctgtcgcatcagcttgtatttgtatcgatacatgcccgtcaactgcccaacatgggcaaatatatactgcaatccatctgccagctggaaggcatccacattgcccagccgatactgcacgtgactatccaccaccagcttagtcaaacgcagaacttcccgacacaggtggaaagcattcccaaaacgagatttctttctttccttggtggtgagcgttttcacaggcttgaggttgaagttgtagtccaggtgcaggtagttgaggtttttgcggtgaatgagaaggttgagcatgttgtagccctggcggcaaacctggagcccaacctccacccagtccagctttgtggactgaaagaatttggtggctttgaaggagcggaacaaatacctcttcttttgagcgttagggggcggatgattcagggcattcagcactcggaagcgtgggtagacgatatccggataattccgcaccggtcctagctttcttttgtgtccgctttttttctttnatgtgttggggg

SEQ ID NO: 149510 - DNA, 1327 bp, Homo Sapiens
  misc_feature (496)..(496): n is a, c, g, or t
  misc_feature (516)..(516): n is a, c, g, or t
  misc_feature (942)..(950): n is a, c, g, or t
  misc_feature (1256)..(1259): n is a, c, g, or t
  misc_feature (1261)..(1262): n is a, c, g, or t
tccagcacgagggccactcagaggccagctctgggaccctggcttcagccgaggaccaggctgccagctcggacctgctgcatggggcacctggctttgtgtgtgagctcgggggtgagggtgagctaggcctgggtggaccagcattcccacctgtgccccctgcactgcccaacgcggccgtgtccatcctggaggagccacagaaccgaacctcggcctacagcctggagcacgcagacctgggtgctggctactaccgcaaatacttctatggcaaagaacatcagaacttcttcgggatggacgagtcgctgggcccggtggcagtgagcctgcggcgggaggagaaggagggcagcggagggggcaccctgcacagctaccgcgtcatcgtgcggaccacgcagctccggacactccgtggcacccatctcggaggacgcgcttgccgccggggcccccacggggtctgtcccccaggaaacttctggancacttggcgccgcacctganccccagctgcctgcgcctgggctcagcttcacccaaggtaccacggacgctgctcacactggatgacccagtgctgagcttccaacgcaacgtgggcatcctgtactgcccggcaggcctgggctccatatgaagagatgtccaaccaccaccaacgccgggacccggccttccttcctctttctcaccccttacttggccaatgttcccgctgctctcaaccggcttttcatcagttttcctcttcccccccctacacctccacaaacctgattctcccttcgcctccccagttccccttctacgccccttattattccgcgaacccccccaacattcctcgattccactttttgtcccccccacatactcgccttttcttccctcccttctttctcctattctaatcaacccttcccttcccgnnnnnnnnncacacacttttcgctcctaatccaaacttttcttgtaccccctcctcttctctccatcggcttatccctacctttctccctctactccccctattcgtctttgtgtaccgatcccttttatcttctttttccctctttccctcattatccgacctcgccttttttcttccccctcttctttcgcctcccgcttcctctgtcacatctgacatcttgcttgttactcatttctcaatcatctacattgcttgcctttgcgcccactttcccgattgatgtctccgattacacttatattagtacttnnnncnncctctggtctgcccccgtttctctggtgttgtcccccctttctcccttcctgtcctctttccttg

SEQ ID NO: 149511 - DNA, 1440 bp, Homo Sapiens
ttctccttcccagggcggacccgaattcccccaggccacccccttgggatggttgcttggcccccataccaaaccagcttctccctttgttgggtcaggggcagcaaaaggtggctaagtcccacatcggatgcggggaaaccttggattttggggttgaactccgttcaagcccaaagagagtggggtggaatcattttcaggggacgggcacttttccactaggttttggacctttccccaagaattccatagccccagacaaaaacatgtctttctccgtttaacactgcacagcccgtgccaccgcatgcagcctgtcgcaccttccccactcctgagaagtgtaagcagcggggcacattcacctgtgtggagtcagtgacagaggccagctgcaggtactccgagtttccccaaccaaaaagtcctccgtcggcggacacggccaggcagcaatcaccgtaggtggcaacttggataacgttcactcccgccaggtctccacccagcttggtgggcgagctggtgatattgtagtgacccagacctgtttgcccatcagcaccccatccacaagaatagacttctcctttatccgtcaggaacagactatgatcctgaccacaggcgacctggaccacctggccatcgaagtcctgcatcctgtggactctgtgactttcactgtaaatttcattttcgaccacctttcttccacattgcccataagaattgtttcccatgctgaagactccttccctgtcagtcaacacaagagagtgagctcggccgcaggagacctgcagcacccgtgtctcctgaggtctgtccagaggcagggagacgggtgagggctccaacacatactcgtagcccctcgttttatctttccggctcctgtgaaatccaagctgagaatctttgttgagtcccatcccccagactttcgtaacatccgcagtcttagaggacagcagtgtgaatccatagccgcaagcagcagatgaaatcttttggtccagctccaggcgatagggcacgggctggatcctgcggcgcggtcgggcgccggcgcggggcccgggcccggagctgggcaccacaaaggaaggcacgcccagcgcccccgagaagctgaagccccacacgaagacgcgatcggcgcgggcagcgcgctcgcccacgtactggaccacgggcacctccgcctcggcttctgccgcttcgcgccggctccgggagcgcctggccgccgtccagtgccctcgccccagtcccggcccgctcagccgccgccccagccgagccccagccaccaacgccaccagcgccatcctccgttccgcgcctcagcagcctctgggcgccgccatcttgcgtaccctcgtgccgaattcgcacccaggcctcgctaccttaaaccgtatagttactgca

SEQ ID NO: 149512 - DNA, 858 bp, Homo Sapiens
cccatttaaaaaaatcctttttaatcttccatttccatggttaaaaaaaccctgccgtgacatggtctataaagttaatgagggcgagttcttcaggtgtgggttgggtttatggattctcattaaatatatagtccccatccctgacttgagcttgggaagaaaaaaatatgccttcgctatatgattatcaattttgttacttaaaatttattgagtgccaacagagcactaggcacatatataacacagaattatacagtctctatgttgtagactatattatttacatagatttctcaaagataacattaaagcatgtatttacagaactttagacaaaaataacaatactgtaaatcagcaaagtttctgtctagcaaggagcaccttttcatgaatgagagggttttgcagaacttattgtgcaaaagcactttaattccattacacagcaagtccatattattatatagttctataaagctataagaagaaaaacctaagtgggaagccatgatcagtttcattaggtcaaacgcatttaggaaattctctgctgagactgaagcttaaaaggctacagtcatatttacatattatagcagaaaagctagaactacagcatgcaattcaatgaggtggaagaatggtgaatatgaaaaccatttttctaaacctgcagtttgttctcttttctattaatttaattaccactgcagtttctgattttgagaagacattatctttcaaataaacgttgttgcacaaatttactttttaaaagagatttttggataagtacggtgaatagcggacgcgtgggtcgacgatatcccggaaattccggaccggtcc

SEQ ID NO: 149513 - DNA, 1476 bp, Homo Sapiens
tgaggtggcagtttaggacttgcacgatcccgtcgagttgaagggtcattggggctctttcagtgctggctgcagtgaagacactgatgccgctactgaagctggagtcacaggaaccatctggacctccactggctgtgccctcctgctttggcagggcatcgtcaggggtgggctctgcctgcctctgcccaggtctcagctcatccagctcgtcgtcctcgggggtgaccagcttcatcaggctctggttgcacacgttggccacttctttgatgcttttcttgcggtcatcgtaggccaagcagggcaagacagcagtcaggatcccggaggagtaaggcagcatgacgcggcccgccagctggatgaactcccgcatccagcacatggctgtcagctggatgaggtcatctgttgtctggcagtggatcaccaggatgttggccatctcagcaaacttcacactggaggggttcttcttaatttcttttaagaattctccaagaacaacctcacacattttgcgaatctctttgccattgtcacccaggatctggaagagtccatccaggatctccggcaggtaatccagcaggttaatgtctggcaccgactccagaaccaggatccaggagatgatgaactgccgggcatactggttgttggagtaaatcctctctcgcaacaaggggatgaagctcaccaggtcaaacttgttgctctcagtcacaatgtcctttaaaaggcggtctaggagctcagatccgcttttcacattggggtctgggtcggctgccagcttggtcagcccgtccaagagcacgttgaagtggggcagcacagcgccccgggccaccttgacgatgttgtagagggcctcgcaggcatagtagcgcagcctgctgtctgcatcattgaagcaggtcagcactggctcgatcagctccttcaggtagagccctgagtccttgcccagtgcgatggagcaggcggccaggccgatgaggccccctttccggctgtgggggtgctgagacagggcaaactcctgggacagggtctggatcacatgcttgatttgcacggtattgttctgggccacgaactcccggaccagcttctcgatctccagcgctgccaccttccgcttttcgtacagcttgtcattgagggcgcgcacgatgttaggcgtgagcggcgcgaaatccttctcggggttcatggtggcagctgggggaacctcgcgactccttagcccgcggctgccggggccgcgccggggccaggggagtctgcggctccgctctgcccccggcgccggcgcatggaccacgccgctctaggcttgcctgccacgctccgccgcctcgccctggaacccgggcccggaccccgctccagcacacctgaccctggccgcttaacaactcccctcgtgccgaattcggcgcgccgtcgacttcatactctccc

SEQ ID NO: 149514 - DNA, 933 bp, Homo Sapiens
aatattaagggtttttggcatttaaaatcagagcaaacgcaaccaatgcaattggtacaggcaatttttcacaaaaagtttcaaaggcagaccaattggaaatgaatggctggttgggaaggaaaataaaaacaacctaccagagtcctcaaattttagaattaatcttcaaaaagatggcatgctgatcaccatcatcctttgtgaggggttagacaagattctaatacatgtatgtgtttttaatgcttataaacttttaagctctaaaattaaccacaggctagtccacctcccactgagactgcaaatgtagttgtgatgcagttccagtaagtttagctacaaaagcactaaaacaggaaaacaaacactataccacataaataattctgcgttcactatcttgcctttcttagtggcattaagaaatatgtaccatggtaagtgtgttgtgaggtgcacgaagagaaaaaagttctaaacaaaggatttgtttatagatcttcatattggcatcagtgatgtttctttaccctccctaagtgagagtctaagagctaactagtatgcttttaggtatatttcacaagttaaatagagtatttcttaaaattacataaaataagacatgcttgaagcataaatgtcaataaataatgccaacatatatacctctacaaaggttaacctgtattaatttgggcatgacccttgtagatttcaggggcagagttacatcagccatcattctttaatagtgacataacaggaagctcaccagctactttaagttttccagcaactattatataaaccttaggtatccaccataaaacagaatccatagttcaaaacaatagattatgaaaaatttaatttaaatcggacgcgtgggtcgacgatatcccgggaattccggaccggtaccag

SEQ ID NO: 149515 - DNA, 1168 bp, Homo Sapiens
  misc_feature (812)..(830): n is a, c, g, or t
ggggcggacccgaatgctttgagtgaggtgcgtacccgctcattgtcggcgcgcccctccgaccccggtccccaaaacagaagggtccttgagggaattgttggcgtcctgggaacgaggggggacaaccgtttttcctgtgccccaccctaagttccgcaatttttccccctgggcagcggcgtaggttcccccggggaaaacccccagttgcaacgtctcacgacccccattccccgctccccccttcggaaaaaaccaggggttgaaccaatcctaaactcttcccccctgtgatcccaaagcccgtttctttttcagggggccccggatacagattttaaacgtggctttaaatcgggcacgcaagaactggggtaaatttacacattcccgcgaataggtgtcccgaacaggtaaatgcattaggagtaattgttaagtgtagcaaatataagcttgacgggttcttaactaacatattaagtaattacaaagattcatttttttacaaacttttaagctattttaataaaatggctatagacctcactgtacttctatttatctgtgcattaataaaaacctgttaaaattccttatttagtacttctgaaaaagtctaatcaaataagatcactaaaattaccagaaaagctttgaaatactgattgcagattcatttcaaagtagatttaacccctttcaggatctggtgtttaaatcatgaatgtcttcaccaacttcaactctgaaaatataaaaattttagccagttctggctatagttaaacagtactggtattacttgnnnnnnnnnnnnnnnnnnntatattgtcaatcatgcattccacaatttcaagaactaagatataactcataaatactgttatgtctttgcaggttatctcaatttccatcaggcctcagctgaaagctcatctgccaaaacacatcagcactcatgtaaaataaaaggagtagggaggtgactttctacacaatactgtacagtgtttggcttccagtttccctcttgtgtgtaactattctaggtatgactccttgagcgtgaaatgaggggtagatagaacagaacagctgttgggctaacaagaattagcggacgcgtgggtcgacgatatcccgggaattccggaccggtcca

SEQ ID NO: 149516 - DNA, 2014 bp, Homo Sapiens
tctttgagaaggggctttcagaagagacagaaagtcctgagaataatttaacaggactttcaactctgaaaaatccagcatcgaacactattttatcaacttcctttggtatcacagaaactgctgtttcagcacattcttcctgcctaattctctctctcattgcattttttatggcagctaggcgatttctcgctgcaattcttccagcatcatcctgttttggtttacttgctatacctgagacaacttttttcctaaagacatttttgttcatattatgattcatattattattgacttgccacccagattcctcaagtttgatcagattgttgaatttgtggattacatcttctatctgaaaactaaccatatcccaaaatccatccagatctgtacaggtagtctcctttatacctcgtttatattcacaatcatcaaccagtccttcaaactgtttaaacctttccttcataaggagtcttgtttgaccaactgctgtgcgaataagatctttagcatcatctggaatgtccaattcaagtttcctgtccccacttgaaagcaatgtgaagttaatttctcagtttctgactggaggatatttctgaaatatggcacaccatggtggggctgagcaattcgaccttcatttctttcaagtgatgggacttcttttattggaaggccatttaaatttttagtagtagcttcatttttatttaaaacatgttcttcatgccaaacagttagaggacccaaaggacatggcaatttatttgaatcttgctgtattgtcttggtagagtaagttttacatttttgtgccaaaatttcttttgttgcttgagactcatcaacttctgtttttaaaggagtccaggtgtaactgggtgtcaaaaaagcattggcacttctgggagtcataggtgttacttgataggtcttcagaccatccagtggctgaaacataaaatccttaggtgcaaaggaattcttcccttttatttttgcagtatttatctcaggtaagttttccatttttgataagactccatctggattcattccacttgttgcattagtttgtgaattcaaagtattttcttcactatcgactttacaagaaatacccttggtcgggttttgttttctacatttttggcaggtcttcctttacttggcacctttctttctggttcgttttcattagcagctcttgtgactggctttcttgctgtggtagatgagactgttctgggaacctgctttgctgcttgagtagctgatcgagtcattctcaacgacgtgggcattacaggctgcacaacttttttctctttgtctgacactttcttttcagaagtttgtcttggaccaggtcggattgctcgaacatcactctcgttatcaatcttagtctgctccatttggtctttggcctttgaccttgtaatccgtacagaagatggaatagccttttttggctcagctttcacagcattctggtttgataaaagaaaacaaggcatatcaggtctataacgacccactttaaatattcctcgtttagctttctctctctgctctttcaatttttgaagttgcttttcttctttgtatttttggagcatctgttttcgttgatcacctagaatagttttcattgcccttggcttaacattggtcttttctggaacaagcccttgagatgtctcatctaattcaacaagaattctaccttccaaggttggaatgtttacatctttcaaaccaaagtgtctatttcgttcgtattccttatgtctattttctttctgagacagtgatttcctatgagcaattttagttctaatcatttcagtacttatatccttcctgtgtcgactggcaaaatgtgatgaagacatcctgagccaccttctagcgtgaaacctcaaccaaacaaaaagtaaagaacactcggtctggacgaccaccgccgactccgaagcaggaaccctcacaaccc

SEQ ID NO: 149517 - DNA, 951 bp, Homo Sapiens
ccttgtcgggcaacattttccggcccaccggcccggtttgtccctcctcccccggatcttgggctttcttctccagccgggcttgcctcctctcccttgccatctgcttgtcagtcacccctgccctgcccacaccgggcccccgagccctttatctttcctccttttgtactccttaatctgcttgttgagcgcctcatgatcgatcccacacagactggagcttgtggtcggctctgtggtgccgcagggttgtggggcatcagggtccctgaaatcattttgtacaaagttgtctctttcatcccggggtccaaagtctgcgactgccagtaactgatcaagctcagctagagctgcatttcccttgtcttgaacaaacactatcggtggcacattcctcagggtctgctgggacatcaaaaggtgcctcatgtgcgcggcacttctctgcaggacagcctccatgtgtgcgttctgctcagcagagagcgttgtcttccagtacgctcggcaggctgagaagtctggagtcagggaaaccttggagagctccacgttaaggtcatacagctcctgactcacttcaggggtacacagcaggtctgtcagtgccttatagaggaggccgttcagggccctcaggcgcgcatggtcttccttcctggttttctttgaggtgctcctcatgaggaattccaacttggatggtttgtaagtcgagtgagaacccaaggaaggactttcataccaaaccttttttttggttttcgaggcaaatttcttgagccagttcttgcaggagacagcagagcagtgaagtccccgctcgcagcctggaaatagcgcagcatcgcggctacggaacagggcccggagacccgcgcgggagcgccacagcccgcccgccgcagcccacatggcgcggccccctcgtccattaccccgcgg

SEQ ID NO: 149518 - DNA, 1160 bp, Homo Sapiens
  misc_feature (159)..(159): n is a, c, g, or t
  misc_feature (161)..(161): n is a, c, g, or t
  misc_feature (277)..(277): n is a, c, g, or t
atgaccattttccaatttgagagccaaaaggatgaaggtgcttcaaagtatgggcattccggtctcacttaaagaacagaatttcaaaacttttctgccaaaagaaaaaagtcccctccattttcttgggtgtgctccagggaccttccatattctttntnagatttggaggccaccgccccattgagggagctggctgcagtgtcagcgtgagaaggagggaggaactccaggcccagggggcggggtactccagatcccactggcctcaaggacncttcagatgggagtcagtgtgggagcacagagcctggcagctcgggaggcctgggtggaggggaaaagaacagtgctgctctaagaccccagccccctcgtggggggagagagcagcagggcttggctctcagctgcatggcaggtgtggaaaagctccttgtgacggggtggctctcatggcctctcccagggcctccagcgttgttagcatctctaccagctcctcttgttgcctggagagtctggaggatgtctcttctttcagttcttgaacgagggtggtaaatttctccatcagcatctcgttggtgctattcaccttcttgtaggcatctacaaagccgggggtgttgaaagactttttctgtaccctgacatcttttaaagatgcctcagtctctacaatctgttttcttgccaatgagctgggatttctccttcacctgtgaatgcagtgtttctgcaagctgcctttcacctcttacacagagttggttcctaacagacaaagtcaataaaagtaagagacccagcagtaagcccatgaagtgtggacacaccactgtcttcccatcgaggctgtggaaagtgacttgaggactcgcgtcatggggtggcagccccaccatctcctcatccagcttccctggagtcagctcagggtccagctccacagaagatcgcagcccctccatggcaccacagccaccacagggctccgcccagtaaccgtggatcccacagccacaacagacaccagagaacaccctgacattccgcctggcatccaaccagcagcgggcaccctgaactggtcaactgtatgatcagctcggacgcgtgggtcgacgatatcccgggaattccggaccggtaccagc

SEQ ID NO: 149519 - DNA, 993 bp, Homo Sapiens
  misc_feature (159)..(167): n is a, c, g, or t
  misc_feature (907)..(907): n is a, c, g, or t
  misc_feature (925)..(925): n is a, c, g, or t
  misc_feature (977)..(977): n is a, c, g, or t
cccccaaaaacccaaaaaaggagtagggaaggggagggcagaaagaatgagaaaattccaaggggtggggaaatggttccagtccctggaggcccgaccgtaagaagtgagccaggggagccaatgggaataacaaggtgaagctactgttcccccctnnnnnnnnntggaatgggaccggggcagaaccaggagggtgaccgagaacatcctgactccagaaaagaacactctgtagcaggaacacagggccgcagagagccactctggaggaaagaggtgaggctatgcggcacaggggcatgaaaagctccttgtggacgtggcctcagcttgctcgctcccagctccctggcctggcttgcctctagaggacaggaaaactctggagaccagaggggaggcagaacacagagaagtgagctgctctcccactctttctaggaggaccctgtttgaaccctgtgatcaccaggggctgggccccaggccagcagagtgaatgcacttaatggagagcagagagaaactgggccacacgcacgcctaggggccgtgtgttgctcctttctccctgagggcctggggccagaggtggtcagagctgccacctcagcttgcagctgcccaaggcaggctggcacgaccaccccaaggttctctggatttgtgaagggagaggaggaagaagggaaagatgggtatgaaatatgaagtggaggagagaaacagccttagatatgtcggggagcaggtgggtggccacatcaagaggagttctggttctggtagatggaagctttctctttcaacaggtccagacacaggtggcagctccaacttccttcagggggctcagacatggacggggtgagacagtacatgtggtagccacgatcgaagcggncgcgtgggtcgccgcttntgaaagaattccggaccggtaccagcttgttttgtccacggccccgtgcttnttccccactcccttgc

SEQ ID NO: 149520 - DNA, 1229 bp, Homo Sapiens
  misc_feature (98)..(98): n is a, c, g, or t
ctgctttcgccgaaagctggcagagatgttgacagggcagatgttgtccagagtgcagaagaagctgggaaaatctgtggtaaggatgttggcaaagnggaaaagcttagggtctggaaaaccgaagtagtacgagttgaggtagccgtggaccaaggagacgacggtgggctggaaagagccctgcacgtcatcaatgggcgggtggaagcctgcaaaggttaagttgctgctgctgttgtccaggtgcaggggggtggcgatgaccacgatgtcatagaagtcagagctgttgcctacctcattctcatacgccacctggtacagggctttcccctctgtgctgtgcagggtcacagaggtcactgtggcatggatcacattggccttggtgagcttcagcaaaccggaacaaaccagcttattgcctccttccacagaccacaggctgccttgggccccggctagtgacatggctcctgcaaaggcgggcatcgctgctgactggccatagctggcccgcaggacagcagaaacgacatcatcaataaagcgctgcgtgacgcccacctgcagcagggactcagccacagagtgctgggtcatgttaacaaaggtggactcccccagtgagtagagcagctcctccacacccgagaaggcatagccgtgggcctggtacttatagatcctcatgaacttctccatgacctcctccacccacatctgcagcctcaggaagctgatgccatagtgccaccagaggcggaagaggttcagcaggtaccagtcagtctcctccagcatgaagtgctccccgccgaagatggcgctcctgcccaccacctcgcgccggtgcctcagccccagcagcttgacgaagtcctgcatgtgcaggctcagggagtggaaggaggcagccccgctctcatagtgctgcttgttgactgagatggtggccaagcggccacccacggttcccttctcgtacacgtcgatctgcacccgaggtccaaagtgctgctggagaaaatgggccacagcagagcccccaatcccagccccaaccaccgcgattttgcccggcggggcatctccgccagcagcggcggcggcgaggagcgcggtcaacgcggcgagcagcgggggtgcgcgggccatggcgggcggcgagcgggcagcacggacgcgtgggtcgacgatatcccgggaattccggaccggtccag

SEQ ID NO: 149521 - DNA, 640 bp, Homo Sapiens
ggtccttcgtgaacgtgtatccttaatacatagacgtcactttcagagtgtgcttggtaaaacctggaagcttgaagatgagccttaggcatcactggcagtgcaggtgggtgacaacacaacagtaggaaggcttccagatactaaccaccagagtagcttggcttttctgctttacataacaggcttctaagtaagatttcatttcatgaaaagggtctgctaatccaattcttttgttttacaactgagttttgaattttctaccttgaatatttgaaatgaggactttgaatgtcatcagggctgacagtaccacctatcaaagttctgaaactgcatttctcagattgacaaaacaaacaaaagcccaaattgttgccttggggcttattaatctcagacaggggatttgttacaccttttcttttccattgtctttgtgcccagtagtgtcaaaacacataattggtgctcaagtttactgtatgaatctgacagacctttctcatgacatatattcgctgagcaagcaatactgtaaagctaagacatttaaatttgtgtgtacaagtaatgagaacactttaatactaaataaggtggggcgcagtggctcacgcctataatcccagcactt

SEQ ID NO: 149522 - DNA, 891 bp, Homo Sapiens
agcagggtccccttcttttcactgccatattccttattgccctgaagctgatgcatgctgtatcttccttgccggctctgagaatcttctttctgatccagttgaagagaggattttattaagtctcggagtgcagttagcggtttcttttcttcatcctgggtctgttttatattatataaatcagcagccagtttttcaatgtactgtttcaacttatcagctgttttcaagccatcttgaaagaaattgcactgtgcatggtaatactttataagattctgcagcagatccacaccctttttggtcttgatttcattaactttaatgagatattcacacatttggagctgaaagaggcgcctttccttctccatttcttccgcaatctcagctcctgttatctctgtgcggatcatcccatgttgttttgcgtgctctcttttctctttctcaatttttgtaaactttgtctcataatctttccaggctttgtcaaatggcttcttgagatctcctttgactccctttaggtctccttttaacaaagaatccaaggtgaagatcacattgtggctcaaaccctggagcagatttttcagcagtgtggacagttcctttgtaaaagtagaaaacttgacaaacgcggtgccaaggtcggggttgtctcgacttaaaaaattactcccaaacttatcaagaacttgtgcatagttttcttcattttgtacatgatcttgaccagaattatatattgcttttacagacttcttcactttctgaagggctgttctatcttggtctagagcctcctccagcagcgtgacggtgttcctgcagttgtgccggacgcgtggtcgacgatatcccgggaattccggaccggtccag

SEQ ID NO: 149523 - DNA, 957 bp, Homo Sapiens
  misc_feature (116)..(116): n is a, c, g, or t
ggcaataaaggaaccaaaacctcccaattaatgaaatgtggacccccaactaggggagggagagaaggcactgacaggcaggccaaacccagaggggccggggactgacctggggnttcagtggagcccaagaaacccggggtttctgtagtgctacagggcaacaagtgaagggagagtttgttccaaaacctgtggagggaaggaaggaaattggattctgttatcaggagagccaagatcaactagcttatagagtgcccacaggcctgagtcttggagaaggagcgaaagctcccaacctcctgggtctctgaagggcaggatcagttagctggtccccttgaagaccacctggcctgaggcccaatccattccaagcactcattaccactacatgttctctctctaacactatctagaggtcctatgtagaccaggggagggtacaggcacatgggaactttgtggggcaaagggaagctgggggtgggaagagatagggtgaaagaagaggataacaggtgtcttgtgagaccctcttcattctggtgttgtccttgaacctacagcatcccctggaacgccccaagcaagaccaaggcagatactatgaggcaggcagcacagggcccaaatcaagaattggtgcagtcgaatcaggcctgtgggagagaccctatgtattccggattcccagggcttcgctctaattcttgtcgtctctgctgcaccttggagtagaagtatcggcacacagcctcctgagcccagggctggaagtagaactcagctcggcgctcctcctctgggttacccaccacatcagtcattgtcttgaggtccctgcactgggactgaagccagtcattgatgaaaccctgagggtctctggcaaagctcagcatgacggacgcgtgggtcgacgatatcccgggaattccggaccggtaccag

SEQ ID NO: 149524 - DNA, 1548 bp, Homo Sapiens
tttgtagttatcgtttttagtccaacaacttgcagtgcaccagctccaagaactaactggcaacttcttgaattgaagtacttcaataaatctgacagacgagtaagcatgtcagtagtaacagatgggatgttatccacacactggcaatattcaaggataattcttattaacagcaatacggttccaacaactgcatactgttgtccctcgacaataagaacttcagctggtttcctttcttctgtggctcctgattttttttcaggtaaagcaatcttcccatctgacagagaatcaacaagatcctgaaattctgcaggaacatctgcttgcttccagcgctcattgtctaagaggaggctgagcttggtttttctctcttcatgaaacctatttacaaacttaatagcttggctctgaagtgctccaagtaatgacgtgctttttcttccacagatctgttcggtgtctaaaatgaatgtttccattaatctagaaagtgttatgaattccatggaatttagcttctcaagaaaaccatcctttgctcttgacatgagaaatttgacagctcgatcatggcatatatctgaggcactatataataattcctggatattatttgccagctttcctaggctctgagtcaagttaattttcatatctttcactgcccaataatatccacacttcctggaatagcagatgatgatgtgtgctctttgctggatgaaggaatcagtagtacattctggctcggatacagaatcactgctgcagggctcactatttggagatgcatttctttgagaggtagtgtcaactgctataggtgttagctcaccctcaccgaatgcatcacttataaacatgccttcatgggattaaataagccacctctgtgtccagtgaattatcttttgcagcattcttctgttgtgaaatctcttccaattctctagtcctttggtttttgtcaagaactgagagaacaacactgtgaatgatatttaatgttgccttcactctctgtaggaaaattgtaaacttagagaaaatatccttgagcagatcaaaccactggggaaaattcaacattctcatctgatctgcaagcttcacaacaacatctgtgtctatttcttctgtttgtgaaactttattaatcacacactgtttaatgatattctttgctgtaataaccattttttcaccatagatttctaaaaaattaagctttctttgttttaaaagtccaaatacaagagatattagtctttcctcttctaaaacttgacagtcatcttccagtggtctatttaagtcactgtgagaataagtagaaaattctgcaatcatcattttatctatcagtttttctaattcacaaagctgtgatcccaaatgccggaaactgtgaatgccctgaagttcctgctgtagaacctcttgtgttgttgctattaagtccaatgctccaacaaattcagaagtagataatcggacgcgtgggtcgacgatatccggaaaattccggaccggtcc

SEQ ID NO: 149525 - DNA, 286 bp, Homo Sapiens
cttctctcctaagatttagctcaggttcagataaacaaatggttccatgagtcacttcatctggacttcttcctgtctcctttaatattctgagcagcgtcggagggcgagcagacacgggagccctgaggaagagaaggagacagcagagaaggggtggctcaggcctgcggtgccgcagctccagcctctcggcaaggaagcgcttgtgtgaggagagccctcccgctccgcgcccacgcgtccgcggacgcgtgggtcgacgatatcccgggaattccggacc

SEQ ID NO: 149526 - DNA, 1134 bp, Homo Sapiens
  misc_feature (82)..(123): n is a, c, g, or t
  misc_feature (190)..(190): n is a, c, g, or t
ttatatttcccaggttttcctttttggggccccttggaggtttaggaaattctggttcctttttcaatccaataaataaggnnnnnnnnnnnnnnnnnnnnnnnnnnnnnnnnnnnnnnnnnncccagaattttcggggattctggctgatctgttaaaagctgaaaaaggtgtttcccattaggagttntttccgtcagccatgttccctctgctccaaaaaatggctttgtccattgtatgcgtactgccacgattggctgatgcttctcgcattgccggcagcatttttccttcacgtggccttttaaaactttctgattatctctgcaatctgtggtttactttccatacatgagaaatttcttaacaatatttctcgaatatttggctttacttaactcaaccaaatcatctcgcaattcttcaaaagcctgttttctctgttcttcattaccatactgaatgtaacactggatcacacgagttgaatcgtgtgcaaatgcaatagttttaattttcccttgaatcaacttctgcaaatcactcattaactttactcttttttctttgtcacagtcttttcttcttaaaatctcccacatctgctttgcccgaacaacaatgtcatagttggttttatcactgagttgtctgctttgcttcagttctttcttcttctttttgaagtcatcccatttgggcttcttggctgctgattcatcgcttctaccatctggctggaattttctcttcttgttgaatttatttgccggctggaatttgttctttggtgatttgtccccttgctgcttattcttgaactgctttacaccctttttcccaagttttgtgatacttttctcaaagttcctagatgtgactttaggtccaccttctttagcaactttccttgttggaaatgtctttgaagaaccagaatcactatttttatgaaatctgtttttttcttgtgctgtctttgtactctttcctgtgaattgctttttccctttaacttccatcgtagcaactcgcacacgtgggaccgagacagctcgcgcagcggatcccgaccgcctcccccggccgtaatggccgaattcccgggcatatgtccggtaccgtcgactg

SEQ ID NO: 149527 - DNA, 1330 bp, Homo Sapiens
  misc_feature (1260)..(1260): n is a, c, g, or t
ggaattcccgggatgcaggggaagtgtgtacactatgtgcactgagggtgacacttctgagtgtgggggccctggctagggagtgggactggcaggcttgggtggggttcccaagctttaatcttcctaccccacagaatgttttctctgcccttcaggcagcctgagccgggcagggcccctgcctctgctacggcagcccccgatcatgcagcccccactggacctcaagcagatcctgcccttcccactcgagccagcccctacccttggcctcttcagcaactacagcaccatggaccctgtgcagaaggctgtgctctcccacacttttgggggacccttgctcaagaccaagcggcccgtcatttcctgtaatatctgtcaaatccgcttcaattctcagagccaggctgaggcgcactacaaaggtaatcgccacgcccgacgagtcaaaggcattgaggctgccaagaccagaggcagggagcctggcgtccgagaacctggagacccagctcccccaggcagcaccccaacaaatggggatggtgtagcaccccgtccagtttccatggagaatggactggggccagccccaggatccccagagaaacagcctggctccccatcccctcccagcattccggagactggtcagggtgtaaccaagggtgaaggggggactccagcccccggcttccttgcctgggggtaagcaaggaagaggaggagaaagccaagcggctgctctactgtgctctgtgcaaggtggctgtgaactccctgtcccagcttgaggcacataacaaaggtactaagcacaagacaattctggaggcccgaagtgggctcgggcccatcaaagcttaccctcggctggggcctcccaccccgggggaaccagaggctcctgcccaggaccgaactttccactgtgagatctgcaatgtcaaggtcaactcggaggtccaactgaaacagcacatctccagccggcggcaccgatacggcgtggccgggaagcccaacccactactgagccgtcacaagaagtctaggggcgccggggagctggcgggcacgctgactttctccaaggagctgccacaagtccctggcgggcggcctgctccccacccccctggcggtggctgcagtgatggcagcggcaacaggctcgccgctgtccctgcgccgggttcccagcgcacctctttctcagggaacgccgatcactcaccctctggctcacccggnccccgggaccaatccgaactgcgcagggacccatcctctttctcccggtactgaccctcaaaccctgacc

SEQ ID NO: 149528 - DNA, 2038 bp, Homo Sapiens
ttagctagcaccttgtgtgtgttattagtttctgtctctcgcaacactgtccagttggggtataataccctccagtggcagggtccacagaattgtttccggcgtgccggacctgagtgttttccgaacagcgcgcaaatactctcgcggggtcagcttcctttctctgtgaacgggcccgtggtccacccgtgggagaggacaattccggccaatgttaaaaaggccctgttgtggcctcccggggactcaatgacttcctccaggagctcccggggcacggcgctgcctgtcggtagtccggaaatcccgcagcagcgcttccggctcccacaacccagttttccagcatctgggacggcgcctcccacaaagtccccgctccccgtgggtcccggctgaaacatggcgaactccgcctgggagcagagctggtgcatcacgtggccaaactcatggaagtaggtctccacctcgtcatgctgcagcagcgagggcgcgtcggctgtgggcttggtgaagttggccaccatggccgcgatggcgatctggcggctcccatcctgccgcaggcagccgggctgcaggccaaagcaggccgcgtgcccgtactttccttcccgcgggtacaggtccaggtagaacttgccgaccacctcccccgaggccgcgtccctcgcggtgtagagccgcacgtcctcatgccaggcactggcgccctcctcgtggtggaaggccagccccaggagctcctggtagatgcccagcagcccgtgcgtgaccacctgcacggggaagtactccttgagcaggttctggtccacgcagtagcgcgtctcctccacctggttcatgtagtagcgcatgtcccaggcacggatgcggccgtcgaagggcaggccccggcgctcgcactccgcacgcttcagctccagaatcaccgcacgctcctgctcccccaggggcttcagcttctgcgccagctcatctaggaaggtggccacggtctggctggtcttggccatgttcatctccaggacatagtcggcgtgcgtgtggaaccccagcaggcgggacttctgggcccgcagcgtcaccagctccttgaggatagcgcagttctcctccttgcaccggcagttgaaggcctcctccactttcctcctggtctcaggcacgtggcatttcttcaggagggggaagtaatgggggtacttgagggtgaccttcaacttgccgtcctccatcttctccagggagttcagaaagtcctcggggagccctcctagctcctggagcgtgaagggcaggaaggtcgtgtcctcgttcaggttcttgttgaagtcgatgcacagaaggctcagcttcttcttgatgcgtttgatgttttcctgagtctctctggggaggtgaagcccatttctccggcccagcttgattagccgctccaggtaccgcgcagcctcgggcctcagtgagtccttctgaactttctcctggagccacacgatcctctggtacacgtcctccctcatgctcatctccacgtcgaactcagagagcttcttgtcggcctctgtgctggctgtccggatgtccttggagggggaaacatgctgggggaagtcaaggatattcctctgaactgtgtaggtgacctccacatcggccagcgccttgagcgtgctctcgtaggacacgtcctcaaactcctgggtgccaacctggtcatacacgcgcttggtctgctcgatgagctccctggtgcgctcctctatctgctgggcactcaggtcccaccgcaggtcgtttaccacagagcacggagatgctgcgtccgccatgtctcctgcacaggctgcggggggcttcatggcgggtgggtctgcgcctgcggctccctccctccttccacctgctacgcgtccagccacctcggccactgaggccgcctgcctcggcccaaccgccgccaccgccgccacggccgcctgaggaccaaggggcccgccgcccgcgctcccggggccctcgtgcc

SEQ ID NO: 149529 - DNA, 1293 bp, Homo Sapiens
agaagagaagttgtttctgggaggaggccacccctattcaactggtccattgcagaatggccaggtcgggccaccttgccccagttgaggagggcccacatcaaaagcaccgctcaggttcccagccgtagacacgcagtgagtcctggcagccgctttacaggcagcaccgtttgggttgaagaggacgctcttgacgggcccaggctccctttcgatgcagctcaccccctggaacttctccaggtcccagaagcggaattgtccctgtcagagctgccggaggccaggaggtactctttggggtgaaactcgaccacgttgacaggccccgtgtgaccagggaaactcagacatcatcttgccggcagtgagatcccagagcttcacggtgctggtcaatctgcggccgacgccaaccacttcccatcggggctgaaccggagacaccgcacggcctggctgtgccccctgtatcggaagacacagcctttcctcctgatgtcccagagcttgatgtttgtgtcctgggaaccagaggctacaaactcgccgtacgggtggaaatccaggctgcagatgttggctttgtgtcccatgagtgtgcgaagaattttggcagcttccaggtcccagacacggatggagcccgactgagagccggccacgatgagctcctcgggggtgttgaggcggacgctctccactggggatgtgtggcccgtcaggctcatgatgcagttgggcttgttgatggaccacaggttgacgcggcagtcatccccgcctgtagccagcagccgcccggaggctttgcccagcaccagtgaggacacgttgctggcatgcgcgacgatctcttgcaacttccaggctgtcttggtgaccacaggggtggccatccttcagctggctggcacctgaagccccacccacaaaataaactgtgctttcctcgtggggtgggggtggatccccccccagatccaccaatcaagttggcagagagttcccacacatccaggcagacagaatgcctcgtcttctggccctggggtgcctcgtggttccaaattacccacagcagcaacagcagcagcctgtgcacatctgtcacgatcctggatcatggaatgttaggctcgagccatctcagctcaatacagggctgcagctgcggctccggaggccgaggctccgctccaggcgcgacccccacttgcctccatctcctgccttgattggccgctgcttgacaaccgaccctcacaacaaacctccggctcagagccc

SEQ ID NO: 149530 - DNA, 528 bp, Homo Sapiens
ggtacaaattaagtttaacacatctgtttgataatctcatccttggtgttggaaaagacgggaaaatccaaaagtgtctattttgtgcccaaatgctcaagttaatactgcgagggccttgatctctggcctcttgccatccctctccccattatttctgaagaagtagccattttgcagattccggaggatgggagccacggccggcccctggtactgaatctcatctccttctcaaggctccttggatcaagttgggaccggcagcgccaaggctgctctccgtgatttagcagcaaccacaaaatgccaccacttccctaagtgacgctgggccccggggacctgatttgaaatcggtgttcagaagaccgagcccggctggacgcagctggcctccggctgagagcggaggggaagggttccatactctccgaggatcccgcgggctcgtggcgtgtggaacgcttttcatcgctttcagttcccgttcggacgcgtgggtcgacgatatcccgggaattccgg

SEQ ID NO: 149531 - DNA, 1353 bp, Homo Sapiens
  misc_feature (30)..(30): n is a, c, g, or t
  misc_feature (157)..(157): n is a, c, g, or t
  misc_feature (255)..(255): n is a, c, g, or t
  misc_feature (324)..(324): n is a, c, g, or t
  misc_feature (746)..(754): n is a, c, g, or t
ggtagttgtgcggcggtccgatctataggngctgcattgcgcatcattgtgtatctgggttatcttctcttctgtcgggctgtgccgtgtggagtggtggcacgcgtgcgtgcgttctgttgctcttttgtttgtcgcggtatgtttggcgattacnagtacctgtcaagctacagatgaaaagcgagtagaggatccgagcagccgcagttgttctgttgggtatgggcgcggcgggtggtaagggatgaagancctcgggcttttctcggcgtgtgatttttagtgttcgatagcgcgatagtgtgcggctatattcgcgcnccggttagccccatgctagtacacgagcccgcgatcacacatcgggtcgtgtgtgtttcacggccgccacgctattatttatcatgaatgctggcgcgcatcgggggtgcggagtgggcgtagttatattggatacccgcgcgctcttgtcgtggcatactgcgtctcggatgagggcgctgtatcggtagtcgcctgctcattggggcgctttgtttgtgggttcttgttgcttgtgctgtgtgcttgcgctctcggggtcccttttgtaacttgtgtatgaattggtttgtgggttctaacatcgggtgagacggggcggtcgagggggggcgggctgcgccccgaaccgccgcccttctcgttatctttgtctggtggtacctcgctgttgggtttgtgtggtgtttttgtgggtggtnnnnnnnnntcgcgccgggccgggcgtaggcggggtgtgtcggtatccgggagctctctcttcgggtatcgatgtggggtgtcctatatttctggttgggggcggtttaccgtgtttcttgctgggcggagggccttttttcaggcggttttggtttgtgctgcgtgttgcgttgtgccggccgcgctttgtggtggcggggggtgtttgcctaacgctctttgctgattgtgggtgaggcttggggggcgttgtatacgggtgagtgttgcctgggtggctgggcggcgcggcggcggcgtcggatctgggtggcccccgcaggcccaatgtcctgctcttggtggtcctttggggcggtgtccactggcagttggctgaggcgtaaaagtggccaagtctatgaggtccttcccgagctcggcagcaggctgataatgaagaaagttgcttgatgtgattctttgcaggtggactcggaggcgcaagttgcgcacggggtcccgggagcgatacactgcctccccggtgtcagtgcccacgcgtccgcggacgcggggtcgacgattccccgagaatcccggaccggtccagctgctttgacaccc

SEQ ID NO: 149532 - DNA, 951 bp, Homo Sapiens
ggccatccccagttatgggcccccaggtaaagaggaggctttcctgggggttaaccttccccatcttccaattgcaaaggaaagccttccccatgagcatagcaccgaaaaatagatggccgagaaaaggaattcccgcaagaaagcatgctttggcaccctgtaagatcccaaaaacccccaggtcccgcacgacagacagagcactgactcgaggaccagtggggatttttcgtgccacttgcaaacggatcttgacgatttctaaaggatttgggaaaatcacctgggagcctccagcgcagcctccagcaagaatttctgctgcaagtgggaccgaaccatctttgtgcataaatttatccctcacaaaatcgttcactgtaagttttatggccttctctggggcaactcccaataactgtggcaacagacctctatacagtccaaagaagccttcatagcgtagcactttcttaaaacagtcaaagctgtttttatacatgagttctcccacaaaagagccagttgatcgttggttctgcattcgagtttttacaagatcgataggatacacagcagtggctccaacagctccagcaacagaacccagaccaaacctgtaggccgactctgcaacttgtagaagaactggtcgagctgaatcacctgaggccttctgcctctgggcctcagccaagttaaagggcagagttccctcttccagaggagcaatccgttcaatgtctgctaaggtcatacgtccccttggctcatataaatctgctaactgaaacaagatgtcaacttccatgggtgtaacctgaccaaatttctgagctgccagaacaaactcctccttagtcacttcaacatctttcctggtgccagccagagtgctatagatctttccggacgcgtgggtcgacgatatcccgggaattccggacc

SEQ ID NO: 149533 - DNA, 981 bp, Homo Sapiens
tctggttcatcatgcgagttcggaccacatcaacccggcttggagtccagagccccagccagaccacatgtaaagctggatacgaagtgagttaaaattgtatcgcccatcattcctgacaatattaatgcttcttagtaatatcatagactggtagctctactcctacaacgatggcagcacgctgagcagttggaaccacacccctccacagacccctggtgccttcttgttggtatatatcgattaagcttccaatcatgctcccttgggacaagcttccttgagcctgcattcgaatctttagaacatcggtgggattggctatagtggaagatatcactcctgacactaccccacagatcatattaattaaaagagtttcatcttctaaacgttctacgaataagcgcttcaagctttggtaaatcccagttttaatggtgccatatgatgcttgtcttagctacgcaggagcaattcctgaatagagagccaatacaccttcctctttacagatgcgaaacagcgcatggaacatccctctatattttatctctttgaaacgggcatcaatgctttggccttgaacctgaagtcgtgttttggtaaggtccacagggaaagtcccaaactcagccacgatagaggcaaggccgccatatacaaagggtttccaattcagaccagacatctcatgacttacagtggtacttttctggtgtccgcttacaatcacggccgccgttgcaaacttcacccttagaaaaattaggattattccgggaaagatacccattcaccctctgggtagcaggatcttgccagttcctcagctgtcacgagcgagctcgtggagagaagggaggcgcctgaagaaggcggcctcccaggggggtcgaggaagcagggttcaatcgaagaagtaaaaccaccgatgccagaagagtgaaagacagggaagggactcagctgctcggg

SEQ ID NO: 149534 - DNA, 1038 bp, Homo Sapiens
agcctgggcaacatggtgagatcccatctctaaaacaaacaaaatatatatactgaagatacagaatcagatgttcagaaagtcctggaaccctcctgtgtgtgcctaagctcagactgcacacatgggaaaaaggccagtcgcccccaccctggtaaatataaggtttctcttccacaatccatttggaatatcatgatctttgggtctccggcccttggggtcctccccagaggactcttctgccaggcctgcagagtgcattctttgccttggctggcctacagaggggcccactggccacagcagtttgtctgcagggtgacagcagcagcagtgattgcagctcagatatagttggcagggggttgtcgggcattgagccgctgcatgtggcaaccatggcagagcaagtgcccatccagagggaaacagcagcagccttcctcatcactcagctgcatccggcagtcctcacagtggtagcactcaaagtgataatcccggtccatggatatcaccctcacgatgtcctcacagccctcagaggggaggatgggttggccacaggctgcacacttaggagcataatttttgtggtagtcggtgacacagtatacttggttggagaagtccactgtgaaggggatgccatccaggcacttgttgcaaacaatgcatcggaaacagcctggatgataggacttccccattgcttgtaggatcttctccaaaatcaagtgaccacagacacagcatttctcagctgcctcctgaaaccctgaaaacagataatcttcctcacagtacacagagccattgacactgtagaaagccttgcaacgcaaagttcgccctagaaacaatagagaaggggctggaacctatcccacagcccaggtgcaagacttctggggtcactgctccccgctgctgcataatatatttaaacctggactttgtgcttttcctcctaactgctgtctgtccttcccggacgcgtggtcgacgatatcccgggaattccggaccggtcca

SEQ ID NO: 149535 - DNA, 812 bp, Homo Sapiens
ggcgttggcaccagtctctagaaaagaagtcagctctggttcggagaagcagcggctggcgtgggccatccggggaatgggcgccctcgtgacctagtgttgcggggcaaaaagggtcttgccggcctcgctcgtgcaggggcgtatctgggcgcctgagcgcggcgtgggagccttgggagccgccgcagcagggggcacacccggaaccggcctgagcgcccgggaccatgaacggggaggccatctgcagcgccctgcccaccattccctaccacaaactcgccgacctgcgctacctgagccgcggcgcctctggcactgtgtcgtccgcccgccacgcagactggcgcgtccaggtggccgtgaagcacctgcacatccacactccgctgctcgacagaaaactgaatatcctgatgttgcttggccattgagatttcgcatcctgcatgaaattgcccttggtgtaaattacctgcacaatatgactcctcctttacttcatcatgacttgaagactcagaatatcttattggacaatgaatttcatgttaagattgcagatttcggtttatcaaagtggcgcatgatgtccctctcacagtcacgcaagtagcaaatctgcaccagaaggagggacaacttatctatatgccacctgaaaactatgaacctggacaaaaaatcaacgggccagtatacaagcacgatatctatagctatgcagttatcacatgggaagtgttatccagaaaacagccttttgaagatgtcaccaatcctttgcagataatgtatagtgtgtcaca

SEQ ID NO: 149536 - DNA, 2365 bp, Homo Sapiens
acaggggctgaggagaaacaccggtggccttctgctgccgggtcccccagagggaacgctttgaacaaagaacctgcctctgcctctagcgcagggggccccactcccccccgggagccagttctcccgctgaggtccagacctgggcagcaaccgtggtccggtgctcggggcttggggggccctggcatgtgtctgcatatgtgtatgtacaaacaccaggccactgccaggaatcgctgcccagcagtccctggtgaggtccaggttctgtctctatatgcataaagtgcttgggtgattgacaaagctgggtgggtatctcggagggagaggctcctggagactgggggacgccgaggccgcaggctcttcctgggcacagtgcctgctgacctgccctaagcaggagctcgctttggctttgagtcggcagtggtctcaggcccttgcctgtcctccggggctgccctggggctagagggtggtggcacccacgcctgctgagccaggcagctggaggggcagaaattctgtgatccccacctgtaaaagatgggagacaccccccaagctgtgtggctccagatgtgctggttctgccccgtgagctgcagggaggccggcaggctgactgtccgtggggcccagggcagggctcagcaccagcgatcagcgccatgggcttgtcccgaggagtccagccagcacacagagcccactctgcagggctcggcaggacggggggcccagccaggccagaaaggtcaggcacagatgccagtcagcagcgccgagagtctccgctcaatgcacagcttgcacttggtgacgttctcgatgtcggcctggtccgagagcatgtgctgcagcccctccaggagcagcagggccttgtggtagcgtgggacgcagccctcacggtgctggaacatctcgtccagggcagccgactgcaccatctgcacagcgtggctgaagatgagcctctcggcagtgatgctgtgaatgcggtccaggagccgctgcttgtccaggaagaagcgctgcagccgcaggctcaggccctggcaggacaccacgctggccttgtacagctcattcagcctgcgcaccacctgcttcacagtggacgacaggcagagcttgccggcccggatctggtcgatggcactttgcaggccggaggacagtagctcggccaccttcaggtacagcaccagctgttccgcgaagccccattctcggctcagcaggctgatctggtcggccaccacactctcctgcagctggtactcagggccccccgccgcctcactggcgctgcccttcagggctgcgatctccaggacgtgctgcacgaacagcagcgtgaagcgcaggccacgcaggatctccgtgtgctcttgctccatgagggtctcctcagggaggtcgggggcctcgaaggtcacagccccctccaggttcgcagcaatggggtcggcaaagctgcagccgtgtcctggagcagggagctcaggggctggggcctcgctgcagggcccaggcaccaggtggcgggcagaagagctggcagagccagtggggcccgctgagaacatcctggtgcgggggccctgggggggcgtgctcccgctcgggggagagcccacggtgaagaccaccggggaggggctgctggtgcccccagcacgggctcctgggtgcaggctccctccaaagccagctgagggtgcgatctccatgggcttctcctgcaggctctccgtgctgcccaggtccggggcttgtgtcccaaacgccgccttaaggagcaggtcagtgaggcggctggtgctgaaagaccggccaaaggggcccttggggtcctcgcctggccgcaggccagggcccaacggctgaccatggaagggtcccacctccgagaggtcgggcagcgtccggtttcgagggggcgtcatcaccacgccctgccgggctaggagggccagcaggttctgggagctgggggtcttcgggaagtcaaaggagggcacagccttggtgggggagcccaggatggggggcagggggtttcgctgcaggaagtcgggcagcttgggtgagccccgcaggttccggcatggactgcagatccgtgggactggctggggagggctggcctgtggtgggctgaacacagctcccagggggtccagtggggggtttgggcagcttggggcggacgacgtgcaagtcagacaggttgggggcgctgtgccctcgtgccgaattcgccacccaggcctcgctaccttacggaccgtactagttactgctcatcagttaaaacagcctgctgtgtgacaacaggcttttaggt

SEQ ID NO: 149537 - DNA, 946 bp, Homo Sapiens
gcgaatgaggggtgcaatgtttcttggcctgaaaggccctttgccgccagttccccccccaacggggtaggggccttcttcccccccgtggtgggatccgcttcgtgcctgggtgagagaggaaagtcttcccggaaaggcctttcccccacaaggtcgccacacatacggcttctcgcccgtgtgcgtgcgctggtgcacagtgaggttcatgcgctggctgaaggccttgccgcagtccccgcaggcatagggcttctcgcccgtgtgcacccgctggtggatggtgagggacgagcgctcgatgaagtgcttcccacaggtgtcacactcaaacggcttttctcccgtgtggatcctttggtgctttatcagggacgagcttcggctaaaggccttgccacactcgctgcagtcgtaggttttcttctcctcgcagggcatggggggcttactgaggtctgaagtgctggagaagttcttgccacgccttacgggtggacaggcccccttttctgtggggtcgtccagccgtggtgggaccaggacacagccttggttggcaaatgccttcagttcatgacatgcgggtactgagccccctaagagtttgttcccatggggaattcccaatggctcccactctgcacctgcatctccccgcggcctctctggccagctgcctggttcccacactccttctgagccaggacccctggcaccattcctcgtgggtccccccgtggcctccccaacaacggagagcttgtcttccgaaatgtcattctttggatccaactctttcatttcaggtctagtctcccagtcagtgcctcatcagtcagcagctgagcagccatccctctgctgcccacggtgaataggaagacaggcctgcggtgaccaacagtgccctcgtgccgaattcgccacccaggcctcgctt

SEQ ID NO: 149538 - DNA, 1159 bp, Homo Sapiens
  misc_feature (80)..(80): n is a, c, g, or t
  misc_feature (251)..(251): n is a, c, g, or t
  misc_feature (283)..(283): n is a, c, g, or t
aaagcgcgtttttttctcttccgcgctttcattttccaccccttgccagggtaagcaatgttttcaagcatttttcttgncccacggggggggtccaagttggtttcttgtccaacccatgaccgccttggtacaggcacaaaaccccccatttttttggagcagcgtgttgcatgcttacgccccgcttgtaccgcaagcgctgccttctgtgtctcctgctgagctcccttagccagccgccgagctcnatagtagggccgggctttctcgatgcagctcnccaagtggggaaccctgtgtattcagtttcctcgccgactcctgtaggatcctccgataggtggtcctggcttcatccagctgtagttccacctggttgatctcctcgctggcctggttcaggtgctccaactcctcctgtattctaggatccagttcttcctcctctcttggggacaatttggcctcactgctgctgcttccacctcctccaggctcttctgcgactgggctcctagggacttcatcctttacaacttcaggccgcagctccccctgtggggtctcccgccctcctggaacctgtctgagctcagccatgctgacagggggagggcagagccctatgcacaagagaggactgacatgctgggaccagggccccagcttggggcttcctgggctctagatggccaggagaagagtttctcttctcaaaaggcagaaaaggtgggcacaggaagaacctcacactaggttagaggttgagattcaagttgtcagtggggttcctagagctgaagccttgtctgtgcaaaagttcttcccttcccgccacagggagtccactgtgacaaacccggagcaacagctccaaggcagggggcaaagggggcttggatcctggaccgaggcctgctaggaggagcaccattcgggagggtggaggcaggcgcctccaggctgtggtggcagctggagagagaaggctgggcccgagctgaggctgtaggatgagcgtctctggggagctcagtttaccttcccgtccgcggagcttctatgctgcaaacaatctcccccctccctccccgcaacaagccgatccaaccggacgcgtgggtcgacgatatcccgggaattccggaccggtcca

SEQ ID NO: 149539 - DNA, 1189 bp, Homo Sapiens
  misc_feature (305)..(305): n is a, c, g, or t
tcagcccccctaccattaatcacccctttgggccattttttagccagggttccaaaaagtattgttcccaagtccccccccattggatttaaaaccaaatgcccccagccccccttttcaggcccagtcgtgctcgagataggggagaaaaagacatcccccacttgatattgttaccagagaagccagagtcctcagtgcacagccaggtttcagtcagagccatatggtaccttaatgtcagccagagatcccattgcccacgttattgtagatcggcagtcccagctgttcttgatgtaagnctctgctggctaggggaaaccctgaacacaggaatcccccaccacagagtaaatgtcatttagatgtataaagatctctaattgtggattcctcaagtctgctttccatccaaagtgtttcataatagcaattccaattacttttcctacctcctgtgcagtgaaggcctttccaatagttccactgcagcgacaagatactctgaaagtcaagtcattctgattatgagtatcaattgctttctctatgtcattctgaaattcttcttcttgaaacttttcgcttttagtggtaaaatctctttgctccagagtttcttcttttatttgtttttccagctggcagtccctattctcttctatcttttgcatttgttctatttttaatttctttgcaatgatttcattttctcccacttttctttttagttggttatcatctctctgagaaagtttttccttttttgcatcaagttcaagaagatttttccaaattgaaatggcattcaaccaacttcctggatcttcatttataagtctttgcatttcattaaatatttttcctttacttacagaagaaataataagtggaaactgctttttaatcagcaaaaataatctttctgcagattttaatttcttcaacatattcaaatcagaacaggtggtgaaaaaaacctttcctgaaatatattcaacctgcgtggccgccagccgcgcccgcacctctcgcattacgaacggctccaggccgcgacccgcagtgcagaagaatcgggcgccagcctcaggcccggaccctggctctccacgcgcctccgacatgcggccggacgcgtgggtcgacgattcccgggattccggaccggtaccaccggcttggg

SEQ ID NO: 149540 - DNA, 985 bp, Homo Sapiens
tgaccacttgtctgccggtgttatgcgaatgttccagtgcagcctcatacatcatttcttgaactaagtacttctctcgtcgtattcggtcatgtagaccctttggtacgtctggaatcaggtatgcgatgaatgacttaatcccgaagacaaggtgctcagacacaataatgaagggccattctagcagcaaggatatgccagtattgtaaagtaaactcataggggtttggaactccaagggcgggcctctgtagtctctgtacctgcaataaccagattttcccataccaagctcactcaggtcaaagaaggataggctattgttgacatatcccttcaagcaattttcacttggttctacatgatttgcacaggggccatatttgtattcataaacaaaacgtgggatgtaatcagaagtaatagcaattacaaatgcattggtgatcacagccaatataccgattccttcgagaattccaagccagatacctatgtcagttgctcgggctggcaaaggcctccgccattgagtgacaaatttgtatgcatccagcctgatttcaatgatattgtttaacaaagccaaaagaggggctagaggaaaagccgcaacaaagatggtggtaaaaccaaattgcaaaaccatttctaagtactcatccatcagtccatgaaggttcatgggctgcagattccaatcattttcccactgaggtatggaagcatcatgtattccccgcttgattttatgtcgtgaccaccagttctggatcaacgggtatcctagttccatgaagttgttccatatttgcttcaaaaacatgatgacacccatctggaggcagaggtctatcaaacagccactaggatgacattcctccagtctccaccggtcaaaaagtttattgtattttcctgggtggcctacgaatcttccggacgcgtggtcgacgatatcccgggaattccggaccggtcc

SEQ ID NO: 149541 - DNA, 933 bp, Homo Sapiens
  misc_feature (77)..(77): n is a, c, g, or t
gctttatagaaagcaaatgttatttatgataatataacatccatcagagatagaaggacccacagatccatcttgcntaatacatcaattgaaagatgagaaaactgagtaaagagtctgaaatagatttgatcccacagttggaaggccccagtgtggcccagaagaagttcacatgtaaaaagtaagtcggaagatctagggaaagtcaggttttaagactgtccaagagtgcatataccagtgggcaggacaactgtggtgtattacaagtttgcctacatagccacctctttcttcatcttacctttgaaagctaaaacagtcagctggatgaagtaatgatcctacataggaggcaatgattatacataggaggagccccgagtgttaatcttgctctattcttctcaaatgcatgctctagtgtgttagtctctcaagtctctttttacttggaactactgaggcaaccacagctttacatctgggcttgaagggtaagtaaagctccttgtgcctttccatgctatgtgttctaagcccatgtctccatccaaaataaccaaagagcttatcactggagtatcgggcaaaaacccacctaattataataaagtggcatttcgtttcttatttgccactttctcttttacatacatctacctttcttagagacttcataaaaaaaggtgggtggcccttggggggatgtaggtattcatggattctataaagaccatcaatagtatccccaaacaaattatcagtacatttcagctatctgttccatttctccccatttaccaaagctagttgagaaatctctattttatcatctatgtgtacaagcacagtttagcagggcactagcagaaattatcttcaactttaattgtagccacgtaacttcttaagcaaaatcacatgtta

SEQ ID NO: 149542 - DNA, 942 bp, Homo Sapiens
  misc_feature (154)..(154): n is a, c, g, or t
cgaccaggccttccaccccaaccacagtgatcccggaggcctgctggctggcatggctggtgtgatgctgggaggagaacccggggagggaagaggattgttaggcaggaacatgcctcagcacagatgggcagggggggttgactttccctgncctcagggctgggcaccattggcacccaacagggccgtcttgcggaagacctgcagggttgggttgtgcagcagcgtgtaggccagaccccagcgagccctgccgcggctggccccgggcctagctcccttggccatggagtcctttgtctgtagcagctgcatcccttcgtcttcctcccctggtctgaggctgtcctggggggctgccatggtcctgggtaggaggctctgcgcttgcaggagcagggagcagaaggctgtcatggctggatgcgactggctgacttcaatcttcaagaagtttcggtacgtgtagtagccggggtcgagagtggcggctctcggtggcagcaggctgaggtccatctggccaaggtggatggcgttgtagagggcagagaggagcactcgccaggtggccaccatggcacccaccagcacattgagggggaagagaagaaaggtggctgcatagagcactcgccggttggtcagctgtgggtgtccatcatgagtctccaggaagacccaatgggctgccatgttctgcaggatcacagccagggccaaagtcagccagaagggccacgaggactccagggaacggaagagcaggaggttcctgccatggagcacaggcatgagcaccaggaaggccagggccgtggttcccaggaagaagatgatctgctgcaccaggagcccaaggcagataaaggctgtctggtaggcactgaagctccggacgcgtgggtcgacgatatcccgagaattccggaccggtcc

SEQ ID NO: 149543 - DNA, 1536 bp, Homo Sapiens
ctggaacttccgatcccattcttctctcggtgggaatgcttgtggggggaaaaagaaacgcaatagataaagcggggcgcatgcgctcccggcacaggcttcgattgtgaggaaggccggctagtctccgagctcatcccgccttgcgcatgcggagaaggtaaaccatcgccccgagttgaggcgcgggtttggtggcgcgtttcagcgaagtcgcacgtgaaggatagcagtggcctgagaaagacccagtcatggcagcctccagcatcagttcaccatggggaaagcatgtgttcaaagccattctgatggtcctagtggcccttatcctcctccactcagcattggcccagtcccgtcgagactttgcaccaccaggccaacagaagagagaagccccagttgatgtcttgacccagataggtcgatctgtgcgagggacactggatgcctggattgggccagagaccatgcacctggtgtcagagtcttcgtcccaagtgttgtgggccatctcatcagccatttctgtggccttctttgctctgtctgggatcgccgcacagctgctgaatgccttgggactagctggtgattacctcgcccagggcctgaagctcagccctggccaggtccagaccttcctgctgtggggagcaggggccctggtcgtctactggctgctgtctctgctcctcggcttggtcttggccttgctggggcggatcctgtggggcctgaagcttgtcatcttcctggccggcttcgtggccctgatgaggtcggtgcccgacccttccacccgggccctgctactcctggccttgctgatcctctacgccctgctgagccggctcactggctcccgagcctctggggcccaactcgaggccaaggtgcgagggctggaacgccaggtggaggagctgcgctggcgccagaggcgagcggccaagggggcccgcagtgtggaggaggagtgagccggatgccccacacaccgccagtgtcataccaaagagctgagctgcttcggggccatgcagccctcctgccagccccctgcccttttcttgccctgtctctgaaccttcagaacattgatccttgccgcagccccactagccaagagaaacagagaaagaccattccccctgcctgtccttgcggccctgtcttctgaggttctctgtctggggttggctctcttaaccctttctctgctcccagcctgcctcaccagggaaggttggaggggcctccctctggcttctgcatctgcgccagaaacatcactgccgttggtctctcatgacttaactggcttccctctgctgctgccttggcttcctcctaatgctcgtgctctcctgtccttctgaagttgctccttggccaatctccagctcccttcttgttttcctcatcctcctaccttgttatccaacaaaccatggtccttttaggcacgctcctgtctcctcattgcccagccagtaggagggcacgggtaagggggactgaggatcacgg

SEQ ID NO: 149544 - DNA, 855 bp, Homo Sapiens
gctcccgggctgtcctcagcaagggcgcggtctggtactcgtgcgtcttttatcgcctcagtttccctccgccgactagcgcgcggggcccggttctccatcgcgcgcacggcagcctagcgcaatgaggcgggcagcactgcggctttgtgccttgggcaaagggcagcttactcctggaagaggactgactcaaggaccccagaaccccaagaaacagggaatcttccacattcatgaagttcgagataagttgcgggagatagtaggagcatccacaaactggagagaccatgtgaaggcaatggaagaaaggaaattacttcatagtttcttggctaaatcacaggatggactgcctcctaggagaatgaaggacagttatattgaagttctcttgcctttgggcagtgagcctgaattacgagagaaatatttgactgttcaaaacaccgtaagatttggcaggattcttgaggatcttgacagcttgggagttcttatttgttacatgcacaacaaaatccactccgccaagatgtctcctttatcgatagttacagccctggtggataagattgatatgtgtaagaagagcttgagcccagaacaggacattaagttcagtggccatgttagctgggtcgggaagacatccatggaagtgaagatgcaaatgttccagttacatggtgatgaattttgtcctgttttggatgcaacatttgtaactggtggctcgtgattctgaaaataacagggccggcatttgtaaatccactcatccctgaaaagcccagaggacgcaggaggctctttaagacaaggggacttgaacaaggggagcaagaagtg

SEQ ID NO: 149545 - DNA, 899 bp, Homo Sapiens
aaacaaaattaatgggtccattcccccttggtttaaaagagctccctcttccctctggggtttccagggatggagtggattttacaaattgccggcccctttattttcagaatcacggagccccccattacaaatgtgccatccaaaaacaggacaaaattcatcaccatgtaactggaacatttgcatcttcacttcccatggatgtcttcccgacccagctaacatggccactgaacttaatgtcctgttctggggctcaagctcttcttacacatatcaatcttatccaccaggggctgtaactatcgataaaggagacatcttggcggagtggattttgttgtgcatgtaacaaataagaactcccaagctgtcaagatcctcaagaatcctgccaaatcttacggtgttttgaacagtcaaatatttctctcgtaattcaggctcactgcccaaaggcaagagaacttcaatataactgtccttcattctcctaggaggcagtccatcctgtgatttagccaagaaactatgaagtaatttcctttcttccattgccttcacatggtctctccagtttgtggatgctcctactatctcccgcaacttatctcgaacatgattcacatgtatagatgaacatgcttcatgaatgtggaagattccctgtttcttggggttctggggtccttgagtcagtcctcttccaggagtaagctgccctttgcccaaggcacaaagccgcagtgctgcccgcctcattgcgctaggctgccgtgcgcgcgatggagaaccgggccccgcgcgctagtcggcggagggaaactgaggcgataaaagacgcacgagtaccagaccgcgcccttgctgaggacagcccgggagccggacagcgg

SEQ ID NO: 149546 - DNA, 1175 bp, Homo Sapiens
  misc_feature (1064)..(1098): n is a, c, g, or t
ttctcataacaagaacatgggccaccagtgaggcctgttctccaacagttggcttccaagcccttgtaaggagtcccatgattcccaaaacgtcttacttctttggtgaaagaagatagagaatattcccgaagactttcccaatgttctgtgtttctgggtttagtctatgacgccctaacctcagaattgactgtaccgtctgcaggggataggtcaccgtggtggcaatcgctttggctactgcaccaatgatgaacacatccaaggaagaaagcttcatccgtttctgttaaaagctgccgttttaaaccttcataaaacatgaactggatggcaggattgaagaccaacagcaatgagggaaatgtgccattccataaagccgagattccttcatcgcgaatgatctgatgaaaagcatcaatgatacctttgtagtttgttggtacaatgtcttcattcctaaattttgctccttgaagcttcagtctggtgtttaccacccagagtggagttgttagcaacacattaaccactcctgcaacaaacccaactaccagatcttttccagtggtagaatgttgacctttgacccagagtgctttgaggctattaaaagtgtagaaatagacaaaattggagcagcagagactggaaatcactggaaaccaccctcgatatggtgccaggagtccttcttctttaatgatctccaggagcaccatgtgtgtagttttggattttcttttctcatcaacctgaagtcgaagtctagctgtatccaggggaaaaaacactgtcattgctgtcacgcttcccacggctccggccacggcgtggaccaggctttcgtaggacagcacggaagccattggtgcggctcctcgaagacccagccacacttttcccacagatgccgcagccagtggagttaggaaaggagcaccggagctcagggtgtgagagtcgcaatccccgccctctcaaacccgcccgcctgccctagaacccccggccgtaatggccgaattcccgggcatatgtccggtaccgtcgactgnnnnnnnnnnnnnnnnnnnnnnnnnnnnnnnnnnncgccgcttcctcgctcaccactcgctgcgctcgtcgttcgcagcgcgagctagcccctatagtgatctatcatcctt

SEQ ID NO: 149547 - DNA, 957 bp, Homo Sapiens
  misc_feature (89)..(98): n is a, c, g, or t
tttaaaacctcaagcagggtcttgggggtggaatttttttcccttacttgttaacgtttgggggaattagggaaaaccttggaaagggnnnnnnnnnntccccaaagggtgaaaaaactgttatccaaatgggaaaaagaatattttccagacaaaaggaggggaaattccaatgaggggcccactccggttcaagttaaagagggttcaaaatgccattcacttgcatgaagaagaattaaccggagcattcacttttgggaagaaaatttttttctagacctaacagatattggcggtattttctctcacagtttctaaaataaaagaaaccatagaaggtcaaatattttaaattactttctcaaccagacagtttcttgtgacttgaatgatatctgctgagaagagaagaaacaccagattctaccaagcgccagggaagtttacaaagctaaaagctgagggtgtcaggcctgcgtcctgtctgagatggcagcccagccagcttcagagtcacctgctggacccacatgttcctgagccagatgccaggagctcacccacaggacgggaaagacctgtccccagcatcccactcttgccctcaagctgactgtggaacgcgagacagctttcaaagatcagaggacaggaaggcagttaacaaagtacacgtttccaagacagcctgagctgtctagtgctgatagcagacaggtggggtgttccaggccactgcttcctcccttatctcccagacctggccgtgtgtggacctcaccagcctaccaagctgttgggcctggacgtgggtgctgataaaataagacaaacctggaaaaaaccctggattctgcaacttcactaggaaataacaaggcacctagagacttcacaagctaatggcagtccctcggacgcgtgggtcgacgatatcccgggaattccggaccg

SEQ ID NO: 149548 - DNA, 968 bp, Homo Sapiens
tgggtggcccaaaggtagcgcatggattccatgggcgtccctgctgttgatagccccttaaagtttggcatattcttccaaaccaccattaaatagggactctgggctaaatgcagttctggctgcccttgccataaagcacagagtgtctttctaaactcttctaccaaagacacattgttatccccttggctcctggtgtggtatgtccgccttcctgctgttttcccattccttaactccacggcgggcagttctttgaaataacagcaaaactgctcaatgttactgagtgactgaaggatggcattcatgaaacatgtgttccccaaattccgaaggcctgtggcacaaatggcagtggtgcttccatttacttttaataacttgctgtttagtgttgagttttccaaaagttttcttttcttatgcctgtcagctgtgaaagctgagttttccaagttctgtaagtgttctctgactttctgtaccagtcccagcttggtgtcattaaccacaaaatcatcacagcgataacagtatgtactgtagctactgcaatccatacatactgtgtgctgaactttatcttgcttttctgatttcttatggttggttaaaggtacttgtgcatcttcataatgtttttttgcatggccattcacataccttccacagtggacacttgaacaagtcaaacagacccaagggcttttgttggaccggcacacgctgcagcaccaggacgacggggagccgttggggaacttggctgagtccggagcaatgcagacgctggagctcaggtgtggacactccatggccacgaggagggcagctgggaggactgcggctccaggacccggcgaggtgggggcggaggaactccggaggctccgtctggtgtcgctccgagccgggccggacgcgtggtcgacgatatcccgggaattccggaccggtccagc

SEQ ID NO: 149549 - DNA, 768 bp, Homo Sapiens
acaccctgtaggggtctcaaaaaatggtcttttaggtcagaccccatcagccccatgagcagccgctgggtggcgttttcctctgcagggaggggtgttaatctgggccccaaatttcttgcttctaggttagaaatcacctttactgcattatcaagaatattcctcacgtatgccgcagaccttctttttcctgttttctcttcagagatcaggttgtgccactctctcctgaccacactgttgttatagtggaagtgtggcttggcgtacttaacatattctaggttggagttcagtttttcccagtagcccttaaagctgagcaccttcataagaggcaatgcaatgtcttctgtcacaagagttattccaggaatttctgtattccaagtgagcactgaggaatgtggcaatagtttgtccatgttacttgtctctgaatatacactccagtatgaagaagcaattataaattcctgaatgaggtcaaatgaatggcaggcagagacattctcagaaatccactgaataatctgggcttccaggaactgcgcaccttgaccgcagtagagcgcgcagtgcaacgcagccatcttctcacagtctaagcaagtgttctgcagaagctgtaataaagacgactggctgagcagtgctctatagagctttccagaacaacaatccaataccagggaccctgacaatgactcggacgcgtgggcggacgcgtgggtcgacgatatcccgggaattccggaccggtcc

SEQ ID NO: 149550 - DNA, 1403 bp, Homo Sapiens
  misc_feature (67)..(67): n is a, c, g, or t
  misc_feature (147)..(147): n is a, c, g, or t
ttttaggcccaccccacaagacccaaggagctactagggggttcacttttcattcaaaatgataganggaaagatcctccatagggtatgtctgtccaagggccaaccaacagtgtgatctactctcccaggtttccagttctttcnatcaataacccataactccttcagtccaatcccgtaggtttgaggttcacaatttgctctcaaatcaaacttcttatatagttgcttggctagatgtccatggcaaccttctgcaaaaattgtgactttagcatgtagttccagtcctctctcaaatgttgcctttggtgcaccatccttttgtatccctacatcgttagtggcagttccttttagcacctaccatcatcatggaagaaggccctcagcagctgcataaaccagggtatacttcaacaccaagggcttctgcttgttcgcccatccagctcactaaatgtcccaagcgtacaatgtaattgccatgattattcattggaagccctggaagaattggcacaggaattctgtatttctctgttaaaattccaaatctgtcttctgttacaggagtgttaagtggagcccccttctctttccagtctgggaagagttctttaaaagcacctggatcaaggcaagcccctgagagagtatgagctcctatctgggcagctttctccactagacacacacggatgtccttttcatgtgccacagccaactgttttagacgaacagctgcagagagccctgcagggcctgcaccaactattacaacatctgcttcttctgcaaacctttccatgttcactccttcccatctcttgtccttatcccggggataaatagtataatgggtagtaattcgaggcacagtagaagttgaagaccatcttatagcacatagaggtagataatttttcttaatttttaaggcatgaaagcactgatatgccaggcaggacagcttggctagcggcaccagcatgttcaaagtcaccaggactctcggtcggacacaacaggaggactgtccgctgctcgcggcgggcgctggacctctaggccgcggggggcgccatcacctgccggaaagcaagaactctgctgcagttcgcctccccgctctgccgaccgctcttgcttcacggcgttcccacctccttctcgctctgcgccggcgccatggatgacgcaacggccagccgaggcttccgggtcatgtaccaaaccagggaaagataagggactccaagtcccagccggggagcggtgaaacagccacagcgcggccagatgggggaaacggacgcgtgggtcgacgatatcctgaaaattccggaccggtaccagcctcctttggcaagcgcacgccgggggatgggagccataga

SEQ ID NO: 149551 - DNA, 898 bp, Homo Sapiens
  misc_feature (14)..(14): n is a, c, g, or t
  misc_feature (97)..(97): n is a, c, g, or t
  misc_feature (206)..(206): n is a, c, g, or t
ttcttggcccaatntgtcgagccaagagagttcttaccacaaccctgggggttccatataccaggatgccttaaccatgtttacaacccatctgctnccacaatctctggaggaaatactcgggaagcaaatgctcgtcggaaaatatctgaaaattccttgtctagacctcctattcccatttttcaaagttccagtcaggatgnataattgattggcgatttttcttggttttagcttgcccaataagattaagtgacgaattttctgctttttcaaatgcaacttgactgtttccaacaaccagtcctacttcaatcttctgccttttccctgtcgcaggctctcccttcaggatgctaggatccatggcttcaatgtccttcaccagtaagccaaaaagcttttcattgaagctaaagacaagctgttgtcccactgagaaggcctggttgttgaattgctgaataaattctgctgccatcttgtcggtgtcataagggttggagtcaatgctttttttctgcaggaaatcaatctcgatggtcattgtgccaatacactgtttggctttgtcaaatgtatataaggagacttctatttcttgcccaatagaaagcccagcccattttctctgaggtaaactgaatgcaatgctccctggaaccaccgatggatgtgtcttcagtgtaaatgtgtacctgtgattgggagaggtcctcacaatcacatgctggccagactggaaatccttttcattcacaactgcacaattggttaaagataattcatctgtaggacatcttgccgcttgcatgctccggcccgccatcttcgcggacacgtccggctcggcggctgccggacgcgtgggtcgacgatatcccgggaattccgg

SEQ ID NO: 149552 - DNA, 1164 bp, Homo Sapiens
gctattgaagtgttttcccaccatcaccagccaaaaaccccccaagccctttttcatttttgatggaggcagcaaccatcttttttcaggaagtcaatgggctggttgttgtatagagtttttctcccctcccacccatattgcttaagtattccactgtgtaaagtttgttgtacttgtgctggggcctagggtcattcactaaacaaatcttatcttccatattgaagagtggcttgacatgttccctgtaaaactccaaggtgtgttatggggccaattttctgataatttttatctttgtctcgatattcccaggtgaatgtctctggtggatttccccaacagatgcacaccactcggaatatctcctccatcatgacgtcctgtgtggccgagatttctcctttcgttgctccactgtgtaccaggttccgcagtcgtatacagaattctctcatcttgtgattcagaatatcattcatccttctggttgcctctgttgtataagattcagggaagcatttcttagggataacaccatatttttcaacaatattaacaagcatatcccattggccaccatcatttgcagggttcataagcaaaaactgcaccagcctcccatcctcaggctcctttctctgggctgtgtccacaaaagcactcaagaagaaataacagcgttcaaccttgtcccaaaaaaacaggtaagattggctaaactcaaattcttcaatatttaactttttcatgaatggaagcctcataacattcagacaagaaaagatccagcatcgccctgagctcttctggttggtgattggcttgccctcctggggcacggcgtgctggaacacatgctgcgcgcgctgcaccgtggcccgcttcagacagatgtccagcaggtcgtgggtggtcccgacattctgggcaagtacgaactgggggtcggaattcagtttctgtatcagagcagctaccttctccgaattcagtcccgagctgctcatggcgcccacgctgcccggcggggtaacggtagcttccagggtccttgggcgagcgccgggattgcgctgcggctcgctgcctagggggcccgacctgtctctcgcaccccctcgtgccgattcaccacccagcactcgtacctagacctaa

SEQ ID NO: 149553 - DNA, 771 bp, Homo Sapiens
gaggatcacatgtcgtaccgttgtttttaaaacaaaggtacggaccatgtgctatatataatcgaatggcttaaactaatttgctatgatcctctaacaccgaaatttcccataaacttaagtgcctacacttaggacttttgaactttcagtcatctttttcgtggtgtctcactgaacgatgtgttagaacatgtgttccatttggagttttgggcctgtgcacggtcaaccccaattaccaatttagttgaggctggattcgattgctcagttcacctgccacgttctctccaaggagtggggtctacgtgacctttagtcctctacctcagagccccgagtcatttctgaccaccccgttctgtgtcctcactcttgtccctgaatgggtccctggtgtggatctcaatgtgtgagtggcttctccacttctccccgctcatgtccccacaccttggcatatttaacccgtttctgcccttaatcttcttccacgggccaccgaatggtaagggaaacctctttgttaaaaaggggaaaaacttgaacctcccatccaaggtttctttcttattctggaagaaaaaagaaaccctttttgaaacctatggtaattgctttccacccctgaaaatggcaaatcctaaaccctcaaacttccccactgttggaccacttatcccaggtaaacaaaggaaaggggtaaacgggttccccactgaaacaaaacatttttgcatttcccctttgaaggaacatattcctccc

SEQ ID NO: 149554 - DNA, 1771 bp, Homo Sapiens
cgggattctcccccacaggttgttccggccggttggaattcctcgtcttgcgggtagggtgctgtgcttgaaggtgcgttcagcgctctgggcgacacctcggaccagtttcctggatttgaggtgaggtcacagtgctgccgatgtggcgatggaagtgcctgtctccgccgggtgatgctctctttcatgcggcccctcgccggtcaccttcacagtgaaggggcttccaggcacgtgcttgtcagcaaacttgatgttgatgatgtaggtgccgggctcggtggggcagtaggtgactttgcatgtcccgtcctccatgtcctcacagttgatgtccaccttgcttgggccttcaatactcagccccaagcccccataacctgcattgcgagtgtccacgatgaactctgccacctggaatgtgtgtccctcggaaagccccttgccccagacccgcaccttgctggcgtccccgatctcagatggccccaccaggatcttgaaggggctgttggtgacatgcttgccactcttgcgcacgctcaccacgtgctccccgacctccttgggggtgaaggagatcccaatgtgccggttgggcaggcgcttcagcaggcagggctcctcgttgcccgagggggcacggatgctggcggtcagctggctcagatcactctcggtgatcttcagtgacacgtccgtggaggtgcccacattcagctgtgaggtcctcatggagtcatcacctgtgatcttggctgtgaaggggctccccgggatgtgcttgtcatcgaagcgcacgatgatgctgtagtctccaggcgcagtcggcagataggacacggtgcaggtgccatccttgttgtccttacaggtgatctctgccttggatgggccctccacggccagtgacagacccccttctccagcatctttggtgacaatagtgaaggtggctggcttgttgaccatgccatggctcaggcctggcccataggcactgacatggcggctgttgatggcatccacatagaactgtaaggggctcccagggatgtggttgccgtcatacttgatccccatctggtgcaggcctttctcagtgggtgcatacctcaccgtgatggtgccgtccttgttgtcggtgatgttgggccgtgccgtcttccccgagggcatccgcacctctcctgtgagctcccctttctgcaccgcgaaggggatgaccaggttgaagggcctcagcatggactccattggctccacaggcaccactggctcctctgtggcccagtgtgtggggcgggcgccgggccggggaggagcgtagggctggcgcagctgtggcacttcagagggctcctcctcgtgcggcagggggtcacacgccagcacgtggaaggggctgttggggatgtgctcacccccgaagcggatggtgatgacgtacttgcccggctcgggcgctgtgtagtagatgtcaaaggtaccgtcatggttctcaaccacatccacatcgagctctgccccatccggcgtggacaccgtgcatgtcaccttcccctcaccggctgccttggcatccaccgtgatcaccgtctcctgcccaatctggattcgagggcccaggcaggcacccaggccatggcctccaatggacactgtgacgaggcacttgctggcatccccagtgggcagagcatggatgcggaagggcgagtaggggatctcatcaccgccatacttgatggtgatggtgtaccggcca

SEQ ID NO: 149555 - DNA, 1015 bp, Homo Sapiens
ttggtctcccccttctgctgtccatatcacccacagcaccctgctcgaccgtctcgtcgaacagctttttggtggtgggcagtggcccagtcgttcccacttgagtctttgagttccttcaagatggagatggctccttctctttcttccctcttgcctacagtgctcaatactgcatatacagcaagtgctcaatatgtgcttattggattcttctttggcacagacctccttgtccatcagtgaggggagccataaaatcctggtctccaggttgttatcagggacccctcagggcttaacctttattaatgcaagaaattgtccttcaaagttctagctgaatagattaaagaaacccagggcaacaactcacttgtgcactcagccattgcaccaaagctggatggcagttctcctggagatctaagttgtcttgctggggcagggacggagaacacacgggagggaagctcagtcactcctctccctgcccccaggcctcctccactcctgggaaggagcaggctggctcaggtgtggcagcaaataagaacagtaatgctgttgtgattttggagtccttggctgtgcgtgagttcaccccatcctcacagccatgctccctgcaaaattgggcagggcaggaattagtctccggtgttttaccggagacatcaactcatttcccaaggtcgtgcatagatgtctccttggcattcctgggcccatgctgaaaagcaactgtccctcaatccttacacaaattcacagcagccctgctggcgtttgctcactgtctgctccctgcccagtcctgcagtttgtgaatctggcgttccacggagatggaggtccgcagtgtgcccatggagttctccatctgaatgggttctgacctgcagccccctttctggcacactccctggtacacctcccaagacttctttcggaagcgcttcggacgcggggtgagatatcccgggaatccggaccgtccacctgtttttcaacc

SEQ ID NO: 149556 - DNA, 1107 bp, Homo Sapiens
  misc_feature (215)..(246): n is a, c, g, or t
  misc_feature (875)..(925): n is a, c, g, or t
ggcgggttgcgccgggttcatgttgtttagcggtggtgcggccggatttctgggattagtcgactgagcggccgggacgtcccgtcgggggctttgccccggctgcgatgcgcccacgggggcggcaagtggttcggatcggaggatggagtcgccgaggagcagcctgaggccccagagtctgagacgagccgccgccgcccccgccactgcgnnnnnnnnnnnnnnnnnnnnnnnnnnnnnnnncgagctggtcgggagaagaggaaaaaaacttttgagacttttccgttgccgctgggagccggaggcgcggggacctcttggcgcgacgctgccccgcgaggaggcaggacttggggaccccagaccgcctccctttgccgccggggacgcttgctccctccctgccccctacacggcgtccctcaggcgcccccattccggaccagccctcgggagtcgccgacccggcctcccgcaaagacttttccccagacctcgggcgcaccccctgcacgccgccttcatccccggcctgtctcctgagcccccgcgcatcctagaccctttctcctccaggagacggatctctctccgacctgccacagatcccctattcaagaccacccaccttctggtaccagatcgcgcccatctaggttatttccgtgggatactgagacacccccggtccaagcctcccctccaccactgcgcccttctccctgaggacctcagctttccctcgaggccctcctaccttttgccgggagacccccagcccctgcaggggcggggtctccccaccacaccagccctgttcgcgctctcggcagtgccggggggcgccgcctcccccatgccgccctccnnnnnnnnnnnnnnnnnnnnnnnnnnnnnnnnnnnnnnnnnnnnnnnnnnnacgcctggccggccggccgcgggactatccacctgcaagactatcgacatggagctggttgaaccggaagcccatcgaggcccatcgcggccagatcctgtccaagctgccgcctcgccagcccccccgagcccaggggggcaggttgccgccccggccccggctgggccggagggccctgt

SEQ ID NO: 149557 - DNA, 762 bp, Homo Sapiens
  misc_feature (393)..(394): n is a, c, g, or t
ccggagacaacacggttcaggtaccgcttctcggagctctgatgtgttgaagaacatatatatgctggtgtgtactctgcttgaacttgtcatagatttggttgtgggtttccaccattagcacgcgggtgacctccttggggtagtagtcggcctcaggctcgggctccggttttgcactttccccggccacccggtcgcgggtgctgttgtacagggcgagcacggcctcgggcaagcgggccgggcggcacttcccctgggctcggggggctggcgagccgcagcttggacaggatctggccgcggatggcctcgatgcgcttccgcttcaccagctccatgtcgatagtcttgcaggtggatagtcccgcggccggccggccaggcgtnncagcaccagtagccacagcacggtagcagcacggcagcagccgcagcccggagggcggcatgggggaggcggcgccccccggcactgccgagagcgcgaacagggctggtgtggtggggaggccccgcccctgcaggggctgggggtctcccggcaaaaggtaggagggcctcgagggaaagctgaggtcctcagggagaagggcgcagtggtggaggggaggcttggaccgggggtgtctcagtatcccacggaagtaacctagatgggcgcgatctggtaccagaaggtgggtggtcttgaataggggatctgtggcaggtcggagagagatccgtctcctggaggagaaagggtctagatgcgcg

SEQ ID NO: 149558 - DNA, 1157 bp, Homo Sapiens
  misc_feature (176)..(248): n is a, c, g, or t
  misc_feature (945)..(995): n is a, c, g, or t
cgcacacacacaaattatgtttgtgtttctccccaggggtttttcgcggggtgtcccgcgggggaattttcttcccaagaaattgggggggcgcctcttctccccagagggggggtgtgcccctcgtgaaacaccccgagaaaaaaagccccgggttttccacccccaaaaaaatnnnnnnnnnnnnnnnnnnnnnnnnnnnnnnnnnnnnnnnnnnnnnnnnnnnnnnnnnnnnnnnnnnnnnnnnngcccaggggtgtttattccccctttttttcccacaggggaaccagggggggccctataaggggggaaaacccccttcatttttcccccctccccggggtttcaaccccattgccggcccaaatttccgggggccactcaaaaaaggttaaccccctttgggcgcgatttcccctggggtcccaaccaagccgggttgttgagggttatcgccagggaattggttgccggaattttgggtaccagcttccacggtgctgctccactttttaccttgagccttcagcaggacgcagctttgccccgggagagcaacacggggttcaggtaccgcttctcggagctctgatgtgttgaagaacatatatatgctgtgtgtactctgcttgaacttgtcatagatttcgttgtggggtttccaccattagcacgcgggtgacctccttggcgtagtagtcggcctcaggctcgggctccggttctgcactctccccggccacccggtcgcgggtgctgttgtacagggcgagcacggcctcgggcagcgggccgggcggcacctccccctggctcggggggctggcgagccgcagcttggacaggatctggccgcggatggcctcgatgcgcttccgcttcaccagctccatgtcgatagtcttgcaggtggatagtcccgcggccggccggccaggcgtnnnnnnnnnnnnnnnnnnnnnnnnnnnnnnnnnnnnnnnnnnnnnnnnnnnggagggcggcatgggggaggcggcgccccccggcactgccgagagcgcgaacagggctggtgtggtggggaggccccgcccctgcaggggctgggggtctcccggcaaaaggtaggagggcctcgagggaaagctgaggtcctcagggagaagggcgcagtg

SEQ ID NO: 149559 - DNA, 1384 bp, Homo Sapiens
gtgtgcttcacatctgttgtgtctcgagttatctctggcggcttagtatgcgttccattgtgtggttcgcaggttgtgggggacagcgccaattgggtggtgggacatggcccttcggctttgataggtgcctcgtgccgctctggtgtcactgctgcgtagggtgggtgttttcttgttatgcgactgtgtctctggcttaggcacgtctgcgtaggggcccacctttgcagcatgggtaggtactcgccttgttgtcatccgcacatcagatctgcgttgtgctccttggggcttgcacttcattactcctatgtcagagaaaggggccttcccgcactggcagtgatcccgcttgtggtaattgtagagcttgacgtggccaccgtgtctcgcaggtcccactggtctgtgaacggcatggtgatctggatgggtttccgttctccactcttcgttggggtcacaccttctgtgtcatatgtacccgttatttacaactctgtccccatcaggctctttagacttcagttccagttgggacaagctacaccaccaatggaaatatgtctcgacctgcagcgtgctgggtttaatcttcacctcaaccttgtaggaggagccggtgagcagcttgatggtgcggttctggccgaagcgctgcccgtccaccttgtaaaagaccgggccgtcattaggctggatgcgcagcgcgatggagaggcgcacgaggcccggcaggtcccccatgtctgggcgagggtctggcgcggcggctccggggggcggaggacagcgccggctgcggccgagtggctggagcgcgaggggcggagaggaagcgcggggagggtgagggaggtggtggagctgaggctgccgctaggaacccgcgccgtcgccgccgtccgcccgggcttttgaggagcagctccttaggctgtggcccccctccccactcggcgaggaagcgggcccaagagacggctccaaggccgcgcgcttccccatcccccgctccagtgctgcgccctccacgcacccgaaggctcgctctggcccgcaggccgccgcgcagatccgcgcagctgggggcgagggagttaatcctgtttacgcaccacaatccccttcagctggggaagcggacatttaggctcctcctagaacagccccgggcaggaggaggagaggtttgggaggcactgggaaggcgctggagttaagcgaccactatgccaaggagcgagacccccggaatctggataccgcctcggccagctacgtgaggtggacactgctgctcgcggatccggcgccagccaggcgggaggcctcgtgccggattcgccacccaggcctcgctaccctaggacctgagtcg

SEQ ID NO: 149560 - DNA, 984 bp, Homo Sapiens
ctccatcccactgttttcttctctcttttctggagttagattagtctgaagccgccaccagccccaggcccccgtgcagaagaaaagcgggagggaacggcggaggccgccgctgccctgcaccgcctcctggaggccacttggagagtccggccccgaggaggccatggccacaagtgcccacagctggccccaggttgccagcgtcgctacagcccagaccaaggcagaataatctccggatgagctggtggcaccgctgagcctttggtctcaccagggcttcctgttgctaggcaggcggggtggagcggagctgctgggaggctgctggataggagaggggtcacggctgcggaagaggaggttcttcgggacacccgtggatggacacggcaaggaaacaccaggccaaccacagctggggataaaatagcacaaccacaccctgccgtccagcgcctcccagcctgtgccccttcctagtaccaccagcaaccatcaatcccgtctcctcctgcctcctctcctgcaatccaccccgccacgactatcgccatggcagccctgatcgcagagaacttccgcttcctgtcacttttcttcaagagcaaggatgtgatgcattttcaacggcctggtggcactgggcacggtgggcagccaggagctgttctctgtggtggccttccactgcccctgctcgccggcccggaactacctgtacgggctggcggccatcaggcgtgcccgacctggtgctcttcatcattggcatcatcctcaacaacacacctggaaactcgtggacgagtgccaggaccggaggaccaggaactgatccggagtcacccaactttcatccttctaagctccgatcctgggacgttgcggcttgtggcccctggtacctggtcttgcattacctgcggcgtggagaggattatgtctggtgtctagtgagttcgtggaccattcttactc

SEQ ID NO: 149561 - DNA, 959 bp, Homo Sapiens
  misc_feature (149)..(149): n is a, c, g, or t
  misc_feature (265)..(265): n is a, c, g, or t
  misc_feature (671)..(786): n is a, c, g, or t
gcccatttttcagggcccaagtgacagggtgagggtcccctttggcagagggcccccctatgccctccctggtgggcccccgttttcgggggttttcggcttgcaaatgagccacatttttggtaggaaatgggcatcatcatcggaancccagggcccaacctccttttcctgctgggaggtatggcttctgccctgagctcccacaccactttccttccccttcgggcttgtccttcgcctcaccttctggaggcttcgaganccgccccccaggttgaatactccatggcaatggggtctatgtaggcttcctccgaccccgtgtctgcttcctttgctgaagttctggtacctggaagatgctggatcctccagggctggggtagaattgcaacagcttgtccttccttgtgggtgccatgtccgccaggggtcctggccatgcctgcccgaccaaggagtaggtccgggaccccgtaaagctctgttggtcctcacgcagacttctctgctggtagattttctctgacctctttgcacctgggcgtgagcagcgcacacacagactggctgccacccccaacagcaccagcagcgctgctccgggccacagcagttcagtccccgagctcatgttggctcctggtgttgcctcttgtgatgcctgnnnnnnnnnnnnnnnnnnnnnnnnnnnnnnnnnnnnnnnnnnnnnnnnnnnnnnnnnnnnnnnnnnnnnnnnnnnnnnnnnnnnnnnnnnnnnnnnnnnnnnnnnnnnnnnnnnnntgagagtccagggttcctcaccacggccgccccatcctgagcccgcacacctgcccaagctgatgccaacaccactgacactggcgggcgggcaggtcgggcttcctgccagccactgaatcatccgtacatccgccgcaccggacgcgtggtcgacgatatcccgggaatcc

SEQ ID NO: 149562 - DNA, 863 bp, Homo Sapiens
  misc_feature (611)..(726): n is a, c, g, or t
gatggttttccgggaagcagaggcacagagaccagaattggggccagtgcttcaggcccagtgacagcctgaggtcccctctgcagaggccacctaatgccctcctgctgggcacctggtcttttgtgcttttctgccttgctaatgagcacaattctccgtaggaattggcatcatcatcgttcttggggcttcgagaaccgcccccagttgtaatactccatggcaatgggggtcttatgtaggcttcctccggacccgtgtctgcctttcctttgctgaagttctggtacctggaagatgctggatcctccaggctggggtagaattgcaacagcttgtcccttccttgtgggttgccatgtccgccaggggtcctggccatgcctgcccgaccaaaggagtaggtccgggaccccgtaaagctctgttggtcctcacgcagacttctctgctggtagattttctctgacctctttgcacctgggcgtgagcagcgcacacacagactggctgccacccccaacagcaccagcagcgctgctccgggccacagcagttcagtccccgagctcatgttggctcctggtgttgcctcttgtgatgcctgnnnnnnnnnnnnnnnnnnnnnnnnnnnnnnnnnnnnnnnnnnnnnnnnnnnnnnnnnnnnnnnnnnnnnnnnnnnnnnnnnnnnnnnnnnnnnnnnnnnnnnnnnnnnnnnnnnnntgagagtccagggttcctcaccacggccgccccatcctgagcccgcacacctgcccaagctgatgccaacaccactgacactggcgggcgggcagggcgggcttcctgccagccactgaatcatccgtacatccgcc

SEQ ID NO: 149563 - DNA, 1230 bp, Homo Sapiens
  misc_feature (336)..(336): n is a, c, g, or t
tccccacaacccccccattagggattgtgcggaaatgttggagggggatatttcacaactgccccatatcctttattgccaggggcattcgttccccatctttaattccagcatttcccaatgcttttaggttggcttgcgggactctgaatgctggcccaaattatctttccattggcattcatggacatggcaggttccttccgacccagctttaccaatgatgctcctttcatcatagcccaaaagcgacattgtttgaccctcttagactggccacgcaccataccctctccattccataattcagtgtgctctcaagccggtaggtgctgnaatgccaaatacgtactgttccatcttctgaacctgtgataatgattggcaactcaggatgaaagctggcaccaagacacatttttgggcatgtccttccagtgtctgcacacatgttttatttctgataatcccatatttttaacaagacggtcatctgcacctgaaatgaggtatggcttgtccccaccactgtagtaatcaatgcaattcacgcctttctcatgtccttccaaagtgaagtttggtgacgaagagcccaactgccacacccttgatagtcctgtccaaagaggcactggcaaactgattgttatctttggggttgatcacaatctgcataacataatgggtgtgtccttcaaacacttgtgagcaagaccattttttatcccagtcccagagcttaataagcatgtcatcactgctagttagaatgaaaggctgggttggatgaacagcaatacagcgaatgtagtctgagtgtgcttcaaacatatgaactctctccagagtattgtaattgaacactctaatctgcatgtcatccgctcctgtcacaacccaattcttccttgcaacaaactttgcagctcgaacaggaagatcacatacttcaaatgtcttcaccagtgtctgtgtttcatgattccaaacacacacactgccattgtaaagacttgccaacatccatggctctgtaggatgcagatccacactcttaactcgatcagatctagcagttagctttcttttgatatcaagtcgcagaggcatggctgcgtcggtccaatcccgggaaccctcgtttgttaccggctactcaggccttgagataaacccaccgatccaccctcgtgccgaattctacacccagcctcgctacctagccta

SEQ ID NO: 149564 - DNA, 1071 bp, Homo Sapiens
agcgaagcgacaaaagattggctatgataggcgtggttaaatggcacgagggcggaacgcaagcatccgagagcggagaggcgccgctgtagttaactcctccctgcccgcctgcgccgaccctccccaggaacccccaggagccagcatgaagcgagctcaccccgagtacagctcctcggacagcgagctggacgagaccatcgaggtggagaaggagagtgcggacgagaatggaaacttgagttcggctctaggttccatgtccccaactacatcttcccagattttggccagaaaaagacggagaggaataattgagaagcgccgacgagaccggatcaataacagtttgtctgagctgagaaggctggtacccagtgcttttgagaagcagggatctgctaagctagaaaaagccgagatcctgcagatgaccgtggatcacctgaaaatgctgcatacggcaggagggaaaggttactttgacgcgcacgcccttgctatggactatcggagtttgggatttcgggaatgcctggcagaagttgcgcgttatctgagcatcattgaaggactagcatgcctctgacccgcttcgagttcgactggtttcgcatctcaacaactacgcttcccagcgggaagccgcgagcggcgcccacgcgggcctcggacacattccctgggggaccgtcttcggacatcacccgcacatcgcgcacccgctgttgctgccccagaacggccacgggaacgcgggcaccacgggcctcacccacggaaccgcacccaccagggcaggctgggcctccggcacatcccggagggggccctgccttgtgcgagcgccccccctagcgggaaagccctcggaaccgggtggcttcccttgtggggcaaccttccgcgccttccaagactgggcaggccaccatccggatccttcccccgagggggccctccccatggtcggggccttttcccctcctttctgccttgttcgggcgtttacttttccacccatgtagccggggtcccgccccccatgtggcctctctgtcgagccta

SEQ ID NO: 149565 - DNA, 984 bp, Homo Sapiens
  misc_feature (56)..(56): n is a, c, g, or t
atattctctgggaaaagtgtttttcgtgaaaagcacaatttcttaattcccttttngggttaaccttttaaccaccactttctggggcttgggatcctctaaattccaaatggataggccaagtgcccaaccccagaaagccttttgctttaggaaaaatatgatccctgcaatggacatgccttcaagttgagctttctagtcttttcaaaattaatgctatttctcctttcaagtggcaagttctcttgaaggagtgaataatacagttgcagaaattgaaaggcagtagtagctttgactttccaacacaccttctccaatacaatcttttccattctcatcaagtctgaaaccgtaaacctatattgacttattcggatcaagtcagttgccaatgggacattcctttcctcttctattgattttacagccaaataaaagcagctcagtccaacacacccaaggtgcttgggctgtaccttcattttagacaggaatctgtccagtaaattcacagctagagaaaatgtctctgtgtcaaagccaaagaactgagttagactaagaagatcttttacttcaaagtcccttagtcttgcagtcattctgaggccattatcgtgtgcagactcaattagtctcaaaccacagacctttggctgacatctagactcctgttccaacagggcattcagctggtgtagcagtttctgagagtcagttgttgtcagtacctctatcatcttgacagagactgcagctcctcagcggtaaccaccctccccgggcctgctcacctcaccccacgatatcagatccgagaggcctacgaggagaggggactcgtaggcaagaggagagaggcccggggagggggactgtcctgggtggaggcctcggcagcgccgccgagacaactcggccctgatcagggtcagctcggacgcgtggtcgacgatatcccgggaattccggaccggt

SEQ ID NO: 149566 - DNA, 1095 bp, Homo Sapiens
  misc_feature (96)..(96): n is a, c, g, or t
gggggcgccgggtaaaataatccccaggttaaaagggggccccattttccaggaaatttggttggaaaaggggaagtttacttctggtaggtaggntacggcttcaaatttgcccggccaggtacgccccagaaaccaatcccattttcaacttcggaaccatttgggttgggaacaccttattggatgaatattcagttaaacattgggatacaagctctgcccagaaggtcagatctctgccatttatcttggaatgtctctgaagacattctattccttttgttaactctacacactttctgtgcttggatctctaatgcaaatgatagccaatggccaacacagaagggctttgctttagaaaaatatgatcctgcaatgacatgccttcagttgagcttctagtctttcaaaattaatgctatttctcctttcaagtggcaagttctcttgaaggagtgaataatacagttgcagaaattgaaaggcagtagtagctttgactttccaacacaccttctccaatacaatcttttccattctcatcaagtctgaaaccgtaaacctatattgacttattcggatcaagtcagttgccaatgggacattcctttcctcttctattgattttacagccaaataaaagcagctcagtccaacacacccaaggtgcttgggctgtaccttcattttagacaggaatctgtccagtaaattcacagctagagaaaatgtctctgtgtcaaagccaaagaactgagttagactaagaagatcttttacttcaaagtcccttagtcttgcagtcattctgaggccattatcgtgtgcagactcaattagtctcaaaccacagacctttggctgacatctagactcctgttccaacagggcattcagctggtgtagcagtttctgagagtcagttgttgtcagtacctctatcatcttgacagagactgcagctcctcagcggtaaccaccctccccgggtggaggcctcggcagcgccgccgagacaactcggccctgatcagggtcagctcggcggacgcgtggtcgacgatatcccgggaacccgacgcgtaccac

SEQ ID NO: 149567 - DNA, 939 bp, Homo Sapiens
ctatgcggggcaaagtggtccagggaatttccatgggtccccttttgacaaggtaggattttttcatattacagcatctgcatttcaatcaaaccccttgagggactgaatccatcatgtcataaggtgttacgatttttttcagaacctccggccacaattccctgccagctccattgtggggtattgctcgctgagatttaggaccactaggggtgtgttatcgggccccagaaagcggggagacaccgccaacatgcactgcatgagattggccacagaggagaggccacacagctccttgaatgacaccaccgcattctgcatgttttctctcagatctgtggcatcccgtatagggggctgggcattcttgaatacctcatccacggttttaatccacagtgttctcaaagatgcatattccctggatttcttcccttttctcacagaaaggccccttttatgaggcttccctcctcctcttcggttagtaatagccacgtggacaaataaagaagcatgtgcaaggacctctccagttaaggactgcagggggacatggcggtagcccgtctgtaaacattcaaagggaattgtgtactggccgatgaattcatccccaatgtagtcatcatccagcactacaaagcgcaccatggccagttcaggcaggttgatttgaaattcaaagctttcatcaaaaatgggagcgtctccattctggtgcactgtttttgtcctttgttctgcacaatcagcagggattccatggatttcaacatagacataaggatctaccacatcacctttggcacctgatcctttgggcttgggaaagttctgcccactgatgattttaatgtgaagaagttgaggtgagacccctgggacagagtgttagcggacgcgtggtcgacgattttgaaattccggacc

SEQ ID NO: 149568 - DNA, 919 bp, Homo Sapiens
  misc_feature (66)..(66): n is a, c, g, or t
  misc_feature (144)..(144): n is a, c, g, or t
  misc_feature (193)..(193): n is a, c, g, or t
ccattcttgtttcttgactatcgcttccaaatgcccatgtctgggagtaaaccaacccccgttccngggatacatgtatgtttttgattgcatagcttatttctctttcgcaattcttttctcatgaactcccatctttactantctcaaaaggaaagcgttcatgaaaaatacgattgattttagcaccacntgagagttccagggtatctacttgatcccctgacccttcaattctcttctcaaagtccacagcaaattgctgaaccatctgcagcaatgctttggtcttccttgttgggtcttctggtttgaaatttttgtaggcttctacttcatgttctatggagagcaactgtccctgtagtttgttcctgaagtttggtagggtatcccgaatgtggttggtaagttgctgattaaggaccttctgcaggtgtggggttcccattcggtcagcgatatgtctgtaagccgggtgggaaaggaaaaacttcctctctgccagcatggctgcctttatgtccttcttcccatctatgtccttctggcttctgtttaccacccccacgtaacccctgcgaagaggcaacagtttgttctctagaacatccctggcatccgttccttcatccataaggtccagtttggtgataactccaatggttctcagaccttgaggatcaacttctttagctagcttcagcgcatctgagtttgcaagatcagtgttggctggagtaacagctaaaatcagacagttctccctcgtgatgaactgcataatcatttctctgatctgatactcgatatctggtggctgatctcccacaggcactttagttattccaggtagatcaataagggttagatttaacacgtgcggacgcgtgggtcgacgatatcccgggaattccgg

SEQ ID NO: 149569 - DNA, 953 bp, Homo Sapiens
taggtcttgtattgtagatccttgtgtgccggaattcgttctacagctgcgcgtgaagagggaggggaaagccccgcgcccaatacccgggttcttgtcctccgtcaacgatactagcacagttccgtcgttcccacaattgtggccgtctgacgattgttagacgacgtcatgcctccttcaaggacagctgtttgaagttcaggacctgcaacatctgtgaaaactccatcttcgtccactaagacaatccatgggcaggttgtgctgagacgctacaccgtagtcttccataccatgagctggggctgtgtgaaccgatcccgttccttttgccatggtcacatgatttgcaggtaaaagaggagaggctttatcaggaattaatggatgactgcaagtaccattttccaaatctacacctgaaagtgttgaaatagtctcaaatgttgtttccaaagtagaagcaacagatgctactttatctgccgccagtacgtagaggtctccagacttagaacatttcacaacagcatactttgattcaggcatatagcaaacagcttcattggctggaatcgtccaaggttgtgtggtccagaccaaaatactaacaggagatgaaccatctataagagatgccaattttggagaaggctttaagagaggaaattttacatatattgaacgactgacatgctcaggattatattcaagttctgcttcagccaatgcagtcctagatgacggagaccaaaacacaggtttgtaagatcgataaaccaagcccttatcatacatttggtaaaaagttctcaactgtttggcttcatacttcccatcaaatgtatagtagcaattattccgatctgccattattcggacgcgtgggcggacgcgtgaacggacgcgtgggtcgacgatatcccggaaattccggaccggtaccagcc

SEQ ID NO: 149570 - DNA, 936 bp, Homo Sapiens
ggtacgtagaggtctccagacttagaacatttcacatcagcatactttgattcaaggcatatagcaaacagcttcattggctgggagtcgtccaaggttgtgtggtccagaccagtatgctaacaggagatgaaccatctataagagatgccaattttggagaaggctttaagagaggaaattttacatatattgaacgactgacatgctcaggattatattcaagttctgcttcagccaatgcagtcctagatgacggagaccaaaacacaggtttgtaagatcgataaacgcaagcccttatcatacatttggtaaaaagttctcaactgtttggcttcatacttcccatcaaatgtatagtagcaattattgccaatctgccattattccccagacgaataaatgctgatttctggtttctcaatggctgctttagcaaatgatctagctttctttctaatttccatagctgaaagattctgagcttctctaccaagttctgataatacttttatttcaatgggcaacccatgacaatcccagccgggcacaaaatgtattttggagccattcatcatatggaatcgattggctatgtctttcaaaatcttatttaaagcatgtccaacatgagggtcaccgtttgcataaggaggtccatcatgaaggcaaaattctgtctttacttttctttctctttgccatgaataaagttctgaaaatccacatttctgctggatctccagctccgtgtccggctgctggcggcccagcagcttcatggggaagctcgtctgcggcagcagcaccgtgtcccggtatctgccactattcgagttcggctggtggttactggccccggagaccgaccgcaccagaagcctcttcgtcgccccttgccatcccgggctgcagggaaggcggggcgtcccc

SEQ ID NO: 149571 - DNA, 957 bp, Homo Sapiens
  misc_feature (92)..(101): n is a, c, g, or t
ggaattgagggggatttttctcccagaaacatctccccaagctgttcatctgaattggcaccccatcaattagctctgccggtggtcagtgnnnnnnnnnntaattcagcggaatctccccatatcgaacaatctgaccaaagtctccatcaaaatagatgctcgtttcctcaataagatctatgatacctttaaaattaccctcccaagcccatgggtatctgcataaacgctgcattatgatttagtttagacctcatttgctgcagggccctggctgggttggagcccattcggtccaatttgttaataaaagttagaaacggaacgttgtagcgcttcatctgacgattgacagtcatggtctggcactgtacccctccaacagcacagagaacaaggactgcaccatccaacactctcagggccctttccacttctattgtgaagtccacatgcccaggagtatctataatgttaatattgacatctttccacatggtgtaagtggctgctgactgaatagtgattcctctttgtctctctagttccatggaatccatgacagcaccaactccatctttacctttcacctcatgcatctttgcaattctgccagtgtagtaaaggactcgttctgttaatgtagttttcccagaatcaatgtgagctgagattccaatatttcgtatttttttcattaggaatcacccctgatgaagaccatcggcaggccttccaattaacctgcttcctctgccagcctagggaggcgggggcccttccgcgccccagagccgcgacggctgcggctcccaggagtctcatggcaagcgcagagcacgcgtcaaagtcccgtgacgccgggtgggttcagctgccggtaacgcaccgggaagcggtcaaagtcggacgcgtgggtcgacgatatcccgggaattccggaccggtaccagc

SEQ ID NO: 149572 - DNA, 1758 bp, Homo Sapiens
tttgaagaggccccttgtcacctccggccaaggccggcccctccaaaccaagtggacaaccgccaaaagggccatcgccccttcaatcgccatgtaggggcccagcacacccccagggccccacgattcgaagcctcgcggtgaactcggtaggatcaccacgtacacagatgtggccacgatgccagttcatgacgggaggtctctccaagaagatgaaatataattgccacgatctaccccggcgcagcaaggacaggaagaggaagggtcagagcccaggaggccagtggcacagaccaggggatcagcccgggggttggagtgcggagccggcggctgatctccacacccaggcccacacccaggactccggtcaggcaggtgatgagtccaaagatgagactgtcagaggaagagcaggagtctccgggaaggcagggtggggtctccccaaggaccacgcgggaacgcagcaggaatgccggagcccacagagccagggagcccgtgacaaaggccacagcagtgaagcccagggaagacaggacgaaactaggatttcttgccagagccctcagatctgcccaccacgaggtggggttcaggggtggcaaatctgagtggcgctccacggctccccttggcggctcccgcactaccaggaacagcagcagaacggccaccactcctagacccggtgtcaccctcagagcccagtgccagtctccagccatatccttcactttggagcctgcaatgtagcccagaccactgcccaccggaatggcaaagtagaagatgctgagcatccggctccgctggtcggccacaaagaggtcggcaatgagagtgggcgcgatggtggaataactggcctccccgacccccaccaggccccgggtcaggaggagcagccagaaatgctctccggggatgaaggatgaccccagtgtcaccagggaccagaaggcaatgcccccgcacatgagatacttccgattgtacctgtcacccaggtagccaaacacaggtgccaacaccatgtaactggagatgaacacggtctggatgagcccagagctactgtccccgatgttgaagaactgctcgatgtcgggaaggacgccagccacggtgaagcggtccatgtagttcaggagattgatgtagcacagcaccgccactatgagagccgaacggccgggagacaggccggtgatgcgctgcagcccctcctggtccgggacctcgggctcctcggacttcgggttccccgtggaccctggcaaccccggggtgccaggcactggcccgtcgtccgggtcatccgcctggctgaggaagggcgcggtgtcggacccggccatggtcccggggggccgcgcccgcccgcgctccggtcccaccgacgatcccacctgcgaggggaggaggctggagaaaggaggatggaccgaacacaggcgagggaagtgcgcccggagacggggagcttgccctgaagcacagagcaccactgagaagggacccgggccctgtcacgcctccccgtctcagtagacacacagcgcggaggggacgtgcggaatacacgtgatgtcggggacaggagcgggctgaagagggcacgatcccacgcggaggccacccctcacccggggtaggagcccgctgcacttgctgtcgctcagcccgggcgctgcaccacggcagccgccatgttgcatcctatagattccgggaccagtaccacca

SEQ ID NO: 149573 - DNA, 930 bp, Homo Sapiens
gattttcgggatatcgtcgacccacgcgtccgagtgaaggggcatgttgatgggtgacccggggagaggtacccggccagaggcgagtcctgcggagtggtagcgcgcacggcctgcggtgtgacacccagcccctgccagtcccccatggccccgtggagccgagaggcggtgctgagtctctatcgggctctgttgcgccagggccgacagcttcgctacactgatcgagacttctactttgcctccatccgccgtgaattccgaaaaaatcagaagctagaggacgctgaggcccgggagaggcagctggagaagggcctggtctttctcaacggcaaattggggaggatcatttaggatcctccaagggaaagaggacaaaggtgccttctgtagacactcctgctctcttccatccccatcttacagatgtattaagaagcctcagatgagcaatggcaggcgctggtgagcgcaaaggcaagaaggatgacaatggcattggcacggccattgactttgtgctctccaatgcccggctggtgctgggggtgggtggagcggccatgctgggcatcgccacgctggcagttaagcggatgtacgatcgggcgatcagtgcccctaccagccccacccgcctgagccattcgggggaaaaggagctgggaagaacccaactggatgggctccccacgactgctgaacagggacatgaagacgggcctgagccggtccttgcagacccttcccacagactcctccaccttcgacacagatacttttcttatccggaacgggacctcctgtgaagagccggcaacactgctggatatgcactcgactctgggcattctatgcctcgatgctatgacttcatacggggtctactcatttgctgtgaaactgttttggaacaatcgtttg

SEQ ID NO: 149574 - DNA, 1507 bp, Homo Sapiens
gcatttgaatgaggggggtccacgtgtgaccagattggtcgcacccttgccacaggtaaccctcccccttgcctcccaaagttgttgggtttagcgcttgaccccccgttcccggggaaataactttttagaagctttttaaatgatatgcttataaaatgacagacatgagtgaaacatcctcaatgacgataatacacaagtcacaagtttcctgtgagtgaaactgagcagtacagagtcaggctgactgtttaaaagccagattcacttcttggtatcaccgagctcttactctgaaattgtgccaggggagcttctgagcatcactggtctcaagtttaataatgcaaaaattccattttgtcatctaaagttttggagaagaatccctttggcactaatgatatttactccagcaccatctctcctttttggtgcctcttcattcttgagtagggacttattgtatcatccatcacaaaatcatacagtacttttatccaggaattgtagtgagggaggttgtcatagtattcagctgctattttcctcaccagtggaagactttttccaggaatgttggggaaatcatgatgttcattatgataacccacattgaaggtaagtaaattcagaggcccataatatgagtaagtttcatgaccctttaagaacatgtaatgctcagctataaaatgtccagaaattgggtgcaaacccaggccaagtaaagatgctgccaacatgtagactaaggatttaattcccaaaaagtaataaattaaaatgtcaaaagtgacctgtgccacggtattgataacttccagatacgtaattggtttggggttgatgaacagaggtcgaaaggcataaaagagaggctgaagaataacccatataaactttctgaaagcggtacagaagaaccagccctcaaaatcggtaggaatatctacatcgacgccatcagctccaaggtaccgatgatgatccatgtgatacctcttaaaggaaattgaatatggaatcccaataggaagattagcaaacattccaaaccagcgattccacattgctttgcagttgccaaaggcagcattgtgggcaatctcatgaatagccagagtcattgagtggttaatgcaactgccaaacgcataggccccaaatatgacccatttccagtccaagtcttttactatgtaaaatgcacccaactgggtgagaaccatcataattataatccatatcaaattgggatcaggtttcatcaaggactttatctctggatactttgccaggatctcccggcgccggtcggcgtgcggctggtcggtgtagacccactcgaagtcttcccgcgagacgcggctccccatggcgacagcggtggcttgcagactagctgtcggctctcgctcccagccggctgctcagaggtggcggcggcggcggcggctccccggctggtcctcgtcggaatcgccacccaggcctcgctcct

SEQ ID NO: 149575 - DNA, 880 bp, Homo Sapiens
gggaacggtgggagccgccgtgtgtggagaagctgctgccggtgtcatggcggagctgagtgaggaggcgctgctgtcagtattaccgacgatccgggtccctaaggctggagaccgggtccacaaagacgagtgcgccttctccttcgacacgccggagtctgaggggggcctctacatctgtatgaacacgtttctgggctttgggaaacagtatgtggagagacatttcaataagaccggccagcgagtctacttgcacctccggcggacccggcgcccgaaagaggaggaccctgctacaggcactggagacccaccccggaagaagcccacgcggctggctattggtgttgaaggcgggtttgaccttagcgaggagaagtttgaattagacgaggatgtgaagattgtcattttgccagattacctggagattgcccgggatggactggggggactgcctgacattgtcagagatcgggtgaccagtgcagtggaggccctactgtcggccgactcagcctcccgcaagcaggaggtgcaggcatgggatggggaagtacggcaggtgtctaagcatgccttcagcctcaagcagttggacaaccctgctcgaatccctccctgtggctggaagtgctccaagtgtgacatgagagagaacctgtggctcaaacctgactgatggctccatcctctgtgggcgacgctacttcgatggcagtgggggcaacaaccacgctgtggagcactaccgagagacaggctaccccgttagctgtcaagctgggcaccatcatccctgatggagctgacgtgtactcatatgatgaggatgacatggtcctggaccccagcctggttggacacctgtccc

SEQ ID NO: 149576 - DNA, 901 bp, Homo Sapiens
ctggaatacgcagagtcagtaagaccatggctacgtcctcgatgtctaagggttgcttgtttttaagccaaactccaaaaagagaaagatctctctgccaatagaggactattttaacaaagggaaaaatgagcctgaggacagtaagcttcgattcgaaacttatcagttgatatggcagcagatgaaatctgaaaatgagcgactacaagaggaattaaataaaaacttgtttgacaatctgattgaatttctgcaaaaatcacattctggattccagaagaattcaagagacttgggcggtcaaataaaactcagagaaattccaactgctgctcttgttcttggtgtgaatgtcacagatcatgatttgacattcggaagtctaacagaggcccttcagaataatgtcacaccatatgtagtctcattgcaagctaaagattgtccagatatgaaacattttttgcaaaagttgatctcacagttgatggactgctgtgtagatataaaatccaaagaggaggaaagtgttcacgtcacccaaagaaagacacattattcaatggattcactttccagttggtatatgactgtcacacagaagacggacccaaaaatgctaagcaaaaaaaggactacttctagccaatggcagtctcctcctgtcgtcgttatcttgaaggatatggaaagctttgccacaaaagtactacaagacttcataattatcagcagtcaacatctccatgaatttccactaatactcatttttggaatagccacatctcctattatcatccaccgattgctttcctcatgcagtatcatctctattgtgcatagaactggttccaatctttggccttgtaaaggagcacctggactaccgtaactcgac

SEQ ID NO: 149577 - DNA, 893 bp, Homo Sapiens
  misc_feature (249)..(265): n is a, c, g, or t
  misc_feature (276)..(279): n is a, c, g, or t
  misc_feature (303)..(381): n is a, c, g, or t
  misc_feature (383)..(383): n is a, c, g, or t
  misc_feature (386)..(390): n is a, c, g, or t
  misc_feature (394)..(410): n is a, c, g, or t
  misc_feature (412)..(418): n is a, c, g, or t
cggtagagagggacactgtcccaggaagaacatccactcgtggaaatatttgttttagaagagaaacatctctgtggtcgccccaccgcggggagtttgttttatgttggggtggagagtaaccacgaccctctgtggttgcgccgccgagtgtttttgtgggaaaaaaaagattggggccgccttgttctttttttcccttaggggcgcgccggccccccaacaaaaggtttttagaaaatttttttnnnnnnnnnnnnnnnnncccacccccannnncggtttctggtgttcggatataannnnnnnnnnnnnnnnnnnnnnnnnnnnnnnnnnnnnnnnnnnnnnnnnnnnnnnnnnnnnnnnnnnnnnnnnnnnnnncngcnnnnngcgnnnnnnnnnnnnnnnnngnnnnnnnttccataataacacaaatttattcacatggtatttatgatagtcttacaaagcactacatgttagctcttagagagatagaatgagaatagggagaaatcttagtgataagtgagtatagttgctcattttacagatgaagagacttagggaaaggttaaacagcagggccaaagccatagagctggtcaggctcaggatcacactccaattcctttacttatagtccaggtgattccataactttgtgctctagcaggtagaattactttggaaggtgtaattggattctcttttcaattagagccctggggtgtcctcttatctctttgaccaatgccttggaacataaatgctattggcagagagatctttctctttttggagtttggcttaaaaacaaagcaacccttagacatcgaggacgtagccatggtcttactgactctgcgtattccagatgcactcgggatccc

SEQ ID NO: 149578 - DNA, 1024 bp, Homo Sapiens
  misc_feature (537)..(857): n is a, c, g, or t
gcgcggcgagatggcggtccgccatttgtggtccgaccggtgataaattaacgcgggccccgtggcggggcgggcgtgcgttaaagtggaggttatcgcgccggcggcgaggagcgcggccgcgggtacacatacccccgtcccaaactaagccccgcccgctccccgcgcggcgcattatgaagatatccgaatacggcgggcggaggcgcgcgcgataatgcggggcaaaccgataccgcccgccgctgccctcccggcggcccgagaacgggggtagataaacgggaccggcgcgatacccggcgccggcctcctatttataccctgtccctggcccgccccggttcccggatcgccttatcgtgcgcggccacataccgggggggtgcgggcgctcaacgaagggcgctgttacggtgcgttcccctacaatagcggtgaccggggttgggccagcggcggctccgaccgcgattacggacgaggtgtggcgcggctgaagcatagggctggcaatgctgggtattttcaggnnnnnnnnnnnnnnnnnnnnnnnnnnnnnnnnnnnnnnnnnnnnnnnnnnnnnnnnnnnnnnnnnnnnnnnnnnnnnnnnnnnnnnnnnnnnnnnnnnnnnnnnnnnnnnnnnnnnnnnnnnnnnnnnnnnnnnnnnnnnnnnnnnnnnnnnnnnnnnnnnnnnnnnnnnnnnnnnnnnnnnnnnnnnnnnnnnnnnnnnnnnnnnnnnnnnnnnnnnnnnnnnnnnnnnnnnnnnnnnnnnnnnnnnnnnnnnnnnnnnnnnnnnnnnnnnnnnnnnnnnnnnnnnnnnnnnnnnnnnnnnnnnnnnnnnnnnnnnnnnnttatttttattcacaatccaatctggcagctaaaagaaaagcagtctttggatgtagaaacctggttttctgaagagcccagctgtaagacctggcttgtcattaggcttcaacactatcatggaaacacagaaaactctgtttttgattggtttacctgcctcata

SEQ ID NO: 149579 - DNA, 751 bp, Homo Sapiens
cggctttttccagacctcctaccttttagtctactttgaaaggtgaaagaaagaacatcgtttcaggaataaaaatgcacagtagtagttatagttaccgtagcagtgattctgtgtttagtaacactaccagcactcgaaccagtcttgattcaaatgaaaatcttctcttggttcattgtggtccaacactgatcaactcttgcattagcttcggcagtgaatcctttgatggacacaggttagaaatgttgcaacagattgccaacagagttcagagggacagtgtcatctgtgaagacaaactgattcttgctggaaatgctcttcagtctgattctaaaagattagaatcaggagtgcagtttcagaatgaagcagaaattgctgggtatatacttgaatgtgagaaccttttacgccagcatgtaattgatgtacagattcttattgatggaaaatactaccaggcagatcaattggtacagagggttgcaaaactgcgtgacgaaattatggccttaaggaacgaatgttcttctgtgtacagcaaaggacgcatactgacaacagaacagacaaagctcatgatatcaggaatcactcaaagtttaaactcaggatttgcacagaccttacaccctagtctgacctcagggctgacccagagtttaacaccttccctaacctcttctagtatgacttctgcctgtccatcagggatgacttcccgcctgactccatctgtcac

SEQ ID NO: 149580 - DNA, 858 bp, Homo Sapiens
ccatggctgtaggtcaggtttcaaccccttttatccccaacttgggaaatgcaaaacagtaatggatttttttaaaaagtgaaactatgtactttttgtttacatagtaatttagattaaagtcacagtcaaatttgcagtgactaaactcaaacttacttaaattagaatattatacagatctcctcacgtacagcttcgttgtttgactaggtttttagttaagaagagttattctgtaacaggcaactggatggtgagtttgaaagactaatctcttagattagactgttggcatgggcctctcaatcttgtcaagctggatgaagtctggcaaaatctaggcacttctacaaagtctctcttataaaacaactttaaaaatatacttgtaaaataataccttcaagactttgtttggtggggtatgaagctcataccgtgcaaagtttctttttcaatctatttaatgttaatctagaatcacatgattcaactgtggcatctccaggcaaaccaaacaccacactttgatgtgtccccagtacttgtgcttgaatttccattcaaattttagtcgtgcaggacaggtatcggttttacttcacctctcatctttgctgcagcatttatattgtcaagaagtgaaacataccctttgatccagtgggtaaatgacatgacagtaattagagctagaatcgaacctgcccttggaatatgtttcttttttaactaatgctaattgtttattgctaaatttgaaatattctgaatcgaaatgagtaaactggctggactttctgcatcagctatagttatggagataagacaatattcctaggacagaaactatgt

SEQ ID NO: 149581 - DNA, 966 bp, Homo Sapiens
  misc_feature (302)..(302): n is a, c, g, or t
gggaattcccttgacctataaaggttaacccgtggtagacggtgaggaccgccatgtgtgggagggagcccctttgggattttggggccccaccagaaaatggcccttaattggtgggctctttccaaggccgggggggcccccgcccttttctcgtttccccaggttaggaggaacaggcagttccccagatccttgcggggtgtcctccagggggctgtcccgggagtagccccatggttttgggggtctgtgaagatctcatggtcattgccacctggcatagttttgtctccaaaganaataaatggtcttataaccgtcattttccacatgtcgcagacagtatctcttgtcccatccatcaggaaagacatcaaagctgatctggcctcctatggaaaacgtgaggccttttccagcaaactctttccgtagatctgctacaaacttttgtcttatattttcttttttatcgagttcgtagaactcaatgcgttcttcttggctgcagcttcttccaataggggacacgtttaacatcccatttcggaattcaatgaaagtacccctcttcttcgggagtttaattttcgcaatgtagctcagacagtagttgattaaatcttggattagggcctcacccagatgactttgaatattctgtctacacaagagtttcccatctttgtatgctaccaagccattttctggaaacacataatcgtatttttcaaccacatcatttctcagttgctcctgcactttctcaaagtccgatccgcctaccactccgattttgatcttctgcctcaatttttgtaggaagtcatccatttctttggtaattttctgccgcggggcggtgagggtcccatccacgtcgaagaggcagagcgctgggccaggcgctgccatgtccccagtttctagccgcaccttacaagacacgttgcggacgcgtgg

SEQ ID NO: 149582 - DNA, 1436 bp, Homo Sapiens
  misc_feature (80)..(80): n is a, c, g, or t
  misc_feature (107)..(107): n is a, c, g, or t
  misc_feature (126)..(126): n is a, c, g, or t
  misc_feature (1183)..(1191): n is a, c, g, or t
ccgaatattccccataggtccagcagccttggtctggccagtactgggcgcacttgcactcctttctctcctttcaggtnggtaaccatgacgatggtggctgtgtnttgttcccagatcatccgnccagaaatcattcaccgttctttcttttggtccttgtgcagcaatgaatttgttcttttcttggtagccgttgatgaatgaagcattgatgtaatcagaatctggaaccccttcaaccggtgtcaggtggactctagagtggtcataaggcaagatgtttacatatcgatttttttccttgttttcctccttggaagcagcctcacaggtggcctggataggacatgcagggagagcgttgaattcctccctgaagagcttattgtcgtctgccattctccggttaatttcctcttccagcttgtccacgggcaggggtgggtatttcctgttggtgcttggggatctggccagaagtggcacactctggggctccacatcctcagtgcggccgttggataagcggaaagaattggaatggctcccagcttgcttgtatttcttaaaccttaacatgtacaaaactatgataataaacacgatcactagcagagaggacagggccaccatcaccgcaataattggtgtctcatctgaaggagggaaagtttctggagtggttgctgcggtgctggaattcccctcccagggttctgttctggcatccgtgaactggttatctggaagccacgttccatttggtgaaattgtaatgcctatagaattggtgcttgctgttcttgtggtcccattgtcagagtctgaagaattgacagtggttaaataggtgggtcccagagttatatttgggctgaatgttggtgccacagaaagagaagttagtgaagaagttggatttgaagttttggcctcttctttaactggttctgccgttgatgagttaattaatcttgtaattcctacagaaggtgcaactgtggtagcattgttggcactgacacatatcagaccactgccgagcagaacaagaatgaaccaggaatccatgcttattagcttcttttaaaaagttaattatgctctttgaacatgtgtccttagttatttgaactgcatcatccattaccactcagtggaattccataaatacctttgnnnnnnnnnagttgtgtcacagagtcgggcgttgggcagggaccgctggggacagaggacagcaggctcacgcctccggctccagcgcgcaggcgtcttcagggccagccacatagccctcagggccgccagccacggcccgcaggcatccgagccccgcgccggcggcggcggcctcgcctccatggcgaggggaagcggctgaggggcgactgggcgggcgacagtgatggcggcagcggccggggtcacga

SEQ ID NO: 149583 - DNA, 638 bp, Homo Sapiens
cttgttttcctccttggaagcagcctcacaggtggcctggataggacatgcagggagagcgttgaattcctccctgaagagcttattgtcgtctgccattctccggttaatttcctcttccagcttgtccacgggcaggggtgggtatttcctgttggtgcttggggatctggccagaagtggcacactctggggctccacatcctcagtgcggccgttggataagcggaaagaattggaatggctcccagcttgcttgtatttcttaaaccttaacatgtacaaaactatgataataaacacgatcactagcagagaggacagggccaccatcaccgcaataattggtgtctcatctcttctgtccttcgagtcagaattacctgaaggagggaaagtttctggagtggttgctgcggtgctggaattcccctcccagggttgctgttctggcatccgtgaactggttatgtagaagccacgtttcatttggtgaaattgtaatgcctatagaattggtgcttggctgtcttgtggtcccattgtcagagtctgaagaattgacagtggtttaataagggggtcccagaggtatatttgggctgaatgtggtgccacagaaagagaagtagtggaga

SEQ ID NO: 149584 - DNA, 1164 bp, Homo Sapiens
  misc_feature (86)..(102): n is a, c, g, or t
gaggattttccacatgattcgctttgccccaagaaaatttttagattgtttcaaaataatttttagaaacccagatgcccagtttnnnnnnnnnnnnnnnnnctgtttcatgtttcatgtaatttctaaaatactcgattgtccaaatataacaacttaaaatcaaggcccaatgtaagacactatcatatttgcccgatttacttaacacacccaacatgataagttctcattggacacttggcaaattatttgttggggaggttaaaagcatctaaaatagcccttatataatgggggtggggtggggagaatgcaccagataagtttagaggatagaatttgcaagctgaagctgtcttttctgaaaatttggatacagttttacaactagcaattagagaaatattttattggttcttagccttattcttcagttgttcatttcagtgtggtatgaatagcctacactagagtgtaccatggggagaaaattatttacttgagtaaacataatgtactttagtaatatcagtaggcacttcacttgtgagatgagtatatacctcactcaaaaggataccatatcatgccctagtatactataacagatcccatataaagatacgcattaaaagtaacaattttaaaaagtgcacattttgagcatgcacagttggagctgtgcaaacagcccagtgtttcaaataaatacaagtattactagttaatttttatcaaaatatcttacagtatggtaaccatttacaattattgctctattacaagttttatcatcaaagagcacttgttgacctgttatataataccgtatatattaatactgaagggtgcttaaactgtaacttaatcagtttggatcctggcattgttccaaaataattcaagagaaaccctgactggatcttgatttaccaaagaaaatgttttatgtgtatagctgagttcaatgcaatattccaaagttaaagaatttttcctcaagtaaggcaagttcacggcattgatggagaaacggtgctgagcaatggcttctattttcacaatttgttattttgccaattatttatgaccaattaccaggatctcaagtatctggatatcagtttcatcaccctttcaacaactaagtacatcaatgct

SEQ ID NO: 149585 - DNA, 924 bp, Homo Sapiens
  misc_feature (672)..(732): n is a, c, g, or t
gggctgtggcccccatttttcccggtccggggcgctaccgttaccatgggtcggccattccccatttggtttcgctttaggaaagtcccttctttccctaagggctgcccctgggacggttggatcccccataatttgcaggcggatgtgggctccccagtgggcccccattccaggccctggtcattgcagcagcccccgcatcgcatcaggggcacacaggatggcttgaagatgtactcgatctcatcagggtactcctggaagatgtccaccagggtctcgattggatggcagtagctgcgctgatagacatccatgaacttcaccacttcgtgatgattctgccctcctccttctgccatgggtgcagcctgggaccacttggcatggtggaggtagagcagcaaggcaaggctccaatgcacccaagacagcagaaagttcatggtttcggaggcccgaccggggccggcgcggctcgcgctccctctccggctcgggctgtggggcggcccgctctcctcggcgcctcggcgagctactcttcctccccggcccgaggcccgggccagggcctggggagcgcgcgcggctggagcactgtctgcgcacaccgccgcctcacccgtccatgagcccggcttccgagcgccgagtcgccactgcggnnnnnnnnnnnnnnnnnnnnnnnnnnnnnnnnnnnnnnnnnnnnnnnnnnnnnnnnnnnnncccgagctagcacttctcgcggctccgctcggctcggcttcccccgcgcggaccacggctcctccgaagcgagaacagcccagaagttggacgaaaagtttcagtgcgacgccgcgagccccgaccccctccaccccgcctccgggcgcgggctccggcccctgcccgcggctcgccgccgcccacgcgtcc

SEQ ID NO: 149586 - DNA, 1289 bp, Homo Sapiens
tgtgagctggcaaatcaaaagaacagtaagtgtgctgagaaaaggcttgtcagccctggcccaggtggggctttgtaaaagcagatcattttcaccaggtggggctttctttgcagagcttctaaagggcatcgacctaggcagtctggtggacaatgaggtggacctgaagatcgaggactttaatcagaatgtccttctgatgtcccccccagcctctgactcagggtcccaggctggcttctctccctactccattgactctgagccaggaagccctctattggatgatgcaaaggtcaaagatgagccagactctcctcctgtggcgctgggcatggtagaccgctcacggattcttctgtgtgtcctcaccttcctgtgcctctcctttaaccccctgacttccctgctgcagtggggaggggcccacgactctgaccagcacccacactcaggctctggccgcagtgtcctgtcattcgagtcaggttctgggggctggtttgactggatgatgcctactcttctcttatggctggtaaatggtgtgattgtcctgagcgtctttgtgaagctgctggttcatggggagccagtgatccggccacactcgcgctcctcggtcaccttctggaggcaccggaaacaggcagatctggatctcgccagaggagattttgcagctgctgccggcaacctacaaacctgcctggcagttttgggccgggcactgcccacctcccgcctggacctggcctgcagcctctcctggaacgtgatccgctacagcctgcagaagctacgcctggtgcgctggctgctcaagaaagtcttccagtgccggcgggccacgccagccactgaggcaggctttgaagacgaagctaagaccagcgcccgggatgcggctctggcctatcaccggctgcaccagctgcacatcacagggaagcttcctgcaggatccgcctgttccgatgtacacatggccgttgtgtgccgtgaaacctggcttaatggtgcagaggagaagatcccacccgagcacactggttgagatccatctgactgctgccatggggctcaagacccggtgtgggagcaagctgggcttcctggccagctacttcctcagccgagccccagagcctgtgtggccccgagcacaatgctgttcctgactccctgcgctggctctgccaccccctgggcccaaagttttttctggaacggacctggtcctgtgaaatcacctgccaaggagagattatactgggcccagaaga

SEQ ID NO: 149587 - DNA, 905 bp, Homo Sapiens
tggccctttgtcccagcccccggccgaacgagggaccgaggggggctgtcctcttgccaggggggtccgtgtttcaccactgacagcggcccaccgagccaccccccactgcgcatgggctgcagcccaggggctgggggcgatcggcgctcctcgggggctaatcttgcacactgggccgtgagccaccaacatgaactccagcttctccttctccttctgcagctcagcaatctctttctgcaggcctgacttctcctcctccagctcctctgtctccgcctgcagcttctctgtcagctcccggcgtcggttccggcacttggctgcagccagcttgttcctctcccgccggatgcgacgcttctcctcctcttcaggagacagctgctcatctctcctcctgcggcccacggtggtgccaatggtcttgatcacgccaggtcttgggagggccatgtgtccagggacagaggccaggcccggcagggggctgtaggggtgcgagcgagggtatgggttggacatggaggtgatcactgtgggctgcaccatccactgcaggtcctggctggtcgtgatggcgttgatggtggggatgaatgcactgcctgagccaggcatatctacccggaatttcttgccaatccctccggtttgaaaggcgcctcacacactgccgggccgaatgggcaggcgtctatgcgaaaccccgtgcactggttattgctaattgcaaaatactcatgtgttacagcatgctaggaattagccaacagctgctttttgcttcggtaatgaggccctattacactctgctggactgagttctcttccttcttcctagcactggtttcctgtctgattttcttccaaaaccgggaattgcctccgctcacatcctg

SEQ ID NO: 149588 - DNA, 892 bp, Homo Sapiens
ccaacgcaaaggaaatttttccacgggggggttttttgggcgcagaatggaccaaaaattgcttgggggcctcaaaggcgtgtgaaaattttccttttaccgaatgccctttctttcctgcccgttgttaattccgattggttggctctttatgtggatgggtggtgaactctctgtcccatttttaggggctgacctccatttttacgattaagacttctaattctgacatgacagcaacttttccagcacaaaaagaaacctcaacaggagtgatattatctatgtgtataattaaagaacgttcaaagtccaatagtgagaattcctcattaatgatctggtacttcaaactaaataagactaatttatttgtgcagccaacgagaagggtctcctttcacagggcaacaggaaatgcacaagggggcctccgaaagcggcatttcaataatgtacatctggtctctgaaggctttgctgaatggtccctccacattatgcccaatcattcggatacacacacgagagttttcagtccttttatttctccagttcacataagcacgtagaaatgtagctttgtttttctcttcaattgctaccaaataatctccagcctcgctgtaggccaggcgcaacacccggcccagcgtggagaaggcgcaccgcggctggcacagctcctggccggccaccgcgaacgcctccaccttgcagcccgccgccacgaaaagcgcgtcacgccccccgccacagaaccggtccggctccagcttgcagggcaccacctgctgcgacccgaacgggtgcaggttgtacagctgcaccatcccgacgtccggcgggatggcacagcctgcccgccctgcagggcgcccggagaccccga

SEQ ID NO: 149589 - DNA, 1220 bp, Homo Sapiens
agcagccaaagggtagggaggtggcaggtagaatgccaagttgtccgggccgcaatttacgacccgtgaggggtggcgggggggttcggggccaatttcttcccttgttctgcaagccgtaaagtgtttgggatttttgagggaggagcgcgggggttgtccgccataattggggccagggctgggtctcggagacccaggtgattccccgggggtgtccagataaatcccaacccaccctgggcattccccaaagttctgggattaccaggacatgaagccaccagggctggggcccctcatgggatgctttggtaaggctccgtatatttctttgcactcagctaggcggtgccctcaggacctagttcccaccccagaaacaaagagtgggcgctgtgaattgagaagaaaatgaatgatggggcttgtgaggttcagcatttattcctcaggaggtgaccaggcttggtcagaggcacctggattctggggggcagctgagcccctccctgctggctcaagactggcctgggcactgcagtggggccagtcctggcccctgacaactcaagctcgtaggtccagtctagactccagggacctccagggccagcccaaggctctttgaagcaagaatctgagtctactaacctgccttgtccaacccaacaccccaaactcctcagctagctgcatccctggtggctacagcttcagatggctcccccatacaactcatagataacgggttctggggcctcacccctaattcattgggcccaaggataccctagtattagcctttcctaagaggaggagtttccccaactctcccgaaacatccagaatgttcccacaccttctcctcagtctttctttcctgaatttcttgggagtggaccattcctgggcactgggaaccagaagtaccaaactaccatctatctctcagtgcctctgtttacccatttgtaaaacttgggctgcatttcctgcttcttacggagttttgggggccattaatattaaagccccggatgatctctggaagacagggactctgttttcatgattttgtcctctagctgccccacaacctccctggaaccttctggaatgtgctgcacaggtcaaactagagcggggaacccaagaactggtgggggccggcaagtggatggcctggggcctgggaacattgaaccatggcagtgatt

SEQ ID NO: 149590 - DNA, 1618 bp, Homo Sapiens
gctgggcctttgcttgtttattttgtttcccgactcttctcttggggttcaaagccgctgaggggtggggtgagtccaggcaaggagtgaaggtcagggggaggtgcggaccacataaacagcgtcactgcacgcatcaccacaggcggcacgatgaacgaggaccacatatgccaagcacggcacaaaaggaggccacgtcagtcacagacacagacaccacagcaaaggtggggaagcggagaccactggccttccgtgtgcaaaggattctgggaagatgggtggagtttgcatatttaaagacagctgtcagaggcaggaaactggggagggggtcccttgggggaaccgaggggtcctggaagtgggaggggctccccaaggtattgaatgagttgaggggagctggtgaagggaaatccttgtggggctaggtgttgggtggcatttgaagatgtggatcttcagagggatggaagatccatgggaaggggctcaacagtaggggtttcttgaggatttggaaaattatgatgggaaataggtgtgctggagagatttgggaccaaaaatagggttttccaggaacttcagggctccaggaagggattctgcaatgggttgcctggtatttgggcacttccaggaaggaaaacgccctctggggaaaccaggggcggaggtcttcaggaatgtggaggttctaaaacagaagtagatcctgaagtgaccacgagtggggttctaaaaggacttggggattccacatgtgagaaccggatttagggccaggaggagtcaggtttctcaaggtactcggggatcttgaggaatgagaggtggaatcttggagaaccgggagatgggttctcaagggatttgggagactccaaaagtgagaaattgattcagggcccagagaagggttgcccagggattttggggttctcagagtggggtatcagtcggagaagaggctggcgaaagacttcctcaggctgcggatggtctcagctttcacctcgtcctggctaaggctgggcctgggcggggctggctttgagctgggggtgcggaggtccccctgcagcggcggtggcgggtggcggcacgtcctggctgggtttctgggccagctgtggtttgggacgtccagcggggcccgggccgctgggccgaggctgctgcgtggtgggtggcccagtgcggggcacgggacccgcctggctggcctggcgtgtggggccggctgggcctgggggtttctggggcgggccctggcgctgctgcccgcccggtggggccccagaggcctttggcggagccgggccagagacggatgtctgacgggtagcctgtgggggggcccgcctggcgctggggagacggagaggcgggcgggcgggctgctggaggcgccccggggcctcccgccactggccgggattggcggccttgaccctgggtcggcggcgcggcctgggacgcgggctgctggggcgctgaggtgggacttggaaggcgctggggcagggggctgccagctgggggtccaaggcctgaaaggtgctgctggccctgcggggacggagtctggccatgggcccacgcgtcc

SEQ ID NO: 149591 - DNA, 1059 bp, Homo Sapiens
cagggtgcccccaccgctgtttggttttccgcgcccctctttgcctcccgccttccgggaggtggatccaccaaacccaaagcctggtccaagcggcaaccagcgcaaattcgggcggaaccccttggggcccagacccttgtaccaaagctcgaactctgcggcagactccagattggccattttttcagaggaggcccgtttctttctattgctatatgttctctcttgcttggaggaagcttcagtgttggagcttaaagttatctccattttactgccattttgggcgtcaggagacaaactctctccttgtaaacgggttaagcctttgggatcatgaccctggagaagtctctgaatactagaaagattctagaaacgaaggttctctgaggatgttagggggaacgggatgcagagacaaagcctcacttgctagcctttactagccaaactcaagacaacgcggtccctgggagtgggaagagttttgtcttcttgtcagttttttgcagtcttgcaaaggagaaaagtcataacgtcctaaaaggactctggggaaaaaatacttcttttatttcagtagcaagcacacaggtctcggatttaatgagcaatacgctctaaccggcgggtggagcggaatccctaggaaaagttcaagctgtcgcaggtagcttgccccaactctcccgcatcctggcggaaaccgaccgggtgcatgtcgccgggtgctaaacggtagagctaagcgaggccacagcgccagccgggggtgtgaggtagcgaacagcctcctgcacgcgagcaaagcggctgctcgctgccgaggcgccgcaggcccagtggctccggcctccagggcggccccgcggcccagccagccccaggcctggcgaagctgccgcaacccgatgcgcagctgaactccacgcccggtgtgagctcggactggcgactgcgacaccggtaccccgaacagcccggcgccccgcacccacctgcagccgactcacctctccgggaacccaagaccgaggaacttaggacccgacc

SEQ ID NO: 149592 - DNA, 989 bp, Homo Sapiens
cgcagggctggcgcagggcaagaagtgtctgggctgggacggacaggagaggctgtcgccatcggcgtcctgtgcccctctgctccggcacggccctgtcgcagtgcccgcgctttccccggcgcctgcacgcggcgcgcctgggtaacatgcttggggtcctggtccttggcgcgctggccctggccggcctggggttccccgcacccgcagagccgcagccgggtggcagccagtgcgtcgagcacgactgcttcgcgctctacccgggccccgcgaccttcctcaatgccagtcagatctgcgacggactgcggggccacctaatgacagtgcgctcctcggtggctgccgatgtcatttccttgctactgaacggcgacggcggcgttggccgccggacgcctctggatcggcctgcaggtgccacccgggtgcgtggaccccaagcgcctcgggcccctgcgcggcttccagtgggttacgggagacaacaagcaccagctatagcagcgtgggcacggctcgacctcaatggggctcccctctgcggcccgttgtgcgtacgctgtctaccgctgctgaggccactgtgcccagcgagccgatctgggaggagcagcagtgcgcaagtgaaggccgatggcttcctctgcgagttccacttcccagccacctgcaggccactggctgtggagcccggcgccgcggctgccgccgtctcgatcacctacggcaccccgttcgcggcccgcggagcggacttccaggcgctgccggtgggcagatccgccgcggtggctcccctcggcttacagctaatgtgcaccgcgccgccggagcggtccaggggcactgggccagggaggcgccggggggcttgggactggcagcgtggagaacggcggctgcgaacacgcgtgcactgcgatccctggggctcccagttgccagtgaccagacgggggccgacctgcaggccagacgga

SEQ ID NO: 149593 - DNA, 1207 bp, Homo Sapiens
  misc_feature (507)..(515): n is a, c, g, or t
  misc_feature (1094)..(1128): n is a, c, g, or t
aattgtttgattattttaatggtttttgaacccatcaatattatgcaatattttaattaaacataaaattttaatcacaaaacacttgaaccgaaaaaaaatttttcactatcaaacaatgttatgcaaatacatcactgcagtgcaccacagcacacctattggagctatgccacagcactgagatactgaggatctctatttaccctgtttaacacaatgtgaagtgacataaaatacagtgacatacaggggaaagaaattaagactgggagtgaagaatgaaaagatagtatctgtgtgccacacagatgtaccctgatgtaagttaggaaaagaacactactcctttactggaatgctcaaaaacacttaggttctcagattaaggttgagcatgtgatttcttctaaatgtcataacttagggaacagagcacttcatgattaatgaattaaaaaacgtgctatcatacttaatttaatctacaacctcctgcaattttgnnnnnnnnnccactagatatatcaaaaactaatgctataatttgcatatatgaagtatgtgtgtctgtgtgtgcatgcaaataaaattaatccatgccattactaccgtaagctatgaattttgttctgaataacctccacatttattttttggaaaatgcatatgtattcttgaaatcaaatgccaacgaaagtctcataattataatttaacaacttaattttcttcatttaaaattctcttatgtgaatatgaacacttgtaaaataaagatctgctccaacagtacagtaaaggtggtattaacaccctattttttatgtgaagtagtagcctcatttttccttgcatcagggctaccttgtctcaaagcgacctaaacactggtgtataaggtttaaattaaaagatgtaaaaccatggcatcaagaacaacatagattgcaccaataattataccctagtgtgtggaaagcagtttataatattcattattaatcctgctagtaaattcttctagaaatttacgtaggtgacccggccgtaatggccgaattcccgggcatatgtccggtaccgtcgactgnnnnnnnnnnnnnnnnnnnnnnnnnnnnnnnnnnncggccgcttcctcgctcactgacttcctgcgctcgtcgttcgctcagaaagctagcgccctatatgtctgatcagtctt

SEQ ID NO: 149594 - DNA, 806 bp, Homo Sapiens
  misc_feature (292)..(312): n is a, c, g, or t
caaccccggtagcattgtcccttccccactgacaaacttatcaaatccagaagctttagagttccgtctctaattatttttctcctgaacaaaattacccaagtcaaaacaaaatgtatttttagaattacggcagcatacgacctgaattttgtgagtttcgtggctttatcttaaatcaccatttccctaaaaacggtttctttctccttagaaatgctggtggcaacttgatgaaacagccaaatgcaccagggcaggtcactttcccattacactgattccacaattnnnnnnnnnnnnnnnnnnnnnctcattgagatagctacagttctataggttaatttaaagcctcctttttctactcatttttgaaagcaaaattacattttactattttacataaccagtgaaaagacgttgaaagcctacagctcactgtttttggtgctctggaaatgttgagggtgggtttttaaccagtgatttttaacgtgcagtgaatttgttagacttttaaacaccagctaaggtagtcaaacttgatccccattaaaaatcaaggaattagggggtcgggggagggtttaggagtgatccagaatgacctcccagaattactgtggcgtacaactttatttttcagagttttcattggaatggtaagagttttatgaaagacagtttttaaaccttatccggagttaaatattaatactttaaaaaaattatggtactagaacttatttgcagcccttttgaaaagtaaccaaagttttcattccttaccccattatttaaaccgc

SEQ ID NO: 149595 - DNA, 1499 bp, Homo Sapiens
  misc_feature (181)..(188): n is a, c, g, or t
  misc_feature (192)..(193): n is a, c, g, or t
  misc_feature (195)..(197): n is a, c, g, or t
  misc_feature (199)..(202): n is a, c, g, or t
  misc_feature (205)..(206): n is a, c, g, or t
  misc_feature (208)..(208): n is a, c, g, or t
  misc_feature (213)..(217): n is a, c, g, or t
  misc_feature (219)..(219): n is a, c, g, or t
  misc_feature (221)..(311): n is a, c, g, or t
  misc_feature (669)..(669): n is a, c, g, or t
  misc_feature (836)..(897): n is a, c, g, or t
atttgcgggggggaagccccccagccccctttttgttcggggccccggtgtttctcttttggggaaccaacgtatgtggcccactttctccctttcttccttttgggcccccgcgcgccccaaaggaaatggtttttagaaaactttttttgggggccgcaggggggcccccccatttttnnnnnnnntgtnntnnnannnnttnngnggggnnnnngngnnnnnnnnnnnnnnnnnnnnnnnnnnnnnnnnnnnnnnnnnnnnnnnnnnnnnnnnnnnnnnnnnnnnnnnnnnnnnnnnnnnnnnnnnnnttgcactttattccgccacttttattgagcaacagccgtggggacctgattctgcactaagtgctctactgtgagacatcacaggttgtcattgctagaggcaagaatctcttacaaagatgaaagggcagaacccagtgctttttttaatggttgttattccatgcagaaacactgactgatccagaactggtaactaaggcggtgatcaaacaggaatgcttttcttctcagtttaggacgaagacccgccatgacaatggcgggaacgctggagtaaaacctcacggcggccagcatgaagtttttcgccagatttgtggccccaccccccaagtacccacgcggagaggcctcncagtcatacagcacaaagggcatcgccttgggcagctcaggctcactctgttccacactgtctgcggtgggaggctcgggccggcctgggtgcatccagtgagtaccacgttcccttttcccggcacactgtctccaggacaggcgtgacctgttctccagaacggnnnnnnnnnnnnnnnnnnnnnnnnnnnnnnnnnnnnnnnnnnnnnnnnnnnnnnnnnnnnnnagaaaccactcatccctgaactaatcatgcaaagtcctccagtttaactccctgttgtgggcggggttcttaaaatttatgaaggcaaagactcctaggccggcccatgcagtctgaatacgctaccgaatgctccacctatggcttataatgcagaacgacctgtttctatcactgcaggacgggattgcaagattttcttatcctgccttggctgcagagtcccattcccgtccaactcaaagcactgggacaatgctggatgtgatagatggtccatgagtatccgcaaaactaaataataagtgggcgatggtgccccctgggtgcgggcagcctctcttactaatttgatagcttcaaggagttagcaaactgtagggtgggtgaagaattcatttgacaaccatagaaacagatgaaaaacaattcccacagagtctccaaacaggcctttgcactgagaatgccgagccacgagaatatacaccttgacacaccttcacactgctgtcggtttgaatggctcattaccaaaaccttagtggtaccgcctacgtgtcctctaaaaggtttttatcctacatataaactttttacaa

SEQ ID NO: 149596 - DNA, 771 bp, Homo Sapiens
gagtccctttgtggtgaggacgtgggcccttggcttccaggaggagggagctacgactcgtcggagcggatgacgtggaagagggtcacgttgtagaggatctggtggccgttgttccaggcatacagggcccggtaccttggggcttgtagtccagcatggagatgtgggagtatttgttctggaatgggatgtcgatgtattcataggtggaggcattggtctggtatgcatagtggaccttggtaccccctgagtagccgttggtgacgtacagcgtgccgcagatgatgaaggcctccccggcgctgcgcttggggtagctcgtgttccaggtctgcagggtctgcagggacacggggtccagcctactgaccacgatgttgccagcgttctggttggtggcgtacacggcccacagcccgctctcgtccaccatgaggtcgatgtccagagtggccaccccaggcgtagtggtacatgttgttgtaaccggcatagtccaggctgcgggtcttgaggatggtctctgtcttcaggtcaaacctgatgatgatgtggctctggaacttgttgaagtagatagaaccgttgtagaccacctgccccgtgcccgaccaggggtgggggagacggtgggaggtgaaattgtccgtgttcatgaagtcaaccatggacttgtactcacgtacgaagcggttgttgtgatagccgtccatgtaccacacccggttatcgccttcaggggcgagagggtctgtcatccaggat

SEQ ID NO: 149597 - DNA, 1402 bp, Homo Sapiens
tacaagctcccccataaagtctgccagataaattagcttgtgtgtaccacatgtgcccacagcacacttaagcctcatttatacatgcttattcacacatgcctacacaccaccagcctacatgttagcacatacacactcatgcctacctgcaatcatgccagcaaattatgtacttactagtgcgcctcacacatgcctgcaaatatatacatatacccttgcacacttgtggaggcacacccttaggcctggtcctggggcctggatggtgctgccctctgctggagacagcgaataagctccttccggttgtctaggatggtgtcgaagctctcctgcagtcgggcctgctggtcaatcaactgatgctgcaggccccggatccactggagcagtgccaggcgacggtacatcaccaagtgcacgtggtgcttttccttctcctgctctttgtagcgctcctggacttgtaagtgctgcacagcctgggccactgagggcagaaggggatcgggagggccagggcctcgcggggtcccacaggcaggctcaggactgctgctacggctgtcaatgctcagggaactgctggcatagccgttgtcctccagaggggagcagactgtgccagcaccacccatcttctcaggctcagccccgggaatctctgccccctctggggggctgcgcaccccttcctcaggggatccaggggcctggaaggcttggttgtcagagggtgactcagaggagctcctcctcaggataggttccactctgcctggcatcccatgccaattctcgttagcatccttggcacttgccatgaagttggagttgctgtctggttggagctcgggctgacataatccaggaggtgggtcccccaggaattggcccccctcagctagccctggctggatggcgaacatctagcggcgtagaggcgcccgctccggcgcgtctggctctggctccgcccggccctggtggtgtctagtccctgggctgggggttcctcggcctgggcgtctccgcggtccaggcgtgggtgcggggctcccgggcagcgcgcccagccccagtcccggactgcggagtcaggcggcgtctgctgcagcagggcggagcgaccggtcccacgtgggccggttcggttttcccggagccccgcgccaggcccctgcgccggaaccgcttcgcccccgccgggccgcgttgacccaggccttccaggtccggtgctctctcctattggcattcgctgggcccttcccatcagttagcctcgctgcagacaccgtgccattttcaagcgtacgcgtgggtcgacgatatcccgggaatatccggaccgtaccagcctgcttgtataacacctgttcatattacatgcctg

SEQ ID NO: 149598 - DNA, 1000 bp, Homo Sapiens
  misc_feature (60)..(60): n is a, c, g, or t
  misc_feature (72)..(135): n is a, c, g, or t
  misc_feature (143)..(143): n is a, c, g, or t
  misc_feature (145)..(145): n is a, c, g, or t
  misc_feature (263)..(266): n is a, c, g, or t
  misc_feature (355)..(355): n is a, c, g, or t
  misc_feature (357)..(357): n is a, c, g, or t
  misc_feature (434)..(442): n is a, c, g, or t
  misc_feature (748)..(749): n is a, c, g, or t
  misc_feature (751)..(751): n is a, c, g, or t
  misc_feature (841)..(842): n is a, c, g, or t
cgggagcgagacacggaatgcgcggccgggcgcgccctgctctgtctcctccctcaccanacgacgcccctnnnnnnnnnnnnnnnnnnnnnnnnnnnnnnnnnnnnnnnnnnnnnnnnnnnnnnnnnnnnnnnnacccgagngngggaggaagttctagcgcgatccaataccccgtttggggtcggggggctccgggaaggacccgccggccgcaatacgggcgcccggcgggcagaatcagggcgctgagggagaaaaannnngacggcgtggctgcgggccgcgctccggcgttccggggccggcggacggggcagaacgcggcctcaccacgtggtcgggccgcgcgcangnggggcgaacgcctccggagcgggcgctcctgcgaccctccatgctgtaccttgtgaggcgtaccgccgcgaaggctnnnnnnnnnacaaccacaaccgcactcgcgtgcgccggccgccaccgcgtcgcgcactgatcgcccgaccacggtcctccgcattccggagcacggcggggctggaggcagcggggcgtctccgcccgcacatatccaaaatagattgcatcagccccagggaagggcaaggtggtcagggtccttttagcctctccattaatatcgactctccattttaagccccagtctgcacaatccagactaaatcccagaagatgtcactgtacaatttccaatgagtcccaagggaacacagacataataattgttcgnntntcctgcaggtactgccccaaagtccacccgcgacaggtggggcgagggtggcaatgcccgacatctgccgcctaagcttctggcttgganngggccccaatccacacgcgcacacacggccacagccggccagtccacccccactgcaccggcagacactcggagggcgcgggcggcctcgcacgcgggttgcaaccaggacgaggagggtcggcgagatcagaccgccggggctcgccctgaggtgct

SEQ ID NO: 149599 - DNA, 1183 bp, Homo Sapiens
tagaggatcccgcttgctttgggacggcgcaggagctctaaggtcagcgctgctggttggaggacattcctgagtccagctttgcagcctttgtgcaacagtactttcccaggatccacaggaaatactcagagtccacctggacattttacttatattcaggttcccaagtgtcagaggggtcaggactgtctggcctggggggcctcctcatgacctcaattcaggattatctactcaaagcattaaacaaaaggaaatacattttcaggatgaaggctgctcttttaagccctgctgaagaaaccatttcaaacaggattggaatagggaaacccggcactcagctcggcgcaagccggcggtgccttcagactagagagcctctcctccggtgcgctgcaagtagggcctcggctcgaggtcaacattctagttgtccagcgctccctctccggcacctcggtgaggctagttgacccgacaggcgcggatcatgagcagctgcaggagaatgaagagcggggacgtaatgaggccgaaccagagctcccgagtctgctccgccagcttctggcacaacagcatctcgaagacgaacttgagactcaggaccgtaagtacccagaaaaggcggagcaccgccagccgcttctctccatcctggaagaggcgcacggacacgatggtggtgaagtaggtgctgagcccgtcagcggcgaagaaaggcacgaacacgttccaccaggagaggcccgggaccaggccatccacacgcagtgccagcagcacagagaacaccaacagggccagcaggtgcacgaagatctcgaaggtggcgaagcctagccactgcaccagctcccggagcgagaagagcatcgcgcccgttgagcgcgggccggggcccggccgagcgtgccacccgcggggctgcgtctcctctccccgtggccctcgcccgcgcctgccgccgctgctgcgagcgagaggcagcgagcggccccgccagccccagccctcggccctgatgcgccggcaatcccccggccccgacccgggactcaaccctggccgcccgtgaacgcccgcctcgatcggacgccatgcccccacagggcgccctcgtgccgaattcgccacccaggcctcgctaccttaaagacccgttgtagttactgcc

SEQ ID NO: 149600 - DNA, 538 bp, Homo Sapiens
ataagtcaaatttccaaaaataaggaaaatatgcatccactgagttacttaaaaatttaatattgaaaattattttaagagaacatttaactgatcctgatttttatagtactaacaatgttctcataatgtaatagatttataaaaattgttatctctatcctgagattaaggagtgcaaccatgttgtagttctattattgagtacgtaaattgatagatctcttccgtaaaatgagggaaatataagtagtcaataaataatgtaggttatattctttcctcttcactacctaaacattttaagctgtgaacaacctattattattgttttgtagcaattttgatgacgtattcgctgatgcacagacattggaattcattacattatctagccatcgtaatacaaatgacctttggatttctctatcacggcgcttatcctcctattaaggatcagaaagttaaactttacggaccacgtacgtccctgtctcatattcttctttgttggtttctgtttaatactttaaagctg

SEQ ID NO: 149601 - DNA, 1282 bp, Homo Sapiens
aatttccaccaatgaccctgccactgggcgggtttcccattaagggggaggtaggtcccattttccattaaggatccttcgaatattgcgccccttccaattaagggagccactttaaccaaatgtcaacaaaatccctcccagccacatggcataagttaagccccagtgtttccctgttgcagactggggagttgccatccagcatcatgaagaaagtaataatttcccaatatttaagtaacctcccactggaagctgccatcaggggagttatgtctcctttattccctcgatcttcaacattagcatgcatagcaagcaatacttgtgctaattcataataccctgctgaacaagccaaacacagcaggctttctccttcttctgtatgttcatttacacttctgccttcatctagcaatttacgaacagcattaacatccccatctgaacaagcttctgctagactgcgagtgtccacttgtcctgcattgtggctgttttctgctttcatccgtgtcagtgcagcagcagcttcatccagtgcacaactaactgaggatgtcagtctccggagtacctcaggatctgcaaaagctttaccatcagcagttgacaatttgccaattcctgctgcttctagcaatgcttctagtcgtgcctgtgtctctggatccacagtgcgtaagtctgctccttctgcagtacttgataagaatatctctgatgttgttttaagcactgggttatccagatcttcttggtccaaaataaatgattcaacctcggacacttcgtcctcgtcactgccagaggcaccacctccacccccggtcctcagcacggcagccgccaacttgaaatccagcgccgcgtcccctccgcccgtaccgctgccgctgcgccgccgccgctgctgccgactcccgacgctggcccggcctccccaaagagcctcacggtgcggatccccagaccgacccctcccggcggaggcggctccgaggccccagctggggcggatcgcggagccacagagtccaggtcctcctcaaaggaggtgccgccgcctccgctatcagtcagcattgttcgcacccggagccggagacggtgccgacccactcgcggtcaccgccgccgctgatctcgggaacgagaagagcagcaagaggaagaagcgtctcctttcccccgtcccagcagcgccactaacttccctcgtgccgaattcgccacccaggcctcgctaccttagaaccgttagagttactgccgt

SEQ ID NO: 149602 - DNA, 1066 bp, Homo Sapiens
  misc_feature (200)..(200): n is a, c, g, or t
ttaggcattttccaccaatccaaaggagtccagggtagctccagagaggggctaagtgggtccgtaacctggagggggccttcttgcagtcctgggctttctgggaacagtctggccccgttaggtcgctctgctgggctccatccacaggatactgacagggagtgggatagtctggcgcaggggaagcagcgcttgcnagctcacaagtctgataggagaactgtaagggggctggggcagctcctggctgtcgtgtgggtggaggggggtggtgccggtggcggctgctgctgctgtagctgcgtgggcagaggaggagcagcccggggaccggaagtggagggcaggggctgaagctgcatctcttggtactggctgaggaaagggctgtattgcatctgctcggaggaaggctccacggacggggctcaggggctgggtcaggctgaacggtggggcctgctgagaaggcggtggagtctcctggcggggaaggggcagctgctgacttggctgtgggtaggagctctctgctatctgcatctgattaaaataggcctgcagttgagactgcttctgaagaaagacgtcgcttctgctggagcctatgttcctgcagctgctgctcaaggctccgcggtggttctttgcaataaagctgacaggtgttctgggcctttgacagaaggctgggcttctggagtctgtgctgcaggtactgggtctccaggctctgaccgtggggacagctggggatgcacgctggcagggagagtggagacgctttcctgctgcatgagaaacttcttcctgagggcagctgctagcaaggtcctggagctgaggagccgccggcgccaggttagggtctgcctccggtcctatttgttcatacacaactgcactttgttcaactctagaattcctttggttctagccagattctgaagatgttgtctaaatgctacaattcctgggtgcgacgcgtggtcgacgatatcccgggaattccggacccgtaccagcctgcttttttgtaaccactgttctatagtcacatcct

SEQ ID NO: 149603 - DNA, 922 bp, Homo Sapiens
  misc_feature (575)..(630): n is a, c, g, or t
acattcccccatccaagtccattatttttaaggaagggtttttgccccttcttgccatttttccaaattggaatgggagtaacccaaatttcctgggcccaacattcaccatccatttcaatcaagaaactcttttgagcccccactcattgccagccactcttcctggggtttgggtaccaggcaactccttcttttgggtccctggtaatgatcgccatgtactcccacccccccctgtggaatctgtgttgttttaccagacccagtctcacccaaccagtacaaaggactgatgtctaaccagaatatctgtaaacctatccttgtattcccaaacagggagctgaagacgtttctttagaatatcatagtatcgaggagtatggggtaagttggtgaacggattaatgcactgtggaagtgacgtgtgacctgcatgtccggcatgcgttgaatgagcagaatgtgttgaatgcgttgaatgtgctgagtgggttgagtgagctgaatgggaagctttcaaaggtggtaatccagcactgataagcatagcatttgttgaagctcgcaannnnnnnnnnnnnnnnnnnnnnnnnnnnnnnnnnnnnnnnnnnnnnnnnnnnnnnnggtctcgatctttagaccgatcttcacgatcccggtctcgatctcgatccttcccatcggtccccgcacgcttcttgccagaggggtaatcctcccctaggtccaaccggtgccgcttggacatcctcgcactcttcgaacgggcagttattaaggaagaaagctggctgctgtatgggcacagtcgaggacagccacttaactctggaggacccccacccctcccgctactacagcccacacggtgcggccggaaccaacagctaaaatggcggcggcgacgagggctggg

SEQ ID NO: 149604 - DNA, 1047 bp, Homo Sapiens
aaaccaaaatatatacaacatatgaatactacttctgcccttatcttctctgatctcgtctctcctctcgccaatccatctccggctctctatctgtttactcaccatcactcctgattccactttctcatccttcgcgcgtctccccctttctcgctcttctttcaacctcacgccatgcttccgcacacgctctcaacgccagtacttccagatgatttgtctgcaccctgcaatttctccagcgcttgtcccccaccgtgttccacgaatggatctcctgaccttgggcagtccccaactctcaggatctcgctcatctgtgttcagaggccactctgagcgaggccagtggcgaatcgggctgaatctcggagcattttcacaccccattcactgacagggcagccccccggggcgaaagagctcggcgggaaagactcctagccattgcccgtgagttgaagcctctcaggccggggcgcagcgcgccaggtcggctggccagctccgcgcagccggtttccgctgaggttgaggctctgcagctgcggaaggcccggcggctcggcggggcccaggccttggcccggcggcagcgcactccaggcgcgttgcccgacaggtcgagcacccgaagggcaggcagcggcccgagctcggggctcaggccgggccccagcgcgttgcgccgcagcacgaggctgtgcagcatgcggcaggccctgcagcccaggccaggccccggcgcggcagcaagctcccgcagccgctcacttccaagtagtgcagcagcggcagggtgaaaagccgcggcggcagctgcccacccgccgcccgcactcgctcctccagcccgggccccgtcagcagcagctcccgccgccgctcgcgctcagccagctccagctccggccaagactctgacaccgctgccgccgccatggcgcctcagctgctggcagcgacgcgtgggtcgacgatatcccgggaatccgaccgtaccagcctgctttttggtacaaactgttcatagggaccaatgct

SEQ ID NO: 149605 - DNA, 1141 bp, Homo Sapiens
  misc_feature (886)..(886): n is a, c, g, or t
gggtctcgcggcagcatggcggactacctgatcagcggcggcaccggctacgtgcccgaggatgggctcaccgcgcagcagctcttcgccagcgccgacggcctcacctacaacgacttcctgattctcccaggattcatagacttcatagctgatgaggtggacctgacctcagccctgacccggaagatcacgctgaagacgccactgatctcctcccccatggacactgtgacagaggctgacatggccattgccatggctctgatgggaggtattggtttcattcaccacaactgcaccccagagttccaggccaacgaggtgcggaaggtcaagaagtttgaacagggcttcatcacggaccctgtggtgctgagcccctcgcacactgtgggcgatgtgctggaggccaagatgcggcatggcttctctggcatccccatcactgagacgggcaccatgggcagcaagctggtgggcatcgtcacctcccgagacatcgactttcttgctgagaaggaccacaccaccctcctcagtgaggtgatgacgccaaggattgaactggtggtggctccagcaggtgtgacgttgaaagaggcaaatgagatcctgcagcgtagcaagaaaggggagctgcctatcgtcaatgattgcgatgagctggtgggcatcaatcgcccggacggacctgaagaagaaccgagactaccctctggcctccaaggattcccagaagcagctgctctgtggggcagctgtgggcacccgtgaggatgacaaataccgtctggacctgctcacccaggcgggcgtcgacgtcatagtcttggactcgtcccaagggaattcggtgtatcagatcgccatggtgcattacatncaacagaagtacccccacctccaggtgattggggggaacgtggtgacagcagcccaggccaagaacctgattgatgctggtgtggacgggctgcgcgtgggcatgagctgcggctccatctgcatcacccaagaagtgatggcctgtgggccggccccagggcactgctgtgtaacaagggggctgagtatgccccggggctttggttgtgccccatccatagcccggatggggggcttccaagacccggggggc

SEQ ID NO: 149606 - DNA, 1590 bp, Homo Sapiens
  misc_feature (27)..(27): n is a, c, g, or t
  misc_feature (52)..(52): n is a, c, g, or t
  misc_feature (84)..(84): n is a, c, g, or t
  misc_feature (125)..(125): n is a, c, g, or t
  misc_feature (145)..(145): n is a, c, g, or t
  misc_feature (200)..(200): n is a, c, g, or t
  misc_feature (226)..(226): n is a, c, g, or t
  misc_feature (228)..(228): n is a, c, g, or t
  misc_feature (268)..(268): n is a, c, g, or t
  misc_feature (286)..(286): n is a, c, g, or t
  misc_feature (315)..(315): n is a, c, g, or t
  misc_feature (329)..(329): n is a, c, g, or t
  misc_feature (338)..(338): n is a, c, g, or t
  misc_feature (380)..(380): n is a, c, g, or t
  misc_feature (398)..(398): n is a, c, g, or t
  misc_feature (424)..(424): n is a, c, g, or t
ctctgcggggttccgacgctccccatnattcattagctatacaccccccgcnaccgcctgtcttcgcaatattatcggggatanggcagggtgtgagaacgtgacagcgcttgctcgcccgtgtntctctcacccgcgcgggcgntgcgcgcacacggagatctctccgtgtccgtcgcggagggtgtgcgcggacacanggcgcagcgcgcacatgtacactatngnagcgctgaagtctgcgtggctcagcacgcctgcgtgtcangccgccttctatgccgancctggcccgcgcctcgcgaacagcgatgnctgcggcggtgctngcctctcgngaggagggggagcacccccagttacgtgcggtgcacgtccgngtctccgttcccccattnttctgcattctctcctcacgggggancgcgcgccccttaacataacgggcgtccgcgagcccgcccgatctgcgagggcgcaccgtcactgaccagccccctggatttgacgtcgccccatggctcaaagttgttgggagtaggcgccccccccaggggcccgttgacaccccacccaccgagatctgacccaactcaacggaagctccggtccgcgttcgtgccgccacaatatcattcgcgcctccccccggccctccctccaccccagggacgcgttcaggaccaagccccgcttcatccggtccaatagttaggggtgcgggatttcctgctcttcccccctccagttttcgaaatgacccggccgcatggtaatctccctgcgccgctttctcgtagaggtcatgggctattcacccccaccgactccaaaagtgcccaaaggacctccgccaggatcgagatgtctatggctgacttgttcacaaaacttgctatcttcttaatgaacgccaccgaaaaatgtatcccaggacactatgccatggtccatcagctcaacgaaggccgtcagggtgaaggacagcatgtctccaaagcaaggcttcatgatcttctgcaatttctggtatcgctcagtgccgctctccaccatctgcgtgaggagagagataccgtccaggtttataaactcctgggcaaacgtgacatcccgggagaggctggccaagtccttcagggcttccagcttggcatccatactcgaggactggattcgttcatggagctgctgggcgttctgagctggagatttggttaatcgaaggatagtgccattttttatctcattgcggttcttttctgtgatatagaagtttgaactatcggcatgctggagtgcaaaatattcatggttggcaagagaccacccatcacagacttcctttattattgcagacagtggttttttctgatcaatttccatgagtttggggtaggcgcccggccattctatggccaccttgacgatgtccgcgggtggcggcattgtaagtccccaaaatgttcaaagccagtgggaatgaggatcctacagcgtaaacggccacacgtgtctatacctaatgaggaatgacagaaaaagaaagagaagtcactcagtgcagatgcagggtgaattttgcttccc

SEQ ID NO: 149607 - DNA, 984 bp, Homo Sapiens
ggtgcacccgggccagccttggaaggccaggcggaaactaacccattctgtgccccccgtgcagctggactcgtacttttaatttaggcaggtcaaaaagagggttcccactccaggatacctcaaattttgctcgtgacaagcagcattcgcttcatgaattggtaaaacgtctgatcgccactttaattatggtcttcctcaatatttgtcatcaccatcattaggaagctttggggaaagcaactgatccatgcaatgccttctctctgctgatagtccttcagaaggctgtgggcatgatccaggttgacaaagtccctgtaatcttcctcatctgcaacacagatgtagtagggcaggaagagcggcagcccaggaggcacaggatgggcagcacccaggacagcatcctgcaggcggaggtcttggagccgagcagtccagtctacgtctttggcactgctggcatcattcccaaaatccaaggtaaactgtggtgaaggcccctcctcagtatcacttccccagtcatcagcaccttcacaccagtcctcagctgcaaggctgtttccctgtttctgagcgtcctgcgcctctctctctggcacctgcaggcactgggagcggaacaccttccagctgcgcgcaccgccggtgctacagccggggcaggcgcacgcgaacacgtgcagcagacggtgaaacggggagccttccagcgggcaatacacctgcacgaccagagcgagcggctgcccgcagcgctgacacacgggcctgggcgcagccacggtgggcagagcatccggaatgccgcccagcttgctagcagtccaggcacccggccctgtggggctgccgtgcaccggcgcatctcgaaggcccagcagcaccggcttcagaacggccgccatggccgccgcctcgtgccgaattcgccacccaggcctcgctacctgaggaccgtgggtagtactgcct

SEQ ID NO: 149608 - DNA, 1056 bp, Homo Sapiens
  misc_feature (54)..(54): n is a, c, g, or t
  misc_feature (115)..(115): n is a, c, g, or t
  misc_feature (131)..(131): n is a, c, g, or t
  misc_feature (144)..(145): n is a, c, g, or t
  misc_feature (251)..(251): n is a, c, g, or t
  misc_feature (261)..(261): n is a, c, g, or t
ttgtgggtccgtatgctgctgcagatttgggcgagacggttggaggaccttctnaatgtttcccaaggcctctgggatccagctgggcaatactgtgcctctgcaagtcactggnccataatcgcaggctntttcgccgcccanntggcacagtgaggaagatctctttgctgtcagcaagagggctgccattccctgagatgtgtaaaatccgctctcctgctgctggagtacgcaggccaggggtctgnaagaccctgnagtcaaacctgggtgtcaggccctggagttggtttgaccatggacacctccaatcggccccacggctggggtaacagtgttagcacggcttgaccttttcccttttccttttccttgtatggactgagttctcttcttggatggaggacaccttttgactcttgcagtttgaagattcttacgttcattttcttcttcttcttcctcttccactatcatttcatctacctgtattacctttcgtgttttggcagatttcaggggtgtctgaatagcttctgctgttagtttgtttatttcggtgatatccaggtcagctgttgccgcctcttccagggcctgtttgtttcctccaagggcgaagtagtcaagccagttcatctcgcgcagagccttggggagccgcaggatctcgatgttgtagaggttatccacctccttgaggaggttctgcctgtctgactcaatttgcttgattcgtatttccacttcacggtcgaagtctttcagaaaggaggcgagcttccgcctccgtaaggagttggtcttggccacccgactactgcccttcctaggagccatggcgctcggcggaggctgcggggagcggcggagatggggcagggaagcaagaaactgggtagggacgaggagggcggacggggaccacccgaagaagtcgccaggcacgtacctgcggtcccgagacaagggctgagcaaaacctcgctgtgccagtgagagagagcggctctacagtcaaccgccacccaattcaaactccaccctcgtgcc

SEQ ID NO: 149609 - DNA, 938 bp, Homo Sapiens
  misc_feature (117)..(117): n is a, c, g, or t
acttgtccagacccggttcccgggtctccatttcgccaggtatgtcccccaaaattctgcccctttgttgggattccaggccccactttcagatggaagaagccccgtttttcccantcaacaccatcgtcttggtccaactccactatcagatgcattgtgcattagtttggttggttcctccagtcaaatgaatagtttcgtattttgaaccatcctctttttggtctagcttctcctcagattctgaagcatcctcaggaattacccttcagtacatgttcctctgggttatcgttagagattttaggttcaacttcaaaagcagggtcaaaagggctacccctttcattggattcttcttccaaattttcaaaactgtctgaggaactgtcatcttccttcccaaggttgagctttttgtcagcagtcttactagcattgactctggaatccttctcatcatgattttcaaatagccactcagcatcaaaatccatctcatgcttgactttatttaattctttcatgttaaaccccagcaacacgccaggcttgtacttttcacaatcacggacacacttcttccttttgttactaaaatgggaagcgatgtcactcttccataaccataaactggctgctagcttctcaatttctctcctggtgggatagggctgtttgttgaaatactttgttagaaagcttttcctggcttcataggaatcatcttcatgacccttggggtctaaagctaaaacaacaggctcttcaggcttctcttcaaagaagctgggtgaatcactatcatcatctaactttcgccttctcagtaagggaaattccatttgctcgtaagtgcgcttcacaggtgccagacatggagactgattaagccgagagggtgcatttgtcttatcctggccattttggggtaa

SEQ ID NO: 149610 - DNA, 770 bp, Homo Sapiens
caagtatagtccccccgcccccagttacgtcgggttcctggacaattagtgttcaaacaggattggtgagaccccctaagagatggaggagattcctgaagatagtttctcagatacagcagcaacttctgagaacctgtctcccatgcagggtgccacctcctctctcaccagatcgtctgttctcaaaggtccatttaaagatatgctgtttgtctctgccatggtatctaaaacgggcctcaaatatcatgtcttgttgctgccccagtggagatggtacaaggacgatggttttaaccatataattgcccagtgggtctactgcttcctcagacgttttaggagtagagctaatttggggaattggatctagaggctgctcatctgattcatgctgacaagtttctagccactttgaggaatgactgaaatgttctgaagataagtctgtcctcttgttatttacaaaatccactggagatgagttgttgctgccttcctgcagccccagcttgcacagtgatggggtcagcgaggagcaagcgggggatctttttccagagttggtgagggcaccgggctgcagggtaagttcacggagaggagttctcatagatggttttcccgtctggggcgaaggcgacaggctgaggctcagttttttcactcgccacatcttcaaccagaaggcaggcctatcacgtctcagaccaagtcgaggacgccatcctcgtgccgaattagccacccagcctcgtacctagccg

SEQ ID NO: 149611 - DNA, 937 bp, Homo Sapiens
tctctgtcagtcctgttgatgctgggcacgtttgtttggcccgcgtgctccagctggaccgtgtgcctctgtggtccccatgattgacacggagatcgcttccaagccagtgaaggggtaagccagagaacagaggaaggcaagaagcctgctttcagaaggtactaagtcctcacgcacagcctcagttctactgtctcaggctttccttggagcaatgtagttgtttcaggacagggatttggttggagactcctctaagagatgggacggagattcctgaaagataggtttctcagatacagcagcgacttctgaaaacctgtctcccatgcagggtgccacctcctctctcaccagatcgtctgttctcaaaggtccatttaaagatatgctgtttgtctctgccatggtatctaaacgggcctcaaatatcatgtcttgttgctgccccagtggagatggtacaaggacgatggttttaaccatataattgcccagtgggtctactgcttcctcagacgttttaggagtagagctaatttggggaattggatctagaggctgctcatctgattcatgctgacaagtttctagccactttgaggaatgactgaaatgttctgaagataagtctgtcctcttgttatttacaaaatccactggagatgagttgttgctgccttcctgcagccccagcttgcacagtgatggggtcagcgaggagcaagcgggggatctttttccagagttggtgagggcaccgggctgcagggtaagttcacggagaggagttctcatagatggttttcccgtctggggcgaaggcgacaggctgaggctcagttttttcactcgccacatcttcaaccagaaggcaggcctatcacgtctcagaccaagtcgaggacgccatgttcacccccggtctgtgccc

SEQ ID NO: 149612 - DNA, 901 bp, Homo Sapiens
ttatagggttccctggcacaccccccttttaactggttccctgtgtaaaaccccctgtgggtccccccttgggggccaaaccaaggaccccccccggagacccaggccatttagttcttaccttggctcgccaaattcccagattttttcatccaacccccagcccattgaggctgaaaaacggcctgctccaacccatcgggtcctggggtgggacggatgtcccaggaggtcctggagcaccaggttgaccagggaacacctggttctccatcaattccctgaggtccacgagggccaggtcttccttttggccctcgctctcctcttggtccctgtgatcctggaggtcctgccggtcctggacgaccacgtatgcctgttacaacaggcactaatcctggttctcctttttgtccctttcttcctctaccaaaatttgtattgccacttccaggtgtttgtgaacagacaggccagcattccccagggggcgttacagggtcggcacagtccagcacatcctggcattctatcttgtcacagagaatggctccattgtcacagacacagatctgacaaggggcaggtttccaaatgtccctgtttaagtacatctggccattctgagtgcaggctatttcttcaccatatccttcatcctcgtcttcttcctgggcttttattgagacaaattgccctaataaaacaataagaatgaggagaggtcttgcttccgcccagtttgccatcatgtctaaatattagacatgtgggttctcctgagagtgaaaagtagattctgaggttattgtagcaccatgaagtcagctgtgggctcttctttcagcaccagccccagggcagcctctgcaaaccccctttttcagcaccagctcca

SEQ ID NO: 149613 - DNA, 1599 bp, Homo Sapiens
accgcggcgagatccgagtgatcagatgcttggagcacgtgcgccggcgtctcggggcgtggagggagcaagcgcttggggagacacaagtggggggtgggcagaacgcgcgtcacgtgctggggcgaacccgcggaggggagatgagggactgccgctcccggttagcccggagacggtgtaggcagcgcatgccgggaagagcggtgggcgcgccgggatgcatcgcggcaagttcgagcaggccgcatgggaggcaagcacagggatggagccactgggtgatgatgggtacccacgatgatggctccccggaggttacaagtgccagactcgcaccagtggaatcaaggatccctttgaaccaggctccagggtttgaaatgggccttcttgagatccatgtagagatggaagttgagtcgtttgtattcagcaacgtcatctcgtactcgagggagcaggacaaggttgtagaagcgctggccatgcgttccttcaggttagaggcaaaaatcctggtggcctggtacatggcagctgcagtccaggcctccggctctgtgacgtagaggatttgctcccagttggagagtgcagggatgatcttaaatgccttgggcagttttccactgcggtacttagataatacctcccggacccccctgtacacttctaggacccgggggtccagctggggcatagggaagcccgacacctctgacatgactgtctcaacctctgtctgcttctcagtcagcttctccatgatgatgtcagccagggtgcgcctggcaggagggttcttgttcatgaacatctctatggcacgctcatcctcagggtccacaaccacctctgcatgatggcccgctgctgtcattgtggcagccttctccagggtgggccactcctcgtcctcgtcatctgatccatcctgaggcattcttggacccagccgcgtggtgcgttcccgcggcgccgcgggcttgtccccagtcccatgctcggcctcgagttcctcctgttgctgccgtgcttgctgcaaaatccgtcggctcagccggggccccacatactcttcctccgcttctcctgtcccgcgaccccgccgcttctcccggacccccgcccgcaccgcattcccagccaggatctgatcggccaggggcgcatgtttttcctgaccccccaccccacgggccgccttgaatttgggcatttttctcgaaaaagttgccgggaaggatcgcacgtggggactgaagaaaggccaggatgcgcttgcgcggtggactctcagcgcccaagaggccgcccggcgatcacagcgccccctagcattcggaggccagaagcgccatcagcgccgcccctcccactaaaagagctcccgggttccggagctggactcccgaatatattcactgcctttaacgttagcttctctcaatagtgcagtctttgagtgtcgctctcctagcttcatggatgtaggcctagagtgctcagccaaacgggaatgtctggatttagaaacctcggggcgggaatccaccggacgcgtggtcgacgattcccgagaatccggaccggtcc

SEQ ID NO: 149614 - DNA, 2128 bp, Homo Sapiens
  misc_feature (203)..(203): n is a, c, g, or t
  misc_feature (216)..(216): n is a, c, g, or t
  misc_feature (308)..(308): n is a, c, g, or t
  misc_feature (1193)..(1194): n is a, c, g, or t
  misc_feature (1993)..(2064): n is a, c, g, or t
agggtttcaaagccccctcctttcccggtaggttctgtttttcgtggaacttggtaggtttcctggtttgggccagctcaggccaggaggccgcagaagatgggggcgcgcatacagggggcatttccttcttccaagacttgagcaaagcgctccaggtcacagttgccagtggggctggccacagcagccattccgggccnggccctcggttcntggcacctcgacaccatacacggccacgtcagccatgtccagcaggcggctgagtgtgccttccactcgggtggtggacacgttctcacctntccagcggaacgtgtccccagtgcggtctcggaagtacaggtagcccagctcgtccatcaccagcacatcaccagtaaggtaggcctggtcccccttcttgaagacatccttggcaatcttcttgttgttggcgccctggttgaggtagccatcgaagcggcgcagggggtctttctggatgatgcggcccaccagctggcccggctcacctggctggcagggaatgcagacgccgtcgggcccccggatcagctccatggtgtcctcgttgacacgtaccaaccggatggggtacacgaaggacaggatgcggctattgaaaccacaggcccccacctggctgtcgaagttgcccaggctacagttgcactctgtggccccgtagaactcagccacctggggtatgtggaagcggctggaaaagttggtccagatggactgccggaggccattgcctagtgccatgcgaacctggtgctggttttctgcctcccgcggtggctggttcaggaggtagcggcacagttcaccaatgtactgcacaatcgtgcagttgtacttgatacaatcgtcccagaaccgggaggctgagaacttcttccgaatcaccaccgtcatgccatgcagcaggcactggccgattcccacgatgtttcttgctgagtggtagagggggaggcagtcatagacgatgtcgttgggccgcatgcggaatccatagtacaccagggcagccatgcggtaatacctgctgtgcaccacgatggcggccttgggcaggcctgtggtgccgggatgtgtagatgtagaacagtttatctgtgaagcccttgtcagggcaactgggaaggtgcttgggagcatctttcagcagagggtccagnngtgttctgtgcttggaggcaccgcaccgggctcccaggagccagagcagaagaggctgagcgaggggtccaggctggcatggacctcacagatggctgaggccatttcgctgccaaagacaagggcccgtgcgcgcgaggtggtgaggcagtggagcagagcatcccgccgcaggttggtgttgatgagggctgcctccacaccgagcttggccatgcccagccataggcccacgaactcattgcggttctccatgaagatggcagccacatcgcccgaggccaggccccgggcctgcaggaagttggcgtacactgcttgagtactcatccagctggcggaaggtccagtgggtatctgtgccctcgaagatcagggccgtcttgtcggggtggcgccgaacggtagaggcaaacaaaatgggcactgtccgccgctcctgcaggcactgtcgcacctttgccttcaccttcaggaggaccaggccgccaaagatatcgcgcctgatggtcttgatgaagacccggatgaagcgccagccgccagatcccaagtagaggaacaacagggagaatcccacctgggtccagggcagtttcagcaccagcttggagaacagcagcacccccaccagagaggctccaagcagcattgtggcccggcgtcggctccgccgcgcggcgccccgtccagatgcggcccggttgcagcagcgtagacagcgtgaggggcattagccgcccctggacgcacggagccgggtctcagcagggtttagccggctctgcgccctgcatgnnnnnnnnnnnnnnnnnnnnnnnnnnnnnnnnnnnnnnnnnnnnnnnnnnnnnnnnnnnnnnnnnnnnnnnnaccccaaacctgctgtgccaggccgcagcaccgcctgccgcaccttccccgaagccggcaagcc

SEQ ID NO: 149615 - DNA, 902 bp, Homo Sapiens
  misc_feature (166)..(166): n is a, c, g, or t
cgggtgcaaaaagtcccccgaaaaggggttggaaacctccctttttttgcgggagcccccgggggacccttttcctgggggaggcgctcctgaaaagcgcccccccaggagggcggtggagacctgggccacttgcatggcgcggccccagctcctcctttactcntggtgtccggtagggtgcaagccggccgcgctgggcagctgcatcttgtgcgcgcgggccaggttacgcagccggttcagctcgttcttggccaccctttctttcttggcctgaatccgcttggcgaactggtcctccaaggggtcggcattgccgggcacctcaatcagccattctttggtgtcgtcccgggcgcgctggtagccccagcgccgccgcccactggccactcacctcgtcccacaccaggttggtcttcttcttgggacggatgcccttgaggcgcgcgaactgctgccagcgtgtaagtggccgcggtcggggcagaggcttctctcgcggcaggcgtgtggtgggctccggcagccgcgccactatcgcctcttccacgcgctccgtgggcagctgccacagctggttgatgagcagttgcgtgttgtcccgcgccagggcctgtagctcggcctccggcgtgggtccggcgcaccgcagcccggtcggggggttccggtccgacgccagcaggttgcccaggtcaaactgcagctccagctccttgtgcaccgtgatgcgttgcaacttctctgcctcgtcctgctctgcctttgcgagcagctcctccacgctctggccctccatggctccggctcggctcactcgctttggggctgcagctgaagttacttttcctacagtggcggcccaaacatcccgggaatccggaccggtccagcct

SEQ ID NO: 149616 - DNA, 1290 bp, Homo Sapiens
gggaaaataaaccctctggttttccggggcggggttcctttttcccgagaggctttaaattccaggcttttcattcctgggaggggccccttccggccccccgggagggaggttccggggcccctcgagcagaggttccaataaggcttaggatatcggagtgtttttccagaagtctgtgttcccccatggtaggtgtggcagacatgatgaactctgctgccgtgggtattgcttgtgatatgcttaggatacgaaaatagctccttgtaacctgtgccgaactggataatatttactttctgcttctcacccaccaaggacagcgcatgcaaggcgatttgcttggcttgcaagaatgtcacaccctccatggaactggagcagtcaagacaaataatcacttcgctctcattggctaggtcagggaggtcgacatcgagatcgggttgaaagacaagcatgcaagcctcgctttctttttctggatgtttttcaacccacattcttgggagataggcagcagacaaaccgatgtggagagaaaatccactgctgtctaaggagctgccttccatggtgctaatgacagctttgcagtctgtgcgcttttgtttcagttcatgtgtatcactgaaaatgaattcaatcacatacggcatctcaatagacatagtcaaagagaagctttgctttgttcctatttcttttatacaaatcttctctactgtatcctgaaggttttcattcaaagccttgtcctgttgccagggtgctacggtggcgggcatgaaaaagacaccaacagtgcccaggatgctgagttctgtgatgtaggtaatttttataagaaccttagccttagggggtaagtttccaacacttacagtaaaaacgtccggagcatcctgactcatcaggtaagcgccatggcccctgggtcacggcttgtaggctactcttgctgggcttcttccttctctttaatctctccaactatgtgcttcccattgatgaaggcttcgaagccacacacagcggccttgtcatccaaaggaaagatatattttgcctcaatgggcacgtgacttttatttgtgtatgtctgaaaaacaatgacctgggctacagtgtctatgattctccctttgatgtggacatcctccagaggaaccaagttcccagaggcatcctggaggccggccttggtgctgctggaagttttggcatctggtaactggtaatcttcaacctttgaaaaatttgaaaactcaggtctgtatcctctaa

SEQ ID NO: 149617 - DNA, 1517 bp, Homo Sapiens
cccaccgaaagggggtgtgcgcaaaaggggccccgccccagcaccaggatttccaggaatggaggtccgtaaactcctttctcatctttgggtttctgaaggtcttggcttgcccccttcaccactttggccactgctttctcttctggagtcttcggggtcatgagggcgctcatcagtggtaggctaggcagctctatgtcaggagaggcttggggacagctaggggagggctgaaagtagctcttcaggtttttctggcctctgctagagccaacctgactgggctgaggcctggttgagccgcacttgggctttgtttttgggcatgtctgtacccggggtttgattgttgtgctgcagggtcgactgctccaacacaggactttgttcgagaggaactaggaagcgaaggatcttgagctgggtgcctgcaaactcagggaggaagcgggtgcacagaggtgggcactgttttgcaggcacagaggacacactcaagactgcacccacagggcagtggtcagagcccatcacctcaggcagcaggaaagaggcctgaaaggtgtctatgaccagggtcctgtcccccagcacatagtcaagccgggagccatagttgagatggcgggcgccagtgactgctgaccagcaggtgaaggccccctcctgctttgttggaagcagcggtagctatcgatgaagggccctacatgagaggcagactggcacccccaagttactgagcaagctgtccatccacttgcgccctgggtcctcttcaaagcattccaggttgactgcatcccagtggtcaatggggcggtgggctgtattcaggtcacccagaatgatcacatggctgcctgccgccaggagggcttctgctcggatttgcagcaaacgatagaagcgcatcttaaagactagccgctcaggcctcccagggtccgcatgggggcagtacacgttgattagggtcaaggtcttctccttaccttcccatgtgcggatcttatgctgtgtgaggagggccctgccctcactatccagagcccggagttcctcttgggtaaactcatccatgtttccatagcaaccaacatccccattctgggtggcaaacaggccactcaggccttcttcagcagccactggggtagcattgtccttacagaaggtggctacaccagaatagccgctacggttgcggctgaagctgaaataggagttataaccctcaacgatagccaggggctctgtcagtgcatccctggtcactttggtttcctggagacagacgatatccgcatccagctcgtccaaaatgcgccccacggccacggcggcacagttgctgggttcctgatttgccaccccttgcaggggtctccgaatcccattgatgttccagctcaccacgcgcaacatcttaaagggctggaacacctcccagcccgcgccaacctcctcgtgccgattcacacacccaggcctcgtacctagccgtatttcct

SEQ ID NO: 149618 - DNA, 1290 bp, Homo Sapiens
  misc_feature (1062)..(1073): n is a, c, g, or t
tagaggcaggacactggggacgaacagtggtagtgatatgttacacagtaaacacctgccaacccctgtactcccctttgctccatcagttatcaggaaggagaactaaggagggaggaagcttattaggttcactgttgaatgatgattgaagagtacctgctgctgtatcttggaagatgacaagcatcctttttcattactgttggattgagaataatttcaagattcaaaatctcatgacttcccaaattgtgttttaagaaggctttgctgcaagctaccattcccaatggggcagtcaactctgagaatattacaagccatctttattgccaaaaccagcaagtacacagagtcctgaaacaaggcaggactttggcaatgccttggcctcctggaagcatgtctgagccctcctgttcgcagggatcatgaggaacaagccctcctgagctgctacagttcctgcctgacctcagtctttcgcagtcatcatttgtcctttcttggcacatgggtgctgacctcactcatccttggggtccgggatccagcatcagggtctctataccccaggatcctccatgccacatggtcactgctctcctcagggaccaggacaaggtgctgctgcttgcccaaatgttttcccatgggatatgtaccggaaggtttatcaccaccctgggaaacataatgctgccccttgggcccagaaaggggtttccagctgggggcacgtggactggttctgctgtttttggcagtcgcttttctgaattctcccctccggcagccttccagagactgatcctgggagattgagttgattgtcttgggctagaccttgtcattttaagctctagtcatagcaccttttttcagagcatcttaggcaccattgcaacccaaccagggaagctgcatccctgtggtggtccttaggcaccagtctttgttaaacaaaaccctttggcactattgtggttttctattctctgtctgaactctattcaaaagtatctttgctctcttgggccttttcttttactggtttgnnnnnnnnnnnnctaatcctgctttcatactagccagtgtgggggaaaaaggaccatatgtcaaagagatgagagagtggtatttcttgggccattttccaataaaggtttcttattttggccagatcctttaattatggccctggtgacccagggtacttgggggggcccgcttacccttcttggcccttttaacgcgctttgtaagggggaaccgacccttagttgc

SEQ ID NO: 149619 - DNA, 887 bp, Homo Sapiens
  misc_feature (61)..(61): n is a, c, g, or t
  misc_feature (77)..(77): n is a, c, g, or t
  misc_feature (169)..(169): n is a, c, g, or t
  misc_feature (721)..(765): n is a, c, g, or t
aataaaagaaaatgcccaaacactggttcattaacaggaagttttatttaccccacctttnccctggtatatgatanggcatactttatacataaagaaaggtttaagctgtatttttagtttttaaaaatcagggaatctgtgttacttatgaaaataatgggagagngatattatttgtcttgacgctggtgccaaaataaatatttagaagtgttttaaagttattaaaattaagctgtaggttagaaaaattaaaatgaggggaactgggtgaattttgcagcatgtataccagaccacgcagctgcacctagggcaccacgtgagttgccatctccacgctgaacaattaggcctagcatcccggctggggccttcgctagagcggcacataacagctccgtcagggaatagtgacactgtaaatggaagaccagccactggctctgaaaaaaataaacctcgtcagttttggattccagcattcatggcttttacgtgtttgcatagagaggggtggcccgccaggcccggggcagcctggggccagggtcggtgggaggaaagcaaggctgtaaacactggagtctgtaccggctcccagtccgtcctcacaccatgttatgggagaagggtcacaaggtgtaactcaagcaacttaacacatgaaagtctaaagtccactcttgacatgtaagtctgtgcgtgcgttaactgnnnnnnnnnnnnnnnnnnnnnnnnnnnnnnnnnnnnnnnnnnnnngatatgcagaccaaatcaaacagaagcaaaagacagcaagatggacaccgtgaaagggcagtcagtttggcatttgtgacgagcaaagcagagaattcacctcagtttgtgcggacgcgtgg

SEQ ID NO: 149620 - DNA, 885 bp, Homo Sapiens
  misc_feature (201)..(201): n is a, c, g, or t
  misc_feature (272)..(304): n is a, c, g, or t
  misc_feature (735)..(787): n is a, c, g, or t
  misc_feature (807)..(825): n is a, c, g, or t
ccgagccaagatcgcacgaggcttttccaagcttagtttcatggaccccaaacctctttgaagcatgcaacaagaaagttggtgtaaatatgattaaaaagtagttatagataaatgtgaataggtatataaaatcatgcttcgagccctcatatttcttttttctccaaaatagatcttatactatagtgagagaaaaanacaatccttccctttctgcactctttaaaagctacaccttttgtaaaatactgtgcttgtaaacccttgannnnnnnnnnnnnnnnnnnnnnnnnnnnnnnnnttaagaggtcaagcattcaaatggagatgaaacaccagcacctgcctagattgctagagagaaacattcacccctgttatttgtgagatgtgatattaaaacattagcacagtagaatggcttgtttcaaggaggcacgactgtggttcagggactatctgctttgtatcacgggcaagttcacaaaagttgttgaaaataaatcagaataattcagaagagtgaagtaggctgggtgcagtggctcacacctataatcccaccactttgggaggaagaagtaggatagtttgagaccagcctgggcaacataagacagacctcatcttttattttaaaataaaagtaaaaataaattagccaggcatggttatgtgaacctgtggtcccagctactcaggaggcggaggtggaaggatagcttgaactcnnnnnnnnnnnnnnnnnnnnnnnnnnnnnnnnnnnnnnnnnnnnnnnnnnnnnataggtgagactctgtctcnnnnnnnnnnnnnnnnnnngaccgcgtatgcggccgcaagcttattcccttgtagtgagggttaattttagcttggcac

SEQ ID NO: 149621 - DNA, 1412 bp, Homo Sapiens
  misc_feature (1066)..(1084): n is a, c, g, or t
tcactcagtgtcagccacagcggccaccacatagcagctggccccgcaccttctctggaacagtctggagatgcaaggtcagggtggaaggcctggttcacccttgaaagaaaggatggctaggggtaaacaagaggagcaagtccctggaatgcagggagccaagaagggcagccgaggataaggctctgcctccccaccggcgagggtttcctttccttctggtcattaaaactgcacagcccccggggagatgttgaacatggcagggtcgaatcgctggcctcggaagggagaaccttcagcatcccaccccttcttcagcatctcatggactttcagctcatggctctgtggcttgccctgcagcttctggtggtagtcaaaggtaagcctgtccaacaccgcctgttcctcctcatccacggtggccatggagcgctccttgttgatcttgtcaatgtcgatgggctcttctccctccaggatggcgttccaccaatactcgcccaccttgctcaggttcaccaaaacgcacttcccgggctcgagactccagagagaactctcagtgttgatcttgtgggtgagcttcccttccatgaggacgcgctccccattttcctccagcatggccacacgaatggagctgctgctaagggccactgagacctgctttcccttcaccacgtgcttgggtactggcaccctgacctccaggtcagtatagtcctgtgaccaggtgtagttctctcggacagcaccattgtaactgtcgggatttttctggaactgctcctgaatcctgggaagaattggtggttccctagggacttcagcagcaccagcaactgctcctggagcttctgcctcctgtgaaccatgggccatttccttcacagggcctggaggctgcactttctctacttcctgatgcccatccaattctgtggtggagtcaatctctatttcctggactggaactgggactggctccttctcagctgcagcagctgacacagtcttggcctcttcctcttcctttcttctgattttctcttcaagnnnnnnnnnnnnnnnnnnntcatcctgacgggccatgtggtcaaaggttttgaatacctaaaagatgtacagttagatggtctttgttgtcattattttacagaccccagtcttgttcacaatgcaaagaatacacggtcctggtacaactgcagcaccaaggcctgcgcggccccgggcgggaagcccatgcggtccgatgggtggcgcagcaagcgatagaagtctgtcttgcggtagaggaagccaaagagaacgcgcaggaaatcctggacgttgcccacgtgctgcaggatgcccaaaagggcctggtcatacagctcggccgcccctgtctccatgtcgcc

SEQ ID NO: 149622 - DNA, 249 bp, Homo Sapiens
caaagccagacactgaattttaacacaaaatcagctgacttttagacattgtgaactcctagcctgcggccaaccacttccagggttgtcagggcttccaccccacactgacccagggtggcttcattctgtaagggagaacctgccagaagcacgaccttatcttcagggatgaggccctccagggatgctacatgggccttgctctgggcaaccgtctccaggccggtcacttcaagagtgtgcccc

SEQ ID NO: 149623 - DNA, 1191 bp, Homo Sapiens
  misc_feature (958)..(994): n is a, c, g, or t
ctggaatcctgtgttcctcgccactggcttccagcgcctctgttttctcaaagggctgatactgtcaccactgggaccaagttaaaccatggtcctggccccaggggccttgtggcaaacagggcacagaacgagactggcaaattaaaaccaaaattctagatggtgtcttgcgctccacacgcaggtcttactggggaaaaggatgggagtgggggctccccaggactcgattttagctaatgcgctgtgtcactgccccagctcggacgtagaagcccagccctccgtgagctcttgggaaaggggtgaattcactgggtcatggaagggacagtcaggtgaccagcggggtcgccagatgaagcttcccagccgggaaacaagactggggtttcttggcaggccctggtcctggggagcaggccctgttgttggctggagaggaaggtgtggggtggaacaggtgtccacatagctccatctctgggggctggagcacacactttgatgagcccccccggaaatgatgtcagagcctagccgcttccttatttgctcttttattgaggccgggcaggccctgggtcactttggaggcccctcttggctccacactggactggccgggaggtgatgggcggggaaggttctcgtgattgacttgattctgattctgagagtggcgagtggggagaggcttccccagttctctccagctttccctgcagctgcaacctgccctctggtccccggtgtggagcctttgcctgtctctaaaaagagcctgttggcgacaaggccgtacggggcacaagtcttcacctgaaacacgtcatcggtctctcccccaccaacgcacgccacctttggttcccctggcccctgaaccctgccttcttcctcgctccccggattttccccagactttctcgcgctcctccttactgcccttccnnnnnnnnnnnnnnnnnnnnnnnnnnnnnnnnnnnnngttcctaaggccctccattgcgacgactccggccttcatggtggagttcgcctcaaggtttccgcaccccaatcgcccccgctctgtcccccccgcggtccatgcccaccctctcttcttcctcgccatctctttcgcgaccctcctgcccctccactttctacgttaccctctgcgcgcgattcctcttccctgcg

SEQ ID NO: 149624 - DNA, 968 bp, Homo Sapiens
ctttggtgggtgagtgcttttgatgtggggttgataacgtagagtgttctgcgtttgagaaaaggttgtaaatgccccatagggagtgtgtggggaaagtgtttgcccccaaagcgggtacgctacattacggggagctcctttggccccaaacccccaaagtgcgtttgtatgttgtgttttcgctctttggcctttgtaaaggtgtatgactgtcttctttgcaagtacaacggatagaaggttctatctcgttgcggtgttgcggtttaaggggagttttgtgggtagccccaactgtgtggactttgatatgatagctgtttgccgtggtttagcccatggttgttgtactgttgagccccgtttatggctgtagcagttgttgtgttgtatgttccagttgctggccagagttacagtggttgccaagtgcagtggtaaattgctgccgccttgaatggtgcaggtaagcttgcagccgagttcaggtgtgtgcgtccagtagagtagtgcaatgcagttctactgattgcagtgtgtcaaagatgacatcgaatttgttttgaatagccgtggaagcgctatgtagaatgtgagtgcgagggtttgtgatatcgtccttgagtgtgtgaagagtcagtgccgcgtgtaccgagcgttcaataacggagtcacgttgtcagatgtcagtttagttgagtggtgtgtgtagtgtctgctgtaagttgttgcctgctttgcgcaagtcagtcattcgtcaatgtcatctgtcagaagtcagtagtcagtcatcagaaagtgctgtttctcttcttggcagtttccaagccagaagtcttaaaaggtagatttttaagtttctgagtatcagaaacaggtacaggagatgatttagaaggagtaatggaatcactagttcttttttgtgcacctcgtgccgtagtctcaacccagccgtggtgcca

SEQ ID NO: 149625 - DNA, 1203 bp, Homo Sapiens
ccatgtttgtggccagagatgtggtttatatgagaatttacccacccggtttatttgcgcaatgagggttgcccagggcggcgggggcctaaattttgtaatattgagagccttcgcctggggacctcgctgtttggattggttccccagtaattggcccttcaggaagattcccatatgtggattttggtctaagacaccgtttcgggttgtcccgcccgggggggttttttattttgggggagagatcccaaagccaatagtccattggcccagggatcttcttaggggaaacaggttatgggccatggttcacttacccttagggggcccggggggcccaaaggaaaggtttaggaaagttttttgagggccggaggcggccgacaaggttgagtttttgtgtttggggggtttttactttgcagttagctctctttcccttgtaaacagttttattcatttttaaggaatcatgcagcaatccattaaatattgcattcttgatgtccccccctgtagtgtgaccacaagtgtactccaggggagaggggtacacagatggcacaagcagtatacacatgcacacaccaggtgtgcagaccaaagcaaagtgagcgaccagcgtgttaaactccaggtgggcaggaccccaacttcccaggtgaggtgggcaggaccctaactcccaggccagccggcttagagtgtggtggtctgtgcccaggagatgcctcagcgggggtagaaactctggtgggatggagctgggcagaaggaaaaaagggctctgtgaggaagccgggatcacaccacctgaaggcaatagggagagcacaggcctagtgcagcaggaaggagccctgggtctccatagttaggctgtgccctgtgggagaagccaggccccacctcttctctttgggtgaactgttgacgtgactatgtgactgtctccagatgaaggactggggcaaaagggttggccactgacctgtcctcatcaggctgactgaggaccagctccttggatggagtatttctgtgggccagagagctaaatgacagccaagagaaggcagggggagggaggaagaggagaaatagtaactgagaaacaagtaaaggacatttctaacctaggtatgccttggacatgggactgaggccttgaggaatctttccgtgcttagtcctctccta

SEQ ID NO: 149626 - DNA, 1304 bp, Homo Sapiens
  misc_feature (1251)..(1264): n is a, c, g, or t
catctctaaggctggccagactaggtgtcatttggaaccaacagaccaatagcacagtgccccccatctgccccaccaccaactacagctgccactccccttccaacatcattccccacattgtcatttggtagcctcctgagttcagcaactaccccctccctgcctatgtccgctggcagaagcacagaagaggccacttcatcagctttgcctgagaagccaggtgacagtgaggtctcagcatcagcagcctcacttctagaggagcaacagtcagcccagcttccccaggctcctccgcaaacttctgactctgttaaaaaagaacctgttcttgcccagcctgcagtcagcaactctggcactgcagcatctagtactagtcttgtagcactttctgcagaggctaccccagccaccacgggggtccctgatgccaggacggaggcagtaccacctgcttcctccttttctgtgcctgggcagactgctgtcacagcagctgctatctcaagtgcaggccctgtggccgtcgaaacatcaagtacccccatagcctccagcaccacgtccattgttgctcccggcccatctgcagaggcagcagcatttggtaccgtcacttctggctcatccgtctttgctcagcctcctgctgccagttctagctcagctttcaaccagctcaccaacaacacagccactgccccctctgccacgcccgtgtttgggcaagtggcagccagcaccgcaccaagtctgtttgggcagcagactggtagcacagccagcacagcagctgccacaccacaggtcagcagctcagggtttagcagcccagcttttggtaccacagccccaggggtctttggacagacaaccttcgggcaggctcagtctttgggcagtcggcgagcagtgctgcaagtgtcttttccttcagtcagcctgggttcagttccgtgcctgcttcggtcagctgttcctccactccacatcaccagtggaagtgtcttggtgccgctcagtaccagtagctcaggtcctccatggacagtctctccacagggggggcgtggcaagaacgctcgttgggcgagtcggttgacgagccgctggtggccagtgcccaagagcacctggtagttgaactacgtggtaaaggcgggggcacagcatgggaatggcaacactcagagcagtgcgaccaagggtcgcaacggacaacgggtgccacacggtgttctnnnnnnnnnnnnnntccctcaacaaagacaaacaaacaagcaaaaccaacacac

SEQ ID NO: 149627 - DNA, 1735 bp, Homo Sapiens
tgacgcaggcagtggttcaggcccctcggcacgcccgtggttcgcactccttccatccagcccagtctcttgccccatgcagcaccttttgctaaatctcacctggttcatggttcttcacctggtgtgatgggaacttcagtggctacatctgctagcaaaattattcctcaaggggccgatagcacaatgcttgccacgaaaaccgtgaaacatggtgcacctagtccttcccaccccatctcagccccgcaggcagctgccgcagcagcactcaggcggcagatggccagtcaggcaccagctgtaaacactttgactgaatcaacgttgaagaatgtccctcaagtggtaaatgtgcaggaattgaagaataaccctgcaaccccttctacagccatgggttcttcagtgccctactccacagccaaaacacctcacccagtgttgaccccagtggctgctaaccaagccaagcaggggtctctaataaattcccttaagccatctgggcctacaccagcatccggtcagttatcatctggtgacaaagcttcagggacagccaagatagaaacagctgtgacttcaaccccatctgcttctgggcagttcagcaagcctttctcattttctccatcagggactggctttaattttgggataatcacaccaacaccgtcttctaatttcactgctgcacaaggggcaacaccctccactaaagagtcaagccagccggacgcattctcatctggtgggggaagcaaaccttcttatgaggccattcctgaaagctcaccctccctcaggaatcacatccgcatcaaacaccaccccaggagaacctgccgcatctagcagcagacctgtggcaccttctggaacttgctctttccaccacctctagtaagctggaaaccccacccgtccaagctggggaagagcttctgtttccaagttctttggctggagagactctgggaagtttttcaggactgcgggttggccaagcagatgattctacaaaaccaaccaataaggcttcatccacaagcctaactagtacccagccaaccaagacgtcaggcgtgccctcagggtttaattttactgcccccccggtgttagggaagcacacggagccccctgtgacatcctctgcaaccaccacctcagtagcaccaccagcagccaccagcacttcctcaactgccgttttttgcagtctgccagtcaccagtgcaggatcctctggggtcatcagttttggtgggacatctctaagtgctggcacgactagtttttcatttggaagccaacagaccaatagcacagtgcccccatctgccccaccaccaactacagctgccactccccttccaacatcattccccacattgtcatttggtagcctcctgagttcagcaactaccccctccctgcctatgtccgctggcagaagcacagaagaggccacttcatcagctttgcctgagaagccaggtgacagtgaggtctcagcatcagcagcctcacttctagaggagcaacagtcagcccagcttccccaggctcctccgcaaacttctgactctgttaaaaaagaacctgtacttgcccagcctgcagtcagcaactctggccctggagcatctagtactagtcttgtagcactttctgcagagggggatctctagatcgactggaggctgaagttggatggcgtgttaca

SEQ ID NO: 149628 - DNA, 941 bp, Homo Sapiens
  misc_feature (129)..(129): n is a, c, g, or t
ttgtacggatgccccaaaaccctttccccaagaaaaggattggactcacttcatagaccctaaggacaaatgaaatttcagtgctaaaccatattgccccccagtgtacaccccccaataaatcacttnccccggaggtctgttttcacaagtcacctggagaacgcctttggggcagtagggttcactgtgtaggtcttggggtctctgttgccaggcagggtggctgctgtgcagacaaactgaactgggacccggatatgacgatacccatgggtaaggcactatgtgaagagtgactatgctgagacctctgttttataaaaacacaattcttgaaacatcagcaccatcgcctgttgagagtgagatcaggtttggaagccctttgacacaggagctggtttcttttggcacatggggtgctgggtagcattgcgactgaaggctctttaacaaaaagccaccccctctgagatcttgagcacaaagggatctgaaagtgtaactgggaacagggcaggccagcaggcccttcctgagctggaaatcaggcgaggaggactctggtttgatttcccaattccacagcaaagatttggggcaaatgtgaaacaggaatacttggattccagaggaaggtggaggggcaccccatgagggttattttaaagatgagaggcaaggtcagaagatagaaatggaatgaggtcgggagaggctaaccagcccagggtcttgtgaccacgactccttttacataagggacaggtgtgccagattcagaccctcattgtacagccttgctcctctgggtggaacagtccagcaaccctcagtacactccagggtctcctggaagggcaatggctgtccaagcaaaggtcctggcatcttccgtctctccttcagggttctcctcctctccaccctgtcctctc

SEQ ID NO: 149629 - DNA, 1468 bp, Homo Sapiens
  misc_feature (17)..(17): n is a, c, g, or t
gccaatcagtccagtcnagatccacttgaaaaccccataggtgttcatagaggagccaagcagtgtctccgggaatggtcttgctgtctcccaggctctgaattttcctgtccaggatgcgacgccctctgctgagagtcttgagaaactgcacctcttcttcattaatgatgtccttcaccatgtctgggtccttcttcagctcaggaaatgcatctcccagggactggacgacaacatccactaacgtagcaaagaagcccctgctggcattgagcttttcatgggcgtatcggacagctcggcggagaatccgtctcaacacatatccacgccctgtgttgtcaggccggccaccatcagccagtgccacagtgatggtccgagcatggtcagccagcacccggtaggccatgtcaatcccatcggcatcctcagcaccaactttcccagtgtatggtcgggcacctgtgcccttctgaatggcttcaaagtaagggacaaaaaggtcagtgtcatagttggacatcttattctgcagcacagataccagtcgttccaggcccatccctgtgtcaatgcttttcttgggaagaggtttcagaatgccatcagcttccctgttatactggatgaacacaaggttccagatctccagcacattagggtcgtcctggttgacaagatgtgcggcgtcccgaccaccaatccggtcgtagtggatctcactgcaaggaccacaggggcccgtgtcacccatctcccagaagttatccttcatgttgcctgggaggattttggtgtcatccagccccaaattttgccagatctgtttgcattccagatctgcttctaagccagctgcttcatccccgccaaagtaagtaacataaagtctttcaatgggaatgccaaactcttgggtgaggagttccagagccatcttacatgccaattccttaaagtaatctccaaaagaccaagagcccagcatctcgaagaaggtgtgatgatagacatccttgcccacatcgtccaggtcattatgtttgcccccagcccggatgcacttctgggtattggcagctctgctcagctttgccatggggtgagatgggtcaattgtgttcaggaaaatgggtttaaactggttcatgcctgcattggcaaagagcaaagtggggtcatccaatgggatggtggcagacgagtgaacatacgtatgctcgttcctcttgaagaaatctataaatcgctgccggatttcacttgctgttagagtagagtccatcttgaaagtcaccccaaagaactctcctagggtcgccgtccccagctcctccctcagagtcccccgccaagggcccgctgcacctattcccgcagacgcgcagctgtaccggcctcagcctcgtgccgaattcgccacccaggcctcgctaccttaaaccgttagagttactgccgt

SEQ ID NO: 149630 - DNA, 964 bp, Homo Sapiens
tgcgcattaccccggttaggcccacgtggggtttttcgaaattacaataagctgcccccctggaagttcccaaagtgtaattggtactttggggggaattcatctggggcccttccagaccccgtggccgggagctcttcgatagcgtaaatgtccagcataatgaggtcttccccaccagctcccttgccctgtgatttcagctgggccagtttcctctcctcttcaaagccatccatgtctaccaccaggcccttctcttcagcgatcagtccagtcagatccactggaaacccataggtgtcatagaggagccaagcagtgtctccgggaatggtcttgctgtctcccaggctctgaattttcctgtccaggatgcgacgccctctgctgagagtcttgagaaactgcacctcttcttcattaatgatgtccttcaccatgtctgggtccttcttcagctcaggaaatgcatctcccagggactggacgacaacatccactaacgtagcaaagaagcccctgctggcattgagcttttcatgggcgtatcggacagctcggcggagaatccgtctcaacacatatccacgccctgtgttgtcaggccggccaccatcagccagtgccacagtgatggtccgagcgtggtcagccagcacccggtaggccatgtcaatcccatcggcatcctcagcaccaactttcccagtgtatggtcgggcacctgtgcccttctgaatggcttcaaagtaagggacaaaaaggtcagtgtcatagttggacatcttattctgcagcacagataccagtcgttccaggcccatccctgtgtcaatgcttttcttgggaagaggtttcagaatgccatcagcttccctgttatactggatgaacacaaggttccagcctcgtgccgaattcgccacccaggcctcgctaccttaagaccgttatagttact

SEQ ID NO: 149631 - DNA, 915 bp, Homo Sapiens
ccattttccccccgcttgtgcaacagaggacctcccccaccaactggggcaaagggccggggaggaaaatctttcaagcggcagagggggtcccgcggtcactgttccccccctttcagtttttggccctgacaacctcagcctggttttcaccatgttttttctcccccaagccacaaatatttctttttaacttattttggtgatgtacccaactaaccacaaagccagggcctgctgggatgaggataaaaatcaaataaacaatcctctcaacgtccagaaaatggctgccaggccttctgacttcatgaaacgccggggccaggtgtgctcttctatgctggggtcctcttcggtccattgccacattgctgtttgtattcttcttctgctcagcctctggctctgcaggcagaatgctggtgacggtgtggagaagagcttcaatctgctcctccgtgagccgctcttcactctcttccaccatcagctggatctccacagcagtcacaggccggtggttcagcagctggagcttctcagctttggtcaacttgtggcttttcaatgctgtgagaaattctctgacaatttcaggactctggtgcctgcatggtgtttttgatatgtattttaacgtttcataggtgatagtgttcaagttctgttgcccagagctgtgtttattctttccactttctttacgctgctctttcagatcagttagtaactgaaatacctcgtagttactgagaagcgcagaattggcatccttcacttccatgacgtcccgcctcgtcgcccctagctgccagcagacaaagaacctcacacttcacagctgtctccgccgccaccaacagcgccaaggtgccagctccgcgcgccaaggtgctcgccgggatcgccccc

SEQ ID NO: 149632 - DNA, 1517 bp, Homo Sapiens
  misc_feature (34)..(34): n is a, c, g, or t
  misc_feature (36)..(36): n is a, c, g, or t
  misc_feature (67)..(67): n is a, c, g, or t
  misc_feature (88)..(88): n is a, c, g, or t
  misc_feature (222)..(222): n is a, c, g, or t
  misc_feature (620)..(620): n is a, c, g, or t
  misc_feature (1340)..(1353): n is a, c, g, or t
  misc_feature (1359)..(1375): n is a, c, g, or t
  misc_feature (1388)..(1447): n is a, c, g, or t
cccgtggcgtcgctgtgtaataaaatagaggggngnctcgtcattcttgtggtatgggtaataacgntggagcaacagcgtgggtgtntagcatcagagacccgtgggcaaatacgagtacgtctgtctaggactatagtgaaacgtcatatcaccatgggcgtggtggggcgcggaccgggtgacgacacacccatcccgctgtcagtcacctagtaagtnaggccgcgtcgaccttgcgtcacatgggtacgagcgatgcgtaccgtgcgcctactactcctcataaattgccggtctactgccgcgcgggggtgctgactcactacggatgtgattgttataactcaggcgcggcggtgtgtggcgggaaagcaagcaccgagcggcggggagaaaaaaaatatgaaagcaacggcgggcgggcgtggagggccgctctttatccccagatatgagatggaggagtgctggcacagtgcccgcgcacgtggggtgtggtgatctaggtgtcgcggggctgtacgcggcctccccctccgctcataatctcgtggaagccgcagacaacgcctgttgtgagagagcggggggggaggcgacacgacgaccgctacacncgtcgtgtggtgggatgaatagaagtccgggcggcgcgaggcggccgcgcgaccaatggggggcggcgtggtttatttatgaggcgggggtgggagccgggcaaaacaccgtggtgtggtgtgtggggatgcgccagttatctcttttaggccacggcccggccgtgtcgccgcggggtgtttcttcaccgacgcggaaccagatgcccgcgaggcggggcgagcataggttatgcgcggaaaacgcgtttatccgcgggcgtaacgccagggccgcgggcacgcggtacgggctggcgggtatccgccgatggtggaaagtcggcgtctccgctcactccacgcgcgcgcaacggcggggtggggtaaatcatcgtgaagagggggggcgaggggaaacgcgggttatttattgatcttctcgctcgttttgtccccgcccgttaagaagaaaaggctgtaattttattttcaaatttttggaagtttttcagaaaaaaataaaatgacaagaacacatacaaatattgaaattattcattgaactataaacacttagcagaggaagggacttttgatgtatttgaatccgcctccttctgaaagcaggaatcacttctaaatgtctctcatatctttcttcaaggagtggttttccaggaggttcccagcctcctcaaatctttcccaagtttgatgcacttcacctcataaaaatannnnnnnnnnnnnnatatannnnnnnnnnnnnnnnngagacagggtccnnnnnnnnnnnnnnnnnnnnnnnnnnnnnnnnnnnnnnnnnnnnnnnnnnnnnnnnnnnnacccaagctcaagcgatcctctcacctcagccccccaagtagctgagattacagatgcacatcaccacac

SEQ ID NO: 149633 - DNA, 996 bp, Homo Sapiens
aacttcttttggaaagtttggtaggtgtcttgaaaatttttaatgttcccatccaggaggaggcatttccttagaaaggctgctaaggggacttcctaaggactggggacgtgatcgtgattccagggccagtgagtgcacctccatttcgagcgtttaccagatacaacagccttgagcagcagtgatttacttaagctctgatttttttctgggtccagctggacgtattggtatcaaggttttcatatatacaaccatcagagcttaatgacatcaaagagatgaatttcccgatctacagatgcagtaaaactctttataacagagttttcgtcttgtccaagtaagagtgtatatttggttaagatacgtgagttaaacatttgcacgtaagcaaagtaatttccatgtttttcagtaataaaaattaaaacaggatgtctgaatactacgaaaaactttgtccatttaatcacttcttcatcagagataacagtttcaattttctgctgggggtctgcaagcaaggcctctaaaccacgaacagcaccttccttgaagagcaccaagggttctgtcccttgcactgaaagtatcctatatacttctgctgacaatgtagctttaaatactttatccaggtttacatcttcattattccatattcttaaaaccttattatcgtgtacaacaacatactctccagtttgaaagttgcacacagctggacatgttataatttgaccttgtttcactgaccagctccccaagggtttctgatcagaaaccttatagaggatgactgtcctgccgctgtctgtcactagaaactggtctgttttgtcgctctgctccacgcctaggagtccttcaggcccggcgctcaggactaccgaagacaacgtgaattcttcctccagcgctgccatcccgggaattccggaccggaccagcgggagaagggcgcggtaggggagggttaggttttttgtt

SEQ ID NO: 149634 - DNA, 1724 bp, Homo Sapiens
  misc_feature (601)..(615): n is a, c, g, or t
tttttttcggtaacacatgttccttttaatctgcttatcttggaaagcttcatattcatcctcttgagccgtcaacatttaccaaaagagaatggtcagctccccaagttgcccacccaagttacctatccattccactgacaccacaaaaggcccaaacaagtctctcttgggagaaatttttaggaaaggtgtgcaagaattcagagtcatccacccaaacttccaaaagtatactgtgtggacaatctgcagctataaaaatatacacatacaaaagtacagctacaaaatcatgggggctcagctccttaactctgcattataagaagtagggatttcacattcgaggtaagctctggggaagggggccgcattatgattatgattctgtgtttgatctccttccatctttatttttatggactagtcagaacacagtgaaccagccagtgaggagtggaaggggttaatccgaacaatccaagggccaatgtgggaaatgtgaagttcaaggtcacacagtcattctgctgtcaggaagagtgtcatgagtcagggaaggagagaagtattttaatagtgccctgtgggattcttnnnnnnnnnnnnnnnttttaatgtactatgaatcacaacacagtcactgagctatagcagacaggctctggaatttgcattgatgtgtgatctctggcagccgctacatattcaatggacaaagtccgatgcttcctacacagagaattctgctgggtcagctcgtggagtgtcagcaggaaaggccacccagggatgcctgtcttggttcctcggtttctcatcagtgtgtacttttttcttggtgagaggaaacacccctggtccctgggccttctgcatatagcatcaggcagggttctgaggggccctggggattctcagaatagaaggctctgtcccttggacaaggccaggctggtgttacttggctccacaagtgttgatgtttttcccatccacggcatcttccacgagggaaatgtggtaatcggtggacagggtgaagtgagagatacagcccacgagccctctcatatattgcctgttagtgtgcagagcaatttccttcattccacccacatacagagctccattgatgttaagctgccgcatcatgcctggggatttgcctgttctggctccatagtcatccacggttatctttcctgactggccatccctaacggccttaactcggtgccaccgaccatcgttgaaggagccattcaccatgatggatgccacaccactgcccaggttatagctgaacacgagggctccatcccgaaggcccaaggaaatgaagtcgctgttgggtctcatggggctgtctcccctccacagcaaaaggccatccttggcagttgttttaaacctcatgaacacatttgatcttgatcctgacaccctcttcaagatatctgggttgtcatacgtcaggtaactgcggccgataaactgcgggatctcaatggcttctatgatcgtattgaggcagtagttcccacactctgcccggtgccagcatgaaagagaacagggagagtcagcctttcacagtccttgtcaaatcccaattactctggttgcagatcacttgaagccagccttgtttctctcacaaagctctgcccgagagtccagcctcgtgccgagatcgccacccaggcctcgctaccttg

SEQ ID NO: 149635 - DNA, 1123 bp, Homo Sapiens
ggctgggaaaggtttcccacattttttccccaaccccgcttggtttcttgttccaaggccaagaaggaacccgggtattgggtcccttttttcggcccccccgaaggaagggtgatccccggggcgggtagtctttttcttagcttgataccagccttcacggaatggcccagcaacttcgtggtggagaacctgctggaaactggctttcagagaccccgtcgcggtagaagatgatgcgggtgggcttgaagcgcgtggacttgtagaaactggatgaggagcttcgcggaccatggcggccaggtcttgtatgatctcctgccggtgctgctgcacgcgcacggtggcgcagtagcgattggggtgggcgtccatgctgccccaccacggcggcaatggagggcttcttcccatccccggcgggggggtgagtgacgtctgctcccagaaagatgacgggctgctggaacaccggcggcctgccctggggcagcaggatgttgttcacgcctcccagcttgacgttgatcttcaggcagaggttggacagggtctgtggcgtggtcctctgcacgttcttcatctgcacgcactgcgtggccatccccagcaccgtgtctcccacgcgcttgacctcggcgtacacgggcgtcttgccgggcaggatgaccaccaccagctgcaggcccgcatacgtgttcttcaggtgccggaacatgggctccacgctgtccgccccctgcgcgtatttgcagaagcacggctggccctggatgggcatgccggcgtctctcgagatctttctgagctgctctgtgaaggacttcagatggacttccgtgcactggcgctggggggcgaagcacgcaatggcccacaccttgatctcgatgcccgtgtggaactgcttgttccgcatgtcccagacgccctggacaggggtcgcaatagctttattcctgcccccgtagaggatggagggcggctgcagcacccgcccagtcacgtctgtcatctcatctttgaccatgattccaaattacggacgtatggatctgtgttgaaacttgcagtcgcatcaatttgctaatctcttcttgccgatcgggcgccgacctag

SEQ ID NO: 149636 - DNA, 1490 bp, Homo Sapiens
  misc_feature (165)..(165): n is a, c, g, or t
  misc_feature (191)..(259): n is a, c, g, or t
  misc_feature (776)..(839): n is a, c, g, or t
  misc_feature (844)..(852): n is a, c, g, or t
  misc_feature (910)..(1019): n is a, c, g, or t
  misc_feature (1296)..(1307): n is a, c, g, or t
gcgcacggcatggtccgggcgggggcggcggtgcggcggaccggagatagattgcgcgggaaacgcgaaggcggcgggcgcgaggtgtcatcactcggcggatgtcgccgcgaatgatgcagaggacagggatgcgcggaagatgccccgcagcgtcgggagtanagatggggcgcgggatcagagacaannnnnnnnnnnnnnnnnnnnnnnnnnnnnnnnnnnnnnnnnnnnnnnnnnnnnnnnnnnnnnnnnnnnnaccgccgcgcccccggtccgcggggctccggggcgcggtgcgggcgcacacaatcaatagcgcgacccccggtgcgcgcgctgtgcgatacgcggttacgtggggggcggcgcgccgcggcacacgcccgggggggcgtgcctccccgcggcaggcgccgccctcgcatcgcggcccgactggcgtgtcgtgagcgagcgcgggcggatacggctacgggcgagcgggccggtcggtcgacctgcgtgatacactagcgggcggggctgcgcgtctggcactcgagagtcggcggcgccgggggcgagcgaccacagggaggcgatcatgcgccccgacggtgtgggctatagttcaatctacgccggggccgggacgtgcgggtcgggtgcgggacgtgcgtggatctgggtcgctgcgttcgtgggcgggtgtggggtgactcgcggcgggccccggcgcgtcatcgggccccagattggcgcggcggggcccagccccggggcgcgcgggcctnnnnnnnnnnnnnnnnnnnnnnnnnnnnnnnnnnnnnnnnnnnnnnnnnnnnnnnnnnnnnnnntaccnnnnnnnnnccctggagttgggccccccgtgctagcggtcgggtgcggccccgcgggggaagtaatnnnnnnnnnnnnnnnnnnnnnnnnnnnnnnnnnnnnnnnnnnnnnnnnnnnnnnnnnnnnnnnnnnnnnnnnnnnnnnnnnnnnnnnnnnnnnnnnnnnnnnnnnnnnnnattaagcttttaaaaaccacctatttttccaaagccaaacctgcttctggcccattgggggggtttccgacaatacaatatgattgtgaataatggggggaggaatctaaatacaaatcagagaaaacagttttcagaggattaggtagcttagctacaagattagcttgaaacatatgaagaatagtatgaaaggctgttgtaagaaaaatgacaaattctatcattcctctgacctgaaacaaggtgaaaacttggtagaaaggctgcatgaagnnnnnnnnnnnngtagtccaataaggtctatctgtagagcttgctctcacactctgaatacaaatctagctagtgtcagttcttcagagccgaaaacttacttgccacacttggaaccgatgcagtcccattaccagctgaagcagggcatgtgatctaagacaagtgtagatatcaaggagacaggaagcaagc

SEQ ID NO: 149637 - DNA, 1114 bp, Homo Sapiens
  misc_feature (65)..(168): n is a, c, g, or t
  misc_feature (544)..(544): n is a, c, g, or t
  misc_feature (550)..(550): n is a, c, g, or t
  misc_feature (588)..(588): n is a, c, g, or t
gcaggcacaagggtttttttggttctctgtaatatggttgggaattcaatattaagaagtagagnnnnnnnnnnnnnnnnnnnnnnnnnnnnnnnnnnnnnnnnnnnnnnnnnnnnnnnnnnnnnnnnnnnnnnnnnnnnnnnnnnnnnnnnnnnnnnnnnnnnnnnngctggaaggaaacttgggggtcagctggactggccgcctttgttgacaaggcaggaaagcctggctcagtaccgccgaatgatttgtccaaggtgagcggtggcagagctggaaccagaagctgttagatgtttgctgccccttaaactccagcaccaaacctccctctgtccccgaagaccatcttcacagggcatggttagtgcgtagtggatctaggctccagactgagggtctgtctgggaagggcttctaggaatcccccagcttcctcgataaaggatgtggctctggttacccccctcccccatttccagatggaaatttagctaaagagtgagggccacagagcccagcaaggggcgtggtccgtgcntgttcncaagggcggagccagccagcagggtcaccctgttcctntaagagaagggggagcgctagcccctctcagccatcctgtcctgtcctccatcctggccaaatccgaaagggaaaatgaaagagggagcaggaggcgccggtcccagccacctcccaaggtccctggctcagctctgacaccccagtcccggccccagggtgagtggggttgggtggcggtttaggggcaccaggggcgtgtggggacctgtgtaagtgtggggtggggaggatctcaggagatgtggaggctggaggcacaggaggccagggaggagggagaagcctggcgtcgcactcccaccacgctggggtaggagggcagggacacctccgacaaaggaccctgtgagagttatgaaagcggagttgcctctgtaccagccccccaccctgagaggagttcactgcagtaaaaatggtgagagaaatggtgggccaagaaaggagtggtctcgctgcctctgccactcccactcctcccatgggcaccaaattgggtctagcgtctcgggttcgaggctcc

SEQ ID NO: 149638 - DNA, 962 bp, Homo Sapiens
  misc_feature (89)..(89): n is a, c, g, or t
  misc_feature (117)..(117): n is a, c, g, or t
aaagaggaagggagcccttcttttttggaggcccgggttgccccaaattgcgccagactttcgtcttgggggtgggaaccccaggcacntggtgagacattgcagccccaggacatnctcctttagttattaaggaggaaaagagaaggaaactttcccccctttcatgggctcccccatcacttcggacagagccagacacattgtagccagcaactatgaggggactggccgcattggcattggagttggttacacgcactgtggtgcttgcctctttcaacgcccaggttggatgagttgcgaggatttcataatctccaggcagaactttaaaaaatgcaaactttccgccaggctgtgtaactgtggactggatctttgcttcggtcccagtgtttctcagagacacctgaactcccgcaggacccaggggctgccctttgctgaggaccttgccattcacagagaacccagtgaagacaaagttgatgtccccaccctttgtgcagatgtcactgactccatccacatggagctccacggtcgtcggctcaaaactccaccctaggggaggctcaatcttcagaatgaaatcccccttatcatacaaagggatcataaagtaaccattattaggggcacagtctgtctggtatttcaaagtcccatgcttggtgtacagctttatctcgatgagcgagtagttgatctccacgtccgacttgacgaagccaccgcagcccaccacgatgtcctccgagccgtgcgccggccccacgccgctcagcagcagcaccaccgcggcggtgaccaccgcgggccccagcagccccgcgccctggcccaccagcatggcccgacctcccccagctagacccaccgccggcagccgggtcccgcccctcacactgcacgccgcaggctcccctcgtgccgaattcgccacccaggcctcgctc

SEQ ID NO: 149639 - DNA, 917 bp, Homo Sapiens
  misc_feature (681)..(681): n is a, c, g, or t
  misc_feature (750)..(750): n is a, c, g, or t
  misc_feature (774)..(774): n is a, c, g, or t
  misc_feature (789)..(789): n is a, c, g, or t
  misc_feature (804)..(804): n is a, c, g, or t
ccacgcgtccgaaacatttattttccaatttagttttactttcagtgcatatcaaagttgttgtactcttcagaccaacaaattaacttgagggcaaattacatagctttccatgtacccttttttcctcaggtgctaatcaaaggctctgaaaatggatactgctttagtgatgtctgctttattcttaaaatgcttatttcttttgctagatgtaaagatttggtgttaacaaaagtggttttaatatgtaaatatgaatgaatgcctttagtttaccctgtttgtctattattaatctgttttcatttatccttcatagaggaggatcctttcatgatcttgaatacatttcattagatattgttgcattttaagaatgaaaatacaactgttttctgtcttagattaatcctgctgctatgagaaactgaaaatcaagaatgtgatgcactttttacattactatataccatacatataccataggttgctttgatacctttcctgtagcacagccactaacaagagtgaatgaattatacaattctttttgggagggaatcaatacaagtaactaattcttagctgatattgtcctatgaaggacaataacttaggaatataagaattctgttaaatagtacacttttttggcctttaacatgtcttctactactngaaaatagtttaaatccttagctttgtttctattattcccctctctctgcctcagaaagaggaattggngaagaaatggctaaaggacgtggnggtcattgattttgntgctgatccttttanaaaaacattttggtctatggaaagctgggggaactaatttttttggtttggaaaatagaagggggaaattagtgcttggcccctgaaacccaaatccggaatttaagttttaa

SEQ ID NO: 149640 - DNA, 1396 bp, Homo Sapiens
  misc_feature (844)..(858): n is a, c, g, or t
  misc_feature (984)..(999): n is a, c, g, or t
  misc_feature (1122)..(1137): n is a, c, g, or t
ggaaaagggaatggcactttttcatgtttttaaccaaaaataaattttaaatattgcgggggttttcaggctccaaacttctaccattaaaaattccgggagatctggggccccacacggaccagtggggtggggggtgttttcttggcctggacgggggtgtggtcatcagcatggctgaaagaccaggcgggtcccgggccccaggagagaccacagtccctgcaacccagtcttccttccatcattatttatattatctttcatttcttaaatataaataccaaggccccttctctgtgtcagggggagaatgcagtggggatgagccactagccatgggctccagcctctcaggcttggggctgctgtgcccccaaccccagcccacagcagtaggggactcctgggcacccaaggcaggtggcaaaaatagccgccaaggccaggggacagaggcggggatggaggcggggactgaggcggggacagaggcgggcagagttgggggagtgacggtggagcagggaaagtccctcatcaactatgagcctcacggcacacgtactgcaggcttcacggcacaccctcccaaaagcacgtcagtctgcgtgtgtccaggcagcatatctgcacctgtgtgtgcatgtgtgtccggaagtgtgtgcccaggcagcatatctgcatgtgtgcgtgcgtgtgtatccggacagcatatctgcacgtgtgtgcatgtccagacagcatatctgtgcacatgtgtgtgtccaggcaatatctgcacgtgtgtgagtgttgaggcagcattatctgtgtgtgtgtccagtcagcatatctgcgtgcnnnnnnnnnnnnnnnactagacagcatatctgcgtgtgtccaggcagcatatctgcgcctgtgcacgtgtgtctggaagtgtgtgtccaggcagcatatctgcatgtgtgtgcgtgtccagacagcatatctgtgcacacnnnnnnnnnnnnnnnnccaggcaatatccgtgcatgtgtgtgtcaaggcagcattatctgtgtgtccaggcagcatatctgtgcacgtgtgtgtccggataccatatctgcacgtgtgtgcgtccagacagcatatccnnnnnnnnnnnnnnnnccaggcagcacatctgcgcatgggtgtgcgtgtgtatgttcaggcagcatgtccttgtatgttctggcatgtctctgtgcgtgtgcgtgcatttgggcagcttatctgtgtgcccaggcggcatatctgtgcatgtgcgtgtgtgcgtacgtgtgccttcagggagcacgtgtgcgcgcatgtgtgtgcatacatgcatccaggcagtgtgtgtgtccctcgtgccgattcaccacccgcctcgtacctagaccttatg

SEQ ID NO: 149641 - DNA, 1218 bp, Homo Sapiens
gagggaggaaccagggccgagcccaaggagcccactcacagaccagccctggctcaaatgcaccctgcccccaagaccccagccacaaacagcccactgtcccccagctgggctagatgacctcaaagtttggagagtcaggacaggtccagggatgggaggaagacgtctccggggctggaggagacaggggggtgctgggctccgaaagcagatgccgcccagactcagaaggctgccgctgggccacataggacagggggtgcctgactttggcctcgggtatcccctgggcaggtggtgaggcttcaaagccggggttttcaatcccttgaatgttgctgtccatccgcaccagctcctgggcacggcggttggaggctgcctgcctttgcttgtagaccaggagcaggatgagggggaggcagaggattcctacgatgcaggcacccgtagccagggctgcagccgtgatgttttcactctcctgggaggaggatgggtacaccacacagttggatggtgcatctttgcctgtctgcacctgcagctccatggcaccatggaccctgtgctccgagtggtggtgcctgatctccaccaccaggcagcagtagaggccgctatccagcagggtcaggttgcgcatggtgatggagaagttgccatggtggtcggaggccgactccagcccgtggcgctgagccaggtcgtggctggtgttggcagcctggtggcctccatggtgcaggtgaaggtcctggaacgtgaggttgcggatgggccggcgctctgagcaggtctgcacctcgcccctcgagctgcggtaccacgtcttgtagaaggtcacatcgtgccctttgtccacagggcccaagagcctgcaggtgagggtgacgttctgcccctcgggacagacatacagggaatacggcgtggcgaccttgaaggctgccaccggacctagggacgcagccaggaagagagcgaagagcagggatccccagcgccagctgccggcctccagggccgtggggacgcccatgtcgccgtcggacgcgcagaggaacttctggtgccggggagcgggcgggacgcggccggcgcggggaagcctcccgcgactgagtgcgagcgagtgagcgctgcgggcggccccagcgccgtgccggacgcgtgggcggacgcgtggctcgacgattccccgggaatcccgct

SEQ ID NO: 149642 - DNA, 1520 bp, Homo Sapiens
  misc_feature (1267)..(1267): n is a, c, g, or t
gagcggagagcgcgggccgttttctttcctggtgtcccgtcgcggcttgggacccggcaagatgggcaagaagggcaagaaggagaagaagggccgcggcgcggagaagacggccgccaagatggagaagaaggtgtctaagcgctcgcggaaggaggaggaagacctggaagcgctcatagcccatttccagacactcgatgccaagaggactcagactgtggaagttccgtgccccccaccctcaccaaggttaaatgcctccctctcggttcatcctgagaaagatgagttaatcctttttggaggtgaatatttcaacggccaaaaaacttttttgtataacgagctctatgtctacaatatcagaaaggacacctggaccaaagttgatatccccagtccacctccgaggcgctgtgctcaccaggcggtggtagtgcctcaagttggcggacagctgtgggtctttggaggggagtttgcctctcccaacggagagcagttctaccactacaaggatctctgggtcctgcatttggccaccaagacctgggaacaagtcaaatcaacaggcggtccttcgggtcggagtggacatcggatggtggcctggaagagacaattgatcctgtttggtggcttccatgaaagtacacgggattacatctactacaacgacgtgtatgcctttaatctggacaccttcacatggagcaagctgtccccgtcagggacggggcccacacccagatcaggctgccagatgtccgtcactccccagggcggcatcgtcgtctatgggggctactcgaaacagagagttaagaaagacgtggacaagggcacacggcactcagacatgttcctgctgaagccagaggacggaagagaagacaagtgggtttggactcggatgaacccttcgggggtcaagcccaccccacggtctggcttttccgtggccatggccccgaatcaccagacactgttcttcgggggtgtctgtgacgaggaagaggaggagagcctgtcgggcgagttcttcaacgatctgtacttctacgacgccaccaggaaccgttggtttgagggacagctgaaggtagtgcaacctctgagtagcatgcgccgtggtgcgcagccctaacttgggtccctgccaccactgccttcctccagcaccttttggtattggggcccccaaagcccatgagctctctcaagaggggcgagggttccgtctctgactgtcctgggtgactangcttggagagcccttggtcacggtccccttagtctgtcctggatgctggcggggctgctacctcagaagccagttgccctgggctgaagtgcccgggacctcccgggcctctgtgtgagaaaggtttgctggaagtccctggtgtggaccagcctgtgttatgacccttggagcttccctgggttccgggaacatctttactggtcccgggagcatagctgctggcccggggccagcccacccagggcacaga

SEQ ID NO: 149643 - DNA, 1132 bp, Homo Sapiens
  misc_feature (933)..(977): n is a, c, g, or t
gcattcattcccctggttaacctaaaggaaaagcaggcagcttccaggttagttttgtggtttggtggcccccagatccccaaccattgatactggctccagtcaatgttcagagagtgagtcaggaagtcggggatgctcaatggggcatcaacgtagtcctgccttccagttaaatatgagcctttctgccatgtaatcccgatctttatattccttgaaaaattcacagcctggatacgggatggagaggagagtgaagtcggcatagcgctgggctttgtccaccttctcagaggaggttacattcatgccaaacttcaccttcttgttctccaccatcaggtcacagatgtatttgactgacaggtatcgaagcagcttgatgtcatagcctctgaccttatcaaaaagatgcgtgtcaccacttcgaagagcacagtcctcctccgtgacgtcctccacatctgcccaggcatcatctgcaccccctgagaaaaaatagttgtagcctgagcgtccatacagctctccccatccagccagtgtggccgacctgcaaatgtgcttgcccttgaacaggattactgggcagacaaaccgtcctctgcaccgggccatcttgctgcggtggatgaggtcttgcaacttgctcacctgtacggtactctcaaacgtgtctttctccttctcagaactctcatactccaggaacacgatgtgccggggatagtggccacagatatccccattcgtgtttggaatcacgctgaaacagtagtctcggccaaacagctccagacatctcttctcaatgcgctcaaccttagagccgccggtcccgctgccatccttggcccggtactgagtccgggagaactcctccagcagctccccaagccccagctcctgaggcggctggttgcctgaagnnnnnnnnnnnnnnnnnnnnnnnnnnnnnnnnnnnnnnnnnnnnncggccatggcccagccccgcgtcccctcagtgtgcctcaagcgggcccatggcacctgcctgcacccaactccgaccgtacgcgtggtcgactgatatcccgggataccggagcgtaccacctgctttttataaacacggtctatcttcctatcc

SEQ ID NO: 149644 - DNA, 1152 bp, Homo Sapiens
  misc_feature (617)..(628): n is a, c, g, or t
  misc_feature (705)..(705): n is a, c, g, or t
  misc_feature (733)..(733): n is a, c, g, or t
  misc_feature (739)..(739): n is a, c, g, or t
  misc_feature (926)..(926): n is a, c, g, or t
  misc_feature (934)..(934): n is a, c, g, or t
  misc_feature (963)..(963): n is a, c, g, or t
  misc_feature (971)..(971): n is a, c, g, or t
  misc_feature (997)..(997): n is a, c, g, or t
  misc_feature (999)..(999): n is a, c, g, or t
  misc_feature (1028)..(1028): n is a, c, g, or t
  misc_feature (1061)..(1061): n is a, c, g, or t
  misc_feature (1077)..(1077): n is a, c, g, or t
taatacatgttttcaaacccaaatttaaaatatgatttgttgttgtgataggttagaagttcttacttgtaaaatagaagaaaattgttgtagtggattggaacggtgttgtgtccattaatgtttataaataattaggtgtagaccaataatataagattcctacatcagtttgcagtcctgactttacagtttgaaataagtagcaaaagaaaattatgataatcaagtaatttattattttggtaagatagtataaaggaataaggaaattttaagtattgtttaggggccaaatttgaactcagctaattatgatttaagcgctctattaattgccctgatttttaaagaggtgcatgtaattttgaaatagcacacattttcgtttgtagtcactctggataaatttgtatttttgagtgttcattgaacgaggcttatttgactgtggtaaacttattttattggatggttttcatatgggaaaataattaatgggaaatatgattacgattggttattttttgagaaccctatttttcttttaggggcttattatagtaataaaccctttttttaaacggatgcaaaaaaacttttcgccattttggagnnnnnnnnnnnngtttctttccctggccttgtgatgggtggaaagaactattttttgcgctgtgagagattgttgttgtgttgtttagnagaactacagggagggacagcattgtgntaatgngtgaaggccacttatttatgtggtgaagttattgtccgagggcggacgaaaggtgtcctttagcctgtgcgcgaattgtagtgtgtgaccgagccctgttgtttgtgggcctggtggtaaatgacaggtgggagatattttggaggttgtaagagataccttttattggtttgaattggaaggttcncctagagnaaggtgttgcacctgggaagtgacctaanggtgtgtntgaggagatgttgtgggtggagcaananacccctaagagcgattggcgcattctgtnaggacgggttcagacttttgggggtgaagctgntgtgtaatcatgaagntaattgggcgtggcatggatgttaattttgtgtccggagaatatttgttccgggaactcaattttcggtgttagt

SEQ ID NO: 149645 - DNA, 1082 bp, Homo Sapiens
gtccgccaacggggcccgagttttacagccatttcttgtgttcttttattaaaagactcttccccccgtaggagggattcacaggccggggaaacccggattttcttccattccattcttctttaaaaaaagtatgaaatgcccccggtatttaagtttctattttttatttgaacccaaacattattcttgggttaagtaatgtcatgggttttccactataatcaccaaaaggcatacttcatatatttgatatctaaaggaaaatatgcttaaaattcaactggaaccatggcatttcacatcaatttgagctcagcaatatgcctaatttggacattttaattttagaaacccaatttttaaaaattcttaaatgcagtgttttcagaacatagttaccaagtcagagaataaccacttatattttaaaaagattaaaacattattatatcctcaaatcaacaatgtttttttgtgggaaagcttacagaaaattataatgttaaacctcatagccaaatcagttccttattctctggttttagaaaacacaaacaaaccttaagaagtaccgaggttccttctgacttaaaaggttaatgttttattcaggaaccaataacaataattcctcatcaaagacagctaacttagtaaggtcaattgacaaccacctctaacaacagaggtggcaaacagataaaaattgtttaacagagaaaaatattatttcagggttcagaatgatgttgaatactaggagactcaaacttgtaatccttgaaactgacagctagttcccttcaatactttaggggttcatagaagtattaacagaaatgggaaacatggtgatattacaactgtaaagacttgacatttttgttaaaagagaaagttcaaagacagttaaggggagtgttaaataatgctgactggggggaaatgatatagatacttgcttttcaaatgaaaatcatggacaagtggtagtaaccatcccatctgaacagagtaatgtaatataattagatacacagtttacaacgaaataagactaaattcttaaaattagtttg

SEQ ID NO: 149646 - DNA, 1451 bp, Homo Sapiens
  misc_feature (1410)..(1410): n is a, c, g, or t
gggagtcgcctccggaggaaggaagaagaggacgccgggcgcgcagctcggtgctgattatcacaactgtttggtgacctacttcactgacctgtgaggattccttcccttcaagtactggattcttgatctttctgcatcatcaagaatggaaacagactgtaatcccatggagctaagcagtatgtcaggatttgaagaaggttcagagctgaacggttttgaaggaactgacatgaaagacatgaggctcgaagctgaagcagttgtaaatgatgttctctttgctgttaacaacatgtttgtctcgaaaagcctgcggtgtgcggatgatgtggcctatatcaatgtggaaacaaaggaaagaaacagatattgcctagaactcactgaagcagggctcaaggtggtaggctatgcttttgaccaggtagatgatcatttacagactccctaccatgaaacagtctactccttgttggatacactcagccccgcctaccgagaagcatttggaaacgcactgcttcaaagactggaagctttgaaaagagatggacagtcatgactacactttttcctttcagaggggctggtgctggtacagaatgttgatataaagcttaaaattcttgcatatggtcatagaaaatgcatctttggttttgtgtttttatcacttgcttccaacttaggcttttggctcagaagattattgaataatgatttgtcttagtttctgtttcagtaagggaattctgaggccgttgctatgataccatcattaagacattcacatgtcttcatataatatctcttcatttcaaatcctaatcactatttcatactattacagggctttgatgctgccagcactgtcttttacataggaaattctagatttgcacagtaatagaggaattagaagtacctaactatacactttgattcagcctgctaaatcaggggttcaatactagccttggacaaactttgtagtaattaattgctaccacccttattggaaacaaattatcaactagtttcccctgcacaaattttgaaattcactgctttcaccttaatctatttatattactaagtaatgggattaataaaagatgaatttaattattatatttacttaaactaagtatttaaatgggaaaaaccaagggacctggaaaatagttcctgctatttcccggggtttggcaacaagcccacccaaattaaagccgaagggataaacccggtaggcaaaatggaatgggaataaaattacctcattttcccaaagatatcctaagcgcccttaaggccaaatacacggggaaaccagacctttcccgtcccttttgttcctttaaccaaagaaaagccatcccttccaggggggggtggattttncaaagcagaaagggaaggatttccggggcgtttccgtcaaa

SEQ ID NO: 149647 - DNA, 1021 bp, Homo Sapiens
gtcccatattcatcaatcctccttttccttcctcctccgagttcccggtcccaactcctgggtttggggggcctttccttgcagtgggggggtccctgctgccccattgtgctgggggtggaggggccgcggctggaggactgccagctcaggaatgttggtagtggacggacgtgtcaaccttgtgggttttgctgtgcagacagcacagccacgctccccctttatgcttctgcagggccttctgggtggactgcaggcactgactcgtggaactgatgtgcaaactcttctgccacaaagggctcccacggcttgctcttcccattggtgctgtgggacagcggcacaggaatgtccttgggtgcagcgccccggatatagtgaagcatgctcagactctttttgcctccaggggcctcgctcagcctggccttctccccgctggcaggagctagctcctggactctcgacagctcctggggccggacctgttccagcttcccaggctccgcggcctttgggatgtcagacaaggaagcagcaacaccaaccggcttctccacatccagagaggcttgctgcgtggctggttcactcagggagacggcaggactgtccctcggagagtttgtcaaggagtcggccactgctgctgacagtgccttctgcttcatggcacggagcatttcaacaagtctctctttgtctttcctcttctcagcgctgatgtgggtcaggttgaagatggtcaggaacttcttcttttcttcgaagttgggactgttgttcatctcatcagggctgtagcgggtagacagcgccagtctcggtgaaggcgtctgccgcttgctctgaattgttgggggcgacgggcttctctctcgcagcatcctccgccgcttcctccgcttctgggccaccattcctccttctgctgttgggtggtcaagccaaaaagttgcaaaaactctagttctccctcggccgattaacacccagcctcgtacctagcctatgt

SEQ ID NO: 149648 - DNA, 1089 bp, Homo Sapiens
gggaagggtgaacccgcccagtagggaacccccctgccatttttttggcattccttgggggcctggaggagctcaaaaacagcggtgacggccattgtagagcttgccaagaaatggcccacagaaggaggaagggccaggagaaaaggtgaggccccgcccacatccaggactgggaacccttcccactgtgagatccaggtgggttcctctccccccagggcccgcagccggtagaggcagcccctcgggtaataatattgcaggaactggacgcagctctgaaaaatggaaaatgctaagaactggttgcgaaacttctgataaatgggtccattaggccaggtcagcatcactccggacaggaatgtggagacgtagtggtgagacacccaccagcctttaattcttgagccgttgctgatgagaatgctctcccgaatggtcagggtgcagtaataccacaccagcaggaagttgaagacttcgtcagtcaccctgtagtgaaggacaaatcgacatgccacggcacccaggagcaggatgatggtcaggtagagcttgaacttctcatattcgtccttgtaggcgaacttggcctggttgctgaggagggtcacgttcacattgccgaggaccaggtttcaagtagagcccgttcttcttgggcaggtaggcctccatgtggaagaagacgtcctgccgctccttgatgttcgctgccatctgctgaacaagctccgcctcctcccgactggcatggcgtttgcacctctggagtgtaagcttcaagtccttgaggtgcttcttctgcttactgatggaactgctacacagcgtctgcagcgcagccagctcctccagcttctgcttgtagatcctgtgcgtctcctgcagttcttgaaattctccctccagctcgtgccattcgcgctcgcaacgctccagctgcccggacatgatgcgatggtgcaaggcggcggtgccggcggctgctcccgcagcgctgcccgaccggccccccagcgccccacgcccgcgcgctcgccgaccgccctcggaggcaccagctgttcctgcgcagccaga

SEQ ID NO: 149649 - DNA, 308 bp, Homo Sapiens
atagaaggcgtgagcctggtgcccgtgcagaacatagccctcctccctctgagtgacgccccttcccctgtgcctgcatctctgtccgcaggtgcaaacgccatgccagtcgggaggaggcggagctcgttcagcagatggcagcgaacatcaaggagcggcaggacgtcttcttcgacatggaggcctacctgcccaagaagaacgggtaggagctggcaacctccccacccctagcacaggcccatgcccaggcctagcacaggtggtccatataactctcgccttcctgctggtgctcagattga

SEQ ID NO: 149650 - DNA, 1638 bp, Homo Sapiens
gtacgtcccagccctctttgctacttagcgcctctgggcccgagtaacacctgctccttggctcagtctggcgccaccggcatcacggaactgtacttcccagagacgtcacaccgggagacttccgattcccgctcttgagattggactctcacgtgcaggagccagtcctcgctgggctctagcgggcttctgatggaggagctactcctctgggaggacagagtagaattagcagcagcctctgtcaccatccaaagattacaacccatgaaaccattgaatttgtgccttgtatcagaaagcaaaggagaatgaaaaagcacagctaacattgcttgaggatctaggcgattaattctttagactgtcatcatgggtatccgaggactaatgagttttgtggaagatcatagtaatgagttcttcactgatttgaagttgcgggacacaaaaattgtcattgatggttatgctcttttccaccgtctttgcttcagttcaaacttggatctccggtatggaggggactatgattcttttgcagatgttgtacaaaaattctttgaatcactgtttgcttgtaatatatgcccatatgttgtatctagatggaggatgtgacatttcagataaaaagcttacaactttaaaggatagagctagagagaagatccagatggcccattccctttctgttggtgggagtgggtacgtatgtcccttactcatccgggaagtattcaatacaggttttgatcaagctgcgggtgtgttttgtccagtgcttttcagaagcagatcgggacattatgacacttgctaaccattggaattgccctgtgttatcatcagatagtgacttttgcatttttgacctgaaaactgggtttttgccctttgaatagctttcagtggagaaatatgaacactatttagggcaccccaaaactatatccctgccaaatgcttttcccttgatgcattctgccatcacttcagcaatatgaataaagctctactacctctctttgcggtgctatgtggaaatgaccatgttaatctacccatcatggagacattcttaagtaaagcgcgtcttcctcttggagctaccagttctaaagggaggagacaccaccgaatcctgggacttctgaattggttgtctcattttgccaaccctaccgaagcactagataatgttctgaaatacctcccaaaaaaggatcgagaaaatgttaaggaacttctctgctgttccatggaagaataccaacagtcccaggtgaagctacaggacttcttccagtgtggtacttatgtctgtccagatgccttgaatcttggtttaccagaatgggtattagtggctttagctaaaggccagctatctcctttcatcagtgatgctttggtcctaagacggaccattcttcccacacaggtggaaaacatgcagcaaccaaatgcccacagaatatctcagcccatcaggcaaatcatctatgggcttcttttaaatgcctcaccacatctggacaagacatcctggaatgcattgcctcctcagcctctagctttcagtgaagtggaaaggattaataaaaatatcagaaccctcatcattgatgcagg

SEQ ID NO: 149651 - DNA, 652 bp, Homo Sapiens
  misc_feature (521)..(533): n is a, c, g, or t
gtcgtaccatttcagagtagtgctttatttttatatgcaaatattcacccttcatgcatatacaatagttataaggtctgaaaactaagtctatcagagagaattgcaatcccttgactcatatgtgttcatcctcccatggagagcctcattatttcatacaataaacatgccagaaaaggattctggggaaaaaacctgtatcagctcaaaaggagaggttttcttaaactgtctggggttactgaggtcaaacaagatgactgcatctgttttacaggaaaaatcaaatccaaagtactaatcgtaacaaggactaggctagttctgatgtttactttcctacctacagctactctgtaatgaaacaaataatattaacaaccccagagtgaactaagtttacacatgccaaatatcacatcttattcattatctcacacaagcaatacaaaatgtaaactggtaatctgaagtaaaggctccaagtcttaagtatccaattttccaagataattagnnnnnnnnnnnnntcaaatactcttaagcattatttttcatacttctaagactataagatctttgtataaataaaaattatacttaaacacatatacaatacaaactaatgaactgtattagaaatcctcaa

SEQ ID NO: 149652 - DNA, 1142 bp, Homo Sapiens
  misc_feature (920)..(921): n is a, c, g, or t
  misc_feature (1022)..(1022): n is a, c, g, or t
  misc_feature (1025)..(1025): n is a, c, g, or t
gggacttcaacatggcggctgcggcactggcggtggctacggtgacggcctggcccggagcgggcagagttggaggtggtggcgttcgctctccctaggggctgtcgggagctcagcggggaccgagcctgggaggccggccggtgccagcacctttcggcttctgagacggcggcagcagcggcattcaggttctaaatggcttctaagaagttgggtgcagattttcatgggactttcagttaccttgatgatgtcccatttaagacaggagacaaattcaaaacaccagctaaagttggtctacctattggcttctccttgcctgattgtttgcaggttgtcagagaagtacagtatgacttctctttggaaaagaaaaccattgagtgggctgaagagattaagaaaatcgaagaagccgagcgggaagcagagtgcaaaattgcggaagcagaagctaaagtgaattctaagagtggcccagagggcgatagcaaaatgagcttctccaagactcacagtacagccacaatgccacctcctattaaccccatcctcgccagcttgcagcacaacagcatcctcacaccaactcgggtcagcagtagtgccacgaaacagaaagttctcagcccacctcacataaaggcggatttcaatcttgctgactttgagtgtgaagaagacccatttgataatctggagttaaaaactattgatgagaaggaagagctgagaaatattctggtaggaaccactgtgacccatttatgggctcagttattggacaataacttgcccaggggaggctctgggtctgtgttacaggatgaggagggcctggcatccttggaacggggcaaccctagatttcaagccctcttcataaaaccaatggctttataaccttaccacanntgggcaactgtggaaaagatgtcacttgccttcccaaagtggccctccccccctatacctggccggaagcaaatatcaaatccctgggcttttcccaaaanttnactccggaggaccgcattccgaagaacagcccaagcttggcggaagcattttccataagcacttcctgccttcccccatggggccggttcccgaaattccctaacagcccttccccc

SEQ ID NO: 149653 - DNA, 1677 bp, Homo Sapiens
  misc_feature (1620)..(1620): n is a, c, g, or t
ttccgggatcggtgacggcctggcccggagcgggcagagttggaggtggtggcgttcgctctccctaggggctgtcgggagctcagcggggaccgagcctgggaggccggccggtgccagcacctttcggcttctgagacggcggcagcagcggcattcaggttctaaatggcttctaagaagttgggtgcagattttcatgtatgacttctctttggaaaagaaaaccattgagtgggctgaagagattaagaaaatcgaagaagccgagcgggaagcagagtgcaaaattgcggaagcagaagctaaagtgaattctaagagtggcccagagggcgatagcaaaatgagcttctccaagactcacagtacagccacaatgccacctcctattaaccccatcctcgccagcttgcagcacaacagcatcctcacaccaactcgggtcagcagtagtgccacgaaacagaaagttctcagcccacctcacataaaggcggatttcaatcttgctgactttgagtgtgaagaagacccatttgataatctggagttaaaaactattgatgagaaggaagagctgagaaatattctggtaggaaccactggacccattatggctcagttattggacaataacttgcccaggggaggctctgggtctgtgttacaggatgaggaggtcctggcatccttggaacgggcaaccctagatttcaagcctcttcataaacccaatggctttataaccttaccacagttgggcaactgtgaaaagatgtcactgtcttccaaagtgtccctcccccctatacctgcagtaagcaatatcaaatccctgtctttcccccaacttgactctgatgacagcaatcagaagacagccaagctggcgagcactttccatagcacatcctgcctccgcaatggcacgttccagaattccctaaagccttccacccaaagcagtgccagtgagctcaatgggcatcacactcttgggctttcagctttgaacttggacagtggcacagagatgccagccctgacatcctcccagatgccttccctctctgttttgtctgtgtgcacagaggaatcatcacctccaaatactggtcccacggtcacccctcctaatttctcagtgtcacaagtgcccaacatgcccagctgtccccaggcctattctgaactgcagatgctgtcccccagcgagcggcagtgtgtggagacggtggtcaacatgggctactcgtacgagtgtgtcctcagagccatgaagaagaaaggagagaatattgagcagattctcgactatctctttgcacatggacagctttgtgagaagggcttcgaccctcttttagtggaagaggctctggaaatgcaccagtgttcagaagaaaagatgatggagtttcttcagttaatgagcaaatttaaggagatgggctttgagctgaaagacattaaggaagttttgctattacacacaatgaccaggacaatgctttggaagacctcatggctcgggcagagccagctgagcccagccctgctagcctgcgcagaacacatcctggaggctgcaagccactgtgggaagagaggcactcngattctttgggtagagcagtggaacgtccatccgtactagctgacggagtggaatcg

SEQ ID NO: 149654 - DNA, 1184 bp, Homo Sapiens
agagtatgaagtcgacggcgcgccgaattcggcacgaggcgcaccgactatgcgggcgcttcagtcgcatcagcatgaagctgccccggatcccgctccggaggcagaaactacccaaagtcgtagtggcccaccacgacctggataacacactcaactgcagcttcctggagccaccctcagggctggagcagccctcaccatcctggtcctctcgggcctccttctcctcgtttgacaccactgatgaaggccctgtgtactgtgtaccccatgaggaggcaccagcggagagccgggaccccgaagtccccactgtccctgccgaggcgccggcgccgtcccctgtgcccttgaccacgccagcctccgccgaggaggcgatacccctccccgcgtcctccgacagcgagcggtcggcgtccagcgtggaggggcccggaggggctctgtacgcgcgcgtggcccgacgcgaggcccggccggcccgggcccggggcgagattgggggcctgtcgctgtcgccatcgcccgatcgcatgaaaccgtctccaccttgactccgccaccaagcctaaggtgtcctggatccacggcaagcacagcgccgctgcagctggccgtgcgccctcaccaccgccgccaggctccgaggccgcgcccagccccagcaagaggaaacggacgcccagcgacaaatcggcgcatacggtcgaacacggcagcccccggacccgcgacccaacgccgcggccccccgggctgcccgaggaggcgacagccctcgctgcgccctcgccgcccagggcccgagcgcggggccgcggccccggcctcttggagcccacggacgccggcggtcccccgcgcaagcgcgcccgaggctgcctccctgttggccgctgacctgcccggcaagactcctccccggggccgcgcccaggggggccttggcgggcagggggccctgggaaacatcggggcccccttcttaatgtcgaggcctcccctgttttccgcacccgccctacctactgggcctcccgcgggccccgtacccctcgggggcccttttatcacctcccgcgaactcggtcccccttggggggccctcgggaacgcccctcgtttgcggcgcggcgagccggtgagccgcgcgccttgtcctccgccctcttcgatgc

SEQ ID NO: 149655 - DNA, 1080 bp, Homo Sapiens
  misc_feature (32)..(32): n is a, c, g, or t
  misc_feature (85)..(85): n is a, c, g, or t
  misc_feature (99)..(99): n is a, c, g, or t
  misc_feature (157)..(157): n is a, c, g, or t
  misc_feature (217)..(217): n is a, c, g, or t
  misc_feature (250)..(250): n is a, c, g, or t
  misc_feature (276)..(276): n is a, c, g, or t
ctggtccttaggggggcacactctgggctcantttctggtgaggttgccaagctcagctcctggtgcaccctggctgttctcagncccttctcggtgtncgtctctgaggagtccacctcacgaattggctcttgcttctgcagcgactcccgtcgnttcggctcggtcctgccggagggtgcctagggcccgtgagggagccaggctgcagcaccncccttcccttggcaggggcccccttgccagacnagcacactcctggctccaactacctnccagaggggctcacttccctggggcggcagttccttctttagttcagagtggggcaggtcaaggctgtgcttgcgagaagtggctagctttttctcagaggcggcaagtgctgctgccagtttctcagccgactgcaccctcttgagtagtggtgaacggggtggctccgcactcttgggccgtgagagttgcctgcccaggggaggtgacaagtgaagctttgtgggaaaggcctgggctacatggccagacaggggcgatggggaccgctgaggtgaagctgttgggggtgggggagaaggggtgtgggccagtggtgacagtgggatgctgcctgctgacttgcgccgtggagagcggtactggcgttggagcttgggtgccagaccgtggagggagctgggccgtgtgtgcccagagccggctggggaactgggcacgctggagctgggggagctgctctgtgatgaattccctcccactgaatgcacagcatcgggggtcacccggtagccttgagtgggagatcggggggaaaggctgtggctgtgtgtgggagagcctggcccactctcccctgatgacaaggagcggttaagggaagaaaggctgcggctggtgtggagcagggatgcttgcttggtgatcttgcggaacagggagctcctttttctgctttcttgcccatccttgccgcggctcctcttgctccttcgggccatcttggccttgtagctgcccttccgagctggccccactttaatggatgtgttctccaggggagttgttgaaatggccacctt

SEQ ID NO: 149656 - DNA, 1138 bp, Homo Sapiens
gctttacgcagcgctgggtctagagcgtccggccggttagtggctcccacgtccccgacctcgcggtccccactggcgccgtccagcagcgtcaacacctgggccactacgcggctctcgggtgctcgactgccccgctggggacacaaggcgtccatctcgtccaggaagaggaggctgggtccgcggctggccagttcccgggcgcagctggaagacccgccgcacgttctcctcggtctccccaggccgggaaccctgcagcgccggggcgctgactgccagcagctccgcgcccgcctcgcagcgccacggcctgcaccagctgggtcttgcccactccggggggccccgccaggagcaccccgcgaggcaccgctaagcccagcgcggtcaggggcgcgcgggtagcggagcgggaggcggaggagctcccgcagcgagtcggccgcctccgaaagacctcccaggggcacctcgggctgcggcatgggcttccgacggaggctccccgccaaggctgacgcgggtacgaggggtgaccagcccagcgggatcgggactgggcgtcccgccgacgatgtgcaaggcagcccccaggccaggagcgccatggcggagcgaccaccacgtggcccaggggagatcgggtcggtttctcagcagctcctgtgccgcctccagcaccgcggctgtattccgggcaccgggcgcgcctgcccgctctcgcaacaccggccacacggcgacgcgccgcaggggcggacagggcactaggaggaggcgattcaggctgagactcctccgggatctcgacgccccgaccgccgccccggggctcgcgcacagcgggtccagctgcacaaagccgtccgctccgtcccgccgaggccaggcagtgcagaggcaggagccgccgtcgggtagcgagatcttccctgccgagcccaagcagcgcgcccagggcgtggagggcggccgggcccaggcggcagcgcttggtgccccggtctctagcgtgtaagggtagcagctttaagagcggcccttcagggaagggatccgagtccggagccgtcgcacgcagatgaaccaggcagacgaaaccagattaggaaacccacccagcccacaaaaa

SEQ ID NO: 149657 - DNA, 1088 bp, Homo Sapiens
  misc_feature (429)..(454): n is a, c, g, or t
gaaggagacttgaggctgtcgtttgtgctggtgttcctctagccacagggggctgctgaccggattcctgtcccacgtgtcccagccacaccttctgcgggggctgtatgtgctgctttggtctgggctgcctgcggcttcagacttgagctgggccttttccgctgcgggtgaaccttctgtatttccctgatgtgtcttggccagagaccaggcttggccgactgggctgcttttcagtactgttttcttttcggtgtgccttccccccaggattcccacctgtctccttggggtttgtatccaaaaacaggtgatttatgactgggtaccacccgtgggatgctctggtgcctctgcgtctggtacatcaaatgcccggagcacttcaggggctcttgttgccagtctgaaatctcaagtcaacannnnnnnnnnnnnnnnnnnnnnnnnnaccctcatacgttttggcataagggccttgctcagtggggcccatttggcccctataatggaaatcggcatcacctgctccaccatcaggtctataatcaatttcctcctgccgtcttctatcccgtggccgaagtgcctggggaggttcgctctcaggaccgcctatatgtctcagcacatgaactgattttccagcaccatagcagaaactcaggatggctaatgccataattatcagcactggaagatgaagcagcgctggaatttccttcatgagtgctttaataaattccccagttccttttccaatatgcttcaatggctccgttacaaatgtggtgaatgtaactgcaagtgcctttgttggtgggaccaaccaaatagggttgactagtaagagctcatagtatttttggcatgggtcatccttataggtccatgaacttctaaaccattcccagatacttccagtccagtccatctttttggcacacacattgtttaatggctccatcttggcgacttcagcctgatgctgtgcaaaagctagcttatataaatacatccaattccatcccaaactgaacagaaagctgatgattaaaacacgtctcaactgagcggacgcgtgg

SEQ ID NO: 149658 - DNA, 909 bp, Homo Sapiens
  misc_feature (57)..(71): n is a, c, g, or t
cccaagggaggtaggattttctttaaattccaatttgctcccttttttgtttccgtnnnnnnnnnnnnnnnggtatttccatttggggtattaaaaaaaattaaaatatttttagaattatggcccatgggaatgaaataaaaaattaatccttccagtatgaaaccatcccccccaggggtacattcatccaaaggagggaatttgtcaccccaaggcccatgtgcttttcagtggaaaggaaggaggggaaacctctaaggccgcacggtgggcccacggagctagcacgtgggcgggactgaaggctggatgccgggattgaggtggggaactagagatgactctaaggcaggaacatctgtaccatctgcagggaaatgctacctccccgggtgccacgagctccaaccccacacactatgtctactctggagagccggcatggcagagctggactggctgggtcagggtggaagtgccccacgtcagggacaaggaggacgatggggacgatggggaggagagacaagtaaactagcagtgctttttaaaaaaatgtttaaataataaataagggcccggagacatctctcttggtaaactctctcttcctccggccaggcccaggtgtggtccacaccagcagataaaaagggaagagaaacccagctcccggcctggcagagctgtttcacgcaaaggctctgtgattcagtgatgctgtgcagggtggacgccaagctgccggacgggatctggagggagcactgaggatgggtcccatggggccaagtccaggctgggtgggagagcgactcagagccagggccgcaaggtgggcctggcacagagctcccaagtccacagggagatgaggtgatgggcgagtcagccgggccccccggg

SEQ ID NO: 149659 - DNA, 519 bp, Homo Sapiens
  misc_feature (327)..(352): n is a, c, g, or t
gctttctctgttgcaactttcccacagattgtgctgcgcatttgggcctgaacagaaaaatctgaggcttacgcagcatgcgtacaatcagcatctctgtggaggcattcccagcagcactctccccgagtgcttcttccgctcatgtaaatacgtcctaggtcactctggatgattagcaaatagctgctgagcaaattggaagaagctggttttaggcttgaaaaacaaaagctattatcaatttggccagagcagagaagactggctggtgtttgggaagggggcaggtagcagggagataataacaaggaccactgactatannnnnnnnnnnnnnnnnnnnnnnnnnagcctttgaatcagttggccaaaccacacagggagagaatggcacagaattccaaaccctgtttctctaattccagagtctatgctctttctggggtttctccatgaggccagaagagaggaagccgcagagaggccgctgtagaaacagactgtgcggggtctcat

SEQ ID NO: 149660 - DNA, 542 bp, Homo Sapiens
ttcaaatgtcagatttctttattaaaatgtgcacattatagtttacttaaatacaaaatgttcactttccttgcaggtaagaaatttcactgacatttccatgtcaattagcttctttttaataaaaatccttccactgaaaataaataagcatttaaattactgaactattatattcattagtctcaatacctcttaaaatacttaaaactttagaaaatagactctaaacattgcctaaaggtggcatccagctctgagcaggccacacaaggtgtgtctgagtatggccatatgactcctggggccacctccacgacggcccagccccaccgacgctctgctgaaaatcctgcccctcagcaggacgcaagcttgttccccaaatagtggtgacctcaaactgcaatatgatgaaacctgcagccaacactgccctccacaagggtttctggaaaggctgaagctggagacggtaaaccacaacaccgtcccatgtcactccaggtcaccccagctaaagacattcaacaccagccaaa

SEQ ID NO: 149661 - DNA, 1340 bp, Homo Sapiens
  misc_feature (245)..(245): n is a, c, g, or t
  misc_feature (1092)..(1092): n is a, c, g, or t
  misc_feature (1153)..(1153): n is a, c, g, or t
  misc_feature (1168)..(1168): n is a, c, g, or t
  misc_feature (1293)..(1293): n is a, c, g, or t
  misc_feature (1308)..(1308): n is a, c, g, or t
acaattaaagatttttcttcaaaaaaggtttttgtggggtgggtgcccccttgttgaaggggtttaccaaaggaaatttgcaaaccaggctcggaatttgggccacgggttattaaggaaaagggatcctttcgctggggaatgtttttcatcccgggggcctgtccagttctttttagctggctgcctgtagccgtgatggagggcattgtatgtacgggaatacctttggctgtcaagccctnccatgagatcctgaagatgcttattcagaataccagtattgagtctatcaaaaagatcatcctcgggctgcttgttctccataaatagttgtaggttcttaaaaactcgtttctcaacagggaccttgttatagtatctgatggagtccttcccgaggaagtcaaactctaccacatattcctgaccatccaactctgggtgtagattgatgtgctccacacgaagtgagcagcagcccacagtgtccgctgtttctccttcctccttttcattgcctgctctcagagcaagcttgtcgatgaagtacagggctacagctctctgccggactttcatctctttggacttccagtcttctcgatactggttccggatcttgtccacacattttttcagccgccgagcagtctcgtatttctgccagtccttctcacccttgattcgtgaactagggttaagcatgatgtatttaatggaaccttggatgttctctgtccaggaaaccagccaagtaaccttgttatcatgccggacttctttccacttatgtcctggaggaggagaaggaaccttggcatctttgctacagttgatgattatcctcgggcatgattcgtctcttcagcatgcccatcttggggtggttgccgcggccacggaaaagtccaggaggctctatcttgaagttagcaatcctctctttgtggttatccataatacagaatccatattctttcagtaatttttcattctcctctttgattttcagtttctcttccttgctcatctgtttccgagcttccgtctgggctttgaaatactggctcatctgggtaaaatcacatnttgcttaggttggtgataatattcttctcttcattagtcatttcctttctccagtctttanagaaatttttcctanatattttccttggtagtatattcatgggtcgagcattttttgcaaagaacgtagctacttccctctgcttttgggggctccagctttcatgactttacccatcataataaaaacttgacatttcntctgggagaaggctncaatatgggtggggggcaaaatactggggacc

SEQ ID NO: 149662 - DNA, 947 bp, Homo Sapiens
  misc_feature (51)..(51): n is a, c, g, or t
  misc_feature (84)..(84): n is a, c, g, or t
gtatgaatcccacccagggcggtcccagggagttgaggattaagggatatnttattccctttggcggagtctggcccttttccngattttctcttctttccctcccattaacactcccaggcacaatccaggtgaaaggcttaagcagtttctggacagtgtcaaagctttgtagagctagctctctcgttggcacgagcaccagggcataggggccatcactgcgctgtatttttgactccattgcttgaagggactggaccacagggatgcaataggcaagagttttacctgagcccgtctgggatctcacgagagcatctctgccttccagcaacacaggaatactttgcttctgaacactggtcatactagacatttttaagaccgtatttattgtggaaattaaatgtgggtggaggcccagctcatgaaaagcagctgaagtaaacactttttcttgcacctgctttaccacaggtctgtggagttctggaatgtcagggttgtttttaaacagtgatgaagtcttaatgcactgtctctcctcctggtttctatcacttgtgctaaccgaatgcttctttggagaaaacattttttgtgcgttccccttaaaagtcctctgagtttctttaacactagttttcttggctgggagaaatgaagtttcgttcctccgtttcgctgggggagcctcactggacgcttggtattttcttttcgtagcctttgcttgccgactcgcctgggctgggggacgtctggagaacgtcctggggttgtcgaagagcgaaccgtcggcggctgccatggtctgcgtgggtgacgcgtggtgcagcagcgagcccggtgcgcagactgctgggcccgggaccccacgtggacgcgcgaggacctgcgcccctcgtgccgaattcaacacccaggcctcgtactagcgcgga

SEQ ID NO: 149663 - DNA, 820 bp, Homo Sapiens
  misc_feature (307)..(593): n is a, c, g, or t
cccccaaacctcttatcttaaaaaccctggacaactttgcctccaattccaggcaactgtgcttgccactcctcttcttgcttgcccttaggaaacttcactgttagtaagataagccaaccacgaaataaaagagtcgtttaaaccaaactccaaatctacacacatagaattattaccctccaacttcctacaagtatacttgtaaaaatatatttcttaaagcacccctaagtaaacaccaatcttgcccaagaaaaatcacaggtttggggcctatctgataatgactgtcccggaagtctcnnnnnnnnnnnnnnnnnnnnnnnnnnnnnnnnnnnnnnnnnnnnnnnnnnnnnnnnnnnnnnnnnnnnnnnnnnnnnnnnnnnnnnnnnnnnnnnnnnnnnnnnnnnnnnnnnnnnnnnnnnnnnnnnnnnnnnnnnnnnnnnnnnnnnnnnnnnnnnnnnnnnnnnnnnnnnnnnnnnnnnnnnnnnnnnnnnnnnnnnnnnnnnnnnnnnnnnnnnnnnnnnnnnnnnnnnnnnnnnnnnnnnnnnnnnnnnnnnnnnnnnnnnnnnnnnnnnnnnnnnnnnnnnccagaggtctcttttacgacagcactaaccacagactttagtccaatatggttaagaacaatgaatctctgaaatttcagagctggcaaacgtttaaaataacgtataagaacttgggtgaggtttttctcccctatctctttacgacgcgtggtcgacgatatcccgggattccggaccgtaccagcctgcttttttaaccaactgtcatattaacaatgcttctc

SEQ ID NO: 149664 - DNA, 1127 bp, Homo Sapiens
  misc_feature (260)..(550): n is a, c, g, or t
  misc_feature (777)..(777): n is a, c, g, or t
cgcgcagcccctcggcgcggcggtctgcagcgggggcgctggtggagctgcgaagggccaggtcggcgggcggggcggcggcgtggcactggctccggactctgcccggccatggcggcggctccagccgggagggcgacgtcggagcggccacgttgagcggcccgtgggaggctggcggcgggaggcgaggcgcgggcggtgcatctgccagtgagcgcccacggagctgtgacccccagagccgcgcggcgccgcannnnnnnnnnnnnnnnnnnnnnnnnnnnnnnnnnnnnnnnnnnnnnnnnnnnnnnnnnnnnnnnnnnnnnnnnnnnnnnnnnnnnnnnnnnnnnnnnnnnnnnnnnnnnnnnnnnnnnnnnnnnnnnnnnnnnnnnnnnnnnnnnnnnnnnnnnnnnnnnnnnnnnnnnnnnnnnnnnnnnnnnnnnnnnnnnnnnnnnnnnnnnnnnnnnnnnnnnnnnnnnnnnnnnnnnnnnnnnnnnnnnnnnnnnnnnnnnnnnnnnnnnnnnnnnnnnnnnnnnnnnnnnnnnnngggattaccgttcccaggaaggatgttacctttgacgatgaccgtgttaaatcctgctgctgctccccacgggtccgggctgcccccaaaaggatggaagtcacaaaggggcagaacctctggaaggtgccagccatcaagccttccctggccccaaacccccctttcccaacccccgggccctggtgaagcaaggctttcggggaccttttcttggcccggaagcncttaccctttataagggtgggaaccttaaggggagaaggggaacatagaaaaaggggggccaaactttggggagaggccattctctgggacaccccgggggagagccaagggggttccttcccctttataacccctcccttttggcgccccttccccattggggctctttggggaccccccctaaaattggggtaccaggcccttggggaatggggccccgctgggcaggctctgggctgtgcgcccccctggttttataaccaggcccgtgcccctacttgggcgcccccccgcgtgttagggtcttgctcccactccttctttcccgtagacccacaccaaccccccc

SEQ ID NO: 149665 - DNA, 1554 bp, Homo Sapiens
  misc_feature (1387)..(1387): n is a, c, g, or t
  misc_feature (1480)..(1480): n is a, c, g, or t
  misc_feature (1522)..(1522): n is a, c, g, or t
  misc_feature (1530)..(1530): n is a, c, g, or t
cgctcgcttgctagctcgctagctcgctcgcccgtccggcgcacgctccgcctccggtcagttggctccgctgtcgggtgcgcggcgtggagcggcagccggtctggacgcgcggccggggctgggggctgggagcgcggcgcgcaagatctccccgcgcgagagcggcccctgccaccgggcgaggcctgcgccgcgatggcagagatgggcagtaaaggggtgacggcgggaaagatcgccagcaacgtgcagaagaagctcacccgcgcgcaggagaaggttctccagaagctggggaaggcagatgagaccaaggatgagcagtttgagcagtgcgtccagaatttcaacaagcagctgacggagggcacccggctgcagaaggatctccggacctacctggcctccgtcaaagccatgcacgaggcttccaagaagctgaatgagtgtctgcaggaggtgtatgagcccgattggcccggcagggatgaggcaaacaagatcgcagagaacaacgacctgctgtggatggattaccaccagaagctggtggaccaggctgctgctgaccatggacacgtacctgggccagttccccgacatcaagtcacgcattgccaagcgggggcgcaagctggtggactacgacagtgcccggcaccactacgagtcccttcaaactgccaaaaagaaggatgaagccaaaattgccaaggccgaggaggagctcatcaaagcccagaaggtgtttgaggagatgaatgtggatctgcaggaggagctgccgtccctgtggaacagccgcgtaggtttctacgtcaacacgttccagagcatcgcgggcctggaggaaaacttccacaaggagatgagcaagctcaaccagaacctcaatgatgtgctggtcggcctggagaagcaacacgggagcaacaaccttcacggtcaaggcccagcccagtgacaacggcgcctgcaaaagggaacaagagcccttcgcctccagatggctcccctgccgccacccccgagatcagagtcaaccacgagccagagccggccggcggggccacgcccggggccaccctccccaagtccccatctcagctccggaaaggcccaccagtccctccgcctcccaaacacaccccgtccaaggaagtcaagcaggagcagatcctcagcctgtttgaggacacgtttgtccctgagatcagcgtgaccaccccctcccagccagcagaggcctcggaggtggcgggtgggacccaacctgcggctggagcccaggagccaggggagacggcggcaagtgaagcagcctccagctctcttcctggctgtcgtggtggagaccttcccagcaactgtgaatggccaccgntggagggcccgcaattgggggccggggcgcttggacctgccccccaggttttcatggttcaagggtacaggggccccagcacgactacacggncaactggacacagaacgagctgcagctcaaagggttttgggnaaataggngggggcctgggggaatcccccttc

SEQ ID NO: 149666 - DNA, 1240 bp, Homo Sapiens
  misc_feature (68)..(70): n is a, c, g, or t
  misc_feature (112)..(112): n is a, c, g, or t
  misc_feature (140)..(140): n is a, c, g, or t
  misc_feature (152)..(153): n is a, c, g, or t
  misc_feature (193)..(193): n is a, c, g, or t
  misc_feature (205)..(206): n is a, c, g, or t
  misc_feature (294)..(294): n is a, c, g, or t
  misc_feature (373)..(373): n is a, c, g, or t
  misc_feature (432)..(432): n is a, c, g, or t
aggtttgtgttgataaataggcgcccccgcgtgaccgctccggccgggccaccacgaagcgcccgatnnnccagataagttccacaaagggaacacaagtttcggaacaagngtgaccccagtaactgggacacggtgtncccgcgggggtnngtccagggccccaccagacccccgaggcccaggggtaggngcgcaattatcnnccatgttgcaggaatataggcccagagtcctttgccaagcccttcccggattggcggccaggaggacatacccaggggcgccaccaanggtcaaagggacctagtcccaggtcgccgggccgagctctctgggtgtttattaccagaagacgctcccggcttagagnggaacggacccatgccacgccctacccgcgcggcaggcctggggtactctgccaagatngagtggtccaggtcccccacggttttctgtgtggagggttgtcccggcatctggccactagggggggccggtggttctcacacacacgcagcgggggctccttagcacctggcttatacagcttcctggggacgccaatccagtctctgctcacacctccactgttctgggagcaccagagccggctgcccctggctgagctccactccgcgttgcacggcgggaatgtctgcttctcttgcagctgtagtttgttggcctccaagcctctggtgatcgcagcttctacctgggtcagtgccggggtgggcagcccatcctctccgtagaaccgtcctgtcaccctcccaacacacacataattcttctcatagaatgaaagccaattgtgaagtgtcagcatctcagcggctgacaggtcggatacgtcatccacgaggcctgcttcagaacagtccccggtcacgaaagctctggatgcgtctcggcctgcgaagccgctatagtgggacccaggctcgtagtgcctccggccggaggacacatcgtagacacggccgagcaacgccaagtacaggcccgggtcccctgggccgccgcggtagcgagacagctcctccggtatgaaaaggcgaaagccagcgcggggaccccaccagcccataagccgtgctgccattaccgctgctgcggctacagccaggcccaacaaaagcccacggcctccgcacctcaacatctatataggcccacccgctccgcacttccgaggttgccgcctctatctacagctaagatggccgagacg

SEQ ID NO: 149667 - DNA, 890 bp, Homo Sapiens
gaggccagaccactatatgattctccattgggccatgatggctactgaagaaaccattgtggtcatggccgtgcatggttctgatgcattcaaagccctgaaaatcccatagtttaatggtcatatctgcagaaccaggaagcccagaagcttgccgctgtggtcgaatgaaatgtcctgtacagagtctgtatgtcctttaagagttcgttcaaaatctcccagtcctcataatccccacacctttaattgtagcatcttctgaagcagagaccataacactgaacacaggatggaaaatgactcgagtgactggactcctgtgaccactcaatgcatatttttctggcggacggggaatccattcttttgggtctcgtttctgaccaagaggtccacctgacgtaaattcttcttttgcttcatttagctttgattctaattccataaccttcttttgtaatctaataacagatgtccattttttttccaaaagaccagcatactttttatctaattcttcattcacatctaattcagcttcctttttaaaaactgaatatgcctcttcatagccatttgaacgaagataatctgctatagctcgatttagttcatctcgttgtctctgggacagcaccatcttggctgtaatgtcaagcttatctgatatagtggtatgtccctcctttgggaaatcaaaaagctttttgatccgtggacttataatttaaatatgccactaagtgtcttccacacaggggaaaatgattctttcacaaatgaatccaactagtaaccagaagatattcaacaagtaagattcattccaccggagcgctgcaccgccgcctccgcagggcctcttccgtccttcaccggacgcgtgg

SEQ ID NO: 149668 - DNA, 1387 bp, Homo Sapiens
  misc_feature (45)..(45): n is a, c, g, or t
  misc_feature (177)..(177): n is a, c, g, or t
gctagtcggattgagttttctcattaccatttctcgtacaagcanccagcatgcgagaatcattggtcgacagctggtggggcccgtgtataatatagagggcagtaaaatggcatcttaaggatgtcataggtctgccgacgtccatatcaagctctgtagtcccgtttgttgacntcaatggcatgtctataagcctggatagcagcagacgtgttgttcatctccatgtactcatgtctcattagtgtccaggcaccaagatcccgaggatttaatttcagggctctctggaaatataaggctgttttctcatgatgagaacgtaaactgtaataattgccaattacacagcacgtttatacacgatatttatcaatctcacagaggttatgagccagataactcacctccgatttcatgctcctgacataaagaaggttggagaatgtgtccatattttcaatcctgtaagggtcttgtttccttagctcattaaaaatggagagggctttgtcaatatctctgatattgtgataggcaactgcaatttgggaaacaatatccgagctcttagagaagcccacatcaatgagattctgatacttttgcagggcgtcctctatcaactgcaactctgtgtatatatgagccagaaaaaactctttcatccaggtgtctggcaaagacaggaacttcaagcatctctttgtctgtgatcaggttacagagttctaaccaggctccccaatgcaagggcaaaacatgagtagcttcctcaaacacatcaatggcctctttaaccaagtccagttttggaagcaccacaccatacagataaagtccaaatccatcaagttctcgagcttggtgttttttgctgagctccactctcaattctctaagcgcctcatttttcacttgtcctttttccagggggcctaagctatcaactgtttcatcgtccttctttttttctccagacagatatctggaatacatatacagaaaataggctttcttgctattgcagccatgcaggaaatgtgctgcccgatcatactctttaacgtcaaagtaggccttggccagggtataggcatccatatcctgggcatcttcctctgtaataggcggaggcggttgcagctcggccagaggcaatgcagggagagagaaagccaactccgccgaccatttgctactgtgtagtaggccccgctcccgggtaaggcccgcaataagcagcagttgctttttaatttcccgcaaatctgagaaatcgctgtttatggacaggacaggcgccactgccgccgtcacagccaccgggaccatggaggtactcgcagccattttcccgactcgggccactccagccaatccc

SEQ ID NO: 149669 - DNA, 1033 bp, Homo Sapiens
  misc_feature (104)..(135): n is a, c, g, or t
  misc_feature (140)..(140): n is a, c, g, or t
  misc_feature (179)..(179): n is a, c, g, or t
ggaaggaacccaaccctccccaggggccccaggccctggcggtagaagtcccctccatgattcggggggcctttcaccgttgaatgccccgtgggacgaagggnnnnnnnnnnnnnnnnnnnnnnnnnnnnnnnnggggnccctttcttcccgttttgctccaggaccagccactcggnccagggcttgctgcaaggataggggtgcctgtgcactgcttcgtatggggtgtcttcgttgcccctgtagaaggggtgacctttggtgttaggccccacaacttccatgctgctggtgtagaccaggaaccgtgttccggtctgcacacaagcctcgatcacgttccgggtaccctgcacgttgacctcatggatggtcttgggactggccctgccaaacacgtctaccagcccagccgtgtggatgaccacatgggctccggccacagctgctgccacctcatgggcctgggtcacgtccccctggatggcagtcaccctcacaggccctgtcttcagctcctccagccagggacccaggtgttggtcaaagacccgcagctccccgagccggggctcccgctgcagcagcattcgcaaccacgtgctctcccaggaagccacagcccccctgtgaccaggtacaccagcttctgggcctgtcgcagagtcggccatgcctggctggggaagagaccttggctcatccaggggctggctgccacctgctgcaaccacctgttactgctaggaggtggcctggagcggtgacgaggctggcgtttggcgggagggcagagctgatcctgggagctgcagcaaccaggccacctgccgtctgcccctgctgatggctgcagccgctatcccagggtgcccagactggcctggaggggccctcttctcttcgtccagggctgccgcccgcacaccgtcgacgcgtggtcgacgatatcccgggaattccggaccggtaccagcctgcttttttgtacaaactgggttcatagttacctaatctgccggtggagtcc

SEQ ID NO: 149670 - DNA, 1140 bp, Homo Sapiens
  misc_feature (127)..(127): n is a, c, g, or t
ccaaggggttccccccctttggaaaagtttttgggcccaagggccacgaatttttttcccttcagggttcccaattttggtttttaaaacatttcccgaaaggggcctttttccagggcgaaatggnccggggcagggttaatagtatttgcttgtatttcatcccatcccacactttcagggtgtccggcttggtgtttttttatatacgtgttggcattttccatcagggaaaaaggtaggggtgcttcttcccggaagaacgtgccccactcggctgcaggggacgatctttaggctgcccccgcacatccacactcggaaggagatttcaaagttctccccaccccagatgtccatgtccatatcatatttccccaggtaatcaaaccaagctttgtcgatcacgaagagccctccagctatgataggagtcctgatgggctccgtggggtccaggcgccgagccttctgctctggggagagctgctcccactggaagtggaggctccagtcaaacccccctctgagctccgaggcagactcgatgtaggtgaaggtgtccaggttaatgatatcgatcacagggcacaccacccgcgtgtagtcctctttgaccctgtgcaacagaggctggagccagtccctgttcacctcacagtggctgtcgaggaaagtcagagtggtgccctgggcgatgtcagcgccccgaatccgggaccggaccagaccttgccgttcattattgcgcaagcatttcaccttgggcaacttgatgagctgtttacagtcatcagggtcattgctgaagtcatccactaatatgatttcccggatcagatgcgtaggggtgcggtttaatacactgcggatggtcctgagcagcgtggagcgggcctcgttgtggaaggtgatgatgatgctagtgggtggaaggtccgtgcaatacaccagcagtgtgcatctcagatggcgagtgtccgggatggcccgattgctggagatccgctcactctcccgctggttgaaagcatacagcttataggggtcgtcaccaacgcgccactttttggcattcagataccgccgctcatcaaactggtcccacaggtcgtcccggacgcgtgggcggacgcgtgg

SEQ ID NO: 149671 - DNA, 1239 bp, Homo Sapiens
  misc_feature (482)..(482): n is a, c, g, or t
atgagccaccggctggcctataggtgctatttaaatccatgagatctcctagggagctcaagttgctggaatctgatgggagtgggggcaggagggctgagccagagcgggtaggggatgtcattggcaggaagcctgtccatctcggctgagtcttttttctgtgaggttgagtcaaggccatcagcggggagggagctgagctgaggcagtggagtaactagagatgaagaggaaaggtgtggaacaggcatgtgccaggcagggctgctgggcgatgttgctgcacgtcccattgctgtctgtgctcatgaatgtcaagtgagactcctcagccctgtacccttctccagctgcttgagtgtcttgcagaaaaggtggatggttggggattgactcagttgagattttgcccccaaacatccctttcccccaggcccctaaaggggaagtcagggaaataactttctaacaaaaagcanggaggcgagccctagaagcggggagccaggaggccgaaggaaatctcatctctccacagtctgtccctgtgacaagcaggctagggtggcccccctccctgcaggtagaggattctgaagctagggtaatgatggcagatggctgctgtatcctggcatccagccagctcccagtattttgccatagctcccattccctccaaagcactttctatttcttcgcacaaagtggctactccactgacggattcctagggctgtgcagacagacagggctcccatgctctgcgtgtccctccctcaggaacccatgcttggcctctgacatcttttcccaggccccccagtgaagcaagaactggtctcctgcaagatgtgccgcattgagtcattcttccgcaagaacggggccttcgcactgcttgatccccgagacctggccctctgaccgtgggccaggtgtgggcttaggggagggaagaagaaataacaggcctcctggtggggcaaagctgctgtgtgtgtctgtgcccctctgctctccctgtccctgaggttgcattcaggcctttctgaaactatcagacctgcaagttgccctcttgctttttccgtaaccctcatcactttaatcatccctttgaggactcagcaatgaccagagggtgctgggaagggcgagcactacttcgcaggcacgggatcctcagcaccaggggaacacagtagttccaggaagttctgggtgttcctggcc

SEQ ID NO: 149672 - DNA, 1613 bp, Homo Sapiens
  misc_feature (748)..(748): n is a, c, g, or t
  misc_feature (760)..(760): n is a, c, g, or t
  misc_feature (1151)..(1209): n is a, c, g, or t
ggcctgggtggcgaattcggcacgaggggcaggcgctagtggatgagctgacacgctggctgcaggagttcacccggcaccacggcaccatgagcgacgtgctgcgggcagagcgctacctcctcacacaggagctcctgcagggcggcgaagtgcacaggggcgtgctggatcagctgtacacaagccaggccgaggccacgctgccaggccccaccgaggcccccaatgccccaagcaccgtgtccagtgggctgggcgcggaggagccactcagcagcatgacagacgacatgggcagccccctgagcaccggctaccacacgcgcagtggcagtgaggaggcagtcaccgaccccggggagcgtgaggctggtgcctctctgtaccagggactgatgcggacggccagcgagctgctcctggacaggcgcctgcgcatcccagagctggaggaggcagagctgtttgcggaggggcagggccgggcgctgcggctgctgcgggccgtgtaccagtgtgtggccgcccactcggagctgctctgctacttcatcatcatcctcaaccacatggtcacggcctccgccggctcgctggtgctgcccgtgctcgtcttcctgtgggccatgctgtcgatcccgaggcccagccagcgcttctggatgacggccatcgtcttcaccgagatcgcggtggtcgtcaagtacctgttcccagtttgggttcttcccctggaacagccacngtggtgctgcgngcgctacgagaacaagcccctacttccccgccccgcatcctgggcctggagaagactgacggctacatcaagtacgacctggtgcagctcatggcccttttcttccaccgctcccagctgctgtgctatggcctctgggaccatgaggaggactcaccatccaaggagcatgacaagagcggcgaggaggagcagggagccgaggaggggccaggggtgcctgcggccaccaccgaagaccacattcaggtggaagcgagggtcggacccacggacggtaccccagaatcccatgtggagctcaggccccgtgatacgaggcgcatcagtctacgttttagaagaaggaaggagggcccagcacggaaaggagcggcagccatcgaagctnnnnnnnnnnnnnnnnnnnnnnnnnnnnnnnnnnnnnnnnnnnnnnnnnnnnnnnnnnngaggccaagccgctctggaggaagagtaagggcggccgggcggcggctgcagggcttctgcctgtccctggcccagggcacatatcggccgctacggcgcttcttccacgacatcctgcacaccaagtaccgcgcagccaccgacgtctatgccctcatgttcctggctgatgttgtcgacttcatcatcatcatttttggcttctgggcctttgggaagcactcggcggccacagacatcacgtcctccctatcagacgaccaggtacccgaggctttcctggtcatgctgctgaatccagttcggaaccactgggggggttgaccgccgcccctctacctgcgcaaaaaccgtggctggggcaagctgggccttcccaaggtggcgcctgggtgctgggcct

SEQ ID NO: 149673 - DNA, 951 bp, Homo Sapiens
ttcccatgaaccgactcaaaaaatggcaacccccattggctccaatgttgccccttggtgtcacacccgagactccggatcaatcctgcacacaagtcactaaggatgtctccatacaaatttggcataacaagaacatcaaattgggaaggatcttgtaccatattcaaacatactgtatcaaggtacatctcattaaatttaatatctttacagctttctgcaacttccctgcatttttgtagaaaaagcccatctgacatccgcatgatgttgggctttgtgcacctcggtgacgttgctccggtggttgttccgggcatactcaaaggcaaactcagcaatgcgcttgctcgccccctcggtgatgagcttgatactctgcacgactccatcaacaatcacatgctcaattccactgtattctccttctgtgttctctcgaatggtcacaatatttacatcggtgtaaggggttttatagccttcgatagagacacatggtcggacattcgcgtaaaggtcaaatgttttgcgcagcagtaaattcatagatgggtgaccggctgctattggggtcttcaaagggcctttcaagcccatcttgttcttatccatggactctttagcctctgaagggatcatccactttcctccaggtccttgaatggcagtgacgttccgctcctcccactgaataggtgctttggcagcatcaaaaatcttcataactgcagctgaaatttctgggccaataccatctcctggaattaaagttactgtctgaacaccaccagtaaaacctctggtcacctgttttgggttgtggaatgcccccagcagccgagagaccttagagatccacgcgggcccagccatcgcttcccctcctggctccgcccccggccgtaatggccgaattcccgggcatatgtccggtaccgtcgactg

SEQ ID NO: 149674 - DNA, 900 bp, Homo Sapiens
cttaggtgtttaagttccgcgcgcaggccaggctgcaacctgacggccagatccctcgctgtcctagtcgctgctccttggagtcatgttcccagccgccccttctccgcggaccccgggtaccgggtcccgaaggggcccgctggccggactcgggcccggctccacgccccggacggctagcaggaagggtctgcccctggggtctgcagtcagctccccagatgctcttctcgaccggtcggccggcgtagctcgctaagctcgcggggaacaccaacacgaatgttcccacaccactccataactgagtctgtgaactatgatgtgaaaacgtttggatcttctcttcctgttaaagtcatggaagccctaacattggctgaagtcgatgaccagctgaccattaacatagatgaaggtggatgggcttgtctggtgtgcaaagagaagctcattatttggaagattgctctgtcacctattactaagttatccgtttgcaaagaacttcagctgccacctagtgatttccactggagtgccgacttagtggctctttcttactcttctccctcaggtgaagcacattctactcaggctgttgctgtcatggttgccaccagagaaggatctatccgctattggccaagccttgctggtgaagatacctacacagaggcttttgtagattcgggaggtgataagacttacagtttcctaacagcagtgccagggagggaagtttttattttgggccttcatccggggaggccgcacctaatttccgggttgaataccctggaggagcctccagggaaaagatttccattcaggcaatgatccctgggccttcacagggggccaaggggcaattgcctttttccaagggagatttgg

SEQ ID NO: 149675 - DNA, 1369 bp, Homo Sapiens
  misc_feature (218)..(218): n is a, c, g, or t
tcagatccagtgaccacaaggccagatcctttcctcttccttcacaccaagttggcgtcacatgctggtagttggaactcagccttgggaggccacgtgacctcacctgtcatcatggattatgggattggacgaggggtgggatgtcgcctgtagccctcctcccaccttacctcagcagacaggcaggcagcaagagggcacagggagatgcacgncagaccagagggcaggggccgtggccaacagctggctgcaagggtgaaatggaagaactaagccggcctccaggctccaagctcactattggcaggcactgcagaaaatgtcctgtccttacacatgtgagcccggagcctgctgacctggaccctaaggaatgcctgtggtcttcgctggaaccaacaggagggtctgctggggtcagcaggacaagcctgggcctgccagctctccccaccctccctgcgggtgcgtctagggttttcacagcttggctcgagacagcttagtgttggcacattcacagaatgagatggctgcacaccccaggctgcggcccaggatcagggagtcccctgccggggggccctccccccgttccccgcgactgccacgcccagggtgatcttcaggttctcgtagaccacgtagctgatgctcacagctgggatgaccttcatgaagttgggggccagccccctgtacagcccgaaggccccctcggtccgcaggatatgtttgaagaggctgctcatggtcacctccggagcgccctcaatagaggcttgcgcctgcatccgggtcctgactagggccagggggtagctggccagctggccacaggtactggacatggtgccacaggccaggagcacaaacacgccggggtccgcgctgttcactgcatagtgctgcagccaggcattcttgagcgtctcgtagactgcaaggtcgatgccggcataggggatgatgcccagcatgttggggacatagcctttgtagaaggcggccaccccctctctggccaggatcctcctggcgcagtccagcattcctgagtactggcctgtcttccgcagcgccatccgggtcttcaggacctccattgggtagatgctgctctgggcgatggcccctgccaaggaccctgccacaagcctctcgtgaatcctcagagtctcctggtcactaccaacaaggcgcttgatctgctcataggccatgaatttgatggctgattcgggggcaattttgaggacgttgatgccattgccccgccagagtgacctggcccctccttctcgaatcatctgagtgaagccaccaacgatgcccatgttgttgctgcgggaggcatggacct

SEQ ID NO: 149676 - DNA, 884 bp, Homo Sapiens
  misc_feature (652)..(652): n is a, c, g, or t
  misc_feature (704)..(704): n is a, c, g, or t
  misc_feature (722)..(722): n is a, c, g, or t
  misc_feature (777)..(777): n is a, c, g, or t
  misc_feature (864)..(864): n is a, c, g, or t
agagctatggcgggtttgactgtgagagacccagcggtggatcgttctctacgttctgtgttcgtggggaacattccttatgaagctactgaagagcagttgaaggacatcttttctgaggttggacctgttgttagtttcagattggtatacgatagagagacaggaaagccaaagggttatggcttctgtgaataccaagaccaagagacagcacttagtgccatgcggaacctgaatgggcgcgaattcagtgggagagcacttcgagtggacaatgctgccagtgaaaagaacaaagaagagctgaagagccttggcactggtgcccctgtcattgagtcaccttatggagagaccatcagtcctgaggatgcccctgagtccattagcaaagcagttgccagccttccaccagagcagatgtttgagctgatgaaacaaatgaagctctgtgtccagaatagtccccaggaggcacggaacatgttacttcagaaccctcaactggcttatgctttgctgcaagcacaggtagtgatgagaattgtggatccggaaattgccctgaaaattctgcatcgccagacaaatatcccaacgctgattgcaggcaaccctcagccagtccatggtgctgggcctggctcangatcccatgtgtcaatgaaccagcagaatcctcaggcccctcaggcccagtnctttgggtgggatgcatngtcaatggcgcacctcctctgatgcaagcttctatgcaggggtggagttccagcnacccagggcaaatggccagctgcttgtcacagggacctgggccctggtttcctttaccttcttggaagaagaaatggccaggctccngggttggaaatgccaaggaa

SEQ ID NO: 149677 - DNA, 1285 bp, Homo Sapiens
  misc_feature (391)..(391): n is a, c, g, or t
tttcctcgggatcccttccacctctgccatccaagggtggacccctctgatctagcatgggtcctctttgtttctgccattagagttctggctcgggtaatggccctcccctcagttcatttggggtggtcctcggctctcatgcgcagggacatggtgcatgggtggaccctgatgaggtggtcccaagtaacctctaggctctacctctccagttacagaaagtaaagtgcctccccgtggatcattcggagcatctcctaacaagcctcgaggggttgggacattcgcaggcaaggatccccgctgcatagctgctctggggtcttgcatcggcacttgcccccgttccatggacactggtccacttcctggcattccaacctgagcnctgcattcctcctccaggagctaaggaaccagggccaggtcctgtgacagcagctggcatttgccctggtgctggaactccaccctgcatagaagcttgcatcagaggaggtgcgccattgacatgcattccacccaaagactgggcctgaggggcctgaggattctgctggttcattgacacattggatcctgagccaggcccagcaccatggactggctgagggttgcctgcaatcagcgttgggatatttgtctggcgatgcagaattttcagggcaatttccggatccacaattctcatcactacctgtgcttgcagcaaagcataagccagttgagggttctgaagtaacatgttccgtgcctcctggggactattctggacacagagcttcatttgtttcatcagctcaaacatctgctctggtggaaggctggcaactgctttgctaatggactcaggggcatcctcaggactgatggtctctccataaggtgactcaatgacaggggcaccagtgccaaggctcttcagctcttctttgttcttttcactggcagcattgtccactcgaagtgctctcccactgaattcgcgcccattcaggttccgcatggcactaagtgctgtctcttggtcttggtattcacagaagccataaccctttggctttcctgtctctctatcgtataccaatctgaaactaacaacaggtccaacctcagaaaagatgtccttcaactgctcttcagtagcttcataaggaatgttccccacgaacacagaacgtagagaacgatccaccgctgggtctctcacagtcaaacccgccatagctctgttgaggtcggccctcgtgccgaatttcacaccccaggcctcgtacctagc

SEQ ID NO: 149678 - DNA, 1026 bp, Homo Sapiens
  misc_feature (795)..(795): n is a, c, g, or t
  misc_feature (920)..(920): n is a, c, g, or t
gcccgcccgcccctcccgcccctgcttctgtttcaggatgcagaacgacgtgaagctgccccagggtcagcggcgcaactacgcccatgcgctggatggcctgtaccgcgtagctcgtgaagagggtctcaggagactgttctcgggtgcaaccatggcatccagccgaggggccttagtcactgtgggccagctgtcctgctacgaccaggccaagcagctggtccttagcaccgggtacctctctgacaacatcttcactcactttgtcgccagctttattgcaggtggatgtgccacgttcctgtgccagcccctggatgtgctgaagactcgcctgatgaactccaagggggagtatcagggcgttttccactgcgccgtggagacagcgaagctcgggcctctggccttttacaagggcctcgtcccagctggcatccgcctcatcccccacaccgtgctcacttttgtgtttctggaacagctacgcaaaaactttggcatcaaagtgccatcctgaccagccgtgggaatggctgggctgccaggccagacacgctaggttcttccaaagagtcccaagcccagcacctgctcctggggccacgacctccctggccgtggccacccgtcctccgcagcaggcccctgctgtccccccacctgctggctgagctcctcctggcgtcgtcccctctcagctgtagctgcaccacccccgctctggctaccaggctctcccggctgggcactgcgtggccttgcccctctcccgctggcagctcctcaggnggaacaggggctaccagaggctgatttctccctctctgggcccaggggaagggggattatccctgcctcctgcccccgatgccaaagcagcatcttcagcactttcatcaaggaattgggggggnaaaagtggtggtggccaccctgtgctggttgctcacccaagtgctaggctctgcaacttcctggtctggctgagagcaaccagacctttccatggtcctcggggca

SEQ ID NO: 149679 - DNA, 1030 bp, Homo Sapiens
  misc_feature (138)..(152): n is a, c, g, or t
gtgtgtggccgtggggcgcctcctaggcgcatattccccgcgtttggggccgaggttgggccccctctgaaagccccaactgttttggggggaggggctttttccgggaacccccaaaaaagtggaggccctcgtttnnnnnnnnnnnnnnncgttatccccaccttggggcacggggccccttgttaaaagggccccagggggccggaggctttggctgttttcccccggcccaaggggaaaaccgccccctgattttccccccttgggagttcatccgggggagttttcagcaccatccagggggctgggcacaggaacggtggcacatcccccttgcattaaagctggcgacaaagtgagtgaagatgttgtcagagaggtacccggttgctaaggaccagctgcttggcctggtcgtagcaggacagctggcccacagtgactaaggcccctcggctggatgccatggttgcacccgagaacagtctcctgagaccctcttcacgagctacgcggtacaggccatccagcgcatgggcgtagttgcgccgctgaccctggggcagcttcacgtcgttctgcatcctgacgttgaccaagtctgcgggcgtccccacgaagcctccagctaaaccgctgacggagcccagcaacaccttctcgtggaaggggagaggcccctggctgcccttggccacgcggtcccgcacagtctcgtagatggcgaaccgagtcagggagtaggtcatctgtctgcacagcgaggcgctcaggccgctgtagagtgccaggatgccgtcggtacgcaccacccgcagcgccatgcccgtcatgcgcagcttcacctcctgctgcgtctgcagatgcaccttgagcaggtccagcgggtgcgtgcagcaggcggccccgcaggaggccagccccccgaagtaccagcgcgacacgcgcgcctcggctgccatggcccaggagagcccaatcccggcccgaccacaacccgaccccggccctaccccggcgtgtaccg

SEQ ID NO: 149680 - DNA, 960 bp, Homo Sapiens
acaaattacggctaggtacgaggccgcgtttaaattcggcacgaggcggcctgtggatgttgcggtgagcgcagcggcgtccgaggcaacaagatggcagctgcggagccgtctccgcggcgcgtgggcttcgtgggcgcgggccgcatggcgggggccatcgcgcagggcctcatcagagcaggaaaagtggaagctcagcacatactggccagtgcaccaacagacaggaacctatgtcactttcaagctctgggttgccggaccacgcactccaaccaggaggtgctgcagagctgcctgctcgtcatctttgccaccaagcctcatgtgctgccagctgtcctggcagaggtggctcctgtggtcaccactgaacacatcttggtgtccgtggctgctggggtgtctctgagcaccctggaggagctgctgcccccaaacacacgggtgctgcgggtcttgcccaacctgccctgtgtggtccaggaaggggccatagtgatggcgcggggccgccacgtggggagcagcgagaccaagctcctgcagcatctgctggaggcctgtgggcggtgtgaggaggtgcctgaagcctacgtcgacatccacactggcctcagtggcagtggcgtggccttcgtgtgtgcattctccgagtgcctggctgaaggagccgtcaagatgggcatgcccagcagcctggacccagccgcatcgctgcccagagcctgctggggaccggccaagatgctgctgcacagaggggcaagcaccaggcccagctgcgctcagaacgtgtgcaccccggggtgggaccaccatctatgggactccacgcccctggaagcagggccgggctggcaagcagccaccaatgaaccccccggggagggtgcccacctggccgggccaagggagctcaaccaaaaagtaaggttgggcgtctggggcctcccc

SEQ ID NO: 149681 - DNA, 1188 bp, Homo Sapiens
aattccatttttttgggcgcttttccccaaggaaatttccccactctcgaatcctcgccgcagtatcttcacggtttcccccacccaatatcgccgaaacggcccaccgggaggtccacggaatacgtcacacgcgcattctcttaatttctcccacaaagcgctttttaaaatctaaactctcgcttccccctgtttgcccccccgaaaccccacttttgccctcaaggctggtttttacttccatccccccggtttttggctaaaaaaaccctccaaagggggccaccctcccctttacggttctaaaaaataataaatgtggggggataattaatgggaggggaaaaaacggtgacatccattaatttataatctcccccttaaaggaaatttagctattttgtctttaagttgatcccaaagcccaccaattcccttaaattcaatgattcccagaattctttacaaaaccatccttggtatatgaatatcttagccccaaaaatatctgtgattatgatgaatttatgatgatgaaaaaagccaccaacttttatagagatccctgaatatccgagagcttaggaggcccaaggattaaactttctatgacttcctgtagaatgtgtgccttgttaagtagggattagcttctgcataaaatgtgaaaactgagatcactcactcattctattcaaagaagaagtgagatatactgtcagttaaaaagatgaaacaaatatgggaagtcaggcactaatattagttggcaaattttacaaaggttttaattacatacctctttaaaaaaagaaaacctaggcaacacagacctatattaaaaacatcagtttcaaatttcttccaagtttgcttttaaatgaaggtttaaaaagcagatcaactctagattttgtagtccaacttgctgtgaaatactgaaactaactttcctttaagaaatcttaaggaggcacactttctagtggtgataccctcctccaaaccaaaagtagtaagaaggtaagggtatgaacagcaaagttgtgtaacattttcttatttctataattttacttattctggatacttttagaaaataaactcatgttttaactaagactgttaaccaagtacaaaactatttgttgttgcatttgcagatacagtatcctacaaatatcc

SEQ ID NO: 149682 - DNA, 949 bp, Homo Sapiens
atccaggggaaattccaccaggaaaaccctccgggaggttccagggtcccctgggggtgaaatgggaactcttgtggagggggggttggtaagaggttactgccccagaggggaagcctgggctttgggggtccccggtttcttgggggaggcaaggaaggctttgaaacagccccaaccatctccattcacaacctgctctttccaacctgtgaccctttctcaggaaggtctctgggggcctctggcatgtcagggatcacctggtacaggggctcgaagtaaccaaacatgtcctctgccacctcacccaggggcactgtgtcgatcaccttctgtgccaccagtttcatttcagtgatgtaggcagacatggcctcctccctgctcatcttgcccagactgttccaggcgtcccacttatatcgtccaatggggtcccagaacccgggccgggggaccaggcagggccccatggtggcctgcttgtagtaactgtagaatcgcagcatctcttcataggaggggcggtaagaaccgttcttgggcaggttctggatgacgctcactgcagcctggaactgtttctggcagtcgggctctgggctttctttctcggtgcccatgctgctgcgagccctggggccctacttttgagcgactctcaaggcagtgtggtggggtcagggtcgccaggtggcgaggcaggtggcgagggcctcagtgccagatgtgtccgtccccagatgcgcctcctttaggtgcacatctccaactcccgaacaggtggagaaacaagataggagtactcagggcggggcgaacagtctcccaccctggccgcctgcaccttggcccagcgtgtgccccgcggcgcccactgccaggacacctgggtcctctctcgccaccaccccgcggcttcctactgaccccggggtccagcccc

SEQ ID NO: 149683 - DNA, 2274 bp, Homo Sapiens
  misc_feature (97)..(97): n is a, c, g, or t
ttaaagggggatgcctgcttcgccttctgtggcttttgtttggaaaagggagttggattggaggatttagatttgaggtcatgatgtcagagcacanccaggaacttcccaaggcttgttgctgaagatgcccacgctgtcaaagtagggtggtgggggagacagcgagggcagttcaggacaccaggcactcctttgtctggtagagaggaggaggggaaatggagctattccaggatacaagggatggcactgagggatgcataagtcccctgcctcccttgtctcaacatgttctcctctgccagcccagtcagcttggggagctaggtatcagaaacctgaaggattcagcccgctttgtcctactagtgtctataagtctctgtcctgagatcctggggctcctcctatttctagaagggatgaggtgccatcaaaaataacttggctggtgtaacagtttagagaaggaagtcacacctgtagcctggctggcaggcaggtggacatgaggctgagaagggaagccagatgtcagaacatactaggctagcatgcctgcttctagctttcaggacccaatgtacacatacacatgtgtatcatgtatgtatatgcatggacactcaagcacaggaggggttatgtgctctgatctttgaaaccagagaagggaggaaaagccttatggaggtccctcccccaccctaataggttgctaccctcaattgccatctgcccaccaaggcccctgcccagtgctaggcagatagccaagtggtaggggtgacatgactccactaaagcagcagcccaaggaagtgagggaggggacagaggctgaccctcctcaaagccccttgttgtagtagaccacttcaacgctggggttttgctcatggatctgagctctcagctctggttccaggttgcttatgtgtatggagctcttctgggggaatagggcacagcacaggggggttgcaaataccaggcagaagcccaccagtcccacctgcaggggtgcccccagccagggggcggcgcttcaggaagtctttcttctccagagtgtccatgatcagtggtgggatggccatggcaggaatcgccatgcagattcttgaaatcaccacctggaagattccctgcttggctgcagtcaccgagtagccaagcctctgacctgcctcatcagccaccgggatgcccacctgcagctctctctgcctcatcagggggatgttgatgcagttgccagctgccactgctgcaaagggcacaaatctgccgaccaaggggggcaggtgcttggtgagggatttgagtcccagggccgtggccacagctccagtggtggcactcacataggctgtccccagctgcctcacagtgatgggagtgtcaccactgcggttggagtagttaacaatggcattgaaggactgattcacccactgccagaacaccacggttggggtcttcctgtagaatgtgagcatgcagccagtgatggtcatgttcatgggcacctgggctgacatgcggccaatcaggaccaccttctcccctgtgtccggatggaaggcggagtcatacacatacttggccctccacagctggtcctcggtgatccctggggtcaccacgccggccctgtagttctgcacgatgttccgagaagcttccagctgtgccccggacagcagcagatttcgaggatcagtaacagtgaaaaagtgccgggctctgcccaggaaagtactttggtcccagcgaggttcctggatgttgatgtctaaaggcaattcacccattttgctttccatcgctctctgaagctctcagaaccgccttcctctctgcctccgctgtcgccgccgggccctcccagccatcacgcgggacgtcacgcgtgacgccgaccagcagggaggggcaggagcttcccaggccgcgcccacccggtgggcacggggattggcagaacccagccaccacacagagcacgcctgcagcaaactcaggctcacgtcccagctctgccccgtgacgtccctccacggaggcctcaagggtgcccagggaggggtggctattccaggagcccacggtagctggctcggctcagagaagtaggtggttcgagtccggaggggtacaagccagacccaagccctaaatttgcggaatgagctagggcgtcagaaccagaactggggtgggtaaacctcgtgccgaattcggcgcgccgtcgacttcatactctct

SEQ ID NO: 149684 - DNA, 1078 bp, Homo Sapiens
tggtgttcccatccaaggctaaaagagcaagttggcaaaataaaatcttttcccacgtgtgtattcaaaagccaggccggttttaatatatttcaatcatccatgggccctgttaaaggttgtcccacccccttttcccccttgtgtaagcatcccccccagctttgcagggtttttgtcccataggagcccagttaatattaagaggagcaatcccccaattggaatgagggcacttgtaaatctcaggcacaatggcccaattaaagatatttactttcctttccagtatcagcgtccccccattacatcgggtatgatcaaaaagaccccgtgatgattctgtctcctgaggtgttaaatgacaaggagatgatttcggcagaatgtcctcttaaggtgtaaacttcctcgccattctgaatgtcccacaatttggctgttgtgtccatacttccagtcgccaccaatgtgctttgagggttaaatgataaacacactatttctgctgtatgacccctgaaggtatggtaacattttcctgtttccacactccagagtttacaagttttatcaaaggacccagtggcgattttgtcaccgtaaggattgttgaatgctatggcataaaccacattcctgtggccctccagcgtgttcagctcctctccagacgcagtgtcccagagcttgcacgtccgatcatagcttcctgtgataaagcatgagcccgatttgttaagtgcaacattagtcagtggcaatatatgtgctttgagaaccttaaaaagatagaacgtgtgattgctgttctggccgagtttctcttgcaacctctgtatcaaaagtttgacttgctctgttcgtgaagctgtgagtagaggttctgccttctggatttcttctactaacgcactgacatcagtgctgggaccaagatcaagcaaatctatggacttagtctttaattctccatgtttttcatattccaacataattcctggcgggtaataccggagcaggaggctcttgagcttcattttcttgctctcttatccatcccgggaattccggaccg

SEQ ID NO: 149685 - DNA, 862 bp, Homo Sapiens
tttgatatcaaattgaggcaaggcaattttttctaattgcacaggatctcctgactgccagataaatcgtaaatcatcagttgtgtaaccaaagctctccagttgcatcttgcaacgttgtgtatccatgggaaacaatgtcaagtccaaagggcatgaaagagtaatagataacctcatgctgacaaggacatctccatcacgaaaaataaagaggaggatgttttcctgggtcacatcatgaaaattggcacttttttcatttgcaaaaaataaatcaggtttccataaacacttgtacattgttggatccactgtcagtgcatctgaacccctaaaatcactggggagcttcagcctggggtcattccatttttgtctcaggaagatgttaactctatagtccattgttgtttcttgaatggatcccaaaactgttaataaaaatgttgactactacatcaacaggaatgcctttgaagtttggtcttatcctgggatcataactgaccaataacctgttcaagatattgctagtggagttggcaggtactcgggcaaggtcctctgctgactgctgagatgggcatagatactgcttctttttccccttccctttctttgaagacttttccttagaataggcttcttccacccacaaggaaattaaaattaaaaaggcagttgtcaataaaaacttcatcttgaaaacttgaatttcagaagatcgatccggaggcgcccctgcccacaatcgccgggcgagatcgtggaggctccgggcccaggtggcagtggctgctaagggtgcagcgggcgccgagcgggggcagctgcgtcccagccgcccgcccacgcgtcc

SEQ ID NO: 149686 - DNA, 1360 bp, Homo Sapiens
aaggacgcgaggcctgggtggcgaattccgcacgaggcggaggcggcggcggctgactcgccttctctccggggctgcgaccccgaggcaaccggctgcagatgggagcccgcggagccgaggatgcgggcgggccggggcgcgacgccggcgagggagctgttccgggacgccgccttccccgccgcggactcctcgctcttctgcgacttgtctacgccgctggcccagttccgcgaggacatcacgtggaggcggccccaggagatttgtgccacaccccggctgtttccagatgacccacgggaagggcaggtgaagcaggggctgctgggggattgctggttcctgtgtgcctgcgccgcgctgcagaagagcaggcacctcctggaccaggtcattcctccgggacagccgagctgggccgaccaggagtaccggggctccttcacctgtcgcatttggcagtttggacgctgggtggaggtgaccacagatgaccgcctgccgtgccttgcagggagactctgtttctcccgctgccagagggaggatgtgttctggctccccttactggaaaaggtctacgccaaggtccatgggtcctacgagcacctgtgggccgggcaggtggcggatgccctggtggacctgaccggcggcctggcagaaagatggaacctgaagggcgtagcaggaagcggaggccagcaggacaggccaggccgctgggagcacaggacttgtcggcagctgctccacctgaagggaccagtgtctgatcagctgctgcgtgctcagccccagagcaggtgcccgggagctgggggagttccatgccttcattgtctcggacctgcgggagctccagggtcaggcgggccagtgcatcctgctgctgcggatccagaacccctggggccggcggtgctggcaggggctctggagagaggggggtgaagggtggagccaggtagatgcagcggtagcatctgagctcctgtcccagctccaggaaggggagttctgggtggaggaggaggagttcctcagggagtttgacgagctcaccgttggctacccggtcacggaggccggccacctgcagagcctctacacagagaggctgctctgccatacgcaggcgctgcctggggcctgggtcaagggccagtcagcaggaggctgccggaacaacagcgggctttcccagcaacccccaaattctggcctgccgggtctcaaaaacccgagtgaggtggtacatttgcccgtccctggcaaagaatccaggcctggcacgccggcggggacttgggcagagccccgcgccccggggccaacttgggtgggcgcgacc

SEQ ID NO: 149687 - DNA, 940 bp, Homo Sapiens
aaaagaaagtcttcttaaattaattccaggcctttcaccccccattaaatttaggatcccacccctggtcatagcataaaaagttgaattgtcactagaccctgctctgctgctgagccatggaccccctcccagtaaagggcgccctcttcctggccgtgcctccggtggccacacacagctcacccctccatttctccctgagcagaccatcatctcaggaagccaggaggaagccaggacttggtcctggaaatcaataatgcaacccagccagaaagggggaaatggtcatgagaaggaagccaggggcatgaaaagcaaactaccaattccacaataaattagcacgtcttcctgaggcttccagccagggagtaggctagactgtgagctccttgaggggagcgttgtgcattccttctgggtagctcccagtgcccagcacgggtggttccaccattaaaaactacccttcctttcatttagtcattttacatctcccattttaccaggccgtattctcaacactgccattcttggtggcttgtaaaccaacaggagcatagaagagtcaaagctgctagtacttccttaaaatgttcccctttagagtgcagctgaaggggaaagctcctttgccgctcatttttccctaattgtctatatccatcagacaccttcatctcttcaccctgtgacccagccaggaaagaagcaatgactttgaggtaacaccctttttcccactgagtactctttccatttggaatatgcaggatttgcttgggagtcttaattggagtcaaacacttaacacacacacatggagttggtccctgtctacaggtagcacctctggggcacagacaacagctttgggctgctgttccatttacattcacagtaaaaacgctggacatggtcttgttcatgttcc

SEQ ID NO: 149688 - DNA, 1286 bp, Homo Sapiens
cccttcgacctggcctgtcgtatctgggacgtgttctgtcgcgatggggaagagttcctgttccgcccggcctggggcatcctgaagctgttcgaggacatcttgaccaagatggacttcattcacatggcccagttcctgacccggctgcccgaggacctgcccgccgaggagctgtttgcctccatcgccacgatccagatgcagagccgaaacaagaagtgggctcaggtactgactgcattgcagaaagacagccgggaaatggagaagggaagtccgtccctccgacactgaggctgcagcgggaattcgcactcggcaccaatcagagccccatgccgcggcccctctgttgtttcagactgacacccgggcagccgaaaagaacagacgctctttaagtttgattcctaacactggagttggccttaaacaaaacaaacacaaaaacttttaaagaattaaaccaaggcttagccttaagcagctcagtggaaggatgagctgctgcggaccacagccagccactgcatctgctgcacagttgaacgatgggcagtggctcacccccactcctttatttcagcaaaagctaattaaattgtaatgtttctatgtcaactactgggaagtatgttacagtcttagccaggatgcatgagagatgttatttgggagacttgagatgctttggctgatatttacatgttttcgataagaaagggatcgctgattgagttattgagatagtttttccagagctggaggtcacgtttctaaaactcacctacgaaagatagcattaaaggaacaggggctctctgaggatggccactgatgtgtgtttgtggatacctgggcatcgacccagcctgcagggtgagctctgggccatgttgccttgacacagtcacagtgtaaaggctgcaggtgcacacgtgggctccagtgggactgcgctctgggagactgctccctggcatcggtcctgcggaggtggaaagtttcgagaggaggagctatttgcgaggaagccctgtgggcatagagataggcttaaaagcggagagaacacagagtggaatcagccccctgtaaataaaagggtaaagaaagaaatgtgtgggctgggccctctcccaactggctggtcagtggagggcagggcagcagccccagaacagcacatggtggggggaggtggcccccttgtgccaaccaaggggttccctctctgccttttgaggccctggacaacctgggacccatccctaagtggccag

SEQ ID NO: 149689 - DNA, 1395 bp, Homo Sapiens
  misc_feature (986)..(1113): n is a, c, g, or t
  misc_feature (1169)..(1272): n is a, c, g, or t
cggcgcccgtacatcccaccccccccttaaacggacctaagtagcgaggcctgggtggcgttttcggcacgaggggccaggaacaggcagtctcggcccaactgcggacgctccctccaccccctgcgcaaaaagacccaaccggagttgaggcgctgcccctgaaggccccaccttacacttggcgggggccggagccaggctcccaggactgctccagaaccgagggaagctcgggtccctccaagctagccatggtgaggcgccggaggccccggggccccacccccccggcctgaccacactgccctgggtgccctcctccagaagcccgagatgcggggggccgggagacaacactcctggctccccagagaggcgtgggtctggggctgagggccagggcccggatgcccaggttccgggactagggccttggcagccagcgggggtggggaccacgggcacccagagaaggtcctccacacatcccagcgccggctcccggccatggagcccttgaagagcctcttcctcaagagccctctagggtcatggaatggcagtggcagcgggggtggtgggggcggtggaggaggccggcctgaggggtctccaaaggcagcgggttatgccaacccggtgtggacagccctgttcgactacgagcccagtgggcaggatgagctgggccctgaggaagggtgaccgtgtggaggtgctgtcccgggacgcagccatctcacgagacgagggctggtgggcgggcccggtgcgtggccaggtgggcatcttcccgtccaactatgggtatcccggtggcggcctgctccgtcgtgcacgcggcaagcctccaggcacccccgcctgcatgacgccatcccgccaccgccagcttccgcctgtccccccttccgtacctcccgccttctgccctagatgcctccccccatcatggctttttcgtttccctcgtcccctccctnnnnnnnnnnnnnnnnnnnnnnnnnnnnnnnnnnnnnnnnnnnnnnnnnnnnnnnnnnnnnnnnnnnnnnnnnnnnnnnnnnnnnnnnnnnnnnnnnnnnnnnnnnnnnnnnnnnnnnnnnnnnnnnntttcccgcttccgccgctgttttgccttgtgctcttatttgtcccgtctacgccgnnnnnnnnnnnnnnnnnnnnnnnnnnnnnnnnnnnnnnnnnnnnnnnnnnnnnnnnnnnnnnnnnnnnnnnnnnnnnnnnnnnnnnnnnnnnnnnnnnnnnnnnctccgtccggccttcgttcatcgcccttcgtcccccttctgaacggccttttaactattggacccccgctcctcccttccctataccccgccccttatctcgcctccgcgcgtttccgcttcg

SEQ ID NO: 149690 - DNA, 1402 bp, Homo Sapiens
ttttaaaaaaacccttcaaggccccggcctcaggattttagcttgggaaaatatgttgacccagaattggtatatggaaccagtcagcaaaaagatgtggataacttacccaagcgtttcttactggtttgtgatgtgacccaccacattaccccccttaaaacctctagcactgtgtctttgactaaatgacctttttaaatgggggaaagaaaatcagtgacacctgtcagaagtcaaaataggtagccctgtacacacagccacaaccagaagcggagaaacaaggccacactattgctcagatcacatcttcctgttgggtggcacccctgcccagctgagatcctgaatgggtcccgagggagtgccgggaccctgtgcagtccatcttagcacctgcttctggcaagaaagaggctggtcttctggacacaccgggtggggagacagaacacttgaggtcaagtcctgaggcagagtggccagccctctctgcccatccccacctctgaatcacccctcactggtctgagctgtgttcagggtgctgcaaggactgggatcgccagtgcctcagatgtttgtacccggaggctgcaccatggcgaatcctgcacctgcctcggtgtggggcctgggaataaagtcagggttaggagtgaggcgatcttgcactcgagtgtcgtgggtgggggtgcagcaggatgcaggtagggcacctccaggaccatgttcccatccaggacatctctgcccattcctatgcagcatcctgcaggacaggaccccagggctctttaaggaaagggctgtgtccgtctgttttcctgtatggctgtaggatccagtaggcatttggggagctgacaaccgttcccctaatatggctgatgtaaagaggggcttccttgtctgggacaggagcaacaccagccccttgatggctgagccccaaatcaattcttaggccttttataggggaactctcccttcactcaggcaaccttcactttgacatctctgcccctatggaccacgagaactgaagtcccaaaataagggtttgagttttcactattatttctatgagtcctatgggttcctcaaccccaccaaaactggcaagcatggccataaaccacaaaaatggaagaccctgaaatagacgcagtcatgggaaaacattcttgcatgtttgaagaaaatggagactgtttcaggagggtccgccttgtgtgcccgcctcagtggaggcagcgttccaaggcccaccaccctcttccacaggagtccctcacttcatgatgaaatggaaacctgcccttgaggacgcctgtgaaccgtgcctgagattcacctcgtgccgattcaaacccagcctcgtacctagcctatagtg

SEQ ID NO: 149691 - DNA, 620 bp, Homo Sapiens
gccttcggtgagccccactacatgagccgggggcgctggctgcagatgaaggatgtcctggtgggaggatgggccctgtggccgaggttcttctttctagagattcctgacgctgctgctggtgctgctccatcacttgtcttctctggatgtccatctcatcaggagaggggccattctgcacctgacgctggctggaggggcctccttcttgggaattcatgatgttcagggcaaacagcattgcattggagaacgtggttgcctcttctttacttgcaaagtttaagccgtagacctggcgggcatctcgccactggtggaaggttggcgtggcctgattgtacttcagccctttcacgattgaataattgatcacaacctgctgatcctgcaacttgactccaacgactctgaaggtgttgctggcagtgttgtggtagatgttgatccggctgaatccctgctggccaggtttgattggtacccatttcttactggtgtcatcgtagaccatcacggaagcccgggcttggcagatactctgttcacttgtggccctggctgaaaagtggcagcacagggaacctgaggaggcgagtcctgtactcccaccagcc

SEQ ID NO: 149692 - DNA, 1801 bp, Homo Sapiens
  misc_feature (1621)..(1629): n is a, c, g, or t
  misc_feature (1703)..(1711): n is a, c, g, or t
gagatgaaggatgtcctggtggaggatgggccctgtgccgaggttcttctttctagagattccgacgctgctgctggtgctgctccatcacttgtcttctctggatgtccatctcatcaggagaggggccattctgcacctgacgctggctggaggggccacatgacgttaggctgcctccatgtcatttgtggaaggaaatacaaggttgctttgtcattagaggatgcacgcacctcgttcttgggaattcatgatgttcagggcaaacagcattgcattggagaacgtgtttgcctcttctttacttgcaaagtttaagccgtagacctggcgggcatctcgccactggtggaaggttggcgtggcctgattgtacttcagccctttcacgattgaataattgatcacaacctgctgatcctgcaacttgactccaacgactctgaaggtgttgcatggcagtgttgtggtagatgttgatccggctgaatccctgctggccaggtttgattggtacccatttcttactggtgtcatcgtagaccatcacggaagcccgggcttggcagatactctgttcacttgtggccatggctgaaaagtggcagcacagggaaccttgaggaggcgagtcctgtactcccaccagcctatgttgatcaggcggttcgcgcgcttcgggcctagtccggactcgccgccgccgccgccatattcccgtggcatcttccttactttgtccatcctccggactcgcgatcttccttccggagccatgtcagaaggagtggacttgattgatatatatgctgacgaggagttcaaccaggacccagagttcaacaatacagatcagattgacctgtatgatgatgtgctgacagccacctcacagccctcagatgacagaagcagcagcactgaaccacctcctcctgttcgccaggagccatctcccaagcccaacaacaagacccctgcaattctgtatacctacagtggcctgcgtaatagacgagctgccgtttatgtgggcagcttctcctggtggaccacagaccagcagctgatccaggttattcgctctataggagtctatgatgtggtggagttgaaatttgcagagaatcgagcaaatggccagtccaaagggtatgctgaggtggtggtagcctctgaaaactctgtccacaaattgttggaactcctaccagggaaagttcttaatggagaaaaagtggacgtgaggccggccacccggcagaacctgtcacagtttgaggcacaggctcggaaacgtgagtgtgtccgagtcccaagaggggggaatacctccacgggccccattcccgagattctagtgattctgctgatggacgggccacacccctctgagaaaccttgtaccctcatctgctcgtggtggataagccccccagtgtgctggccctacttcaatccgtcttccctcggccccttcccctgatggggtttggccccccccacccattttcaacccccaccaacttttcttcttaaggcttttggggtcccttcttccttctcctggggattccactaccaggcatcttcttgcccccccacttccttcaattannnnnnnnnatcttggctggaacctcccccctggggggccatcccacacctggccctttcccctcaattccagcctttttttnnnnnnnnnaaaaggccttaccggggggggccctcccccccgaaaatcctttacttgaaaagggccctctggccccccctataaacccccctgggggag

SEQ ID NO: 149693 - DNA, 912 bp, Homo Sapiens
  misc_feature (17)..(17): n is a, c, g, or t
  misc_feature (114)..(114): n is a, c, g, or t
cctgtttctttttccanccggcttaatttcgcgaccccttcccgcccccagtaagtttatggttaccaattcccaacgtttattttatttcccggttcccagcgaaagttcccnttcgccattttcaggggtgtaagtcagataaaccacttcttgtccattcattcgttcttcagggaggatttcttgttttatcttcaccagtttaacagcaatgggtttccccagtccgtcggtccgatgatacttcaaattcaacatcatctcctacttttaagtcttgcaggttgccattatactgtgaacagtggaagaaaagtctagcttgacgttctgaacactgaataaatccgtaagaggttaacagtttttcaataaccccagtttcacgcagtgctgctgaagtaccattagggtacccattatgtccattgttgtggagaaggtttggatcaaagctcatctcgcagtgatactcaaatattgcactttcagtagtatttgctgattcttctttttcagcacacgtttcaaaggatgaaagttgctagtattaaaaaaaagagcgagagaaaatgatctaccaagctaataaagaatacaactgctgctgtaccgggcaatctcacagtacagcactgaagaaaacaaagactactagcagcgttgggaagtgctctttcaaagctgttgagtaggcacaaacttcttgtttcagatcaagtgttgtgtcttcaacttaagtgtactcttctttggtcttgttagttgttacgaggtttgttccttgcctgatctgaacttgaagcagcagtttcaggtggtaaagtctgttctgttacacttcatacccaacagctcagcgccccctctccagcgccgccataagcagcacggcccggtacgtagccc

SEQ ID NO: 149694 - DNA, 1129 bp, Homo Sapiens
  misc_feature (974)..(974): n is a, c, g, or t
  misc_feature (980)..(980): n is a, c, g, or t
  misc_feature (1069)..(1069): n is a, c, g, or t
gagtactcgggcgtctgggagcagatccgactgggcctctacactctgggcggtttcatctgcctgagctgctcgggaatccaccggaatatcccccaggtcagcaaggtgaagtccgtccgcctggacgcctgggaggaggcccaagtggagttcatggcctcccacgggaacgacgccgcgagagccaggtttgagtccaaagtaccctccttctactaccggcccacgccctccgactgccagctccttcgagagcagtggatccgggccaagtacgagcgacaggagttcatctacccggagaagcaggagccctactcggcagggtaccgtgagggttttctctggaagcgtggccgggacaacgggcagtttttgagccggaagtttgtgctgacagaacgagagggtgctctgaagtatttcaacagaaatgatgccaaggagcccaaggccgtgatgaagatcgagcacctgaacgccaccttccagccggccaagatcggccacccccacggcctgcaggtcacctacctgaaggacaacagcacccgtaacatcttcatctaccatgaggacgggaaggagattgtggacttggttcaatgcactccgagctgctcgcttccactacctgcaggtggcattcccaggggccagcgacgcagatctggtgccaaagctcttcaggaactacctgaaggaaggctacatggagaagacggggcccaagcaaaacggaaggcttccggaagcgctggttcaccatggatgaccgcaggctcatgtacttcaaagaccccctggacgccttcgccccgagggaagtcttcattggcagcaaggagagtggctacacggtgctgcatgggttcccgccgtccacccagggccaccactggccacatggcatcaccatcgtcacgcccgaccgcaagtttctgtttgcctgcgagacggagtccgaacanagggantgggtggcggccttccagaaggcggtggacaggcccatgctgcccccaggagtacgcagtgggaggcgcacttccagcataaaccttanccagtgcggctggaggaccaccgacattggactcactgtggcttggacggaggggccccc

SEQ ID NO: 149695 - DNA, 1451 bp, Homo Sapiens
aagggaggccccacgcccgggggagggagggggctcccagagaggaaaaaaagtgagaaaggccagtccgacatcagccgtttcccacttggcctggagagctcagtctggggcactaggtgggagcggggctggcgggtcctggcatgccgactgcagtccacggagcaggaactccacagataaaattcgaggacagagacggagcggggaggaggaaggtgcgggagggcaggcggtgcaaacgtaggtagtagagctggactccacagggccctcagctctgcctggcgcagagctcctgggccaaggtgctgactcactagtcccttgtcagccactgtcacgggtatgggcgagcccgcatgtgctgcaggcagctccgacgggcctgacacctgacccctgactgctgctacctctgcactatgtcactgatttccttcaccgaactgaggagcttgctgaagtcctgagtggccgctggaccactgcctgctgtcgccgggcagatctgaagctcccggagattattctccagtttgttgatggcctctcggaaggcaaacttgttcctcatttgctggatggaatccacatagctcacgcagaacgtgtagaggtttttgccggcctccagcactgcgctgtggctggccatctgctcggagttcctagagatggcgaggcacagcgcctcggtgctgtccaggaccacgcccttggtgatggcgccgctggcgatccgctctggaggctggcgggttttccgaagagacactcgggttgatatgagagggatgaaggcggtggaagacggctggtcccctgccagggccgaggatgctgatggcaacgtggagggaacgggggctgggctgatgggggtccccgacggcttggcggactgtggctttggagtggccgggagcacgggctttttgaggccctctcccggctggctgggcttggcagcgtcactgttcacagcatcaaccagactcgtggcttttgtctttgcgcccaggactgcctccccggccgcctcctggctcgggctctgcgtagggctttcctccagccttccctgcagaggctgctggtgggggcggcggggcaggtttgagcctggacgatttccccttgtccctccctggcgactcagaggagtgcttgtgcctcctcactctggactcctcggcggggcccttgctggtgccccctggtgcacctgagcctgctttgctggtgggtgtcactggctcagctgcagcagggtccctaagcactgccctttcactttctttggggagcccgagcaggccactgtgacctccaccgaggtttgatcagtgcggctgagcacacagggctggactccatgatgtctttgaagacctcatcagcagcttcactcattctttttcaccagcctggggggaagcagttac

SEQ ID NO: 149696 - DNA, 878 bp, Homo Sapiens
cccagggattgccttccccggccgcctcttggctcgggctctgcgagggctttcctccagccttccctgcagaggctgctgctggggccggcggggcaggtttgagcctggacaatttccccttgtccctccctggcgactcagaggagtgcttgtgcctcctcactctggactcctcggcggggcccttgctggtgccccctggtgcacctgagcctgctttgctggtgggggtcactggctcagctgcagcaggggtccctaaggcactgccctttccagcttcttccttgtgggggaggcccgaggcaggggccacggtgacctgccgccggaggggttttggagtcaggttgggcgggctggagcccgggctggactccatgatgtctttgaagacctcatcagcagcttcctcattctttttcaccagcctggggggaggcgttactgtgcctcgggtcacctggtcagacctgttctcccctgccctcttccgaggcagagccggcttctcacttttgtgccctccaaatgtggacgagtcaaactgtcttcccgtggactgcaagtcccgaggcagcgtgactgacctccactccgtgtccttggccccatggggaacgcaggaggcggagcaagagcgcaggaagcgcttgctggagctgccaccgccctcctcctcgccggtggctaggcggctgctggtcagcgtgctggacttcttccacaggtggggagaccggaagcctgagcccccggactcccggagggctccattggggaccccagccccattgctgggctttggggacttggctgggtcagctgtgtccaagggggtgaaagccagcctcgtcttgaatcccacccaggcc

SEQ ID NO: 149697 - DNA, 955 bp, Homo Sapiens
gccctttctccgcaaagttaccagggttccccaggccccccaaggggggggtggagacttcattatttgccaagggaagaaccccgggaaggtttcatgtttgctcccacccggattgtacccccaatggtttatggaacctgcaaggcaggcccaccatgaagttggatgttgctgtcctcattccggaaatattccatcagtttttcaaagcggtgctgctccccacacacctccttgaagttgtcaaaggctgcaagggatgatgtcatgtcctcccggcaccaagcacacggccgccagcaggtccagcaccagagccttggttctggggttcttgttgttgaggctcagagcaatctcattgacacaggctgggtggttcatgacaaggctgaagccagactggtagttcatgatggcgcgtaggcacataatacagacgtggacgtcgtccttctggctgacgatgcgggaattccgcagggccttcctgctgtgggctggggtcagccggggagaagggggacacttgatggtcaggtggcggcttttgggcacggaggagggtggacccttgctgaggtcttccacagactgctccaggggcttgtttttctctgagttggaagccccgttgtctgtgctctccatgtcatacgtgacagagcactgggcaaaggccaggtactcgagcagcacatccaggccacggttctcttcattgaggaactcctgcacccacccaatgtggttggtcctcagggaggtctccagctcccgtagcacctgcgtggactcctgaactcgcctcttaaaccccaggttggacatccaatcagctgctacctttcggctgaccccaccagtatccacatagctcttcagcttctggatgtaggctgcggggggattcttgacttgaaaccgctcctgatcacagatgagctcccac

SEQ ID NO: 149698 - DNA, 1382 bp, Homo Sapiens
cttatactccacctcatgcccaaagcctgtgagcagcccaactccaaggatgacttctggtgctcggtaatcgccgagtcggagacaatgggtgctatggctgctcatggtccaagtgggcactgcccaagtctaccacccgcacacctgttgctcttcacactgcgctcatctcgcttcttctctaggttgtaggtgagctcatagtcgtgcaattcacataacagaatacttttcagccattgaggtctggtatgtgtcagcttgttatcactggaggaaccttgacagcctggcacagctggaaggccactagtggcgcatcttggtggactggcgagtatgcggtcaggtgtaggcttgcttggtcttttgaggaaactcggtaaggctgctaaggcccaggtaagctcaataaggatgatacacatgtggccatggtagtcaaaccagtcaaacatctggacaccagaggcttcttgcttgtcagggtctattctcattgatatttctctagcacgcttgatctcatagtcgagcatgattccttgtacttctccacattctttaatgatcttcagggctaactcgagcccgcgcatcccctgcgatggtcaacacattgtacaactcggccgaaggtcccctctcctaaggtgctaacgatttcatcgtaagatgagtcggcgtataatgtcacgttctgcgcctcctccgaccgtctgtgcttcctccggctgctgcgctggctgcggtaactgctgttctcccgctgatattcataggaatgccgatagtctgtggatcatagtaggcatctccccgatcccggctataatcgttgcgtctgtagctgtccacagtatcgcccggtcatacaccctccggtcggacgaacgatcatcataactgcttcgagaacggacatggtagctgtcctctcgccgacgccgtcgtgtccggtcactactacttgaccaggagcgacttcttcgtcgcttatgctttcggctccgatagtgttcacggtaactcccccggctgcctcgctctgaggagtggtaccttcgaggatgcggcatcgttctggcggcgaggcccgtgcgcttgtcccacaggaagtccgtgatggcggcgacactgcggccggagtcccggcacccccgcggcgacgaaatgctgctccacccccccaacccgggaccctgggacctcccgccccgttcccgggctccgcttcagtcccgcccgccccggctccgtccccgcccctaagatctgcttggcgccgctcgcaccgcccccgcccggggcccgatcccagctcggtctccggctctggcctctccgctccgatgaagggaattccggaccggtccagc

SEQ ID NO: 149699 - DNA, 942 bp, Homo Sapiens
  misc_feature (35)..(35): n is a, c, g, or t
  misc_feature (206)..(206): n is a, c, g, or t
tttcactttcgaaagattgatgctgttgggcaaangtctcttcgcccccttgcatggtacggtcacggaaagcaaaccaacttccaccaggcttggaaaaactgctactcccatctgtggggctgctaggacccaaaaatttcctcaaaaggcccatcccagggtactggggttaagttaccagggatcatatacacccaattgtntatcttcgtccctttgaccttggaagaaatcactgtagtgtttaagcaaggaaaccagcaccatgttctcatcatacttgattaagaagtaaggaagagctgtgactccttctgtttgacaaagattatcatatgcacactctagtgcttcaatctgttttagtgaaaacctttgatccaaacccactggcccctgaatgagaggtaaactctctggaagacagagggcaggatagcaaaaccaatagtagaagtggtacttctttagatctgcaaatgtcaagaggaggaacttgttgaggagtacagggttttcaagagcagtgcctgattttatggattcccatatctcatttgctgcttgttccaaaaggagcttcttatctgcagtcttgaaagactcgagtgtgttggtgttatacagtgttccaatagctgggcagcaacgggctggggtgggagcactcatgtcaaaagcactgaactccaatgttaagcgagctggcagcccagcagagtcaccattgtagtaataacccttaatgtccttgggagcttcatccagccgatactcgttcagcttcttctgggtcaactcatgccaaaacccaacatccaaggcactactaaaaggggcaaactgcagtttagagagtccaggatcccccgtagctgccgccattatttcttgccgccgctcaacttccgatcccgggaatccggaccggtccagcct

SEQ ID NO: 149700 - DNA, 876 bp, Homo Sapiens
  misc_feature (159)..(159): n is a, c, g, or t
tctggccaattttccagttggaagccctgtggaaatgcccacttttgtcccccatcccttcatgggaaggcaatggggggcccccagccgttggggcccaaatccaggccacaatgttgcccacaccagggggaaagccagcctccttgatcaggttgngccacatagagggcggtgaggggtgtctgctcagctaccttcatcacaaccacgtttccagttgccaaggctgggcccagcttccatgcttgcatcaggagcgggaaattccacggaatgatctgcccgcacacccccacaggttcatggcgtgtgtagctgaagaagtctccgtcaatggggatggttttcccgtggtacttatcagcccagccggcataataccggagacatttgaggaccatgtccaaatccaccaggtaggagatgacatagggcttgccattgtccagggtctccaaggccgccaggtaggtccggtcccgctcgatcagatcggccaggcggttcagcagccggcccctgtgtgatgcgtccatgcggcgccaaggtgagcccagctggaaggcggcccgggcggccttcactgccttgtccacatcttccttgtccccttcagctacctgacagatgacctctccagtggacggattgacggtggggaatgttttcctgctgacggcatcgtgccattcattgtttatgaaaatctggttgcagaagacctcgggctgctggttgggggcaggcacggcctgggtgcggcggctgacaagaggcggcggcccaggcggggcccgaagcgggcggcagcgcgcaacatcgcagcgggctagcgacgcgtgggtcgacgatatcccgggaatccggaccgta

SEQ ID NO: 149701 - DNA, 1293 bp, Homo Sapiens
aaaaggttttttgttcccttattcagggggtccagcccttccatggctggaagaagttttctcccaaaggtttgttccccagggaaaacccagaggggccaaaccaaattttctttgggatctctagaacgggcttcatagaggttctccctgaggtgcggggtgaaccctgccatggactgcccacgtacgtgtgatgtcactcacatagcaggaagactcacaacctccatccagaagcaccatttccccatcccttgatgagttgattatttttcacatagtgcaaagtgtttgaccgattaccaccagccaccacaggtggataggctaaaatgtctgcgccacgagcccggcattcaaattcaaacttagcataaagaaaggcttcttccacaggggctttactggtgaacatggtttctatggaagcctgtgatgtcagcttcccagcaatctgcattcgttcaatttctgcaggagacttgatcagccggaggcgctgtatcagctgctgaacaccccgaaccttgttcttgctcttggctttggcctcagtcaggggctgcatatagtcagagtgaagctgtgcatgtgagggcctcatccagtcataccaaaccatgttcgtctcagctttcatttttggtagaagatgttgaaattcttctagcgtataggcttcgtctactccagttagagctattgctccatcagtgccagatcgcggaccatcccaaagttctcgactgggatctcgccgaggcacaaaaagtatggctttgttgtgatggtaattgtttgccagggaggctctgaaggacaagaatgctatcaggctcttggaatccacataggtacaggaaattgttgtcttggtggaaagtatagggaatatcgttgctcatgtagtatgtagggttggagagcacaaccactgtctggtctgtcccactctgcccttgagcttccttctggatcagagacattagtttgtgtctgcgaagtgcatattccacctgagatagtcctggagttacctcccctggtctgaggaggtgtgggtgtgtaaaggggctgggctggcctaagtatcggtttggaatcctcctttctgggacaggctgaagggagtaccttcgctgtgaacacaacatacatcctgagaggccgcggacgtttgctacagcgggaaccagcttgggggctgagagcagccaaggcattacggcctaactcacgcgtcgggaagagaaagagggtaacgacggggaacgcaaccgcctgcagggc

SEQ ID NO: 149702 - DNA, 1083 bp, Homo Sapiens
gatgggtagccccatgaaaaattttttcccaacccccaggtaaattgggggaaaaaagtaacccaaggaaaatttaaaattattttccccttgaaaggttttgggagtatttctattctccccctgggtagccatatagatcagcctggtttcccagaaaaaggctgcctggttaatttcttccaaaagcatccactttcctgttgaaataagagtaagatttttcacttcctgatgctgaagtggtaacactttttatcatttccccagaaacctgatggtttgttatgcacttcccccttctggaacattgttctccgtgccattgccatccttttctttttgcttatgatcatatccatggtttgcagcagtcgccgttccagggctagaatatccgtgtcagtcacattcctgaggaagtaagacatgtaagtgtatgggcagttgacagcaccaaatccagaaagaagagccatgagagtcactccaatcacaccaacccggctgatgagctgttctatggataagatcccatgttttgggctgagaatgggaaagggatctcctagtttccagaagaaatacataaaggtcagccataagagacaggaaaaaagcagtcgttgtttatgcagtagtcggatattgctcacaataaaatagccaatgtaaaaaggcaccatgaaaaccaggatcagcagaattacacacaggttcattttccagtgaaaataacgggagctgctattcaatactcctaagatttcaaagatgatgagctcaaacatggtgcaagaaaatgcaaacgtcacggagaagatcacctgtacaacatactgacgtatctcatagtctttaaacaattggcgcatgaagaaaagccacccaaatccaaaaaatagtatctgggaggtaatcatgatgctggagtcgatgaggaaactcatggcgaagtgtaaggaaggctcctgcctccacttcccactccccgaggccacagcacgctggggccacaggccccctcacacggtctgccttctcccaggtgctgcatccatactccggggcagtaccagcctg

SEQ ID NO: 149703 - DNA, 879 bp, Homo Sapiens
cctcccgggcacaaggaatcccctcaggtttggcataggttgtgccaaagtttcaggaaatttccccgggtccctggttttcagggatcttttcccagatcaatggagtctatgtacatcagattcaacttgtggttgatggccaggctgagtgttccagggctttgaacacagaggcgtagcagtctctgagcttggtgtatttgccaaccagggctatggagcatattttctgtaacctttcatacctgtcagccatatttctccacttaaaaagcaaattacttgcagaatcaccgatgggcaggtgcaatctctccttaaaatatttcacaatgctttgttcctctaaaagcacaggaactcggtatgtggaagaaacatcatggatacatatgacctgttcagggttcacgtgacaaaacatagaaatcttctccttcacggccatctcaatgggcgttgaacttcggcagacaatcagatctggagacaggcctaaacccctcagtgcgcggacgctgttttgggtgggtttggttttttgttctccggtagcactgagctgtgggacaaggctaacgtggatattacagaaattctctcttttcgccttaaactggaattgtctaaacgcctccacaaacggcattccttcgatgtctccaatggtgcctcccagctcaataacgcatatttggggctcttccttattaccatccaccggcaccttggcttgattcataacccactcctggacagcatcagtaatgtgagggacaacttgcactgttttccccaggtaatcaccacgcctctctttattgatcacatgctgatatatcttccccgtggtgatattgttgtctttataaggaa

SEQ ID NO: 149704 - DNA, 1797 bp, Homo Sapiens
cgtgtgtgtgtctcgcgctgccttctgtgtgggcgcgccctggtgttcctactgtacgctcgtggggcgtgtccgtcggtatgtgttggctcgccccctctctgggcgtgttctttccttgtctgccgcgccccgctctcttttttcttttgtcgtttgtgtgctgttcgctgctctcgctgtcgttcgttgtgttcttttccttgggggccccaccaggggccacccaattgttggcctttttaatttgggtccaacgtccaagccactcagctcagagaaaggtgctgggtgctaggtccaggtacagaacgggaaaggcagagaggatgagcaggagcaagaagcagggatgtggccccaacccatcagccagggcctccggccagagtgcccagcagcagcttccccagcagctccagcgtggccagaaggctgtagtgtgtggcctgcagggccctgggggccagctggctgcagcgcatcatcccagtgaaggtgactgtggtgaccaggcctcccaagaagtgctgcagacataggctcagcaaggctgaccctctcaagattgtgccagcgtccatgctggcccccagggtgtccaggtggaagaccaaggcagtctgacaggctaggcccccgaggcggaagcgcagcaccgacctcaacagaggcagcagtttccagtgcttggccagcaaggtcccacccagggaggagccagcgatggagcagaccacagcacccacaccattccacagtcccaactcgggagcagaaacgccgtggtccagcaggagaagaggaaacaggctgctggcaccctgctcacccagcttgtaggtgagcacaaagcctgccgtccacacggtccccggcacggctagcacgtcccgcagaaggtgcgcggtgtggggacgctgctcggaagggggctgctgtgggagccgccgcagggctggtgcagcccaggccagggccgcggccagccagtaggttggcagccaggagcggaaagagttgcggccccgagaaggtgggcagcagtgccagcaagcgcgcctccaggtagcgcggcccccaggttagttcgcgaccacctgcacggtattgcccggccccagttcggccggctccagcagctgcacagccagcgcgtccagggccacatcctgcatggcggcacccaggttcaacaacagcagcaaccccgccacagcggcgggcagcccggcctggccagctccaggagggggcagcccggcaagcagcccacacaccaggcccaggcccgccgtgctgcgcgtcacccaggccctcgccgagccctgcgcgtccaccagcggggcccaagccagcttgagcagccacggagcgtacagaaccttggccagccccacgcgcgtcagcgagaggccgccggcacgcagcagcactggcaggaggccggactggagcccgtagggcaggccctgcaccaggtagaggccggccagcggcagcaacttcccgcgcatggcggctcaggccggctgcgaggctgggaggtcgggttccaggtggggtcccgcaaggcgaggtcccctccgcgtggggtcagaggccacaccccggcatggctttggttctgggaccgggcagagtcagcgtcgtacaggctagggtctggacacgtgctctcgggctttaggagcatcaacaccccagaagaaccgaagtcgggtccaaacgggggcgggcggtccggacaccggcggccggcggctcccggcatcccgggaattccggaccggtcca

SEQ ID NO: 149705 - DNA, 882 bp, Homo Sapiens
  misc_feature (236)..(236): n is a, c, g, or t
acctatccaaaaggtatataaggttataatctttccatttgctgccggtaaaaatgaaaagctttccatagggttcccaacagattgtatttgttctcatttctaaagataccctttttcaaagggagtagcttgcctcatatcgtacagtactatattcctgtcagatgcacaacttcccaaggagaaatgtctcaattgggttaaatttaacactacttatactgtcaattccnccaggtcattgaacatataggattagttctttgttcatcccaaatgtctactggctgtccacatgtggcaaaaacagcttctttccagtgatgatcaatcccagtatacactgtctttcctaatattgtatgtaatggctcttcctcgtctccatagcctggcccatccattttccactgcttcacagttttgtcatcaccaacagtgaaaaaagaagtcccacaaaagcgagtacatattcctcgtacaaagccttcatgtgcttgtattgtacggatacaattccgctgagttagattccaaattctaacctctccatcacacgccccagaaaggacagtagccagcttctctggatgctttgccaagcaattgactccatcacggtgaccatccagcgaagcaaggaatggttttgcaaatactcgttccagtttggtagcatttaaagctcttatatattctcgtgggacctcaaaaggatgtaaagcaggatcatagtttcttggaactctctgtaagtccaacttggtttcgcggacataattgtccggattccggctcagcatcttcaccttcatctcggttgctcttccggccggactccacgaggtgtccgctaggagttccgcccaccgccacccc

SEQ ID NO: 149706 - DNA, 615 bp, Homo Sapiens
gcgtgaagatcccagtttgaaagtgaggctagatcctgactctggacaagcaccaccccgaagctgtccacatccattatattcatcttccattggccagaaatttggttttgcggttgggaagtgttggtatttatctaagtgttggcactcattagtcttagccagatgctacttgcccagctgattattcgactatccaagtagaaggagattatggccagactgttctgtgtggtatgggggagttacatatagagattattcatgatcgaatccagagggaatatggactggagacctatctcgggcctctccaggtggcatatcgagagaccatcctaaactcagttcgtgccacagataccttagatagaactttaggagaccaaaggcatcttgtgactgtagaagtggaagcaaggcccattgaaacatcatctgttatgcctgtgattgagtttgagtatgctgaaagtatcaatgaaggccttttgaaggtctccccagaggcccttgaaaatggaattcacagcgcatgtctccaaggacccttgcttggatcccccattcaggatgtaccactacttcacattctacattttcatagcggcc

SEQ ID NO: 149707 - DNA, 792 bp, Homo Sapiens
tggggccatcatgcccagctctaggtttttaaaatgtaggcaaggaggtcagcatttacacaaaagcagggtttgatcttaggaagcttaataaagagaggggtctaatcaaggtttcctgtaggatctgggctttaagttaggccttaaagaacgaagaatgtttgtgggtgtagtaagcaatgacttggagcagagccctctagccattgggctcaccctcacaggcaggcgccactgaccctaggggggtgtaggcagctggaggaagtactgtgtgtcccccattccagcgatggtggcccctctcagagtcaatacccttccttccaagagactgaacatacaactggacaatggccaggccacatatgacaatagactctggccagaaacccataaccagcctgggaagccaaggaagccaaaccacagcctcagcagcaatcggacccagaacagtctgaacttagtggctgccagcttcttcccaatccccagccaccacaccccctcttccaactccagaccaaccagagaaagccaaatatacccccccaaccaaccaaagatgcccctccagttagtccgctctgtccccatgccaacaatctccaatcacagcacacccagagccttccctttttttccactataacatttcacagtccctgcctgcctttgacccctgccaaatacaagcaatcatggctgactcctttgcaaactttgaccaaatggcctctctgctcttgtttaggtggtttttatttccacatctccaacagggag

SEQ ID NO: 149708 - DNA, 1392 bp, Homo Sapiens
  misc_feature (337)..(337): n is a, c, g, or t
  misc_feature (472)..(472): n is a, c, g, or t
ggtttctttcctggaagatttaaattggaaaggtgggcggattgtggccttttttaagggcccatcaaacccccctctctcccgggattccaaaaggtgccttggtttatcccccatagagtctaattatttttaaaggtaaaggatggcagggtatattgccttccggatccccctgggtaggttccagggcagtctccagtagcagactccccttgggctaggtccatcatctttgatcttgcctggtagatattttaggcttctggggtccctttacttataattctctccgaattgttctcaaaggattccttctaatggcaaaaattcaaantgaggttcccccaatgaatagggaagactactaatatcatgttgcttaggtcaagcctttccaaggaccgtagtagtataatttcatctggaacagattttaacttgttatccctcaggtctagcacaagaatgnaattcagatgtttaagatgttctgcctctaacatttcaatctggttttcacctacgtgcaattccttcaatagactacaagaaggaaattttggtggaaaacgtaatttattcctccggcaataaagcaatttttagtgattcccatgccagccaattcagggaggtatagtttccaagagatttgaattacaatccaaatgtttcacccttttcattctatttatttctgctggcaaactcttcagttcattactagaaagattgagtcgcaccagactggacagagaagaaaaactagcaggaacagttgtaagatgattgtttgaaagatctaaatcttctaaattggaaagttgttcaaatccctctgatatgcaggttaattcattatgctggagatacaggcacttcaggtttcttaggtttgtaatttcttcagggagtattttcagtttattatggctgacattaagtttctgaagattttctagctctcttatagcagaaggaagggatgtcaactgattatcatgtatatcaagaacagtcagtgcaggcaagagtcgcaggtcatctgtaagtgactgaagtttattgtttgatattattagtttggtcaaatctgtctgctcccaccatctttcagtagcaccaaacgaaagattctgattagcttcctcagggatatccacatttattctccagacacactgcggcacttcactgaggtttctacccgacaggtttaactggccgctcttcctcgctgccttcaacagcccttggggtaccgaggtaccgcagtctcttccacctgctttgaaaccagcgcggagatcctgccccgctatccgcttcaggcgcgacatgttcaaagtcctaggtccagaagctgcagccccacccgtgacgcttccc

SEQ ID NO: 149709 - DNA, 1362 bp, Homo Sapiens
  misc_feature (64)..(158): n is a, c, g, or t
  misc_feature (172)..(188): n is a, c, g, or t
  misc_feature (1236)..(1278): n is a, c, g, or t
  misc_feature (1294)..(1294): n is a, c, g, or t
ggctgtggaatgaaatgtttctcaagagcctataatatagtagatagtgcatattaagatgtcnnnnnnnnnnnnnnnnnnnnnnnnnnnnnnnnnnnnnnnnnnnnnnnnnnnnnnnnnnnnnnnnnnnnnnnnnnnnnnnnnnnnnnnnnnnnnnngagaccctgtctcnnnnnnnnnnnnnnnnntcaatttagctagcaggaatttgacatttaaagagggaatcttctctacctctacaaaatcaacacttaacacttttttcaccttcagaattatttagaatgtggatttactttgtctagttttttcctttatagtgtaatttattgttactctctatttactgactaccagagatatacaaaatactgtgcaaaagattgttactgttcaaagagcttacaaactaaatttaaaagaatagcaagtctgaaaaatagaagatagtcaaatatttgtttatgctaagaactgtttttaattttcagctttgatgtaaattgctagcttaggtgtctttagttcaagcatgttaggaaatcctctttattcttaaatatagatacatgtctgcatatatgattgaattttagagccagaaagcatgtagagcagttgtgattagtagaaaatacactgacaagaagatatttgcatttatttcccaaagctgccagtaactagattttgtgacttaagtcatttaacctctccttgattagagcttcctgagccatgcacactggcactgcaaatcacagacaggcctagatacagatcccctcaccccttgctacatccaaaggtggcctgggtggctggagcctctgggccagaaccacctttgtccattttcctcagtgtgcctacagcatcgctttccatgtgtgccataacttgggaatagttgggatgtgttgcttaactcctttgcaccattagttatctgtgagaccatctattccacactcttcattttttaaagagagaccataattatttttaacttactgaaagtttaaaattaccctagcatttctgattaaaaaaaatttagaaggaaaattttaatgcatttgatttcagatgggcggtttaaaatagatacaacccctttggaaaacacaatattggtacctacatagccaagggcctggtaaaaaatggacccatagtccttttggcccccataaaatttcgtacctttctaataactgtgtttaaaccctnnnnnnnnnnnnnnnnnnnnnnnnnnnnnnnnnnnnnnnnnnnccgcccagttgaaaanaaccattgttaaatggctcctgggccaagtttccttgtttatataaagttaaaacccagaagaagttt

SEQ ID NO: 149710 - DNA, 1271 bp, Homo Sapiens
  misc_feature (35)..(36): n is a, c, g, or t
  misc_feature (70)..(70): n is a, c, g, or t
tgacccctcccacccaggtagatggatgtagaagnnaaaaatcagatggggcctgggaccaccagcaaangagcaggactcgagctgacatggaattgatttctgacgtgcagaaagtagaacacgggttgggccagaatttcttcatctggaggggcaggacgccaggtgcactccacatgtgcaggtaggttgagattcggctggtctgaatggccaccagattgccaccaacaccacatatgacgggggtaaatatcgccatgcctttgtactgctgtttagaaacggttttgctcaagatgagtcctccgaaactggtggatggccctggcccaggatgattgggaaccagccaaacttcagggattttcacgatgggtgggctttgcttggcaatgagggccccacactggggtcagaagccgcaaagctgaggcagaccagcggcgtcagataccgactatctttgtgtctgtagaagaagctgctaaccaaagccagaatggacagtgtgatgaggtctcccaggctggctgcaatgggcgtggcaatgttgtctgggttgaccccgagctttcgagcaccaatcactatacagaccatcagcacccccagggcaaaggctgcaaggaaggcagtgaggacactgctggcacacagcaactccaccttggcgacatccacttcctctcgagacaccacgcccaacagcagcgcagccacagcagccaagagccccacgacagtggcctgcacctggatgagggccaggttgctgctgatgactctgtgctgctcctgggggtcatcaatttgtccagtgttggcagctgtggagagtctggatgccagtgtcatctccaggttccccttcaggcccaccaggggcggcaccaatgtcaaaaggtctttcacctccacaaacacaggccagtgctggaaatagtccagaagcatgccggcccaggacagtcccaggcctgcaaacatgaagggcacggtcacctgaaggcctatggaccaggcggtctccctgctaggctcagtctccagtggcttgggggtcacgctttggctctcaggggccctgagagctccatcttctgaggctacagggagtcctcctgtgctgagggggtgaggaagccccagctcccctggcttgccacagctgtccagcctccgctgccgggtctctgtcccatccatctgggcacagctgggcgcctggcagcccgggtcccctcccatcccggaaattccggacc

SEQ ID NO: 149711 - DNA, 1143 bp, Homo Sapiens
  misc_feature (758)..(767): n is a, c, g, or t
  misc_feature (987)..(987): n is a, c, g, or t
ttttcaagatcggcgcccagctgtgcccttagcatgggacagagacccggcagcggaggctggacagctgtggcaaagccagggtagctggggcttcctcaccccctcagcacaggaggactccctgtagcctcagaagatggagctctcagggcccctgagagccaaagcgtgacccccaagccactggagactgagcctagcagggagaccgcctggtccataggccttcaggtgaccgtgcccttcatgtttgcaggcctgggactgtcctgggccggcatgcttctggactatttccaggccaacactggacaaattgatgacccccaggagcagcacagagtcatcagcagcaacctggccctcatccaggtgcaggccactgtcgtggggctcttggctgctgtggctgcgctgctgttgggcgtggtgtctcgagaggaagtggatgtcgccaaggtggagttgctgtgtgccagcagtgtcctcactgccttccttgcagcctttgccctgggggtgctgatggtctgtatagtgattggtgctcgaaagctcggggtcaacccagacaacattgccacgcccattgcagccaggcctgggagacctcatcacactgtccattctggctttggttagcagcttcttctacagacaccaagatagctcggcatctgaccgcccctggtccgccctccagctttggcggccctgaccccaacggtgcggccctcactggtcaacgcaaaatnnnnnnnnnntcccggaaaatccatgaaagcttaggccggcatcctcaacacacccgggccatgggtacgccgcccccattccgataggacccctccttcgagccacaaaccggtttcctataaacgcacgccagcaaggcaaggggcaaataatccagccccccatctcaaaggcgaaaagaacctgcgcggactctggcgggacactacaccaccctaatccgaatanctaagccgcaccctcaggaaatgggagagagagaaagtgcgacgcccctcacactcatacgagtctaaggacagattttcgtcaaaaacccgcgagatataatcaccacggcaccggctcaacacaccccagatcctcctcccgccccctcccgac

SEQ ID NO: 149712 - DNA, 1125 bp, Homo Sapiens
  misc_feature (99)..(99): n is a, c, g, or t
  misc_feature (104)..(118): n is a, c, g, or t
agtgaggtgcatctcgtggtgtgcttcttacagccgcttatattttggtggatagacaagatagtgtgggggacaattagcagggggcgcgggcgcgangtacnnnnnnnnnnnnnnncaaccgccacttttccacccccaccaaaagcacacagtgtccaaatctccatcgtgcctgcaactcaggaacagctatctggccgcacagctctagggaaactcaaagcaggaacagctctgggtcctggagacgcccctgagaagagggcccagtatccctggggcctcagtccatcagccgctgctgcaccaggcgggaatagaggtcctgtccctcctagagctgggcaagcttctgcagcttgccctcctggagcaccaggatctggtgggcgcgctgaactgtctgcagcctgtgagcaatcaccagcactgtgcgatccccacgggaattccagtcctgcagggcctgctcgcactgcacatctagggcactagtagcctcatccaggatgaggacccgcgggtctcgtacaagggcccgggcaatggccagacgttgtttctgtcccgcagccagctggctccccttctcccctacatctgtgtatattccatgctccatttcctggatgaagtcatctgcgtgggcagcctgggcagccgccatcaccttatcatcttcgcagctctgcagcccataagtaatgttgttcctcacagaaccggagaacagcacaggctcctgcccaactgaaaccacctggctgtgcaggtagcagtgttcatactgtgagatgggcttttcatccagcagcacctgtccccctgtgggctggtacagattctgcagcagggcagccactgtgctcttcccagacccattgggtcccaccagcgccgtcacctcaccaggacgtagggtaaacgtcagccccttgagcacaggcctgtcagggcgattgggatatgcaaaggagacgtcttggaatttcacaaccccctgcagagtggtgggggcaagcgtgccaggtgaaggcagatttggctgtcggtccatgtaggagaaaaccttctctgcagctcccacgttgctgagcatatccccatatatgtataccaggg

SEQ ID NO: 149713 - DNA, 889 bp, Homo Sapiens
  misc_feature (142)..(150): n is a, c, g, or t
acggaatgtagtagcccgtggtttcctgggttcctgaacctttctccatccgttttttgttgatgaagttagccacggtctgtagcacagcaggatgcccgacgtgatcagggccagtacaagccaagggacgaaccaggannnnnnnnnaattattccggccaatgttcaggtcatagacttccatcgtcctgcgtcctcacacctggctgagcctgcgtcattggaaccaatgcagtagtactgcccagagtcgtccttgtgaacagcagtgaacaccaaagtgcctgttttcagagtttaagtggaaagaagaattgcgaaatctgggattggctctggaatccgtggccagtggtacatcattgcgataccagctgtagtgagccgggggtggccctcactctcctggcagtgcagtgttgccatcttgcctactggtacagccttcggcactctacagacaggggtcactggcttcacttgcacagttaactcgatcacaatctcatcaatttccttgcggtcatttcgagcaacgacctcacagcgataaagggctgagtctctccgtgtcacattccagatcttcagggatgtcttccccagtatttctgcacgacccgccaagtctccctgaattttgttgtcaaaaaacacatatgtggtttgttcatcttgaattttcttccactcgatcctggggtcacttgtctgcgaatccgtaatgatgcaagacagttccacactttcaaattcctgtaccactggggttcgattgctggatttgagatttacagcccctatcaggcagcccctgaaaagcagcagcaggaagaagtcaggcagccgagcgcagagccggagtcgcggtggccgcctcagcgcc

SEQ ID NO: 149714 - DNA, 955 bp, Homo Sapiens
  misc_feature (20)..(20): n is a, c, g, or t
  misc_feature (25)..(25): n is a, c, g, or t
agggctttctgatctccaancgccntcaggcaccagctccccataggagtgcttctcgctagaagcaaactttcgctgtatccaaagtagacagacccattggagacatagccgtaaccgttgtccaccaatcttctggacaaagttcacaatttctggcacatactcactaacccgggttaagacatctggagggagaacattcagagcttccatgtctctgtggaagtccccctcccagaacttgggcagcttggagaagatggaattgtcagtgacatcacagccaagtgtagaatccagccagtcagagagcaaatccttggcttcttccagcaacacctccacacagctgttgacttcctctcccgtgagtctggactgcacagctttctcaagtggctctgtggcaagctgcactgcgtgctgaatccgttcgagcatctgctttttatcgggatccgtggtctcatttaattttactgaaaatggcttcagggcggcctgaacatcctccaagagctgtgccgcttcaggcctcttctcccgatactgctcgaacaggtggttctgccgggccctcttgatgatcttgtcatcaatatccgtaatgttcatgcaataaaagacatcaaatttgaagtaatccttcaacactcttctcaagatatcaaaagagatgtaggacctggcgtgccccatgtgagatgcgtcatagacggttggcccacagcaataccacgtcacctttttcccatcttgaggtatgaacacttccttgttcctggtgaggctgttgtaaaggtggagtctgcatggctgggtcccagcaggaggggaccactggggctgcacacgccggcctttgccctgctgcccggaggaatctgccatggctgggaatcccggacccgcagctgcgcctcgtgccgaattcgccacccaggcctcgctc

SEQ ID NO: 149715 - DNA, 885 bp, Homo Sapiens
agtccagagagcaaaaatccctgggcttcttcccagcaaacacctcccacaacaggctgttgacttcctctccccgtgagtctggactgcacagctttctcaagtggctctgtggcaagctgcactgcgtgctgaatccgttcgagcatctgctttttatcgggatccgtggtctcatttaattttactgaaaatggcttcagggcggcctgaacatcctccaaggagctgtgccgcttcaggcctcttctcccgatactgctcgaacaggtggttctgccgggccctcttgatgatcttgtcatcaatatccgtaatgttcatgcaataaaagacatcaaatttgaagtaatccttcaacactcttctcaagatatcaaaagagatgtaggacctggcgtgccccatgtgagatgcgtcatagacggttggcccacagcaataccacgtcacctttttcccatcttgaggtatgaacacttccttgttcctggtgaggctgttgtaaaggtggagtctgcatggctgggtcccagcaggaggggaccactggggctgcacacgccggcctttgcttgcttggagcctgcagggctggcctttgccacaggggctacccaggagcgcttctatgtgcctgaaccaccgagccacgtggaagagctgggggtcagcgggcggggccgagagctgcctgaacgcgtccacgtctgcctgggacagtgagtacccctggacatagctacgcgtgctgaggtgctcgttcagggcttgtgccctggctgcctcgtcactaatgctcagaatggacctgtagtcaggagcctgctgcccggaggaatctgccatggctgggaatcccggacccgcagctgcggctacaga

SEQ ID NO: 149716 - DNA, 228 bp, Homo Sapiens
tttatcagtttacttaagtgttgtcatctgaatctccggattaagccacacttgaaagaaattaggcttttcactttgatgaaccaacattttccctgccactactagtttaagttgaattttgttttacttgcaaactacagtttcttaactgatacaacataaggtgcagggctgtttcttaatgaaagaaatgagagacatataacaacacttagtaaactgatt

SEQ ID NO: 149717 - DNA, 1016 bp, Homo Sapiens
gggcgacgtgggagaggtatacagggggtgttgcgccggggaggggggcgggcctgcatagattgtccgggcgcgcgcgcccatctctccgcggccacgcggctcctgttcctccggcagcgggtctcctgacccgcgccctgtgcctacgggtgggtctccacattgggttcccgggcaagccgacaatggggaaaagggggctcggctcccaagaggaagaaaacttgctttccgatgggctctcagagtccttggtggcgcggaggaggttttccaggaaggccctggggaaggcggatgagccccaaggctcccgatacgatgatgtccccccgcctgggggaggagcccttccccccctttgcccggaatgcccaggatgcggtcggtcaggttgttactcttccccaagacctcagcgtgttgggccatggtgctggcctccaccgcgtagattttccgtgctccagcttgggcgccaaaaaacgacaggatcccagagccacagccaacatcaagaacgatcttgtccttgaagtcggtgtggttttgcaggatggcgcgctggtaggtgcctgtccgcacgtagtcctgcatcatgttctgctgctgggacaggtagccataaaactggaagtactgcacggcagaagactcctccgtccgctcgctgaacacagaccgctccagggtgtggccccggcaggttttccaggatgttgtagaaggaacagaaatcgttggggtgtggcgaactggatgaggacgctgttgcagcccagggtgatgatgaaggactgcttgcccacacggctgcactctgtctctcgggacactgagcacttaaagacacacacatcttcatggctgtagagggcgatgcccgccgagtccgggccggcgcgcacctcgaggcgcagcgcctgctgctccgcgtgccgctggatctcgccgttcgcgtcgccgatggtgaggaggcgggcgccggggaacaccgacacggtagcgcaggg

SEQ ID NO: 149718 - DNA, 1029 bp, Homo Sapiens
tctcgtggcgcggtccccctttttgccgctccttcgtggttccgcgctcccccggtggctccctaaatgggtctcctctgacccccgcccttccccgggcccgccccatcgggctttgggcgtgtccccggagtcccgagcccggcacgagggcccccggtttttcggtcctgcctgcctatccgccacgctcacacacctgctcacgatggacgtcagaggctgagcagcctgtcctggcctccggcctgtcaggccacagtcctgggttcttcccctggctcacgcctctggaggcgtcagacaggcgtccaggcccacgtaaacgctcgaggtgaactcgaattccgaattccgctgctcagatgtcaaacagctctgcctccttctccttccagaaggagaagctgcggtcgatgtagcgcagatgtcctcgttgctgaattcgcccatctcagacaccagttccaaagggtcttcggcgggggcttcggaacccggagagtctgagatcgggggaggcgcggcgggcggcgggccgccgctgcggcacagggccagggcctcgcgctgccccttgggcgggtcccccttctgaaccggagcggcctcttcggtccgctcctgttctttccccttctcttcctttttcttcgcctgttcttcgggggccggctcagcctccaggccgtttccgaagaacctgtgcctgaggtcctcgaagccgtcgctccagccgcgccggccggcctccacctcctccagcaccacgcggtggaagaggcggatgcgctcccacgggtggctgtccagccggtggaacatctcgtagcacagtaggtggcggaacttgcgatcctcgcggctcaggcccatctccggtagctggaagtagccgagcatgaagaggtcgagcgtgaggctttcgtagcgcgggggtgcgccgacgcgtggtcgacgatatcccgggattccggaccggaccagcctgctttttgtacagactggttctataggtcaactaatggc

SEQ ID NO: 149719 - DNA, 972 bp, Homo Sapiens
aagggccctgcaaagccgattttgctgttttgacgtaagcattgggtagtccctttactccccggaagggatcttttgggccaagtgacagcggggcccttggggctttgactttaaagggtgtgtggggacactgcccgcctgtcccctagaacaacctcccaagttagggcatcataaggagcataaatctatgagccgatccagtattttcttaggacactttgggagaagttagagtctgaactggaaagcactactcccaccctgtcttaaccggcgagtgcccctcagaggccacggccgcgcgagcaagtcagtggctacacagctcgtttcccgtgggtcctctgtgtagttaactttgctggggaccctgatgggagaagggacagccaccagccagtgaaacttccagtcagtgctcagggaggcgtgggaccctgcagggccacacacccctgaaccccacgcttacagttcacaaacccacggagtagccactctcaggtccaaagacactgcagtttttaccaaggcataaaagatgccacagaaaatttaacaggagcctcagcagcagttttcaaggggagttctgtaaacttctctgcaagatggatgtgtcccccttaggttattttaagaaaaggccataaaaaagcacctgctgctgaatgttctctccctccctcccagacaagcagcccctcaggaacacgtgggcaaaggcacacatggtgcccccttctcagggtgctccagacttcccagggtcaaggatccctcaaaaaaagaaccaagtcttaaaacatatgtagtactcagatagataggtctcactctgtagaactggaccttttaaaaactaaagtgaaatctcacaggagagtgggtgtcatacctggcctagaccagtgcccataacacacgtacgaggcaccctcgtgccgaattcgccacccaggcctt

SEQ ID NO: 149720 - DNA, 1347 bp, Homo Sapiens
atcccccggctgactaccggggaagctgggccacggccggctgctgtgccttctgctgatcagccagagcctttttctcttttgcgattcgctctgcacggagagatgccacctggatgggaggcagcggcttgtcatagttgattccactttctgccaacacagacgcgtgcttggggttcttctgaaagggattcatgccaagcggaggtttgatttgggggactcctcttgccagcagtcattttcattaagtcaaagtggctcgtgtacagctgggtgtgtgtggcattctcatcctgggcatagatctggctcgtacggagaggacggttgtttttactcttcccctcctctcgtggaatgatgacattctcgtagcgattccggcactgtcttggaagagcggtagattcggctacaggagttaacaacgtcactgacaagatcccaattaggctgtgtgtagcaggtggacacgattgtgaggttcaaaggcagctccagtaactgctttacagcctggcagcagcgcccagtcctcactgatgagccactcggggttgtcttgaccaggctcagctgtgggtttggcaaaagttggcaggggcttggcgaatggcacctgctgcttcagcagaatattcttcttctgctccttgccctctctgcgaattttcagaagtcctggtgcttgcgcggtcacaacagggaccgaggagggacgaccgccttcgccgtgacgctgcttcttcttcctgcctgcagctgaggggtctgttttgtgtcgcttccgctccttcctcacgtacacagggggcagcttagcctctgggatgggagtggcttcatacatgagacacatgaccgagtcgaggtagatgtcgctgtcgtcctgcggcggggtgggtggggtccagagcggcatgacttctgtctgcccatcgacatcttcgtagacatactccatgctgtaggcatcctctcgcgtgtaggtcaggagctccgcctcctcctgctccagccgcagccgggcctccctctcctgcagggtcttcaggttccagaactcccatgccctcactgcagtcatcactgcgtcctcactgtttctctccttttcttgctcaatagaagtatggaataattccaggtaatttaaagcatatttttcaattggtgtaagctgctccatgaagtcagctagctcctctaattgggatggttcttcatcacacggcatgttctcagagtctgatgacagagcatcagtgtgtggtcccagccaccccctcctgtgcggacttctgcctcgtgccgaattcgccacccaggcctcgcgtcctt

SEQ ID NO: 149721 - DNA, 809 bp, Homo Sapiens
agtatggcatcagaaaaaagaaatagtgagtgtatgggtaatctatggctgcataataaatttcccagaatgtagtgggcacaatttctggggggccaagaatccatctgcatggctctggcttaggagctctgtgtgaagttgcagtccagatggtggccaggactgcagtctcatctgaaggcttaactggggctgaaggctccacttcccaggtggcgttctcaaacatgcttgccaagttagtgctggctgttggcaggaggcctcagtttctctccatacatacatctccaaaaagttgcttgagcaccctcatgacatggcatctggcttcctccactgtgaatccggagctcaggtaggtgcattcaagcaggccagcctcaaaggcaacagtgctgatgtattccagagggaatgcttggttcctctatttccggagctctcacaggtttcggtcaaggtgtccgcagggctgggctccttctggggggcttgaccggggaagatctacttccatgctcactcacatggctgtggtgggatttgattccttggagactggtgggactgtgggcctcagttcctcactcagtacattgccagatgtccttcagttccttgccaggtcaccttctctatcaagctcagcacatgagaagcaccaggagacagaataccaacaagatagaagcggcacgcgtgagcggacgcagtgggtcgagataatccggggaaatcggacggtaccagcctgctttcgtcaacttgtctatagtgtcactaaataggctaatggtcataac

SEQ ID NO: 149722 - DNA, 1178 bp, Homo Sapiens
  misc_feature (179)..(187): n is a, c, g, or t
  misc_feature (363)..(371): n is a, c, g, or t
ggcgacgcaaggtagagccgccggggcccttagtgggggtggacagtttgcgccccgcgccgctgagtggagttcgtcgcgcgtatctgcgcccgggtagccccagaagatgtctcgccccgcgcgttgtggatttccgcaacggggcgcgaaaggaaatgggtcgcggttgttgggtnnnnnnnnntatggagtggagagaaatcccctcggcccaaggggacttgttggtcgtttccctcgcgcacagaaataaggtgcgggagacccccccgattagtagataagcgcgtttgtcacaccagaggtattctttgcatttcacgcccgcccaagggcgggggggtagataaaatcattttnnnnnnnnncttattttttgggggagaaaataacagggaaagcgtggggagtctttaggtgtgcgcagagggctcttgtgtggccaaaaatccttttggaatgctccggttggtttgcgtaaggagaaagtttgagtgccagctctttgccttcccaccgttggtaattttgaggatggggaggatagtgtttttccgggccaaaatctttcaggaccattaaatggtgacaatagtcccggtatgtattaagaagagcgagggaatccattccatggtcggtcccaactttttcaggttgggcatcaattcactgggcttggctcgagggttgaatatcagtcccttatgcagggcaaaggcaacgcgcttcacaagctgtttccttattccatcttccagcaagtgctttggatccaccttgatgatgccaaccaaagtcgttttcatcattaagatgccttcagtaaaaatggaaatagcatgagtaagcttggcaacctcgtatcgtgggcctagctgagcatagtccctcagcttgtctttgtccaggcgggtaggcacttcaataatgtggtgggtctgaagctttatgatctttagaagagatgtaaacatgctttctgggatgatctgcacaacttttctcacataggataccaactctccagaatagtactgtgacacgctgagcaggtcggggctatttgcctgattaatacgaagaaggggcagatcgagggcagaggcaagctttaggaaggtagcctcgtgccgtattcgccacccaggcctcgctacctaggaccttatcgg

SEQ ID NO: 149723 - DNA, 1097 bp, Homo Sapiens
gtccgagggccgcaacttcacacactcccgcagcagggacacagcgtaggctgacttcccacaagccaccatggagagggccacctggtaccaaaggtgaaattctccaaacgcaaacttcatggctcgctccaggcactccgagagcatgacgtactgtccccttctgcccaacgtgatgctcaggaggtcatagatggctgcggcattctgcaagctcactgtccggtcctcctcctgctccggcacccggctcagcaccacatctcgagttgccatggattcgctgatgaggaggagcaggagggcttcctcgatgttgtccttggggcagtagaggttgtctccttcatagaggtgaggtttccgcagggcctgagtggcgaaagaactctcctccttgcccatgaactcaggcagagggtgggacagggggctccagtagcactcctcactcagggagtgcagcaggacccccgccaggtgcttggccgccatcactttgaagttctgagttgctttggtctccacagtccgcagcacctcccggagctctctcatgcccttcacgatgttccccttcttcaggtttttcacataggcgctctggagggcagcttccaggaagtaggtgagctcatagtcaagcgggtgacagcctttcagatgcctcgacgtgctgttatttgtggtcttctccaattcctgcaggaacacctgagcgatccaggaggccctctcaaaacaggtgatcacttcttcctccctctctgtcaggcggaagcgggaggcgatggagttgggtaggcgttccagagagaggcctttgatgacaaaagcctccgacagcagccgcatctgatacaggggcttgttctccatggacatgtcatcaatcccggcccgtgcgtacatgctgatggcatctcggtatgagccctccacgtaatgcagtttgcccaggatcagcatggcctcacacatgtactgtggcgagagcctcccatggttaaggatactgcttagataatttttggcttcgctcatcttcggctcattcttctccagcaaaggcatggactactaatcaactttgc

SEQ ID NO: 149724 - DNA, 1159 bp, Homo Sapiens
  misc_feature (41)..(41): n is a, c, g, or t
aggagaaaagacgaagaatgaacatcattatagtctccgcnggtatccttgctagagatctgcagtggtgagagttggggtgtggtctgttttcctgacctcccttttctgctgtggctcctcttagtcaaggctgggagagaggtgttagaggaaaagtagcaaagtcttatgtgacaggtacccttggttggcaggtgccaagcgctggcttttctcatgggcacatatgtgggtttttgggaggttctctacaggacctccaccctgagttgccatagcaaattactctctggccaacctctcggagacccctgcatcctctgtctctcataggactgtcccacctatgccaggcaaaacaatggtgggttggccgctcctcaccctgcccacttctcaccttgccacacaggccactccagcgaggctccacgatcagaattctccagacaggaagtgcacacaagtctcttcatttatgtacgtcctcaattcctaaagacatatgttgggttctcccatgaactgtcttgctgtagtttaatgcaccgaggtgcctgtaacatccagacaacatagtcagcatcagtggggggacagttatagggacagagcctcctcttcttgcagatgactggttctctctgggagctcccttcatttggtttgagttggggagttccctctggggaaatctcagccctgcccacaaatgcagcagtgttatgcttcagctgactttccttcaatccctttcatttgtagactggaattgagggatgtagtttgattgctgttgaacctgttctgcctttagtaaggtgtctagtacttctcttcagaatgcaagaatatttagccctcattgttctatctttgtggcttcagcagatattccaagagcagaggaaaagtcctattcaacaacctataaaatcatttcttgtctgacttcccaaccacaatgacagctctaaagcaacagatatcttgtctgcgttgctcaccactgtttctgcagaacctggagatgtggagttatcagaactttctgccacccttaatcctccgcacgcgtggtcgacgatatcccggaattccggaccggtaccagcctgctttttgtacaacgtgttctatagtgcacctatgccca

SEQ ID NO: 149725 - DNA, 991 bp, Homo Sapiens
ttttgcttttaacaagaaacaatgtattttaacaaatacattgagaatctcaatatctatatcctttgaaaacaagaatctattacaaataagcttggcctaagagctagagttgggaatgtcccattttcaccctgggttggtgactgcattagtttgctagggttgccataacaaagtagtacagattgggtggcctaaacaagaaaaatgtattttccagtaattctgggggctggaaatccaagacgaaatgtcattgggttggtttctctgagacctctctcctcggccctcttctctctgtgtcttcaaatgatttcttcctctgtgagtgtaagtggccaaatttccttttcttataagggcataagtcaatttggatcagggttcacagtaatgatctcatttaactttaagtacctctttaaaaccctttctccaaacatagtcccattctgaggcacaggtggttaggacttcaacatatgcatttcagaggacacaagtggttccaaaacaacagatggggcagatgaggatgaggtgatggcagtactgctggtaggaaccagctgaggccagactccaattctagcagggtagaagagtgcatgacaaggcgtgttatagaaagtcatgatacacttacacagactgaatctcactccttgaggatgtgttgaatcatgagaatagtaaccttgaaaactgcctttgtaaaattatgacagtaagataacttggacatactatgactccatcttgcttctgccctcccagcatgtcccggacgcgtgggtcgacgataccgggaatccggaccggtaccaggcgctaagagacaactgtacaagtgtcacaaatggctaaggtcatagctgttccgggtgaatggttacgccgcgcagcaagccggagagacggaccggatttcaggagtcaccagcggagcgatcggaacaagtacaaagacgagacaacacacagg

SEQ ID NO: 149726 - DNA, 949 bp, Homo Sapiens
  misc_feature (424)..(500): n is a, c, g, or t
  misc_feature (729)..(834): n is a, c, g, or t
tttttctgagttaaaagttttattcattcaacatctcacattacaaatatttaaaaattatatgtatactggtataaatagtcatttgcaaactatttaataacattaatttttcactagcacttcaacaaatgaactcttttaaaaaaggaactgtgttatataacttaagagtagaacatacaaaaataggaacttaacgtgaaaatgactttaataaaaaatgaattacccttatttaaaatgctataataaatactacaacctccccatacacagtaaaaactatatggaaattcagccaagtagtacaattaactgacatacttaaataacttttccttctgataatatgagcaatacactggaaaaaaaattagggattagtaaaaactagacacccacttgctaaaagtttcacttnnnnnnnnnnnnnnnnnnnnnnnnnnnnnnnnnnnnnnnnnnnnnnnnnnnnnnnnnnnnnnnnnnnnnnnnnnnnncagttgaatacaatattgtcccgattcttacaatgctatcaatcacagtagctttaaaataataaaataaagcaaatgaccaaaacctcttttattccatttttaagaaataatctcaaatttacattagtagaaagattgatttctgattcttttctttagaaacaccagcaagacagaggattactcttaacagtagaaaatgacatttttagatcggacgcgtggnnnnnnnnnnnnnnnnnnnnnnnnnnnnnnnnnnnnnnnnnnnnnnnnnnnnnnnnnnnnnnnnnnnnnnnnnnnnnnnnnnnnnnnnnnnnnnnnnnnnnnnnnntcattatccgtcccgcggctaagctagagtcagaggccgatcggcccgggtctacaatggaggtcaaccaggggtggtaccggaactgagtcactaacactgttagcccacgaag

SEQ ID NO: 149727 - DNA, 989 bp, Homo Sapiens
  misc_feature (804)..(804): n is a, c, g, or t
ggcatagttgacatatagaacaagttgggtacaaaaaagcaggctggtacggtccggaattcccgggatatcgtcgacccacgcgtcggcactcatacaattcagacagcaatgtatgattgatccagtttcttcacatcctcaccagcatttggtattactactattttttatcttaaccattcacatagatgtgtgtaatgataccacatgtggttttaatttgcatttccaatggctaatgatgttgagtatctttttgtgtgctaatttgccatctatgtatcctcttcggtgaaatgtcttcatgtcttttgtctattttctatttaggtcatttgttctttttactattgagttttgagaggttttttatatatcctagataaaattcctctgttagatatgtggttgcttgaatttttaacataacttctaccaaggaaaaataagtaaaatttccaacccttgcatggccagtcacttacttaattcctgtccttcagtgttccatctagagaattaagagatatgatgtataaaatagacatcgagggccattaagagagtaaatacttaaaaatacatgttatgaaagcaaagccaataatcactgtaggagtatgagttggctaagggccaaaaactaatgtaaataagagaaagtgtggatataaatgaccattgtttataaacagttatgaaaaaatgctgtgacttgaaatctttcccacatctcccaagaaagtaggtaggagtttatccttttccgtactctctttttaaccctgctgactatacggngctgttcctcccagtggccagattcctgtctctcccgtcacgaaaccgactacgggatcgtcagaacctgtgtgtgccgcatcagtacacgggaccggcccgctcgcgccactcccggccccgcgtgcgcctggccacctttctcccttgacgtgccccgcgcacctcgccccccgcgctgcgag

SEQ ID NO: 149728 - DNA, 949 bp, Homo Sapiens
  misc_feature (48)..(48): n is a, c, g, or t
cagcactgaggtgtgggtagcatgaagaaagatggtgcgcccggtgtntaggacacgagagtcccggtcccgaggctctgccgggcccgcactgtctggatggcctgctggttcttgaacttgaccaggcctagggtgatctgggcgttccagccgggatcttccagggggcagcggaagtcgatctcgccgcccccttcggtcaccagcgtgaagtagatgtggcgcccggtgctctccacgcactccacggccttgatgcgggcgaagctgagctccttgggccggccgcccgtgcccttggcctcgaagagctgcagcccgcgttcggtgaggacgcagcgcttccgcttccacagctgcagcagcccgccgctgcgcttctccagcacgccctccttgagcacggtagccgtcgccgccgccgtcatgggcgccccgaggttcgcggaaagctccaggctgcggcgggcgcggcgcccctctcggccccgcagcgcaggattctggcgccctgggctggcaggccgtgcgcgctgcccacctgcgccctgactgctccgcgcacccacaccgcggccctcagcacccggctgccggtgaggtggtgtcggtgcccccagcgcgctccgcgcccaccgccccgcttcagccggcacccgctcctccgctctaccccagctggcccagcccgacccgcctctgccagatgcctccgcgcctccctaggccgtgagccccaccgcccgcccgttctcttgctcacctgggctctgtctgcagcgctgggcggcagctcgcgggatgtgcccttacatgttccgccgctcgcctcctgcgcacgcccgcccgcagcgcattcctacccgacgcgtgggtcgacgatatcccggaattccggaccggtaccagcctgcttttttaaaccagctgttctatattcccaaag

SEQ ID NO: 149729 - DNA, 1415 bp, Homo Sapiens
ggcctgggtggcgaattcggcacgaggctctcagtgagccggccttggcttttgtggtggcactgggtgccagcagcagtgaggaggtggagctggagctgcaaggccgaatggagttctccaaggcagctgtgtctcgtgtggtagaggcctcagaccgcctacagcgccgggtggaggaactctgtcagcgagtgtacagccgaggggacagtgagcccctcagtgaggcggctcaggcacacacccgagagctgggccgtgagaaccggcgactgcaggacttggccactcagctgcaggagaaacaccaccgcatctcattggagtactccgagctccaggataaagtgacatcggcagagaccaaggtgctggagatggagacaacagtggaggacttgcagtgggacatcgagaagctgcggaagcgagagcaaaagctcaataagcacctggcagaggccttagagcagcttaagctctggctactatgtatctgggagctcctcaggcttccaggggggccagatcacactcagcatgcagaagtttgagatgctgaatgcagagttagaggaaaaccaggaactggccaagcagccgtatggcagagctggagaaactgcaggccgaacttcagggggctgtgcggaccaatgagcgcctcaaggtggccctgcggagccttcctgaggaggtagtgcgggagacgggggagtaccgcatgctgcaggcccaattctcactgctctaccacgagtctctgcaagtgaagacccagctagacgaggctcggggcctgctgctggccacaaagaactcccacctgcgacacatcgagcacatggagagcgacgagctggggctgcagaagaagctacgcacagaggtcattcagctggaggacacgctggcccaggtacgcaaggagtatgagatgctgcgcatcgagtttgagcagaatctggcggccaacgagcaggcggggcccatcaaccgtgagatgcgccacctgattagtagtcttcaaaaccacaaccaccagctaaaaggggacgcccagcgatacaagcggaagcttcgagaagtacaagctgagattggcaagctccgggcccaggccagtggctctgcccactccacccccaacctgggccacccagaggattctggcgtcagtgccccagccccagggaaagaggagggtgggccaggccctgtcagtacccccgacaacagaaaggagatggctccagtgcctggcaccaccactactaccacttcactgaagaaggaggagctggtcccctctgaagaggatctccagggtataacccctggggcccagggcccttcctcccggggccgagaacctgaggccaggcccaagcgggagcttcgggaacgggaag

SEQ ID NO: 149730 - DNA, 1286 bp, Homo Sapiens
cactttaaatagacactttattagatccacaggcgataaaatcccagagctactgttaggcacgtaaatatagaccctgctaaatatttaatattatcaagcttgtgtgactcaagcatggttttgaggccagcaacctcagtttcgatcttcctgtctgtctgggtaagggcccgatcttgctgggcatgcaatgccactatttctgttctcaattccagcagcttcttttcgttcaatgaatacaattcttttactctgctcttttctaggttgaagtctaatttggtatctgttcggactttgatcacttcatccattacttgttgttttaactgatgtagttcgagttttattttctcattttctgctctgagggctgaaaattcactcttctccaaaataatcatatcctttttcacattcgcaatctgagacattacttgctgaaaagtgatttcctgctgcatcttggtgaccatatctttgtagacgatgtccatgttggcctccaggatcttgaccaatgcagacacaatgatttctgcttgttgagtagcaaacccattgtcttccagtaagcacactaaggcatgagtgtcgaagtagagtttcctgctcccagaagaggtgaaatctctccttttgcgctccagctgcagggatccagcagacaagcttagctctctcctgcaggaaacgagtgcaggcgccgggccgtggtactggggaagggcgccggcggcagcggcgacgcccggtgagcacctccacgcgctgctgcgcccggccgggggtgcggcatacccgaggcgcgagcgctcccagtccccgagctgccggcgcggggctgcggcggccaagcgcggggagggcactagcaggaggaggagcagcggtgaggcacgtgacacgccgccgcgggccgccggggcgcgagggcgcagcgcccccagaccgtcggagagcgcagagaggcagcggcgtgctgaggtttcgctgccgcccggtcttccgctgaggcccacgggcaagaagagaagccgctggcggccgggcaggcgctgggtcctctggccgccgaccgagccgcagtccatccccgagcagttcactggcccgggcgcgcgctcatgcctctcgcttttggcgccggccacgcgcggtccaggcccagagtccgacagcgggagcgagcgtgggcccgacgcgtgggtcgacgatatcccgggaattccggaccggtaccagccgcttttgaacaactgttctatatgtcactatgc

SEQ ID NO: 149731 - DNA, 812 bp, Homo Sapiens
tgtctgcggtggatggcatgcttccactggtccgtgccacccggtgaggaccagcaggaacggcggggtaaggggatggccacctccacctcctggcatagcaccgaccggctgggtggtatcacgctgtccaccaaggcctccggggcagccgacggggccgagcagaggagcaggctcccgggcgcctcccgacacatggacagcccggtgggggacaggaggttgaggctgaccagccgctccccccacagccaggcgtcgtccaggtgggggtcaatggcagagccccgctcggggcagtagtccaggttgcactgctcgacgggccggaagccctccagccccgggtagaggcccatcctccgcaccacctcccggctgaagctggggaggccgcagaagccctcggtctttagcttctgtttccgaaagttgactttggggccatagtcctgcttcctccgtccagactgggagagcttccaggggtcacggtccatgagccgcaccaactcggcttcttcctcccgggtcacaaagtcctcgatcagcatcactcctgggaaggggaaggcccagccctcaaagtcagactcctctgtgcccacggcccagccggtgtcggagcagtaaatgaaacggtatgttttcgctgggggcagctcccagggcgggtcactgccgcgctgccgctcgcagatcagacaggtccggatgcccttgcaaccgcattcccgaaggacttcgggggtctcggcggcagccgccgccatcgcgccgtccgcgtggccagtgcgcaggcgcggccg

SEQ ID NO: 149732 - DNA, 1236 bp, Homo Sapiens
cccacagagacaacacagcaagaaacacacgcgagctattatgaaaaggcgtcggggttactcttcatcggaggaaaacctcgctcgtatcagtaagcataatctgattaacacagagcaacggcaagcacatataaaatgatttttgtaggtcatctgcaagttcatggaagagctgggcctagaatgtgggattgtttcctggcctgtctagtctttgtagctgtgagacatagattacagcctatgctaattcaaacctttctacataaaatgttccttatctcaaactagctgggtcctaatggagccagtaaactaatattgcactttcagtctacttctggcttcctctgtagaggctctaggttatgacagagttagctgtgagtatgaaggaaaatagaagtcaatgtccaatcgtggctaaattggaggaaagaaaacaatggaatctgaggggaatcaaacaatagttagggaatgttctattttcttaaattccctactagctttctcaccctcctgtagtgattgccaggtccctctagcctcagtagtgggaaagggagtcatgtactgaacacctaccctgtgccattttacatacagctcacttaaatttcaccaagtaggcagccttcaacatcacaggtgattcaatcaaagtaatttgccagggccgccagcttcagccgagctaaagctggtgcctaggcctattaacccgagcccatgccttcatgtatcactgcatagttacagaaatggcaccacatactgcgatgtagaccattttactaccaaccgtggttcagacaaagagtacaagcctctgcatcagaaagcgaggaatctcctatagccagtaaagctggcaacaggacgaggccacaactgtaacgagaaccagaacacacaaagagcaaagggacaaacctaaagcgcaattaaacagaaaatctgaaaccaaggaacacacagagaaccactagtacggggtacgcctgaacaacaggacccgtgcacacctgatgaacacacaacaacatgagaagggcaggaatctgcaacacacaacacagtcagaaacaaccgagccctcacagagaacaattacaccgcgagccaccaaaagatcaactaaaacagcagcatacagtaaagatgacagcaacacgcagcacaaaggcagagggaccatatatttgacatagttccacagtcttgaaacgc

SEQ ID NO: 149733 - DNA, 878 bp, Homo Sapiens
atgaggtggaattccagtgttaaatctcttcctgactctgggttcagtaggtccctcctcttctgttaccctcctggttctctctgttcaccaactacctgcatgtgccaaactagaaaaaggaaataatttacacccctgccccaacagctccttccctcctagggacttctgtgtccaccccccactttgggtcttagaactgtggctagaagataaaagggaggagtttgagtcagaggctttatgtccccaaacccaaccccctctgagtattaaactatagtggcattgtccctcaagctcccctctgccttggctccagagtcttcctcctcttcttccagactgggcagggtggctgttgttattggtgaagataggcatctagccagagctgccctgactcctttagtgagtggatgatgtcggcgaaggctgacagcgggggcttggactggtactctatgccatgcttggcacacaaggactgcaccaggggagccactttgtggtaacttgtgtcgagggatcgtgggaaaaatgatggtgctcatctggaagttgaggtgtccactgacccagtcattgaaggcagacttgtggcccgttgcatgtggcctggagctggggtggaaaccagttccatgttccggtcctgatcagtgtgcgtgggaatctggtcccctggtccccgcacagtccgttgcttcccggaccggcctttaggaggcccggagtttcgcccattgtggcctactgagagagcgctaaaggactcagcgaccccgtctccggttgagatatttcctgattgcggcaggggcctgaatttgcccctgtcgcttacctcgccgggtcgccacggtttgcttccg

SEQ ID NO: 149734 - DNA, 930 bp, Homo Sapiens
ggaaattgaagaattaggggtttataagggcattcacattattaaattggactgtagatgaaaatattatatgtatatgtgaaattcatccatccgagtgttagcaggagttgtccccgtgtactcgtggctgcagttgcagtgataggagccgtgcgtgttctcacagagggccccgtgcaggcaagggtttccagagcactcgtcgatatcactctgacacctttctcccctaaaacccgaatcacactgacaaagggcgccatccaaactgtcaaagcatgttccgccattcttacggggttcatctttgcagtatgcgactaagctgacacctctgaccagtatataatcctctacactggcaaacaaagcctccgttgtcgacaacacaggtgcccccatagaggcatgggttggaggaacacggtattgacgcttatctcacagtgggtccctatgtacaaggcactgcatttgcagtaataacctccagcaggtgacggattggcaaacgcctccattcttggcaagggttcgctggcgcagtcttccgtggccgtcaggaagcacgcctggagatacatccaccgactcttcgatagtgtgcatagcttactgggtttgctgtctaaagggagctcctgcccattcaaataaatggagtccatacaacccctgaaaccattaccaactttgagtgactgtcttccatgcctatgtgcccttgctgacggatgtggccaccaaagaacacatagttatccacggttcaggggttttcagagtcccctggggctgtggccgatgcaggtatgaactgtggtctagaaacccagcgagcctagttcccttcactgccaggggcaacttgcgtgcacttgcccttcttgccctgaatgcctgccgggccatccgggcccttccacc

SEQ ID NO: 149735 - DNA, 1094 bp, Homo Sapiens
ggaaattgacaccatttattgttttatgaccaaataagagtgtcagagaatacatatcttgggcaggtcccagtaaagcgtctgccatctcccccactttaattctgtgtactggcctaagggcaaacagctggcaggaaggtggtgtcttaggagagagagtacttggatccactggagagtatgctctgagggaagctgcggcacttgcagaggggagtgggctggaaccaaatggagccctttctccggacacgcacaatgctattcccagtgaggtaatctaggaactctacagggcactgcggtccttagctgaggtgctcaaggactccggaaggaagtcatgttccccatttacaacccgttccctagtgcgggaagccagccacggagaagggaagaactggacggcagggcggtggggcaaaaagacagccatgattgggtccgtcctgatgaccccagcatcagacgtggaggtcactttgctctgtgatgagctggtcccgtgtgcatgtggcattgatagcacccgattgtacaattttcccgttgggcagcatccgtgggtattcccacaggcagtgggatcactgggtgctagacggctgggtttcaggacagggcctgaacgtaagctgaggcgattcacgtgctcctgtggggctcaggagctgtgggcacacagatccgtgcccttctgactgctgcttcccgtctgcgcgtcgggtggttcctgcagctccttgttgctccggatccccgagtagccctggcagcgatgtgaggctggctctgattaggccacagccccggtgccttgttctcgggcctcgtgggtcaactggtattctaggcccgtcaaatgcgtcgtaactgtgtgacacggggaaacgccacctgtggcagaggtgcatggatcaggtgcgagagaagcctgtgtcggtgcctcattaaaggtccgaggataacggggtcggacacaccgatggatctaagtgagataagttcggggaagattgactgtcagggcaaaaaggggccaaaacagacacgatagactacctgagtagggacattaccggatgaga

SEQ ID NO: 149736 - DNA, 1023 bp, Homo Sapiens
ataaattttttataaaacttgaatctttaatgttggtttttaccatttactgtattggtgggtctttttacattgggccatagttctatgaaatgtaaactttttcaggaaagccagtgaaaaataatttagatagttatttcttaaacatggtgactgtgtgatagttttgatattaacagacctttaatcactccacagaacattttgtatttaaactttaagtacagttgaccagaattgcaatctaattaaatatatcaatttgttgactggctgaaatttaagatcctttcaatgatcaatcatatcaaaattacttcttttggttcaattatatttaccattacataaaactacaaaacatttggttaatctttccgtgggtatacagtgaaaataggtagccagaccaacacctctttattttttattgggttgtttgatgagctgttctacttctaaaagatttaatcttgtttcattctaggtaataatgtttccataaatatagaggtagaccccaggcatcctactatgcttcctgagtgcttctttcttggagctgaccatggtatgacatctgagatttaaacgtttttcaatagagtcataaaatccttgcctagcattgttaaattattagacaatattagtataatttaatggtagtgtaatttttgtctgagacggagtttagctcttgtttgccagtatgtagtgtatggcgcgatctcggttcacccgcatataagtgatagcttatttgcacatgacatgtcctcgcagtcctgaagctgtataatttggttttaagacctatacatattaattttgatctgctcacgccagtagctaagaacatccgggtcacatgtggctttaaaccaaagtgaaccgtgcacatcttagttttgcttaatgaagggtaaccctggataacggcagaacatctttttgggccggataattatctggctaccaagacgaatttccccattcgacccaaatgtccacaagtga

SEQ ID NO: 149737 - DNA, 1543 bp, Homo Sapiens
  misc_feature (443)..(487): n is a, c, g, or t
  misc_feature (723)..(731): n is a, c, g, or t
  misc_feature (1271)..(1318): n is a, c, g, or t
ctttcgtttgttataccggttcttaggtcccttcggttccctgggtcctcttcacgttgtttgtccccctttgagtcttcggtccattctgctccgtatcttcctagcctcggtcgtattaccttgtcacaccggttactgctttgtctatttggcctttttaggtgacactatgtgacaagtttgttccttttatctcggcttgtaccggtccggatttcccgggatatcgtcgacccacgcgtccttacttgtatattgtataagcttttgttaaaggtacattttcaccatacccttttttatatctcggtattattagtatccccctgttaccctataggttggtctcttccccacccccctttgagcttttgctcttaaatacattcacggttccacagcctgaccatccttgtttaatctatcatactcttccaggnnnnnnnnnnnnnnnnnnnnnnnnnnnnnnnnnnnnnnnnnnnnnagctgaagtcttatgacttttcatgagtccaaattgttcggatttcagcaagtcaaatcttgcaaaggcctgcatattgttgttttaacagattataatgaagtactgtgctaaagagctcttataaacaaaatgccatcatgcacttagcctcgcaataccatgcaatgtatgttaacttagtctctcttctcagacactgttggtagcttaatttctgtgttttcctttttttnnnnnnnnntatggacttattgtggttatctgagaggttctaacattcacatgcaatttggtgtggccatttagctattaatgagttaatggcgcagaacttgttgatatttgaagtgttctctccccttttgcccatgacgtaaatacataggtgtgttccaggatttgttcaggtttttcccccctcctaatcttgtacataacttgtattatgtgtaagttaaacattttattttgaacttggaatgttcccagtgatttcattcagcagggtattttctgccttgttggcaagtgacaaaaaatatgggaagtatttgctaccagttggtagatggtgcccttaatggtagaatgaggaaaatgtccgcaaaagcatgttttattatctttacttttttggggggttggagggggtagcctagccagaacatcattgtaatcttaaaacataagatgcttttattagatgatcaactaaaatagctggaagacagtactttagaaacagatagttgtaagattataaaatgcaaatgtaacttannnnnnnnnnnnnnnnnnnnnnnnnnnnnnnnnnnnnnnnnnnnnnnnccagtactgagcatctccacaaatgtctcctaactcagaaaaagtttcttttcttttcatttgagatttggttgcattcagggttgtaagttggcccttgcttgctaaccccgcccggttttaccgtggctttcattcctgaaactttggttatggcctttggttgggtttccttcaaaatggaggcgaaactcattggggccttacatttagtaccagggaccc

SEQ ID NO: 149738 - DNA, 955 bp, Homo Sapiens
ccttggtcccccaacccatatacccgggagatgcttttcccccccgaaaagcagtcaagtgccccccatagccaaaatgacggttcatgtttgcgggaggcgtggcccgttcatcatcttcactttccaaatcagagaattccccccaggtcatcatctttcagagtgctaaagtggcgcgtttgttttcgtgctctaggtgtgtcaattaccaaattattcttgctgttgagcagatccatgtctaggtcagcctttttggcccacttttgccaaaagttggggtcatccaaagaaatatctgtcctgttttcagaagcaacaaagcttgccttagcaaaggtggaaccttttccttcagattcaatggtgatggttgtagttcgtcttaacaagatctggtcaatgtcctcttcacaaaacttggagccttcatcatcttcctccatgatggctgcatatgctccttttcttaaaagatcttcaatctccttcttagagaactgttggattccagtaatgttgccatcccgaccactcatggattgaagcacagccttatccaaccccaacttgaggctggccttatcaaacatctctctctcgtaggaattacgagtgatgaggcggtacaccttcacagctttgctctgcccaattcgatgacatcgtgcctgggcctgcaggtcattttgtggattccagtctgaatcaaagatgatgcaggtatcagcagctgtaagattaataccaagtccaccagcccgggtacacagtaagaagacaaagcggtctgagtcaggcttgctgaagcggtcaatggcagcctgtcgaaggttgcctctaactcgcccatcaatacgttcatataagtacctcctctggattaaataatcctctaggatgtctaggcagcgtaccatctgagcctcgtgccgaattcgccacccaggcc

SEQ ID NO: 149739 - DNA, 1138 bp, Homo Sapiens
  misc_feature (293)..(332): n is a, c, g, or t
ggggggcccagggtccccgccaggggttcctgaaagggccagggggtgggtttggggcttccatgctgaaccaaggggtgggtggaaagaggggccggaccatggtggccccccgggcgccctcgggggatgggggcgcggtgggccgcaggcagtcggtccccgggtgtcccggcggctccctcatgcactctgtacagcgtgggggcggatgggcgggggcaggggcatcagtctagaggctgcaggcctcctggtccaccgagcgcttcctcagctccttgcctggcttnnnnnnnnnnnnnnnnnnnnnnnnnnnnnnnnnnnnnnnnagatgcaggacggagttctcccctggctgcacccgcaggtaggccttgaccttgtggtgccgggccttgccgtcgctgaagtcgatgacgcggcactcgtaggtgccttcgtccgtgggcttcacccgggacaggcgcagcttgtgggagatgttgctgcccaccaccttgaccacacttattttggttgcctccttccctgcgtcttcctgctgagatgcttttagctggttcgaggcccacgcctgcttgtcggtccagtcccggtggctccgtacataccaccactggatctccagcgagtaggagggggagccgctgccgcggaaggagcaggccatctccacgtcctcgcccgtccgtgctgtcatgtcatggggtgtctctgtgaacagggcgtggccggagacgtggttgtcccagggcgcgtggccggcgggccgcgtggcgccgccgagttgcaggaaaagtgccaggtagtggagggcgcccagcgctacggcgagcggggcccccatcgtgcgctctcgggccgggggcgccgccgcctcacatctgggccccggagaccgcagaaccggcgccagctgtcccctgccctgagcggcctggctgcccggctccggcagctgcccctcgcccgctgtccccggacccggcccagctcccagccctcgcccggctccggcccagccccggcttcggggagcgagcgcacgcccagccgccgccgacgcgtgggtcgacatatcccgggaattccggaccgtaccagcctgctttttgtacaagctgttttagtacaa

SEQ ID NO: 149740 - DNA, 1317 bp, Homo Sapiens
aacccccagaagggattccgggcttcggcccttttgattgggcccccttttaaggtttgcttgaaaaggacaccggccttccttattagcacagctgaagccaatccagaactaaacctcagcacacaaaaaatcccaggatagatgaatcaaaaagactctgaagccaaaaggaggctagggagagcaactgaacttagcaagctgaggatttcagtgtccatcatccgatcctgccctgtaacaacaggtctatatgatagagatattccatctgagctggaggccattatccttagcaaactaacacagaacagaaaaccaaatacatgttctcatttagaagtaggagctaaatgatgagaactcaaggacacaaagaaaggaacaacagacactggggcctacttgagggtggagggtgggaggagggagaagagcagggaaaataactactgggtactaggcttagcacctgggtgacaaaataatctgtacaacaaaaccacttgacatgagtttacctatataacaacctgcacatgtacccctgaacctaaaagttaaaaaaataaaagggatagtctatctgatgcttaaattgatctttaataaccttctgcatcccaccaccccaccaaaaccacaagagaaatatgctcaatattctgtgggcgttcagaccacctacagctgccccttgggttagagaacaggattccgtggtcctctttgaaaaatagtacattaaagaaaatgttaattgcttttattcatactgtgtctctccctgacttctccgaaagcttgtgtttcaaaaggtcagaatggttgttgttacagatatgctgcctcccactctgtttagcatctatacaaagcacaacgttttgtatgtttccacaaattttcccccaaaattatcttcttcctttactttccacctacctcctctgagatgccaaattaagaaatgtcttagaatatctagaatattcttcctcttttcatattcgatttgtcttagcatataaaaaattagttgacatggctttcggaaagtccagttggcagcagagctggacaacagatggccacccagaaattagagccagaaaggtgacttactcagcatgcatacactgacaagaatcctatttttgagaaaccctaaaaatccttgacctgatgtaaagcccaagaggcagtttagaggaagaacatgattataacctgacggacgcgtggtcgacgatatcccgggattccggaccggtaccagcctgcttttgttaaccactgtctataggtactata

SEQ ID NO: 149741 - DNA, 156 bp, Homo Sapiens
gccgtgttccaatacagctttatttatcaacatggaaatttacgttttatataatttttacatgttatgaaataatattcttttgtgcttctttatgaactatttaaatataatgccattctggccgggcgcagtggctcacgcctggaatccccc

SEQ ID NO: 149742 - DNA, 861 bp, Homo Sapiens
ccccaccccactaacgctaggtagcaggctgggtggcgaatcggcacgaggccgagggcccttctgcccagagcaccatctcccgctatgcctgccgcatcctctgtgaccgccggccaccctatactgcccgcatctatgccgctggcttcgacgcctctagcaacatcttccttggagagcgagcggccaaatggcggaccccagatggcctgatggatggactgaccaccaatggagtcctggtgatgcacccggcaggcggcttctccgaggactcagccccgggtgtctggcgggagatctcgcgtctgtgggaatgtgtacacattgcgggacagccgctcagcccagcagcggggcaagctggtggaaaacgagtccaacgtgctgcaggacggctctctcatcgacctgtgtggggccacactgctgtggcgcacaccggcggggctgctgcgggctcccacactgaagcaactggaggcccagcggcaggaggcaaatgcagcgcggccccagtgccccgtgggcctcagcactctggccttccccagcccagcccgtggccgcacagcgcccgacaaacagcagccctgggtctacgtccgctgcgggcacgtccatggctaccacggctggggctgccggcgggagcggggcccccaggagcgcgatgtcctctctgccgccttgtggggccttatgtgcctctatggcttggccaggaggccggcctctgcctggaccctgggccgcctagccatgcctttgcaccttgcggccacgtctgctctgagaagactgcccgctactgggcccagacaccactgccccacggcacccatgctttccatgccg

SEQ ID NO: 149743 - DNA, 1175 bp, Homo Sapiens
tcgagctgatgcgacctgtcatgtagtattgtgtttgtacttctgtgaggtgcatgtataatccccgggctgttcccgatagcactgatggtatcctggtcatatagtggttggacttttcctgctttgcacgggagtggcccttgtgggctcgccgataaatatggtcgcgatatatatatgtgcacctacacagcgtcccccggttcttggctagaccgcttttcccccaaagggacaacattccgcacaggcgggattcttcctgccagacacacggggctgaatccctcggagtaccgctccgggtgcatcaccaggctccattgtgtcaatccatccatcagccatctggggtcccccatttgccgctcgctctccaaggaagatgtttgctagaggccttcgaagccacggcaattagatgcgggcagtatagggtgccggcggtcacagaggatgcggcaggcatagcgggagatggtgctctgggcagaagggccctcggcagcccctcctccaggggacgtgtctgttaccacgaagtcaatcatgttctctgtggagcggccaatctggaacatgtctgtgtcgctatcatgtgtatactccactatgaccgagtggctccgggacagtgtatacgagatgctgtgctgaccacggttactcagtgccttggagacgagcggcgtggagatgtggtgcatgacgtctggcttcaccccgttggcgtgcgaccggcggctcagtgccaggcggcttcgccggcggcccttgtccccacttgccagacaaccattgtagcagctgtgtgcccttgggccagtcacttcccctctctgagcctcggtttcctcacctccttcctcacagcatcccaggacgatgagttcaccatacttgatgggctcctcgcctggctgcgcatcttcaccgggagaggagagaacgcaagagcccttgttcccccggtgctggaggtctgaggttcggggggaccccacttcagggtttccttccagcaccattctggccacgctccgggccccgctgggcgccgctccctccccgcctagcccctgctcggccccgggccgctgcggcgggatgggcccggcccgcgcggctccgccctcgtgccgatttcaacgcagcctcctatctcttagcct

SEQ ID NO: 149744 - DNA, 1566 bp, Homo Sapiens
  misc_feature (425)..(425): n is a, c, g, or t
  misc_feature (436)..(436): n is a, c, g, or t
  misc_feature (562)..(570): n is a, c, g, or t
  misc_feature (678)..(679): n is a, c, g, or t
  misc_feature (698)..(699): n is a, c, g, or t
atgtcacaggtgcgtacggagaggtgcggcgacgggggtggatagggcccatctagagtggaggcgtggcggcatctggcatgatatgaagtccagaggacgctgagatagagtcggcgacgatgcgttgatacgcggtgtgaccagccaggtccggacactagtgcgcgggctcgggagaacggagtagcttgggcgggtgtgtgtagcgcagcggcgtttttcggcagttcgctgtatgactaataaagggatgaatcaggtgtgaaataaggatggtaatctgcgccaaacgccgaaggggggccgaggggccactgaccgtgctgggtgcgcttggaccaacagggtggcgttccaaggcagtgcccgggggtcagaccgatagccgtaagacccgggtcattgtggtttaccgagtcttncccgccgcggngtgccttttagggatacaaagccgtgcaggagggttacaagacacgtcccgacccctccggggagcgatgcccttgaaaaggttccagaaaggcagggatccacaagcgggtccacacctgaaggnnnnnnnnnacaccctgggcgggcagggagcaactggccctgtgggctgggttcacagggtgccggccgtaagaagccatgggggggttgcactgggcagggccctggggcagccannccaggcccacgcccccggnngctgcggtgatattgtcctggcagcagccgtagggcgtctgggcacagtgtaagggggccacaggcggcagcggggcgaaggtggggcctcggcaggctccctgggccgctacgtagagccctcgctgtgactcacacctggccttcttcagctcacactcggtgctgtaggtgaccccatctgagccgcacaccgggctgcctgggacactctggcagctgaagtcacagacacacggcccgtcctccgagtcctcgtcccagatgccaccgcgctgccggcacagctcctgctcacagtcaccgtcctccccagagccagagcctccggaaccgcactcggcctgctcgcacggccctgcccgggcctcctcgatctgtgtctgctggaggcaggcggcttcccgtagctcgcaggcactgccgtaggtgacaccgtcgctgccacacacggggccgggcggggggtgctcacaccggggacacacacactgccctgcggagcacacagccccgaaagcacacacggcatctccacaggtctcacagggtccagctgaggccacgtgcaggctgatctggtgtgtgcaggcgtgcacgtgcagcatgcactcgctggggtacgtgtgcccgtcggagccacacacgggctgggccaaagccacgcattcagaggggcacacgcagcgcccggtctcggcctcgcacagggctccaaagcggcactgcccgcagcggtcacagggtcctttgcgcgccacctggatctcccgcccgagggtacaggccgtggcctccagctcgcacgcgctgccgtatgtgacgccgtcgctgccgcacacaggatcgtagaggctcgagcacgcc

SEQ ID NO: 149745 - DNA, 1339 bp, Homo Sapiens
acgcatgataatatagaacaggtggttaaaaaagcaggctggtaccggtcggaattcccgggatatcagtcgacccacgcgtcgcggacgcgtgggcgcggttcggggcaaccgaggccggggatcgcgggatcggccgccatcgccgccgccgagtggactgggagcccgcggggtactggagcgggaggcgttgccgttggggccgtcgagccccaggatggtgcagagttcgtgacgaaagtgaggagccccgagagggtacctcaggaggcaacatgagtgagaatgaggaagaggaaatttctcagcaagaaggcagtggggactatgaaggtcgaagagataccatttgggcttgaaccccagagccctgggtttgagccacaaagcccagagtttgaaccccaaagccccagatttgagcctgaaagcccggggtttgagtcccgaagccctgggcttgtgcccccaagccctgagtttgcacccagaagccctgaatcagattctcagagccctgagtttgaatcccagagccctaggtatgaaccccaaagccctggctatgaacctcggagccccgggtatgaaccccggagccctggctatgaatctgagagctctagatatgaatcccagaacactgagctcaaaacccaaagcccagaatttgaagctcaaagttccaaattccaggaaggtgcggagatgcttctgaaccccgacgaacaagagtcctttgaatatctccgtaggagttcaccccctggactccttcactcaggggtttggggagcagcccacaggggacctgcccatagggccaccttttgagatgcccacaggggccctgctgtctacaccgcagtttgagatgcttcagaatcccctgggtctcacaggagcccttcgaggtccaggtcggcggggtggccgggccaggggtgggcagggccctcggcctaacatctgcggcatctgcgggaaagagcttcgggcggggctccagcctgatccagcaccagcgcatccacaccggtgcagaagccctaccaatgtgaggtctgcagcaaggccttctcccagagctctgacctcatcaaacaccagcgcacccacactggcgagcggcctacaaatgtcccgttgcggcaaggccttcgccgacagctcttacctgcttcgccaccagcgcactcactctggccagaagccctcacagtgcccacattgtggcaaggccttgggcgacagtcctaactaccgcgacaccagagcacccaaaggcacaacggccctacagctgaacgaatgcgcaagggcttagcgaacccta

SEQ ID NO: 149746 - DNA, 876 bp, Homo Sapiens
ccttgtcagaccctcaacaatttgttagggcctttctccaccggtgtggaatgccttggtctggaatcaggtttggaccccccgccccgaaagctcttcccgcaagatgccgcagaattgttagccgagggccctgcccaaccctggcccggccaccccgccgactggacctcgaagggctcctgtgagacccaggggattctgaagcatctcaaactgcggtgtagacagcagggcccctgtgggcatctcaaaaggtggccctatgggcaggtcccctgtgggctgctccccacaccccctgagtgaaggagtccagggggtgaactcctacggagatattcaaaggactcttttcgtcggggttcagaagcatctccgcaccttcctggaatttggaactttgagcttcaaattctgggctttgggttttcgagctcagtgttctgggattcatatctagagctctcagattcatagccagggctccggggttcatacccggggctccgaggttcatagccagggctttggggttcatacctagggctctgggattcaaactcagggctctgagaatctgattcagggcttctgggtgcaaactcagggcttgggggcacaagcccagggcttcgggactcgaaccccgggctttcaggctcaaatctggggctttggggttcaaactctgggctttgtggctcaaacccagggctctggggttcaagcccaaatggtatctcttcgactctccatagtccccactgccttcttgctgagaaatttcctcttcctcattctcactcatgttgccttcaggaccccggccccgcctcgtgccgaattacacacccagcctgtacctagcctatt

SEQ ID NO: 149747 - DNA, 1046 bp, Homo Sapiens
ctttttgtttgcctttgtttggttgtgcggccgcgttgtgtgttgtgtgctccgttgttgcgtcgtttttctgcttttttctgtttgagttcgccggctttgggtctgtccgtctccggtccggcccattgtggttttggccggcatggtctgtcctctgtttgcttgtctctcttcgtgctttgccggtttggtcttcgtgtatctgccccatttggacgcttgtcccatgtgtcgtcccgttttcctgttgcctcagcctttcccgcagctcctggtgccgatgggcagcgagatgtccgaggcgttgctgtgggtcggctccttgactgagatgttgtcctggggagtccaggagtctggaggagcttctgcccaggtcgtgcagcccctgaggtccggcctcaggggtctgggccttttcttccataccaggcttatcactgccccctatgactgttgtggatggagctgtgttgctgccaccagggcctggagacccagacatatgagatttgatggatgttttcctcccctctttggacacagagggacgtttgacttgagctgagtgttggtggtctggaggcctttctcgcttttcgagatggagcacccgcagggccatcttcatcttgatggtgctgtttggacccgagttactgagctggaagcgctggctcacagtcatgtcctcactggtgagcagctggctgagggggaccttcaggttccccagggaacactggtgctgctcgtctctgacctcaacttcaaggtcctggcgcttgggattgtgaatgaagaaagtgaagttttcctcccacacaggttcattggttttgtatcgaatcttgctctcctgggccttgtgcccaactgacatctggacaacaggatttgggttgctgcttattttccgtacgcgtgaggcggactgcgtgggtcgacgatatcccgggaattccggaccgtaccagcctgctttttgaaacactgttctatatgtcactgagtgcgtgccagcgtgatcgtgtggctgtgcg

SEQ ID NO: 149748 - DNA, 1455 bp, Homo Sapiens
tcttctgtgttgtccaattttctccccggtgtggccacccaccagtgtccccccccaccgggcccataaggaaaaggacaggggttttttgtgtccacccgcccaaacccacaggggccttggaaccctgcaagaatggaattggaccaggtggttgcaggaattcccaggcttttggagcatcccccggggccaggcaagcttcacaaggaatttgccccaaggagcccccctcaaaaaggggtttctgaagccaagagggcagtttctttcagcccaaaacaatccaaccctggtcacggagagcgtccttgaagaagaggctgtgaggggcagcccccagggagtgcctccaggacttcagagcccagcacacacaagggggccacatagaccagcagggtttgggggagcctggggtctctctcctccttcgtttgcagagtgacatcggtcactagcagccagatctccctttgctccagaagcagcagactcttcagctgtggtttttggtaaatcaccgtggcatagaaactgcaacgggtaccaagatcattcatctggagaatgtctcttaagcagcgggtaactggaggctggtaaagcttataaatggggtcttcgtcaattatatcaatttgtcccagatttggatgagctgtgaggatgtaacacaaggctggaggaggcagatgagtttttatctcttcacagggctggtcgcggccaggtgttttcagaggtatcgctgggggccacagggtgtccatcaaactgaaaatccccgctgtccttcctctggtgactttctgtagaaccttcattcccaccaggctgcaagacttcccttccaactgtcttgccttcgacatggtgaactccaagtgcacttcaccgaacattccacaggcatcttgtaccagaaggcaggctcgagttccagctgggtctgtgtgtcctgagctggccccctgctgaccctggtgctgtctctgctgggaagagaatacactctttgcaccaccactcggactccagctcctggccacgaggcagctcctggctttccaccacatccaggagagaatccctcaggggagtgctggttgggatgcgctgttttgcttctttgtgcccatgggtccaggctgtccctgtagtggctacaccactacacacaacctggatttcaggtgaattatttgttagacccttaattacaacatctgggccaagagatgcttcttcttggaaggggtatgtccggacagtacacttcacagttttttctgaatcttctttggcacaactttctcacaaagtaagtattcagaataacgggcaacttccacttggaataatcagtttttgcgacgcgtgggtcgacgatatcccgggaattccgaccgtaccagcctgctttttgaaccactggttcctataggtccatgg

SEQ ID NO: 149749 - DNA, 1615 bp, Homo Sapiens
  misc_feature (43)..(43): n is a, c, g, or t
  misc_feature (128)..(128): n is a, c, g, or t
tggaaccatggggcatagttgatgaacgatctggggttgttgncgatacgcaggtccaaggatgcgcgttcgtacacggcccttgggtgactggaaaggtgccgagtctctccttccagttcggcgangcatggaccagaccttcagtgacttgtacaacgcggttctgcacgggctctgaaccatcaaagtactcggcccggcgggcaggcagcgccgtggccctttcgcagcagccgcaaggcctcatcgtagttctcgtgtcggagctccagctctccggcactgacaccacacgcttgccaggtcatccacctgcttgaagttcaccttggtggccttctccaggatgacacgggcatcgtccagctgtccgttgtcctcataaaacttggcaaacgccacccacagagtgtggggcttgcctgtggccttgaaggggtccaccgtctgcacagcctctgtgtaggtgttgatgatctcccgggggcggccctggtgcagggcgacacgcttgtgccactcgtgcacgtggtgtgggttttggcgcagcaagacgctgttgaggagcaggggccgccggctgatgagctgctcgaagcgggccaggcgcagctccaggtccacatcatcctcctcctcgcgccccagctccgaggcggtctccatctttgcagcgatcatgctctcctcgaactgggcgtagctgtcaaacacctgtgtgaagtcccgcacggtcatcactgtccggatggcctcctcgtacacgtcccgagccttctcgaaatggccgctgcggatgtagtagtcggcgagagaacaccagagcttgcccagctggtcggtgaagcgggtgaggcccccgcggatgatggcgtccacattgagggactgtaccttgtccggattctgggagatgaggtcgcacagctcgtgccacagctggtagttggacttgccggccttagacacgaaacgctcgtcgttcaccacggtggccaggcgctgggcggcctcatccagccggtcacttgacttgaggtactcaatgtactcctctgcactctcaggactcagcttgaggaagcgccgatagcctcgcacagctgtctcaggcagtgggtgtgagcgcaggaagcgcagatacaggggccaaattcgagagtgctgcgtgatgggcagtgcccggagggcacggtcgaaggtgcggcgggtgtgtgtgacgcgcccctggtccatgaggaactggcagtaatctagccacagacgaggcatcttgtgcatgaacacaaaggccctctcatgacagttgttgacatcttcataggcagggtcggtcacacagcgatgcttcacctgtgcccgacgcgccttcaggtatcggtaccagagtttgtagctgcagggcagcagcttgagtgcccgctcgtatagctgattgagcctgggcttcggggcgccctgtttgaactcgatgtagcgaagccagcatttgacagagaattggttccgcatgatttcctcctcataggggaggtcctcttcctcgaagacaaggtccggccgctcggccgcgagagtcgcgccatcaccaccatttttctgcctcgtgcca

SEQ ID NO: 149750 - DNA, 1205 bp, Homo Sapiens
  misc_feature (257)..(271): n is a, c, g, or t
aagcgaagatatggtggagaaggccccgcgatgggggttggtgtatccagagggagtataggtatagggtgtgggtgggcaataaggcctcccgcgttttacacaaggagggtgtaccgcggggggccctggccccctggtaggggagtgagaagggccacacgcaagaggccgccatttggtttgtgggccaggtgcgcaagtttcaggggaatagggggcaaggccgagcctcccaatggagaagacccatgctnnnnnnnnnnnnnnnttttccacgaagaagggggggaaaattcctttctttccctgggaaggagcgtgcaagcctgtaaacttcacagaccgagaccattccctgaagttaccagccccggtgggtcctgtaattagtcccgggcaaagggttccggtaacctgcagcaaccagatacctccctgcccctctggcacagctgtggtcgatcgcaggacagccgcaggtgatgaaaaaccgtgaacccaggacgggcagggcgtgagaccgcctgcgggaggatcagcgatgtcaagacgttacaaacgcacgaaccccctcgccgtctccctggcgtttgtgaggtcctgtccaagctccttcacacgtagatcaccgggcctcgctcccccgactccttccgtgggcctgaaccttgaggtacttaggcctccccacgctggaggggctctgtagggacgtcgaggccacgtttccagtcatccctccacccgtctctccccaggggctgagtgttgaaggcaagactttgcaggagtctggcgttaatacgcatccccaaagtctggagtcgataaggactgaagacacgacgccgacggcggccgggggacaccgggcatgcgcgtctcatccagggggaggccgagcggagcctctgaccctgccccgcgcccagggttcagcagtgggggtcgtcccgccccagatcccaccgagatggccccccttgacccacaggcctttcgagacgcgagcttccgcgatccggggtctctgtgcgaacgtgggcatcttggaagagtcccagccccgctcggggcgcacaggcaggcgctctcagcacggcacccgcgcctccgccggacgcgtgggtcgacgatatcccgggattccggaccgtaccagcctgctttttgataccactggtttatagcctaaatagcct

SEQ ID NO: 149751 - DNA, 949 bp, Homo Sapiens
caggaatgcttaaggcgaccacccatcgtaatgaagccttgagtgtcagttctggcttccatcacctgcatggcccccctaagaggtccccctcctggcccttgtcactgtgcctcatgacagccactacgccctaagcctttggaggccagggacaaagtctcgttcactgtcctttccgctgcatgagtgcagtgtctgccaggtgcacggggcactcagtgcctgtcagcccttggtaaacagtcctggacaacagggtcaaggacagagccctgggcggccacattcggtgcgtgctcctgtgttgtggcaaagctgccttttctgcgtttcatgtcagtgaaggaagacagggatgtggcagagccctgcgggttgctcccatcactcactcggtttgtgccatagtcctcctgttcccaggcggtcccagggcctgcccctgatgggctggaggcaccaccaaccccactcctctggcagtcacagctcagggaatgggcaagcagcaccaatgagaaaccagctgtgtggtggggtttccagagaagaggaaattccttctttcctggagagcgtgcagctgtaactcacagacgagacatccctgagctaccagcccgtggtcctgtactagtcctggcaaaggttccggtaactgcagcaacagatacctcctgcccctcctgcacagctgtggtcgatcgcaggacagccgcaggtgatgaaaaaccgtgaacccaggacgggcagggcgtgagaccgcctttcgagacgcgagcttccgcgatccggggtctctgtgcgaacgtgggcatcttggaagagtcccagccccgctcggggcgcacaggcaggcgctctcagcacggcacccgcgcctccgctagggacagaccgagcgcgtggttcgacgatatcgccgggatatccgatcgcggtactc

SEQ ID NO: 149752 - DNA, 689 bp, Homo Sapiens
ttaggttttaataacaatcgaaagttttattaaacaggaaagcccacacactcggggggacttgtcttctctacctaaacaaacggctcggcaagtaaggatctgaaacctgctctcctccctccgcccgtccctgctccccacccaagaaaacagaaacaaacccatcgtggctgtggaggctgctgcaggcacacactggtgtataatagagagagtaaatatattatttcacttggcatggtgctggcaaagaacctccagctggcactatttcatgtaacatggtccaatctttgcatgtacacacagaataagaaggatcaattggcaaactctggtgccacctggcacaagcatcttctctctctctggaaccaaagaaccaaaagaattctgcactttccagaaatccggctttgcttttctagagtcttcagtgttctgttctccttgccgccgggatcccgtggcttctcctagaggggctctgttatttagtctcttccccctggttacagttcgctgtgcagctctgggaggagggggaaggggccggcgtggaggtggcggcattggcagggggggtgcagtccgggccattggagatggcccccacagtggcctcagagtctacaggtttggagaggtcgatgccgtggctgaggcgaatcagctgttttaccttc

SEQ ID NO: 149753 - DNA, 1644 bp, Homo Sapiens
  misc_feature (238)..(291): n is a, c, g, or t
  misc_feature (1626)..(1626): n is a, c, g, or t
gtgtgttggcgcggttgtgtcgtcttgcgtggccgccgctgttgtgtgtcgttgtgtcctccgtgtgggcggtgtgttgtgggctgttggtctgttggtgtgtgccgtggggtgcttggtcgcgttcgtgttccgtgttggcggtggtcttcgtgtggtttccttggtgtgggtccagtggggcccggtgtgctgcgcggcttgcgctgccgcgtgtgtcggttcttgctctctcgcnnnnnnnnnnnnnnnnnnnnnnnnnnnnnnnnnnnnnnnnnnnnnnnnnnnnnnaacctgggaattaggcaaacctgcctcccgttttatttctaaataacatagctacaatgataagaagctacacgcctccctcataattagcgcccagggaaattccttgtggacaaaggacagacggaactggaagtcatccctctggggctcccctgagacaaacgcttatatgattgccccgttcccttactgtttacataaaaatgcggattcactgggccagactcaatcgtgtattcagtgggaaggctgactgaaccaatgtacgccatacacatactgatcttgtgtctccctaagatgtataaaggcaaactgtatccccagccacctcgggcacctgttgtcaggacctcctgaggctgtcacaggtgcatccttaaccttggcaaaataaactgagactggtctcagatatttggggttcacaaaggcgtgagacggcagggtcctgaggtctgaggcgccgtgggcgaggaggagggtcctgaaatctgaggcgccgtgggcgaggaggagggccaagcacacgccagggtcaggtcctgggcaggtggaattgtgcagtccccctgcgtctgcaggtgctgtctgtctggcttgggcagggttgggggaggaccgaggccagagccatccttcctccaggcacttgcagggccaactggagattctaggcctggcctgagtctgcgcaggtgctagtgggaccagaggcacttcttgggaatggattctggaggtgtcagacacttccctaacttttcacagcccggaggtgcccagttcatgaccgcccagttgcacacgttgagctggggctgcgcggggaccaaggcctcctggtgctgctggacgaccgaggtgatcctgctgagggcctcctggtactcggcgctggcaaagctgagggggaacctctcccctgggtcccgtcccaggtggaagatcaggggcagcttcgtgtggtcttccagattgtgagttgtgacccctgaaacgttctgcccagggcagaaatcaatgccctgtctgaagttctcccaggagttggtccaggtccagaagtgcgccttgtgctgcccgagggtggccgccatcagcgtgtcgccacggtaatagaagataggcctgtccatcagccggccctgcaggagggtggggaggaggttgaggccatcaatggccctgtcgctgggcggcgtcaggcccgcaagggccaggctggtggtgaagaggtccatgatgctgcccagctgcgacgcgtgggcgacgctgtgggtcgacgatatcccgggattccggaccggaccagcctgctttttttacaanactggttctatagtcaca

SEQ ID NO: 149754 - DNA, 785 bp, Homo Sapiens
  misc_feature (628)..(688): n is a, c, g, or t
ggagtttggtttttgtttactgcgacacacacatgaaatcgagtacacagtccatgcagtagcacagccattggagaggacttcctgatgctggctccagtgcaaacagtcccagcaacgccgcctgcttgccatcgctgccgccgccactgacaccttcgccttggccacctagcctgacttgaagaggaggattgcaacttgacccaagtaaaaatagatgaagtgctttgtctcgtgtgtgacgtagctgccaaaatttcggcccacgatacaatgccaggtagggttatatttcttgtcaaattccttcttgatataggcagcaatgtccttctctatgttgtacttctccatggcctgtgtggcgcagtcaacggcatcctgttgcatgtcctcagacatgtctgcgttcttgatcactgccttccggtcagacatggtgtgacacttcacggaggcgagtccgcactgggccctggggaggagcgatggcccgaggcagagcacaggcaggggcggtgttcctgggctcctcctgcagctgcagcagccgccgccgccgcggtctccggctcccgcagcccgaggccgatcgctccctgccgcggtccgcccttggagtttnnnnnnnnnnnnnnnnnnnnnnnnnnnnnnnnnnnnnnnnnnnnnnnnnnnnnnnnnnnnnctggcgcctcacagccggacgcgtgggtcgacgatatcccgggaattccggccgtaccagcctgcttttttgtaccaacgtgttctataggtactaa

SEQ ID NO: 149755 - DNA, 939 bp, Homo Sapiens
cacttttttgagcccaaccaaggcacaccaagtttattggctaagacttgtgcccccaggcaccaaatggggttcaagaaacctgtgggaaccacggtccggactttgaaggaccgcttaagtggacctcagagtggttatggatctgtggggcggggtgtggccagagggtcactgtgagtgtcctcgatgagcgcagggtttgagaatgaatggcagagtcataggtgcacgcccacctgcagtggggaggccaaaggctgcaggatcagtggggctgagccaagggtggagcccgtcggggtggggctcagcctgctggggcttgaggccattggtgatcctggggagctgctgctggcggctcgggggctctcgggcttctcaaagtcacaggcccccagctcagatggaatctctgggggcggtggatggccaggtgtcctagtgtcgccagcagcggaagtcaggtgggctgaggcgagaggcttttggccttgaggctccatgggcatggggtcctggatgacggtctgcttgaagagttcatctcgtaggtgagggagaaaacagtcaatgcgttcccaggtgatctcccagagggccgaggggcctcctcctcttgcatctgcactgtggaaaatctccgctgtgtccatcaccagcagcatgttcttcagagactcggggatcgcttctgacagtaagtcgctggagcctgcgtgcatgtacttgtccatgaagtctaggatggtgagccagagggccgcaaaggtggagagtgacagcagtggagacaggtgctgcaggaagacctttgagagcagtgtggaagccctcatccgggtctcctccatccgacgcgtggtcgacgatatcccgggattccgaccgtaccagcctgctttttgtacacacttgtttatagttcaccatgcc

SEQ ID NO: 149756 - DNA, 1374 bp, Homo Sapiens
tgtgccaatcaggtctagcaagtcctgactgacctgttaagacaccgtatgggtaccccggcaggcacgccttcgtcctcatcatcatcactctgcccgccccgagaggcatgttggctggaggttcgagcccggcgaagcattgatccctctttggatttcttcttgaagcggttccgtttgctgtcatatttgtggctcttgccaacgtttctcgtgggactgtgcatccgccattcagactggcctccacaaggatccggagagtcttgacgcagagctcaaagttgtcaggtgtgatgtgggcagcatcacgcacgatgaaggacagcgattccacacacttaagcagagacttagtgtcgtgtggccccaaatccagtcccactgttaggctgtattgattgatcaggggtgaagggcctgggcggctgggccctggcttggagttatcaacgtcatccttcccaaccactaaccaaccactgtgaccacatcggcatctgtggctgatcggtgtatcttgcccgggcctgccatggtcagtgtagacctctgagtcggaagtgtaccctcgatccaggctcacgtcattctgatggtaggatgggagctcactatctgactgggccccggcatcaggtgcatctgccctggctgtggcctgcagagcagctggaggcttcacacctgagccgatgcactccagcagtgtgaagagtgtggcccagtcatcacctgagtggatgttggctgcattggtcttcaggagttcatggagcccatacgcaacctggtggctgactcgggatagcacactgggcttcatcagtagcaaaatgcgcagggagagcagcacctgagcactgatctcttctctccggagaagccgaatggccaggcgtagcaaccccaccactgcccgctccacaaggaagcagaaatcttgtgcctgaacacagaggtggtatagatggtctcgaacagtctgccacacacagcccacacgatccctgttctccaacacaatccttagcagcatctctaggcagaaagcagcatcttcctcatcatatgtctcttcatctggtgtcactgagaccagagccttcatgagctcctgtagtgactccagctggaggaacttgctttctgtgatcattttttctgggtcacattgctttatacactctaaggccactctcttggcctcttggttttcagtggatgggccccgaacactagactgctcaggaccactcagtgttagccagctcacaaagctcagcactgttgactctcctcggtttgatggtgtctcttcccctcgtgccgaattcggcgcgccgtcgacttcatactctctcgccctta

SEQ ID NO: 149757 - DNA, 977 bp, Homo Sapiens
acggacgcgaggcctgggtggcgaattcggcacgagggtggaggccagtctgaatggcggatgcaagtcccaggagaaacgtggcaagagtcacaaatatgacagcaaagggaaccgcttcaagaagaaatccaaagagggatcaatgcttcgccggcctcgaacctccagccaacatgcctctcggggcgggcagagtgatgatgatgaggacgaaggcgtgcctgccagctaccatacggtgtctttacagttgctagacctgatgcacaccctgcacacgcgggcagcctctatctacagctcatgggcggaggagcaacgccacctggagacaggtggccagaagattgaagctgattctcgcaccctctgggcccactgctggtgccctttactgcagggtattgcctgcctgtgctgcgatgcccggcgccaggtacggatgcaggcactgacctatctgcagcgagcactacttgtacatgatctgcaaaagctagatgccctggaatgggagtcctgttttaacaaggtgctgtttcctctacttaccaagctcttggagaacatcagccctgcagatgtgggtgggatggaggagacccggatgagggcttccacattgctctctaaggtcttcctgcagcacctgtctccactgctgtcactctctacctttgcggccctctggctcaccatcttggacttcatggacaagtacatgcacgcaggctccagcgacttactgtcagaggcgatccctgagtctctgaagaacatgctttctggtgatggacacagcgggagattttccacaggtgcagatgcccgggggaggcgggccccttgggccctctgggagagatcacctggggaaaacgcattggactggtttttctcccctcaacctacggagattgaactccttccaaggcaggacccggtcaatcccaggggacccccaattgccccca

SEQ ID NO: 149758 - DNA, 820 bp, Homo Sapiens
  misc_feature (796)..(796): n is a, c, g, or t
aatagcattaagataattcacagttacatcacagttaaaaacattgtgacatcataacatgttacatcatacatgtaaatgacctaatgccttttttcctaagattaggactaaagcacaaatatctgctttatctacctttattcaacgtattactggaagttctagccagtgaaataaataaaggtaacagaatataagttgaaaagaaagaagtaaaactgtctatattctcagaagatatgatcatctatgtagaaaatcttaaagaatctacgaaaaactactagaactgaagtagggagtttagcaaggttgaagaatacccaatcagtatacaaaattgattgcatattcatatattaggaacaaacaactggaaattgaaatttaaaaaccaatatcatttataaccacatcaaaaacaatgatatacttaaagataaatttagccaagaatgtataagacttgcacactgaaaacagtaagacattggtgaaaaaaaactaaagaagacctaagaagatgaaattatacatatgtgtgttggaagactcaatatttttaagatgataattcttcccaaattaacgtatagattcaatgaatcctaatcaaaaatacttgcaggattttttacagaagttgacaagcagattctaaaattcatatggaaaggcaaaggatctaatctagccaaaaatttttgaagaagtttaaaattggaaatctcggacgcgtgggtcgacgatatcccgggaattccggaccgtaccagcctgctttttgtaaccnagctggttctatagtactattgct

SEQ ID NO: 149759 - DNA, 728 bp, Homo Sapiens
tgctccatcgccgtccaggcgcaaacgatgagatcgtgggcctgaaggggaaatagttgcaggtcctggtgcagggggtgacgggacgtcttcttgccagaatctggaggtttgtttagtcaacattgtgtgcatggccataatattaggtccagtgaagcactccacatatttcagaatctcggggagagtgcagtatctgaagagctccttatcttcctggaaatcctggaccttcgtgatcatcttctcacttggagcatattcggatttcgaaatggtcacatctctcattactgttaatcctaatggtttcacctcctttctgcagattttttcaaactcattccgaaagcgttgaatatcggcatcaggtacaagatttttgattactagaaacccattttcttcataaaattttctctgttccagggttagaacattattatccagagtatacccgctgtccttccccaaatagtgtctttatataactcagtggcaatgccgtagtccagcagggaggccgccctgggcagcgcctgcctggccagctcctgcccgggagggcaccgtcctctcccctccggagaggtcccggtcactgcctgcctgggccggttccaggcagccctgcgcgcctgtgcaccgtgcgcctgtgattggacatctctgggtctctggacagctgccggggtcacgcgccgccggtgaaacgacgtctccac

SEQ ID NO: 149760 - DNA, 301 bp, Homo Sapiens
tgaatctgtactcattgcggggggttccccgcgccgcagccatggagcagcttcgcgccgccgcccgtctgcagattgttctgggccacctcggccgcccctcggccggggctgtcgtagctcatcccacttcagggactatttcctctgccagtttccatcctcaacaattccagtatactctggataataatgttctaacgctggaacagagaaaattttatgaagaaaatgggtttctagtaatcaaaatcttgtacctgatgccgatattcaacgctttcgcatgagtacaactatg

SEQ ID NO: 149761 - DNA, 1099 bp, Homo Sapiens
ttcttttgaaggacaccttaatacattatcttcatgtaaatcatttctgcataaagggcatctagcatgtggctgctcattatgaatgactgggcaaatacagggtttcaaaaatacatgtgcccaatgtgtattcacaggaactgttaaagaatccaggcaaattgcacattcctcatctgaacctgagctcagaattaacttcatcttccttattaacttctttctcagttcttcaggtgtatcatttcctgaggggccattggaagaccactgcatttgtaagaaggtaagtatggccacaattttgccgcagtctaaagcacaagacccaggacatcgtgcataatgtgccaggacagtcccttcattaaaataccttccaatagtggctctgccttcatttttcacagactgataaatctttctctcttcatctgaaagtgtaatgtgctgaataaatactttacgttctggtaactccaaaacaggttttcctttaattttgcttgtctttgttcttctaagtgtaatatttttaattagggactgtaaacgcctaagtcctccttcatctcccattgtgacaggacgctgtattgttctatgccaccattctctatcaataaatggtttaagttttaaaaaggaaagaagagaccacaagtcctttaaagaattctggattggagtacctgtcaaaacccatcttctttctgattctaagtcaagtacagcttttgtctgctgagcatttggatttcgtatggcatgtccttcatccaggatcactcttagccaccttatgctatgtaatggactatctcctttagttccatagtcatgagttaaaatattatacgtagtcaaaacatatcctgttttgaaagtaaggccggttctctaatacgatcaggaccataataaacataaaaattcaagtgtacatctgattttatatgttgtccaactggtcatccagttgcttaacacagaaagcggacagatgatcagtgttgttcggacgcgtggtcgacgatatcccgggaatccggagcgggaccagcctgcttttataccagcggtcatattccattgc

SEQ ID NO: 149762 - DNA, 921 bp, Homo Sapiens
ttctgggtttgccagccccagtccttgaacttggagaagggaggtggggccttggaaattcctgtcccccagggtggggggggacccccttgtcctgggagctggctgagccctgtgcccatggctgggttcagtttgcaggtatagctggtagcactcttttgctggtgggaatggagaggtctcgctggctttcttttgctttttctttctttttgttcccaagcgacacctggtccccgttgagctcacctgacttctgcttctggactgtggccatgctggtgggggtggtggcagcgacagccgagtcgacactggccaccttcttggctttctttttcaacttccttttcttctttgcctccttctccactgttccagggctgtggatggctgactcctgtaggatgtcggacgccgacacagctgcctcccggcaccgccgccactcctcgtcactgtcctcactgctggagctggagggctgtcgctttcggcggggttggggagactcttccttctcacggcctccagggacagatgtgaagaaaaggcggaaaccatcatcctccaaagcgactttctgtaccttagcttttgctggctcctttgctgcttctgagatggtaatgaagctgtccagcagggctcccagcttcttggctacgtgggctcggaattcaggggtggtctgaagctcgttgccatcttgttcatgctcattcaccttatgcctgaggctcggttgggaggttgacaactggctatttgcagcaccggctcttggcttccctgccacgtgcgggcgttgctccaagccccaagccggcattgccgcctcgcggcaccgctccagctcctccgcatcgctactgctgttactactttccgaatcgctcacagtgccactgggcgccg

SEQ ID NO: 149763 - DNA, 846 bp, Homo Sapiens
cagtcaatgaccagtgttaattggccactagccagtcccagatctttatagttctgtcagcagatccagttactatccactgatgtccaggttccacagctatacatcgaacccagccaagatgcccactgataaccctgtagagtttccacggtgggtgccactggggttttggcattgtaggggcttttttagccatcagtgcagagttcttggtattgccagtctccatgacaattgaattcatcgctgtaggctgtggacggtcagaagccccaggatgtcggtattcacttccactaggggcagtacgatttgcatcagccttggtctgcaaaggtaatgccaccgctaaggactgtgcagctgattcacttggcattctctggatcttagtatctgctgtcaaagcaaccccaggtcctggtgggtatggatgtgtacctgccacaaagtattcaacttcttgtccttgattggcagggtactgtttatgaacatatgaatccgttgcattctgaggacccttctctttaagattttcttttgaagtaggcatatgcaacacaggaccatactcattacgaagcttgattgccatttttcgtttgtgactctcttcatctaaaggcacaggttttccattatcagctacaaacatgtcatgggtcctcttcaacgacctgaacacaagggtgtgtacagaatgtttctgtacctcctcgaccatgatgctaccgtgtatcccacctccggcagggaagaaactctaatcactaacgcagtacccgccgccacagctgtgcagcaccttccggaattgggcgcccaggcggcggatgtccc

SEQ ID NO: 149764 - DNA, 842 bp, Homo Sapiens
tttttactcttcaatgcagaagttccttggtatgccaggtttgccatgacaattgacttcatccttgtaaggcctgttgaccgctcaggaagccccaggtatggtccgttatttcacgttccaattacgggtccagttacgattttgcaatcagccctggggccaaaagaaattaataattgtctaaagtaactgaatgcctccaagtcatgtatttctgcgcaaactaaccctttattttaaattgttataaagtcctgataaaggaaaatgtcatataatagttataaagaaattttaaaaagaaaaaatgtgaacagtgaaatatgcttttaagatctttgtaattataatatttcatacttggtctgcaaaggtaatgccaccgctaaggactgtgcagctgattcacttggcattctctggatcttagtatctgctgtcaaagcaaccccaggtcctggtgggtatggatgtgtacctgccacaaagtattcaacttcttgtccttgattggcagggtactgtttatgaacatatgaatccgttgcattctgaggacccttctctttaagattttcttttgaagtaggcatatgcaacacaggaccatactcattacgaagcttgattgccatttttcgtttgtgactctcttcatctaaaggcacaggttttccattatcagctacaaacatgtcatgggtcctcttcaacgacctgaacacaagggtgtgtacagaatgtttctgtacctcctcgaccatgatgctaccgtgtatcccacctccggcagggaagaaactctaatcactaacgcagtacccgccgccacagctgtg

SEQ ID NO: 149765 - DNA, 512 bp, Homo Sapiens
  misc_feature (64)..(180): n is a, c, g, or t
cttgtggcagtacttttgaacttaatggctgaaagcatccacctccaaacttacgtattatatnnnnnnnnnnnnnnnnnnnnnnnnnnnnnnnnnnnnnnnnnnnnnnnnnnnnnnnnnnnnnnnnnnnnnnnnnnnnnnnnnnnnnnnnnnnnnnnnnnnnnnnnnnnnnnnnnnnnncccgtcctgggactctgctccacttgccaacatttgagtggattaatttgtgtggtagtcaagctacaggaaataaagggaccagtcagtcttccacacaatgacacagaggccaattatcacaagtccaaatctccatttgtcatccagctcacattcccgctgtggcacaaggtcacatgcactcgtgtccaactccaaatagtagcttcacatagtatgtcagcactctcccacccatcacttcttctagaaggtcttcctctggattggaaatggcctgcttgcaggacactcagcagctttcagtagttcatccagacatccagctg

SEQ ID NO: 149766 - DNA, 1538 bp, Homo Sapiens
gccgggatgaagtgttgcaggtgggcgatcgtcaacgagtgtcgtgagtgggtacatgggccgctgccccgacgatgtagggctgctggggtggcagagacgcatcctggcttgggagggtggtcatgagattctgcatgttgtaaggctggtagcccatggagactgactggctccccatgtagcccatggtgctggactgcggaggttgagagatggccgggaggctctgtggggcctgggaggccacgttctggtagcccgctgtgggagtaggctggtaggatgagtaagcggggctggcggtgggtccggcctgggcctggggggccgcctgcgccccagtggcccctgctgggtacatgtaggcactcaccatgctgggatcagccgcagtgctgggcatgctggggtaggggccagcggcaggggccggctggctcatgtacacgccgtgcattggggagccctccaccgagccggcagggctgaaggtgctggggaagctggctggtcccgagggctggtagagcacacctccggctgcgggcatggcctggagctgggcgtagggcagggggaaggcgggcatctgcgcgcgcatctggaccgtctgcttctgctgctccagccgcatctgccgctccttctcctgctcctgcaggcgctggatggccagctgcctctgcacctccaggtactcctgcttcttctgccgcattatctccagcttctgggccagctggatctggcgctggcgctctgcctcctcggctgcccggcgaagcttctcccggtgctcttcgcgcagggcactcagcgccccccgggcatcgcggatctgtgccagcttgtcctgcagcccctcatagtacagcctgcgctcgtccagctggttgagcagctccagcagctgcgggtgcatgccgttgatggactggaagagtgagagcacggccgagtcattggtgatgctgcggccccgcatgtggttactcttcatgcggttcacgaaggtggtgacggcgttctgcagcgccttcaggaactgctcgtggctctcctcagactcgccattgtggaactgtggctcactaaaggggccaccagagggaggaatgggctgagagtctgtctccgggagggggttctccaccacgttggtgggggctgcgtgcccttccccaggctgtgcagccggctccgtcaggggcacgggcgcagatggcgtggggctcttgcgagcctcctcctgcttcttctcccagtagttccggttgagataccgtgcgagctcagggtcgatgtcctcagccagaggcgccgacgagttcacaggtgaagagtacaggctgctggcggggggcgctgaggaggccgagggcatgggctccgccttggggtacgaagtgtacgtggacttctgtctcagcctctccttctcctccgcctctgactgtgacagcgccagggccagctgcagctcctcctcctcctgcagggccgtctcgtccctcttggggggcagctggactgct

SEQ ID NO: 149767 - DNA, 1478 bp, Homo Sapiens
  misc_feature (137)..(194): n is a, c, g, or t
  misc_feature (341)..(341): n is a, c, g, or t
  misc_feature (405)..(405): n is a, c, g, or t
  misc_feature (874)..(930): n is a, c, g, or t
aactggccgaagggccttgaagaagaatgggcccggggaaggggcttctgttggggggcccttgggaggggcccaacgttttctggggtaagccccgcttgtggggaaagtaggcctgggtagggatgagttaaagnnnnnnnnnnnnnnnnnnnnnnnnnnnnnnnnnnnnnnnnnnnnnnnnnnnnnnnnnncccaagtggccccctgctgggtaccagtaggcacttcacccatggctgggatcagccgcagtgctgggcatgctggggtaggggccagcggcagggggccggctggctcatgtacacgccgtgcattggggagccctccaccgagcncggcagggctgaaggtgctggggaagctggctggtcccgagggctggtagagcacacctccggnctgcgggcatggcctggagctgggcgtagggcagggggaaggcgggcatctgcgcgcgcatctggaccgtctgcttctgctgctccagccgcatctgccgctccttctcctgctcctgcaggcgctggatggccagctgcctctgcacctccaggtactcctgcttcttctgccgcattatctccagcttctgggccagctggatctggcgctggcgctctgcctcctcggctgcccggcgaagcttctcccggtgctcttcgcgcagggcactcagcgccccccgggcatcgcggatctgtgccagcttgtcctgcagcccctcatagtacactgtgggcagatgacagagcaaccctgaccactccggcacagtgccgagaagctcctgggtggaacggacacgcagatgggccgccctgtgcccaaccttctgcagagggctctgaaggtgctgggctctgggggnnnnnnnnnnnnnnnnnnnnnnnnnnnnnnnnnnnnnnnnnnnnnnnnnnnnnnnnncatggtcatcactgagaccacctcctgttgacactctctggaggaagccacggccccaatgaaggactcacaagagctcagcaccctcaggggaggccctggcccaggatggcgctcacaacacctggctgcccctgagccgaggccccgtggcgcgggcacctacgcctgcgctcgtccagctggttgagcagctccagcagctgcgggtgcatgccgttgatggactggaagagtgagagcacggccgagtcattggtgatgctgcggccccgcatgtggttactcttcatgcggttcacgaaggtggtgacggcgttctgcagcgccttcaggaactgctcgtggctctcctcagactcgccattgtggaactgtggctgcaggcagagcagggttctggatgagtgcggccacgccccagccagcctccctggtggggcctgggatggaggcacccagctatactcaagcctggagcagagtccatctgctccttatgcaagcagccccttctacagctgaggaaggcgaggcctggaggcggg

SEQ ID NO: 149768 - DNA, 993 bp, Homo Sapiens
  misc_feature (650)..(689): n is a, c, g, or t
ctgggtttgttgttccgcggccgtgttgcgtcggacgaattgtcttccccggactgagatttgccccttgcatccgtatggtattgtgcaacccgccaaatagagactgaaaacattgtcaaggctcaccaatccatggaagagatgaacactcccagtcgccgagaaaccaacacaactgggattgcatatttgaggttaacatggttggccaatatcactttccagtgttttgaaaggaaaaaccgccccaacacggatgctaattctgccggttaacacgctcgcttcccaataaggaatggacacgaaataaaggcacaggaaaataccttacatccgtttaatcctaagtgggacccaaaacaaaagagacaactggctcaagaacaggaggggaaaaaaggtactgccataattgatcctagcatcccttcatggctgcaatgcgtaactctcacttttcagtgagaaaaatctatactcttgtgtttctaaagaaagcacaaaatattcttgcaagatttaaatactgctaatcagtggcaaagagtgtaaacagatgaaatggcaaagttttaaaagtttttttgtagtgtttgggaaaataaagaatctgtggtaggaagcaagcaggtttaagtacaagnnnnnnnnnnnnnnnnnnnnnnnnnnnnnnnnnnnnnnnnccgaaagcccagcctcaagcctcaacctactttaagatgcacaaatacaactcaaacttcataaagcagaggagtaaaaggtgcaagagccatgtagcatccctgaagccatggcgaaacaaacacagcggtatttaaaaactgggttcactcaaaggcacaattcaatcaacctctttttctctatttaagtgtatatatttatatccctttgtatatcagagataagttttgttaattgtagaggacacaatggcttcgacgcgtggtcgacgatatcccgggaaaatccggaccggtacca

SEQ ID NO: 149769 - DNA, 956 bp, Homo Sapiens
cggatctttcgaacatctctgattaggaagcgcccgggttatgtgcttggaatagcggaatcattcttcttgatccggagtaggtctcttttaggcaagaagtctcaaaaggtggtttgccccactaaacaaggtatacatgatacacccaatggaccacacatccacctcgaaaactgtgccctttcttgctcagcacctcgggagctatgtaattaggagtcccacacagggtcttcttcctctccccgtcatattcgactttggttgccagtccaaaatcccctattttcacctccagatcttcattcaggaaaaggttgcccagcttgaggtctcgatgaataactcggtttcggtgcaggtactggcagccaagcacaatttgccgtaggtagtatcgggcctcaggctcagtcagggctttcctcctcttgtgcagctccaggagagacctccggcggcagagctccaacaccacgaacacgaagtcgttgtcctcgaaaaagccgtggaatcctacgacgtgctggtgggcgaggctgcggtgaatggatatttccatggacatcttctccctctggtgcggcttgagcagcagagacttaggcacaatcttgcccgcgaacacctccttggtgtccgcgtccgagatctcgaagcacttggcaaagccgcccttgcccaaaaagcggccccgcacatagcgccgccggctgcgtgggtccactaggacctccgggatctctttcgccggtggagccgccgccggagctccgggagctgcaactccggggaccccggctttcccagggtcggccggtgcccgtgccagcttccctgcagtcactgcagcactcatgctcccgaagctgcgctgcagacctcgatccgagcagagcctccgcaccgctccgccctcgtgccgattccccacccggcctcgctacctagcc

SEQ ID NO: 149770 - DNA, 1052 bp, Homo Sapiens
  misc_feature (35)..(35): n is a, c, g, or t
  misc_feature (127)..(158): n is a, c, g, or t
  misc_feature (1031)..(1031): n is a, c, g, or t
ccctggtttctgtggcccctcacgtttccggcagntcccttagagtggtcccttggtcctcggcaaacctgggtctccgtgttggcggcgtatccatgaactgtcatacactcttaggtggcggcannnnnnnnnnnnnnnnnnnnnnnnnnnnnnnnttatgtgctggatccgaatcatctctaccgagtaggttcttaagcaagagtctcaaagtggttcgcccactaacagtatacatgagacacccatgaccacacagccacctcgaactgtgccctttcttgctcagcacctcggagctatgtaattaaggagtcccacacagggtcttcttcctctccccgtcatattcgactgtggttgccagtccaaatcccctattttcacctccagatcttcattcaggacaaggttgcccagcgttgaggtctcgatgaataactcggtttcggtgcaggtactggcagccaagcacaatttgccgtaggtagtatcgggcctcaggctcagtcagggctttcctcctcttgtgcagctccaggagagacctccggcggcagagctccaacaccacgtacacgaagtcgttgtcctcgaaaaagccgtggaatcctacgacgtgctggtgggcgaggctgcggtgaatggatatttccatggacatcttctccctctggtgcggcttgagcagcagagacttaggcacaatcttgcccgcgaacacctccttggtgtccgcgtccgagatctcgaagcacttggcaaagccgcccttgcccaaaaagcggccccgcacatagcgccgccggctgcgtgggtccactaggacctccgggatctctttcgccggtggagccgccgccggagctccgggagctgcaactccggggaccccggctttcccagggtcggccggtgcccgtgccagcttccctgcagtcactgcagcactcatgctcccgaagctgcgctgcagacctcgatccgagcagagcctccgcaccgctccctcgtgccgaattcaccancccaggcctcgtacctagcct

SEQ ID NO: 149771 - DNA, 1069 bp, Homo Sapiens
ggaggtgccggcgggtgtggtgctcgctgggatatccccggggggtagacctccgcgctaccctcgcggtcatggttggcgtgccagtgggattgcgtctgagcgtctgtctggaccgcggacccctgccgccggtgttcagtgtcttgtggaactccttgtgctccgctcgtcttgagtccgggaggtcgttctctgttaggcaagtagtcctcataaggtggtttgcccagcgtgagcagggtatacatggatacacctcaatggtccacacatcgcagccgcgaaactgtggccccgtcgtggtcagcacgtcgggagctaggacttaggagtcgccacacagggtcgtcttgcctcgttcgccgtcatacgtcgactttgggttgccagtcccggatccccgattgttcacctccagatcgtcagttcaggaaaaggttgcccagcttgaggtctcgatgaataactcggtttcggtgcaggtactggcagccaagcacaatttgccgtaggtagtatcgggcctcaggctcagtcagggctttcctcctcttgtgcagctccaggagagacctccggcggcagagctcccacaccatcgtacccgaagtcgtttgtcctcgaaaaacgccgtggaatcctacgacgtgctggtgggtcgaggctgcggtgaatggatatttccatggacatcttctccctctggtcgcggcttgagcagcagagacttaggcacaatcttgcccgcgaacacctccttggtgtccgcgtccgagatctcgaagcacttggcaaagccgcccttgcccaaaacagcggccccgcacatagcgccgccggctgcgtgggtccactaggacctccgggatctctttcgccggtggagccgccgccggagctccgggagctgcaactccggggaccccggctttcccagggtcggccggtgcccgtgccagcattccctgcagtcactgcagcactcatgctcccgaagctgcgccctcgtgccgaattcgccacccaggcctcgctaccttaggaccgttatagttactggcacagt

SEQ ID NO: 149772 - DNA, 849 bp, Homo Sapiens
gttcatacttcataggtgcaatccattcgattgaacaatgtggctttcgccaggtttttatcagcatcaatctggtttatgtaaagattctcgggcctcagcaccttgcaatgctttgaagccctcagaggcactcgagaggatcctgtcacaaactgaagcaatcttgctcgtcgctcttcatcacaaaaactccacagctttccagaaccatttgacaatgttgctgtctggtgtacagtgttttaaccggtgtttaccttccagtcattaacatctatctttccaagtccacaaataatgagctctaactccttctcatcaaatgtcttcagcagatgttgtggaattacttcattaaatcctttctgcagagccaagaattgagcctcaatgcctcgtaaaaatctccagttcacatagagcctgacatattcttttttattttgttcattaacagggatacttttgccatttggtttaagttcatgctgaataatttcaccatatgcattatgttcaacacagaaggtatggtccaaaacacctgtaatatcattctcaagtatccacactaaactgttgtgaagatccggatctactaactccatgtcatccaaggtaattgacttcccaagcaattgcttataaaaaggcaatgtgaagccaccatcaatataatgtccatgaaacacagccattcccattattcgtccaacaaagtggaaataggataaatgttccggattaactgcagaatcaggattgatctgcaatgtataaatatcatctcttgcgacgcgtgggtcgacgatatcccgggattccggaccgtaccagcctgctttt

SEQ ID NO: 149773 - DNA, 930 bp, Homo Sapiens
ggcggctgcggattcttcagccactccacaatgtcctcagctgtggacccatagttgtcatactggaacaagaaccgtcctttctcaaaatagcagatggtggggaagccgcgcacgctgtactcctccttgatgttttcaaattcagaggagtagacattcatcccggccagcacggcgtggcctcgcagctgagtcgcagccttctggaaatgcggcatcatcctcttgcacatgctgcaccagggggcataaaacatgatcaggagcggcttctcttccttcttcaggagccgtctgaagtccttttcactgtcaaggtggacaacatctttggctccaggatcttcctcccacagtgggggcccttttggatccttcaaaaaggccactatggacttaaatgtcacagctcggttatattcagtatgaaatgcaccatcctggtaatggaataattcaacctttttgtccttcgggctcaggtcaactttcatcttcttgcacaattttctactctctgcatcaccacagtccacccagcagatggtcccttgtcctttcaccgcctgggccactgtggacagtaacctgagatgattttcagctgccacctcagatttggagtaaagcaccagtacattattccgggttctgagcagttttttcaagtccttggggtcagagattctctcaatgagcgaggagacctttgcagaggacagccatgatggcaggaccacccagattgccagcagcagccacgccggcccggcccgcgccatcccagcagcgctgcccaccgctggctcctttctccactccggcgcccgctcccgcccgcccgcctgctagctccaccgcggccaaccaccacggccacttccccctcgtgccgattcaccacccaggcctcgtacctagccgtaa

SEQ ID NO: 149774 - DNA, 671 bp, Homo Sapiens
  misc_feature (321)..(333): n is a, c, g, or t
aaattaatagcttgtttattagtaatatgttacattattaaagtgcattgagaagaggtgcaggggccaaagctggaaggccactggccccagccactgccctgggtggccagacacagccggagaagggcccagctcccccctgaaatggatggacagggctgggggcagggccgcctgcctggagagctcggcccaggccatccccaccggaattttcacagtttagcctaagttataacatgtcctgagcgaaggtgggaggctaggagcatggaagcacagcccctggggaagggggctgagaggaagggaggaggnnnnnnnnnnnnnaaccctcaacgccaagggcagagtcctggaacctccccctgaggacccggctcgtccttccaaatgaacacggtgaaactagggctcagttttctccttcattctcccgtttccctcaccccaccccctcccataaccacccccaacactaggggctccaacaacgtccccctcagaccgggctcccagggcagagccagctcatgccactctccaagaacccatgcccgtctccagactcttatctcatccccggcgacgcgtgggtcgacgatatcccgggaattccgaccgtaccagcctgctttttttaccagcttggtctatattcaccaatt

SEQ ID NO: 149775 - DNA, 681 bp, Homo Sapiens
gctcggtacccgttcgctactgtgtgtagcagcgtgtccaaggcaagaactgaaaactctgagtgatgttcagaagtttgcagagataaatggttcagccctatgtagctacaacctaaagccttctgaatacactacatctccaaaatcttctgttctctgccctaaactaccagttccagcgagtgcacctattccattcttccatcgctgtgctcctgtgaacatttcctgctatgccaagtttgcagaggccctgatcacctttgtcagtgacaatagtgtcttacacaggctgattagtggagtaatgaccagcaaagaaattatattgggactttgcttgttatcactagttctatccatgattttgatggtgataatcaggtatatatcaagagtacttgtgtggatcttaacgattctggtcatactcggttcacttggaggcacaggtgtactatggtggctgtatgcaaagcaaagaaggtctcccaaagaaactgttactcctgagcagcttcagatagctgaagacaatcttcgggccctcctcatttatgccatttcagctacagtgttcacagtgatcttattcctgataatgttggttatgcgtaaacgtgttgctcttaccatcggcttgttccacgtagctggcaaggtcttcattcacttggc

SEQ ID NO: 149776 - DNA, 1665 bp, Homo Sapiens
  misc_feature (662)..(662): n is a, c, g, or t
tgtgcagaatttttgacgccagtggatggatgtcccctgtgtaaatggcaagccgttcatgtgaaaaatgaattaaaagcgttgcaaagaatggttccccatggggcccagagaaagctgaatccattggatctcgtattccgcccccccgtcccagccagtcccccggaccagcagcgccggcaccttatgagtggactcacacccctattgcctggggaagcagctagttgaccttgcccattgtccccacaccctggagaaaagagccaggatcagccaggccctctccttgcaattgttcgcccctctgggccagaaccgaaggacgctgctctgtacaggtagagtccaaggaggtgtcagctcatcatgtcattgctattcacgccataagtggaattcttcattgagtcgttgacttctcgacggaatgctgacaggttctgggtgaacctgtctctgtttttcgtaagaagatttcgctcgatgccttccatcaggttctcaaaacacaggtgcatggcctgctgcttctccggtggctggctgttcacaatactgtttcttaggtcagaaaaatacttttcattaagcaatatcaagccaagtagtggtcgggacatagacccactggttcctacagtcttcaaagatgatgnatgttcagcaccgtggacagcatctgctggatcatctctggatgctgctgcatgatgtgcagaaagcggtcgctctcctggttcaggggtgtggtcctcttcttggtgctacgtgacagctgcttgaagaggtatgtcacaatgtggtccaggcaggagcagcagcctgtgcataccatggtgtcaagtgcagtaagtccttcagaaatggaagagagaatatacatgatgacgtgaggttccaggcttgcaataaagttcatatggtcctgggtcaggacttccagtagtgaataataagactggctgagcttggggtaatccaagagatcactgtgaggaatagagaggagcagcttgatgaaggtctgcagagcattgtccagggcatcgtctccatagagacgaaagactccgaaattgacgtaactcccactgagagcagccttcagcatggagaagcagatggagatgcccttgagcttcagagcatagacctgatcctttgggacctctcctagtgtcaggatgcgattgccatacattgttatcatcttgctggtttctcggaagagtaagatgccattgggggaagagacatcaaactggagtcgctgggacctattatgaaccaattcagccatcaacttgagtacaggtgtagtacaggctggatcatggtaccagagctcaattgcccgttggagaattggcatataggatggatatatccattcaaagagcatcatgaagctggtcttggcattgaaagcgaaagcgatccctctcaggtctcttactaggccaactagagttcgctttgcctcctgctcgttgaaactattggtgctaaacatctgggccacagcctcaaatgctgctgtgagtggcagcatgaactgctcatactgatcttcatcctctcctaaatccaccatgaggagacgcccaagtgctgtgtagaaggtagtccgacaccgcatgtctgtcaggttggactact

SEQ ID NO: 149777 - DNA, 677 bp, Homo Sapiens
  misc_feature (99)..(141): n is a, c, g, or t
  misc_feature (280)..(531): n is a, c, g, or t
ctcagaggggagacacacctactgcttcctcagatgggcccctccgcagccccttcccttgctcggggaaagcccccaattctgcccacacccatttannnnnnnnnnnnnnnnnnnnnnnnnnnnnnnnnnnnnnnnnnnatttgtttttgcccccaattctgcccatacccatttctttctttccttccttccttcttttattgtttttgcccccagttctgtccacaccccttccctttcctgtcctgtcctttctttctttcttttttgatagaannnnnnnnnnnnnnnnnnnnnnnnnnnnnnnnnnnnnnnnnnnnnnnnnnnnnnnnnnnnnnnnnnnnnnnnnnnnnnnnnnnnnnnnnnnnnnnnnnnnnnnnnnnnnnnnnnnnnnnnnnnnnnnnnnnnnnnnnnnnnnnnnnnnnnnnnnnnnnnnnnnnnnnnnnnnnnnnnnnnnnnnnnnnnnnnnnnnnnnnnnnnnnnnnnnnnnnnnnnnnnnnnnnnnnnnnnnnnnnnnnnnnnnnnnnnatgagccaccgtgcccggcttcacacccatttctttaaaaaggatcccgtagcaggcagaaaagccccttccatcctgctcctctgatactgtgcccccttggagatatttccgtcctccagccacgtgtctgtggctggaactga

SEQ ID NO: 149778 - DNA, 986 bp, Homo Sapiens
  misc_feature (65)..(85): n is a, c, g, or t
  misc_feature (667)..(918): n is a, c, g, or t
cgggcagtgccaagctaaaattaccctcactaaagggaataagcttgcggccgcatacgcggtcnnnnnnnnnnnnnnnnnnnnngggaagaaccttggctttattcgctctgtggggacactgttccgttcagaggcccctcccagccatggggtgggggacagtggtgggcgtgggaatcccagcgagcatcctggagggtgcgtcgtctccatgtattttgctcttccccatcttttccatggggtcccctgccagggtcaagcactaatatgtggtgaaggcagcaaacagcgtcggcgtccctttaggggtggggagagggctgtagcaccaagaaccccctcccccgcccacgacatccctgaaaaggagactaaaataaagccccggggcctttctacgtaggggctccacttaaatatggaatggtggtaggcagagaggcggtggcccagcaatccttaagtccagattaccagctgtggggaggcttccagggggccaggagcaggctgggcagttccagccacagacacgtgggtggaggacggaaatatctccaagggggcacagtatcagaggagcaggatggaaggggcttttctgcctgctacgggatcctttttaaagaaatgggtgtgaagccgggcacggtggctcatnnnnnnnnnnnnnnnnnnnnnnnnnnnnnnnnnnnnnnnnnnnnnnnnnnnnnnnnnnnnnnnnnnnnnnnnnnnnnnnnnnnnnnnnnnnnnnnnnnnnnnnnnnnnnnnnnnnnnnnnnnnnnnnnnnnnnnnnnnnnnnnnnnnnnnnnnnnnnnnnnnnnnnnnnnnnnnnnnnnnnnnnnnnnnnnnnnnnnnnnnnnnnnnnnnnnnnnnnnnnnnnnnnnnnnnnnnnnnnnnnnnnnnnnnnnnttttatcaaaaaagaaagaaagaaaggacaggacaggaaagggaaggggtgtggacagaactgggggc

SEQ ID NO: 149779 - DNA, 880 bp, Homo Sapiens
tgacccccatcggggggagcagctggcctcctgcattggagacccggcgctctatgtgctccgacgggccgggctgctgccttttctgctgctccacctcctccggggagggccgttcgggaccgaccaggtgggaagtgctggggtggagggggccccccctccttccaacgcctctagggcactggccatgccggcggcaaactgggccgcatcctccttgctgccgaagttgaggccccagacctggcgagcgtcgcgccactgatggaagttgggggtggcctggttatacttgacaccccggacgatggcacagttgatgaccacctgctggtcgggctgcatcttccggcccacgacgcgaaaggaattggccgtggggttgtggtagatctggacgcggctgaaggcctggggacccgtgccagcagggagccatcgcttgttgccatcatcataaagcatcacagtggcccggctggaacagatgaccgtctcgctcatggctgctcggcgggcgggcggctcgcccacgggctggctgctcccggggcgcccctggctggaggttcaggggttcggggctggctccgggctcggctcaggctcccccagggtcccgccccatagagtccggcttcctggggagaatgtggaccgggccggggcgggtctccgggcgccgcttccctcaggcggtctgatgagaggttcctgcagcagaaaggggatgcagcgtccgctccccagcgcgcaccccttgccggtggcggctacagtgttactcttactactgtacttctcttcgttacatttcgtcctcgtgccgaattcgccacccaggcctcgctaccttaggaccgtaatagtactggcc

SEQ ID NO: 149780 - DNA, 1173 bp, Homo Sapiens
  misc_feature (1019)..(1117): n is a, c, g, or t
ttttttcattattcagaataatatattttacttcttataatgtaaaaaatataatcgtttgagtggttttcagcatgatctgttaattttgaatacagagaatgaacaaagcaggtaaatatatgtatatgctgaataatgtaattccatatacaattcacagttagatgcacttaattgtggaaaataaaggaagacaataacatcaagatctttttccaaaacacggtaaaaataacgttcacatgcattaaacatttcaagccatctcagtatatgtctttcttgagtaagtagtgaaccaatggaccagtggttattgttggagaaaacaattaggcaactcatcaatgcgctatttatacaatcttagtgactatttaccacttcacctaagtagactttcccactcatttgaagctattgctatctataaataaatggcaacaggaaatgtttcacaagggcctttgatttccaaaactctcaaattccacagcaaagactcaatttaaggcaattatttatgcactgaatatttgaatgaagatgtattattttccttaagtgaaaaaagctgatactattttgtaatgataaaatttgtataccatagtagaaaatgatttgcaattatgtgttaggacttttcatattccatattgaaacatagtgattctgtagctggcatcagctgtaccctgacttcacatgaatggcctggaggggatcatatttttaaacaggaaatcagtgtgaattagctgagtaattaacattcagtgtacagtgagcattcttaactaaatcaaagtagtcatgaaagaaagtactgttggtaaatccaaaaacatacatcaaaattaaatggtgaggttgaaggttgtagttaagtaccaactagtgtgagttctgggagcattttgaaatggtggaggaatgtactaaatttctgaggaattaatactgatgggaaggatgcagtaaagagtaaaaacgggggcattgtggtttatacnnnnnnnnnnnnnnnnnnnnnnnnnnnnnnnnnnnnnnnnnnnnnnnnnnnnnnnnnnnnnnnnnnnnnnnnnnnnnnnnnnnnnnnnnnnnnnnnnnnaattacataaattagactggtgtggtggcctgcacctctagtctttgcctggtgaa

SEQ ID NO: 149781 - DNA, 870 bp, Homo Sapiens
ttttctaatacaacaggctttattctgttctacaattttaattccataaaattgataaaggcagtcactctattcattttacagaacatgaagtatttattttatggactcaagttggagtaaccaaagaggtttgcacacagtgacaggatgcagtgtttggggcccagttctattaggcattataaatgcccaagatgagagttgtaaccatgcagagtagtgttttctgaatatttggaaagattcttctggtctagtacaagatggtagaagagagggttagccatcctggagtatgaactcggcctaaaacatttccagtttagttgatttgtcggaaggacttaacgtggcaggtggagaggtcatcagcagcatcccagcaactccaagtacagggaagaaagaaacgtaccaaacacacaaggtggatggggtacggtgcttgttctcataacagtaatagccagccttctagagcagtggctcctcaggcagccattcatactttatgtgtagcatgctttgcaacagtgaagctccacatttcccacacctccattttccttacactgtctttgcccattctgcttttcctctttcgcaattctttttgtgctttccttttctcttttgcctctgaatccaagatttggtgagttgggtagagaaagagagcttctgcatttgtataatttcgctttgactatagcttaaatgattatagaattagtatgtaagatgacttctccttatacacctattatatctaatgtttataattcagaaatatcttgtcggacgcgtgggtcgacgatatcccggaattccggaccgtaccagcctgctttttgtacaaactgtcat

SEQ ID NO: 149782 - DNA, 505 bp, Homo Sapiens
cgcgaaacctagtccagcaggtttctgccctgacattctcttgtctgctattcccagagaggtctcagaggggaggggatgagcctgcatctgggggccaagggctgattagggaactgtgtcctacccacactggcatgttggattacgtttgtcctgattattcactctctacggtgagttactaattaacttttggcaggtacaacagataggtcctcacaaactgttcccagccctaggctgacatgagagacgaacaggctgtccacctttcttctccatccaatgggatggatccatgttcattcccacttcacaccttggtcctgctgattagagagctcatcagaggggcctggaaaggctgagcaagtaccagtgacaatggccatttaagaattctcaggccccatgtgccagccttcttgggaactgagctggctttctgggttttctcatgcctggtcttactgcttcttcctcagggctcttgttctcccag

SEQ ID NO: 149783 - DNA, 906 bp, Homo Sapiens
  misc_feature (205)..(213): n is a, c, g, or t
  misc_feature (233)..(233): n is a, c, g, or t
  misc_feature (238)..(239): n is a, c, g, or t
  misc_feature (247)..(247): n is a, c, g, or t
  misc_feature (250)..(250): n is a, c, g, or t
  misc_feature (252)..(253): n is a, c, g, or t
  misc_feature (256)..(257): n is a, c, g, or t
gggggggagattcacagcccttgggtcctaggccgagggtttccccatgggaaaacaagtttgggcccaagtttccctttcccttggtggggccccggccggcaaaagggaaaggtttaagaaaacttttcgggggggccaaggcggccggcaaagaggttatttgtttgcaggggtgggacggtgaaaaaatagtcatgactannnnnnnnnatgttggatagggtgcaatnagggnnggggggtnggngnnggnngaacactcccacgcgcactttattaagtacggaaggacaggtcacaacaggggtggaggtggcggggaaggcccagcccccacccaccatcactggcacacaataaataaataagtaaatagccaagtgggcacgggagagaggtggtactgaaaacactgaccgcacagggggacacgaaagccccccttcgagctgtggccatcaacgctgtacgggtaccatgaccaggaaagggtggggcttggccacagaagccccagagcatcacaagtctttgtaaaggagaggtgtctttaggacgtggaccactcttatttactgactgaaacctggacccctagctggtcccgtgagacccagattatcaaggggccactgtctctcaggcttctggactgttctactgaggatctaaaagaccactgggtcactatcacttggggtcctgatgggtccacccagggacctaggacatgcgagggtcatcgtcacttaggcttccgattggtccactcgggctccaggccgtgaaagggtcactattacttaggaacctaaaccgacgcgtgggtcgacgatatcccgggaaatccggaccgtaccagcctgctttttttaaccccactgtcctatagtgtcacaagcc

SEQ ID NO: 149784 - DNA, 1097 bp, Homo Sapiens
gtgcggggaggtaccagcccccacccaccatcactggcacacaataaataaataagtaaatagccaagtgggcacgggagagaggtggtactgaaaacactgaccgcacagggggacacgaaagccccccttcgagctgtgcgccatcaacgctgtacgggtaccatgaccaggaaagggtggggcttggccacagaagccccagagcatcacaagtcttctgctaaaggagacggtgtctttagtgacgctggaccactcttatttactgactgaaacctggacccctagctggtcccgtgagacccagattatcaaggggccactgtctctcaggcttctggactgttctactgaggatctaaaagaccactgggtcagctatcacttggggtcctgatgggtccacccagggacctaggacatgcgagggtcatcgtcacttaggcttccgattggtccactcgggctccaggacgtgaaagggtcactattacttaggaacctaacactggtaccccacaggacccaacattgatgagtcactatcacttagcctttggattggtccacccaggacaataagggttgtggttccctagacctctggttgacaaggacccaagggccaggacctgaggggcagagagagctctagaagccccagggaagggggagaagactaagtactcagggatagagggaatcttcagcaggcaccagggcccagatttcaaggaggggaggtgacagggaagaaataaggccacctggctgggtcaggccaagatgaatccataggggaccagcttctggggcagcaaagagtgcccagccactgctgggagggggttgcaagggccctcaaaccttccccgggtcccagccccaccccggtgcagaactggaccaaggagccggttgtgcttaacatggctcgtgacccatcgcctccacctacgggatcagggagtggggaggggtgggcctgtggcctgcaggtgcagtgggctcagtcctccaacccctctgtcaagtctgcgatgctctccacatcctcgtgccgaattcaccacccaggcctcgtaccttagccg

SEQ ID NO: 149785 - DNA, 1287 bp, Homo Sapiens
tttttttccggtttatcgcttttatcatatacttttgcagattcagatggagagtacttctgaattttactatcagaaaatccacaaagattcttcaaatgttgttttaacatgagaagtaataaaatacccctgggacacatttgcaaattcgattaaaggagctgaattttctggcaaacatttcatcactgaatttatatcgtcttctgaatctgaatctgaatctgaatctacacgtttccgtgacttccgaggcctggaaacttcttcttcactgtcgcttgactcattttccttactaggtgatgattttctctctttccttttgtcctttaccatagactccttgaatgactgcagtaggttactaccagaaactgagagtgtaatgtctatatgatgcattataaacaacggctcttcctgtgtctggtatggaaaacaggctagattgtctgctatatacaagagcatagtcacgtctgtttttgctgtgtcatcaaagaggttgagtaaagaaataagaaaggctcgtcttttttggcggtttccacggatcatggagtaaaggtgtgaacacaaagcgctagaggactcgtcttgtctgaaaccccttacaggatcttttaggcatgtgttgattgcctgttgtacctggtaagacatcttcataccagccactgctttcatatgaatgaatccagcatattttttgtctatttccacaagttgctgatcagccttgttccgcatagcaggttctgggtctgtgcccatagcaattaaatatggcacacactgaactggatgaataagaccttgatttagagtcaatgcaatgacatttagggcaaagtggcgtacacttgactgggtgtgaaaaaatgcctcaagcacctgtttgagataaagctgcatgatggaactactcatccctgaggaaacatcacccatttcttttaagtcttcctgttttgcaactttcttccagtctctatctgcctgctgcatacgtgtatcttcttcttgtaggtaggtctggaggttttttaacacttgtatttttaaattgactgaggagttcttatcagataaaatattattatatagattcttcacttcttgctcgaacattagacttggatgctgaataaaggcaaatcctagaccaatgatagcttttgtttgtaccgacgcgtgggcgacgcgtgggtcgacgatatcccgggaattccggaccgtaccagccgctttttgtaccactgttctattaggtccacatgc

SEQ ID NO: 149786 - DNA, 1194 bp, Homo Sapiens
ccttccatagcggtgagggctgtgtcgttggttgcccgccgtgtgctgttgtatcttctctgtcttgtctctggtgttctcttctcctgcttcgttctgtgctgtgctcccgagtgatctctgcccgtgcacttgagttggagtcccttgggcttgttggtgtgctccttgtccctgcctgcacaggtacactgtctccggtgcgtggggttgagtcccgtcgtgccctcccactgatcgcgctttttcgggcgctcgtgccggcttggcccccctgtggttcttacccgtccttcttgccccatagatgttggcctcgttgttgacctttccgatgtttttcttatagcgaatcctcttgttgccaacccagttggagaccttgagaccacgttgatgccacagcttcttggcaaggctcctctttggcctcctcacctaggatatgggttactcaggtgggagtagaaatactcatttaggacctcagtggcctgtttgctgaagttacggcgctttcgtctggcatccaggaaacgggagcgcaggatcatcacagcctcgcaggtgctctgcttcagctgcatctggatggcgctgaactttcgatggatgatgctcaccatgcgttccatctctttgggggccacgggcctggtgcggctctgctccctcagcaggttcatgacatgggtcgtgaactcattacatgcctgctcatacttctccagctccgagtggtatatgtgacggatctgggcaagtttgctgcgatagtccgagtgttcgatggagttgtcaggggacacaccaccaccagaggctgcagcggctgcagctgctgctgctgagccgccccctttctcgggcccagccacaccctctgccagaagcatgttgtccaagcgcatcagctgtgggtccaccggctcctcctcctgggagctccgaatgctgaggccagttttctccttgatttcacacaggacgctaaagagagcaggcttcattcggtggcagtttagggcgtgtttcttggcctgggcctcgtccaggctctggtcggtgatggtcattatctgctgcagaatgtccccgatgtcttgcttccctcggcctcccgggacccccccgctacccccaccggggtctccgccaccgggaggctcgccagggcccccaggctcatcccgg

SEQ ID NO: 149787 - DNA, 965 bp, Homo Sapiens
cggcaattcacgaacaagcgtgtcacctaaccctaatttagtccgagcgttaattccgaggaggtgccatagtgcccgcccagaagtaggtccttcgacgaaagtccagagtagcagtttcccagttcggacgttttaaccgcgccaggccctgctttaaatccgccccactcatagggaccacttgcacgagaaacctgggtacgcgttaagcttgggccccccgaggatcttttaaggcctgccccccccttcttatagtgttgattacgaaattaatatattttgaactttaatttctccacagagcctgtataattataacagatatatttctacttacaaagtttaaacaatatgtaatacaacctttttaaatctgtgataataccatctaaaattttacaagaataagatggctttctttgaaagttacaaggaaggaaatttgaaatactacatacattagaatggtgaccatagcaggattcagcgtgcatatcattttattatcagaattatctgtagtatttgcagtttacactaactgaagagaattgtatggattatattatgtagtatgcttgtccttcatttgttactaagcaatatgttcactatacatatatacatcgttattagagcacagatattacatgatcatgctgccattcaaaattaaggtgccacagttttattacaatcaaatggcatccaaatgcaatgttgctatgcaaattcaaaagttctcacagattggcatttatgaaaggagtaggtcacaatgaaatggaattttattttgtacaatggaaaagatttatcataaatatatagaccaatatataacattgaagcaccagaagcagaaaggaaactatgccgacgcgtgggtcgacgatatcccgggattccggaccgtaccagcctgctttttggaaccaacttgttctatatgtcctatt

SEQ ID NO: 149788 - DNA, 1136 bp, Homo Sapiens
  misc_feature (1022)..(1022): n is a, c, g, or t
gaatatagaacagtgtgaaaaaagcagctggtacggtcggaatcccgggatatcgtcgacccacgcgtcggaagtcctggacttcaaccctcctgttgtttggccttagcccagagggagctgctcacctgagcacccttggggggtgggcagagaggcagggtgggattttagagttagtgtctgtgcgggggcagccctgagcctggagttgagactttggggtctcttagtttggaggtgttgagtgcatttgtgcccctgcctggttgagagcttcttggtacctcttgccaccccttctcactgccctgacccaaccccactggaccttgatgctgcgaggagtggtgtcctgacggactcaccactcccgcctgatgtattggatcataggagagcacttgctctcctgcctctgccaggagagggcttgttcctccaactctaggaggccaggcaagcatggacaggagccaagggagcagggtcattaactttttcttctttgcaaagtgggcacttggcatcagggtcccaatcaccagaaagcaccaaagcccctggcaccccacccactccatcctacccagggaccccaagtaggcaactgttatggcagtgggtccagcccaggccagcactgccagcctcctctccctgcagtaggcaccagctctacctcccccggcaggcaatgtccctgacttctccagccccagcaccatctagttcccctaagacttcctcaagggggccaagcccagatctggggccaccccttttgctgtcccctccattcctcgggtttccccacacaaaggtggaacagaacccccagcaggaaaagctttcctcctcctgggaaaaaaagcttgggatggctggcctttacaatcccccctttcgaagcaccttccttcccaataccagcaaaaaccaggggaaccccacccatcaacccaggattccggctttgccttcctcacacggttcaggggcaaaaaagggggaagaacccnccccccctattgagcgcccttttgggaataacccaagcaaaaaatgcgggccgttccacagcgagcatcggacatccccattaggcatgcgcgccccgttgagggcgccctaaa

SEQ ID NO: 149789 - DNA, 962 bp, Homo Sapiens
  misc_feature (635)..(746): n is a, c, g, or t
  misc_feature (776)..(889): n is a, c, g, or t
acaatttccgttgtcctcctagaaggctcgggttctgcaggcacagtatttggttgtgcaataccaccagaggccaatccactggtgaatccagcctcctgtcctgtttgaagggctggagcttgggaatttcaaattgaagctagggctcaaacagtgatcaaataagggctcttcatggaggggaggaaacctgcagccctccttggccctaagacaggtcagcatctcggctcacaaagccaaggttcactgggcaggaaccagactttcagaagggaaaggtgccataggcaacgccaagggcatgactttaaatatcctatcctctggaaagtgttcaagaggtcttgcagtacacgccatttaggagactataaaattcctttcatttatgccatgtgaacaagttgaggcggtgcatttccaaggtgaattcattgaatacaatgaagtacatttattttttgaaggaagtttttgccgcagaaatattgaacttgggactgtgctgacaagctataacataatccctctccttccagatcagagcaggggtgaggaagcaaaagtccacagttactgggcaggtaattggtataaatgagggtgtggggctggatgcggtggctcannnnnnnnnnnnnnnnnnnnnnnnnnnnnnnnnnnnnnnnnnnnnnnnnnnnnnnnnnnnnnnnnnnnnnnnnnnnnnnnnnnnnnnnnnnnnnnnnnnnnnnnnnnnnnnnttagctgggcatggtggtttgtgccagtgnnnnnnnnnnnnnnnnnnnnnnnnnnnnnnnnnnnnnnnnnnnnnnnnnnnnnnnnnnnnnnnnnnnnnnnnnnnnnnnnnnnnnnnnnnnnnnnnnnnnnnnnnnnnnnnnnngacgcgtggttcgacgatatcccgggaaatccggaccgtacagcctgctttttttaccactggtcatattaca

SEQ ID NO: 149790 - DNA, 819 bp, Homo Sapiens
  misc_feature (42)..(42): n is a, c, g, or t
  misc_feature (66)..(66): n is a, c, g, or t
  misc_feature (93)..(93): n is a, c, g, or t
gaaccctgcacccagagggcctgcctggtgccaaggtatctnagcctggacaggcatggacctgtntccagagagaggagcctgaagttcgtngggcgggacagcgtcggcctgatttcccgtaaaggtgtgcagcctgagagacgggaagaggaggcctctggacctgctggtctgcactgacagcctgaagggtctacaccctcggctcacctaagtgccctgtgctggttgccaggcgcagaggggaggccagccctgccctcaggacctgcctgacctgccatgtgatgccaagagggggatcaagcactggactctgcccctcctccttccagcacctgccagagcttctccaggaggccaagcagaggctcccctcatgaaggaagccattgcactgtgaacactgtacctgcctgctgaacagcctgcccccgtccatccatgagccagcatccgtccgtcctccactctccagcctctccccagcctcctgcactgagctggcctcaccagtcgactgagggagcccctcagccctgaccttctcctgacctggcctttgactccccggagtggagtggggtgggagaacctcctgggccgccagcagagccggtctttaggctgtgtagttcgcccaggtttctgcatcttgcactttgacattcccaagagggaagggactagtgggagagagcaagggaggggagggcacagacagagaggctacagggcgagctctgactgaagatgggctttgaaatataggtatgcacctgaggttgggggagggtctgcatcccaaaccctagg

SEQ ID NO: 149791 - DNA, 1031 bp, Homo Sapiens
  misc_feature (348)..(453): n is a, c, g, or t
agcatggaatatgaacaagcttgtttaaaaaaagcaggctggtacggtccggaattcccgggatatcgtcgacccacgcgtcgtagggatgtttttaataaactctattttcgtaacaaactttaatgtgtgctattcttcctacactgcattagggtggaaaaggatgttcaccgtcaaagtttgagctgttaatactgtattggagtctaaattagacttatttgatgaaaatagacattttatgtagttattctcactttcatatgtaatacttttgatttttagtgctcagtcataaggtaaaggttagttgttttaatgtcaattgaagaagctgtgtttgcnnnnnnnnnnnnnnnnnnnnnnnnnnnnnnnnnnnnnnnnnnnnnnnnnnnnnnnnnnnnnnnnnnnnnnnnnnnnnnnnnnnnnnnnnnnnnnnnnnnnnnnnnngcaacacagaaagtgcacgaagcatggagacctaattccaatctgcgcaatggatgacacacgagagacagacatggagagtcacgcgtgagattagctccaccacacaataacaccactcaaacatatcggcgccgaccatgcgtgaatgtcaccaaggaactaacctaactgaaaccttgaagcaaaggcaccatcctcacatgaacctcgccagcagaagcaacaccagagtattccaacaatggcccccggctcccgccggacgggatggtccataggaagcaccaggtgtccgtacggactccatcgaggcaatacccaataaagcgtaggccaggaaaacataacggagagaacttccctgacaccggtcggaaacaggaaacctacgactaggccacagtgcacccacgtacagcacaaaggggcatgaggcagacagcacccaaaatgcgggcagcagcacctactgaacctaaaccgaagctaagaacaacaggcaccctggaggaagccaaacagcagacaagaggttcatacacgaacgcggcggacagctacaccgagatcccgac

SEQ ID NO: 149792 - DNA, 1339 bp, Homo Sapiens
  misc_feature (98)..(98): n is a, c, g, or t
  misc_feature (334)..(391): n is a, c, g, or t
  misc_feature (452)..(460): n is a, c, g, or t
  misc_feature (494)..(543): n is a, c, g, or t
  misc_feature (700)..(713): n is a, c, g, or t
gctaacaagtcatagaatactcaagatgtcagtgctgcggaatgtaggggtggttggggcgagaggggggcggagtcggcgggagtccaacacgtcanctcccacgcctggtgagcgacaccgatcagagcgtgcgggcggatggctggcgtggggttgacggggtggggcggtggcggggccaccgcgagtgatgccccgagttaagcctcatagtaggaggtgaagggtggtagtgagagggtggggggtaggtaggagagcaaatgccacatcatcgtagggtagggatattggaggaggggcggcggaggggagcgagtgtgaggagctnnnnnnnnnnnnnnnnnnnnnnnnnnnnnnnnnnnnnnnnnnnnnnnnnnnnnnnnnnagtcagtgtagtggatggtgtagtgctgctttagatgtgttgggaggaggatgggcggcannnnnnnnnagcgatgcgtcaggggttggttatcagagtaccnnnnnnnnnnnnnnnnnnnnnnnnnnnnnnnnnnnnnnnnnnnnnnnnnngtagagaggagcgcgctcttgtgtgaggggggtaagggaattacggtccggcagcgggtggcagtggtcatggtggggagctcttggccggtccggacgatgtgcggtcccagggggtcagagtcgcggagatgggggcggttgtaggtgaggttannnnnnnnnnnnnnaggctctaggtgatgtttgtctccggcctggcaaaaatcttcgtccatctcttccagtctgtacacctccttcaccctgatgggattcatgtcgggccgactaggcttggaaacggctttcacaaatttctcggcaagctgaattcgctggttaaagtgctgctcccgaacgtcggtgccattcagcacaaggacatcgaggatgtggatggcactgatcttcctctgggccttcccctcccctttcagctcatgcacaatttccacagatagcagagtgtcccggggcagctctgtcttcaggtctagcttgatccagcggtctgactggcggccatcccatgtgtagatctgggatttccccaggccgatgaggaacttctgctcactgccagataccatgcagcggtagtcaaacacagggcggatcttctccagggttttagaggtgagcagtgtgggcttgtagctgaagatgtcaatctcagtgcctggattagctcaaagaacttcgatttagggtcggaggaagaaggagccacacgagcctggtctgggatcccccagagtcggaggcactcccgacgcgtgggtcgacgatatcccgggaataccggaccgtacca

SEQ ID NO: 149793 - DNA, 984 bp, Homo Sapiens
  misc_feature (774)..(820): n is a, c, g, or t
cggccccccccgctgttttaacccaacagggcccctgggggcccgcttgccatgttcccctcccccgcggctttccttcggggcgcccccctcggtatctggctgcccattagggtgataatatcttaggatattcattttataatctgagcttgttaggctccgtaacattccagtcaagacatgctggaggaggcttgttcagatgcaaactcccgaacgcgagccagctttccccccttcttcttccctctgggcctgctgattgagagccctcccccaaccaagacgctggtggaccacagagggctggttagtcaaataagctgcttcttccccttgcccactccctgtccctctacaaaattaataaaaccgtaataacaagataagaagaagaaggtgcaagagaatggattacaatgctgtttgttatcctcagtggaagaggcacaaaggggtcaccattccctttttcactatgtatcgaattatagcttcccttaaaaaaggcaatactttccaaaatacacatatgtataaatacaggacaagaacatattaataagtctaaacacttgaataatatgctgtctacttaatactgatattttcatccagggaaaacacacagaaaaacacaatatggcttaaagaattgcaagattttttttcctcatcagaattatgtaccaacttcatataatattctatgtagacatatttccttctgaatgtagttcagttgcatatttttacagaccaagcatagtnnnnnnnnnnnnnnnnnnnnnnnnnnnnnnnnnnnnnnnnnnnnnnngttctcaccataaatattttcttgcagctcaaccagaaggttggcaaatacttccagaaatctttgtttgatattctcttgcgacgcgtgggtcgacgatatcccgggattccgaccgtaccagccttgctttttgtaacaacttgttctatagttcacattgc

SEQ ID NO: 149794 - DNA, 969 bp, Homo Sapiens
ccatgtagccactccaggtcgaaggctcttctggtcgactgttggtgacctgttccagcttgaagatgtgtaccgtctcggtggttactggaggcgcagaggaaattgtgaatccatactgaacactagagagctgattgtcacataccttttcatccctctccggaactcatagagcttttgcccatcagggacagagaacacccggatgactgtgcctttttcagacgcacttgctagtttggagcctgaggcattgaaggtgatggcagctagtgttccctcatgggcagcaatagtgcagactgttttcagggagtttccatcataaagcacaatctcccctgaagtcaggcttccaggataggccaggtaagaattggaatggttgatagagagagcacatagacctgttgggtttgcaggaatatccaggagggtcttcaacagcttcatgtctttaatgttgtgaatataaatggactcttctaggcaaaccagcagcctttgccggttcagccttatggacaagatgttgctggagtagctgtaattacagatctctgtgcctttcttgaagtgatacacgttcatctgccgtggttttgtgtgactgactaccaccaccaggctgctggagaagaggcgctccacgatgtagacgtccgggatttcattgcttccgtggacttgatccagctgctccacagaactcagagaaaacagcttatacccggctttagttccaattgctagggatgtgcagtcctggttgaaagagaagcagctgagcgccgactcaaccccgcccgggggagcgtccgcggcctcggcctccatcggggggtcggcccgggaagccgcagctcggagccggcgacagccacctcagccgacgcgtggtcgacgatatcccgggattccgaccgtaccacctgcttttttacatactgttctatattcacatgc

SEQ ID NO: 149795 - DNA, 1047 bp, Homo Sapiens
tggaatgggaaataaactccaaagccaaacagatccttttagacctttgcctttgaccctgccgaagaatgggctccccacactggtgacgaccaacctaggccttgggcccagaatcttacagcacctctgtgggcagccggccagccctcttatacgtgggcactctttgcatgagtcggggagctagagcccgcagtgtagtagaaacggttttcagcaaggcctgggcatctccagcgcagcagaggatgacacagccacccacgaggcacagcacagcaccaatccagcctgcatacagggagtagccaaagctcacgatggtggtctcacggtgggcgcacacagggaaccagatggtggcaacaagggcgcagagagccagcagaatgagcaaacaccagccagctgggcccgcctgtacttagccacaccgggctcctggcccatccggatgcagggaagaacagtcagcagcagtaaaatggccggcagacccaggaccgaggcagcaatcatcagggcgcggcaggcctgcacgtagcccggcaggatgaggatgtccaccaggggcttgcagtggtacagccccgtggccatgacgcagtcggcccacagccccttggagcccagctcatccagcttgcggcaggtggggatggtgtagccgcaggtcaccacccagtcattggtggaggtggtcacgatgaccccgatccagcccacgaagctcgtgacgaagcccaccacctgcaggcacgtggccaccatggtggccgccaggatgtccccgtgcctcgcccctcacggctgtgcctgggcctgggctggacagtgcctgcccaggtacgtctcccacgctcgcgagccgctggagggcgacggcccgaggcgggacactggaggtggaggtgggcgccggaggctgcgagctcagcggcgaagggcgcacggcggggaccgacgcgtggtcgacgatatcccgggaattccggaccggtaccagcctgctttttttaccactgtctatattcaccaacgcgg

SEQ ID NO: 149796 - DNA, 647 bp, Homo Sapiens
tgaattaggactataaacagtgtcaaaaagcaggctggtacggtcggaattcccgggatatcgtcgaccacgcgtcgggcaagatatgatggctgggagtctaattgcagttccctgagccatgtgcctttttcttcactgaggactgccccattcttgagtgccaaacgtcactagtaacagggtgtgcctagataatttatgatccaaactgagtcagtttggaaagtgaaagggaaacttacatataatccctccgggacaatgagcaaaaactaggactgtccccagacaaatgtgaacatacatatcatcacttaaattaaaatggctatgagaaagaaagagggggagaaacagtcttgcgggtgtgaagtcccatgaccagccatgtcaaaagaaggtaaagaagtcaagaaaaagccatgaagcccatttgatttcatttttctgaaaataggctcaagagggaataaattagaaactcacaatttctcttgtttgttaccaagacagtgattctcttgctgctaccacccaactgcatccgtccatgatctcagaggaaactgtcgctgaccctggacatgggtacgtttgacgagtgagaggaggcatgacccctcccatgtgtatagacactaccc

SEQ ID NO: 149797 - DNA, 927 bp, Homo Sapiens
ttgctcccattcaagtacattattattgtgtgacccacttatgtagtcttcaatcttcgtccttgggcacagggctggtaataccactctgtatgcttctggccacttgatcgaccctcttctctcgtgccagtcaagccaaccagtttgggagaaaattcttgtcacataatttgcgatggcttcttttgtgtccctctctgggtcaatgctgatgaaaagtggagttagatctggcagagttgtaatgctatctatttcatccacgacttgaatcatcttttctagttcttctggacagacatcagggcaatgagtgaagccaaaataaatcaataaccactgacccaagtagtccttgtcagttttacgctccccagtatgagttgtgagggaaaacggtcccccaagtaaaggcttgccgatgtgtcgctgccgttccttctctaacttctctgccttttctttcttgacgtgcttcattccagccagtaaagctcctccaatagcaaatgtgattgctaaagacttccaggaaacaggcccgggcttcgaggggcgcgtggagtctccggggcccttctgcgaccacgggggtggcggcctcgcagtgctgaggggccgggttcccaggcaatagccagggcgccccgaggcacgccacgcctccgcttgccgcgcgcagaactgcctcagcaagactctcgcagtcccctcggctgggccccaaaactcgagtccgcgaggcaagaagcgccaaagttggccacccagaggccgcataactcgtccgggtactaggaccagcatcgccatgagcctcggagaccgggtctcctttgaccccgactgcgtgggtcgacgatatcccgggattccggaccgtaccagcctgctttttttacacacgtgttctatagtgtcacc

SEQ ID NO: 149798 - DNA, 1033 bp, Homo Sapiens
gaatgacggttctcccttctttccatccaaacctcggatccttccaggataggcctaggttatttgcccaaaaagcattagggcctggactaacaggaaacctttccgccccatcatcaggaaagtgactatgaattgggtacttcccaggcaggcacctcttttgaagggtggattgcctgtgtaaagaaatgtgttggagtgtcctcccaccaaggacgtccacaccccctcactttctgagcgatgagtttatccatttcaaaacccgaatgtcccagtgcaataattttgttcacatttagagtttttaacttatctacttcaggttgtaatgcagtgatttcatcttcaaacactaaatttgtccctggatttgagagaaaaggggtttctttggaagtgtatccaacgattcccacaacttcatcaccaacaggaagaactttatatggcaaataaagtcctgatatttgagatgctagtggcccctttgctttaatgtttgcactcagaattggaaatttggcctctttgaggagtggctcgatcagtccttccacaccattatcaaattcatgatttcccagtgccatggcatcgtagcgcagggcgttcatgaagtgcgccacctcggcgcccttgtacacggtgaaccagatagtgccctggtactggtcgccggcgtccagcagcagcacgttgggttcggcgcggcggatctgctgaaccttggtgaagagccgagccacgccacccatgcagcggctggcgttgacgcacttgctggagtcctcgctggtctgctccagccggctgtgcacgtcgttggtgtgcaaaatcgtaagctcccaggcgccagccgcaggccacagcaccgcgcccagggcgaggagtagcgtcgcgggcgcccgcgcggctcggggacacatagctgtggcgcgtgaactgggtgcgaaagcgggcgagccgggcgagcgacgcgtgggtcgacgatatcccgggaattccgacgcgtaccagcctgcttttt

SEQ ID NO: 149799 - DNA, 1028 bp, Homo Sapiens
ggcaaggacgcccctggccaggtccaaacccagttagtttttcccacatccctgcattgaagtttcaggacatagaaggcggtttctcgaagggccgggttgctgcggggccagggttgtaatgtgggttcgcagatggtagtgtcaccaaatgactgcatttttctttcaagaagataaagacctgatctttatcttgaaactttttccgtgggaccaaactgtagcagcccccatgtagcacagcctctgaaggttctccaccaccgaaaaaatgtaacgcctcttgtacagaagctgctgccgaatgggcctggggagaaagcggatcagcgtgtgcttcttcagcgggtcgttcagaaattcctccaggttgtccaccttgtagctgacttgcacaatctggatgaagatggagaggggaaggcagaggaggatgtcgctgacgagagcccagccaaagccgaagtccctgtggactgggattggggggatgtagcgcatccacgaggcatcgtcgacatacactgtctccgtggcaagctccacttcagcctcccaggtgacaccatcttggctgcctttagatggggcttcagagcaggcctcccaggcacttccagaggaggacggccggacgcctgccctgcctgactcctgctttatcgttctccgttcactgatgaagcttggcttctccacggtgttgctggcagggtgcccgtagatgaggtaccacagaaacatgtggaccacccgcaggcgaggcattttgggcagaaatcctagagaacgccccagtccgggaactacaatggggtgataatttctaagcggggttatgcccattttattatcactttttttcatccgtccactttctgatctagaggaagcactcagctgagagtcccctgatccacttgggccctcttttccttgactgtcttcttctgcctccccttggggcactggaggctgggaagtttcctcgtgccgaattcgccacccaggcctcgctaccttgg

SEQ ID NO: 149800 - DNA, 524 bp, Homo Sapiens
aaaggagacagaagagctttatttaagttctctaaataaaagttcaaagataaggaaaaattactttaattccaccaataaaaaaattacaaacaagtagccatgtattctacactagatgaacataagtgtttaagcacaagcaaggtgaataagaaaagttttcatttccctgggcgaggaacatcttctccctttgtcctcagcatcagttttacttgccccaagtcagtgcatcacaagctttgctgctagaatacgccttaagatgcagggcagcaagcaatcctccaattgttccagggtgtgatcttgttttactttgttaattattactattttaagatttcaatagttttgggggtacaggtggtttttggttacatggatacattctttagtggtgaattttgagattttagtgcacccatcactggagcagtgtacactgtacccaatatgtagtcttttatccctcaccccactctcaagcttccccttgcaagtccccatagtccattata

SEQ ID NO: 149801 - DNA, 566 bp, Homo Sapiens
ccaaagcaaacaattggagcaggtaagaaagaaaaaactaggaaaagccaggataaaaaaacacagggaacatggggagaaactggaaatcagcagaagagacagaaccttccacacagaaaagaacaaggcagatagctccaaacgggtctaggctaaaatgagaatatattcaaacccaaatggctgaacattgctatgaacataggtcatgtatattgagacactgattccgttttatggagccctgtggctcctgacaggttaacgagagggcacgaaactccagtgcgacgtgctccattttgaaagcagataaagctcccctcatcagagtgaagaggaaagtagccgtgctggaataaggcaacaccgggccccctcaatacaccggcaccctgaccctggagtgcaagccactccacggacaccagcaggtccccgcctgggccccggcctcgctcgccacctccgcgacctctgctcccagcccacttctcggtcccgctcgcggcctctcccccgcggcactcgggcaggggctcactcgagaggttttgccgcca

SEQ ID NO: 149802 - DNA, 889 bp, Homo Sapiens
tagacagggcagtggcgaatgggttgctgcacccagggcctgtgtagaggacaggtcttggcagtggagacgaccactcagagcctccagcacgtgctgatgcccatgtgtgtcgtccacacgcagccaggtggtatgtggggaacccgtcgctcttgatgatgactgggtctccctccacgctggccacttcatgcctattccagccatacaccaggtcctggaagctggcaccacctgctccaggcggaagcggatcgcaggcttggggtccttggccagcttctgggccacctgctcctggctcatgttcctgcaccgattgtcataccggggcgtctggtggttccgcaaggcctccttcttcaggagctccagccgctggggtgagcagaaacaggggtaagcagctccggtcttcagcagcgcttctgtggcctgggcatacagctccaaccgctgagattgctggtagggcccagcaggaccgccccggcgggggctctcatcaggcgggatgcctgcccactccagcatgtcctcaatattctctgctgccccaggcacaacgcgagtctgatctgtgtcctctagcctcaggatgaagctcccctggtacttcttagcaaagatgtagttgtacaaggcagtgcggaggccacccaggtgcaagaagcctgtggggctgggagcgaaccgcactcgcaccgcaaccccggcatcagtgcccaggttggcctcgcgccgtcctacggggcggccagagccgccgaaggcctctcgcgctgcagcagtctcctcaggagcgccgccgacgcgtggtcgacgatatcccggaatatccgaccggaccagcctgctttttgaacaactgtttatattcacctaa

SEQ ID NO: 149803 - DNA, 655 bp, Homo Sapiens
  misc_feature (83)..(94): n is a, c, g, or t
  misc_feature (298)..(301): n is a, c, g, or t
gctctctttgagtaactttattttggaggagttccataagcattaggaacatacataaaatgacacaccactgttgaccatgnnnnnnnnnnnncagcatttgatattttccagctttttaagttaaaaaatgattcagttaaaacaaaacaaaagtttagatattttagcaagaatcaccttgcaggaccataatcacatttaagccactgacttgtttgtttgttaatggaaaaaattcacactgcatctagttactatagtatttctaagcataatcaatcaatcacagctgatnnnntgattgaatgcaatgtgattgattgattgattgatatataccaaaattcatatggatgtcacacagtgacagcattgtacaagtaacgttaatgacctccaacaaacacattttaaattagactggtcaagctaaaaggaatgttggagccaaaagaaatgtagtggaattcagattgtctattaagacttgaaactatacattagaatgatgtggaaccctaatactagcagcaactgttacagccctcttaaaagatttgtaagaatctagccgacgcgtgggtcgacgatatcccgggattccggaccggtaccagcctgctttttgtacaagctggttcataggtacatg

SEQ ID NO: 149804 - DNA, 976 bp, Homo Sapiens
tgctcggttggcggggtgttgcgggctgttgtggggtggttggctgctgccgggacgcgggagggtgcggtgggagggaggggcggtgtgtgggtgccctgacggggccgggcccggaggggtgctgctggtcgggggggcgatggctggggttgtgacggccgtgggggaccggctgttaggaggggcccgtgttggtcgggaggctagtctgggatgtcaggccaagtccccacggtttgtgtgtggtattttgaaagcaccctaggttatttcctgaggtcctccaggatgaggagggccgggggagaaaagttagtctgtatcatatcccaaaatgggtccaagccatttctcaacctcagccacagatatgttcttcctcaatgcataatcctcaacctgatccttggaaatcttccccacagcaaaatatttggacttcaaattggagaagtagaggcctgagactgctgaagcaggtgccattgctaatgattctgttaacctaatgcctgtagactgctcgatgtctgcaagtctccacatggtgagcttctcggtgtggtcgggctggctggggtagccaggagccgggcggatgcccttgtaccgcagccttcgcaggtctgcgacgtccagctgctcactgccacagtaggcccacagttctcggcgaactctttcatggagctcttctgcaaaggcctctgccagccggtcccccagcgccttgaccatgatgctgctgtagtcgtcaccatcatcctcataggccttgctcagctcttctaccccaaagcaggcaacggcaaacaggcccaggtagtcacggatgccagaatgcaagggagcgatgaagtctgagaggcagtagtatggctccgtgctggcagagcgacgcgtgggtcgacgatatcccgggattccggccgtaccagcctgctttttgtaacaacacttgttcatatcacta

SEQ ID NO: 149805 - DNA, 804 bp, Homo Sapiens
ggagctgccaatctgatgtgctggtgcccgtcggtagaccatccactggtagacttcatcagtgatacacaccacgtcatgctgctggcaaagctggccaccagctccagctcttccctggagaacacctttgcccagggggttttgggggtttgaggaccagggctttggtgcgtgatgtgaatttgccggccagctccatggggtccagctgccagttgctgctggaacccagttctccattctggatgggacccggcttcagggacacaaacacaggacgaccccctgccatcattgtcatgggctcgtagcagtcaaaaaagggttcgatgatgatgacctcgtctccttcgtccaccagggcctggaaggctgtgaacagggccccatagccaccaacagtcaccagcacattcctgagcgggtctatctcctgacccagcagctccccaagaaacttgccaggatcttcgtcagtggtgggtaaccaaatgtcttggtgtactggttaagcatgaagtctccactgacagcgtgctgaaaggcttccccggcaaagtttggtggtgggaaatccgggaagccctggcccaagttcacgacgtcatgctcactggccagtttcccaaactccacccaggggttgtagtcgatcccgtctagctttcgggcctgcagctgtttggccatggcgagcctcacctgggccgcttcacccccgacgcgtgggtcgacgatatcccgggaaatccgaccgtaccagccgctttttgtaacacctggtcatagttacctacatcg

SEQ ID NO: 149806 - DNA, 1161 bp, Homo Sapiens
tggaagcgttcgttcttcttgtacccgagtggcgtgtagtggtttccccggtgctggtgcttgtcgagtgtctgattggtgtggctgcatctcatagtgtctctgtggcgctctgtgggtatgaatctttgacaccgatatgctcttgcgcgacatgttcgggttgcgtacagggggatcgcgggaacctgattagcatccggaggtgttcaccatgtacggtcgcagggatagggttccgaatgcaatctggtttcgggtttcctgaacatggtggccgtttgctatggagttccaggccaatgctgtgggatgtatccgtcgtcgggtcgcgagtgattgccatggctgagtcgaatgcgtgcggtaaggatcttggggtctcctgaatcacgttcgcagagatggagagatgcaggagttgcgatccttgtaaggtttgataggcctgcagctagtggccgatatccgaggctaagaaggttcaagtctgaaagttgattgagtgactgcaatgatccttgggtagagcagattgcgttgctcgttgctgctgaatgtcctcagacgtgtagagtggccaggagcaggggagtagggcagtcctggaggtacagccctgctggcctgctccgcaagcaagcagtgaggtgtgcattgttagaggtgcaccgggaagggagcttggtgttcggaccccaggacatcctgtccgcaagcagctgctacttgcttgggcttctctagaatattgaggaatgttcccccgtgtcatctctctggactcatccagccccagctgataggctaggttctgtaggcctcgaaccttcgtccatcaaattagccgtggtgagactccccagttctttcaacatgtcgatgtcatcacgttctatctcagccatccatttgggtggagaactagtaataggacttttgaaggaagctgcaaattcagcaacacctggtaattgttctggccaaagatctggtgaggcacggtcaagtttttcaaaacttagcaaagatgcttccacgatctgtcccgtctgtgggagacgccatcggacgcgtgggtcgacgatatcccgggaatccggagcggtaccagcctgcttttttaaaacacgggtctatattcacatgccgtggttgtgt

SEQ ID NO: 149807 - DNA, 1519 bp, Homo Sapiens
tggaatgagtacgcacaaacagttgtttccccatttcgttgtttttttgccctcccctacttttggtcttccccccgtgccctcctgtcgacctttcctctggacgttttccctagatcgcccacttccggctcctggtgcccgaaagttagcggaatttcctcttccagagagcttgaattggaacggacccgaagaaggggtgcaaataaacgtttagcactctattcttgccaactgtactgagctcagatgttaaccgtgcttttaagaaatctgttacccagaaaaatgctggactgagtttttgctcctgcaccatacaactgcaatctggatttcttcagaaagttgtgtgaaggactcagcctctcggaatctttgcacaatacttttggcatgaggagttcctatcactttctgagaagaatacttggttgtctttagtctggattgagaacatttaaaatcaaaactggtctcctgagtagctttgtgtttcagctggttgcagaaagccctcacatcaaattctgatgactcttctttgaagactctcttattctttactggctgtccaagatccacattattctgtacattgatcttcatttgtttagctttttttgaaattccaagcaaggtttcttcactggctcttggtgactgctcatttattaaaaacagtttatttagcaatttatttattcctttagctgcaaaagctataggcatttttttcttaaaggcttcaaaatatggctgtcctaaaaattcagtgatatcagaaggaaaggtaaaatctttgaagtaaggcattggttgaatcctagcgacctcttgaagcaatccaaacaaaggctcatataacaaaatcaacctttttaagacacctttatagagaacccataacctgctcaccagcccaaccatcacaaggtttaaaataagtgcaactcgttgcaatcctctagatgttgtcgacacgtcaagatagataaaggttttgcgagcaagcagtcacaacaaggcggagtcaacagaacttgtcaggcgtctcgcaataaacgcttcactacgacacccaactgcgcacccacctggctcgactcggggacatacacatgactcttggtagtttaaggcgcatgattcttcagttgggcagatatgacgacctcgtaacaggtcttgaagttgagccctcgcagaattcatggtatttttgcagaacgctttaaacacttgctcaaccctgtcatgagggccaaatggggtttgtggcggcccattctgttgtgattgctgtaaaggactgcacataacacatctgtttctgcatctaaggtttggctcttcagcgacagtatgacgagatggcattctttaattacagtctgcaatgcaaaggtacaaggccgcgccggggttctcgcactgtcacgtgacgatcgcgcttccccgccttagggattctcacacggttcacacgtctgcacagtcccgcggcaccgcagcc

SEQ ID NO: 149808 - DNA, 1001 bp, Homo Sapiens
ggatgtgaaaggcgtggtgcggctattgcatggtcaccgatcatggctgccctggtcaagctggcgtgtccaatgagtctgtcaaccagtctgccgctggcgctggagcctggacccggtcaattactggaagcgggtatggaaaccgttgtgcctgtggtctccgccagagggctcttattcaggcttcacgcactatggaatccctgctcctttcagagcctccagctcctgactttttgggactcctggttccatgaggcagggagctggctcttccctctgaggacactgggtctgggatgcagtgctgaggctgcggagcactgactgcccgagttcggaccgcccaccacccgcaggcccagctctggcagggcctcagagacaacccaagtcacaacccaaaggcagccaaagggctggggcctctgggtgcacctgggccatcccagccaccttttctgcagctcaagtgaagccagctaacttcagcagtcttcacattcaagctggcctcaggggggtctgtctttgagaaacattgaggaggcaggggctcatcaagcatcagggtgcagaaggcccaggcaggtgtggcatgtgctgccagagaggacagggctagaatcaggctggccactccacggaggagcttcactgggtgaacctgagcaactggagtgagacatcccagctagtcccaccctcagccagacagaggtttcctctctggagggagctggagggctgctagcctggcacagggtcctgggtcgggcagcacttgctcttcactggaatagttcctgttggtgctcagcatgacccccagctgaagtcgccatcctgaatgctcccccacgaccatgtcgctggtctcttctcccgtcaagccgagcgcgtgggtcgacgatatgcccgggagtaccggaccggtaccagcgtgcttgtttgtaaacagcgggtctatagtgtactatgctggggggtgggtggtg

SEQ ID NO: 149809 - DNA, 1192 bp, Homo Sapiens
gcagtactcctacggtttaaggtagcgaggcctgggtggcgaattcggcacgagggggatacctatgggctgagtctcgaggaactaggagagagctctgttggccctccagcagacagtgtgctgagcaggcacaggagcatgaggtggaaaccaggccctgacagtgacagactggctgcaggcccaggcagtgctcaaggaacgggaccaggagctggaagactctgcgggcagaaagtcagtcctcccggacatcaggaggaggcatgccctgggtcccaggtgctgtagggctctgctaggaggcccttggcaaggctcatgctgccctgcaggggaaagagcagcatctcctcgaagcaggcagaattgagccgcagtctggaggccagcactgcaaccctgcaatgcctccctggatgcctgccaggctacacagtcggcagctggaggaggctctgaggatacaagaaggtgagatccaggaccaggatctccgataccaggaggatgtgcagcagctgcagcaggcacttgcccagagggatgaagagctgagacatcagcaggaacgggagcagctgctggagaagtctctggcccagagggtccaagagaatatgatccaagagaagcagaatctggggcaagagagagaagaggaggagataaggggccttcatcagagtagcccaggctgcagcgggagctggagcggctacaggcagccctgagacagacagaagccaggcagattgagtggagggagaaggcccaggacttggcactctccctagcgcagaccaaggccagtgtcagcagtctgcaggagggtagccatgttcctacaagcctctgtcctcggagcgggactcagaacagcaaaggcttgcggatgaactggagctcacaaaacggggtccggagacaggaggcggtacacaggcccgtgcaccaagccagcagaactgggtcccgcaggggaccaggggtgtgcaccggggaaaggctcccagagaggagaggcggcccaaacctgaatgcattggcaacccgttcgggcgacaaggcgtgtgcccggcgtacacacgtgcccctggatataacgaaaacgtgtgcgcaagtccacggagcctgcgcgtgcacagcaaacgcatgcagggtgctacccagccggaacaagcagacc

SEQ ID NO: 149810 - DNA, 994 bp, Homo Sapiens
  misc_feature (702)..(741): n is a, c, g, or t
ccagtgcctctgtttgcgcccccaacccatgcccaaagcccccaagggcttccccaaaagagcttctcaaaaccggcctctcgagtctcactcctgggcaacagccacccaccaggtcacagggccggtctgccaagagggtccacctggcttcacctccagcaatggcccagatgccagacctcacgatagagccagtacagtgaagctctgtcacccagcactccgcaacacgaagaagtcctgcaggtccgggcatggcgcaagctcaggcactgccctgcaggtgacccaaaaactgctcaaaggccccgtaacggcgggcaatgtctctgcagtaaattccgcgcaccgcttacggggggaaggagatgcagccattgggccccggaattgccgctgcagtttcggtgcaccgctcaaagtccgagtaacggcgagagatctgggctggctggcaatctgcggtcctgggccgatcacggtgagggtgtagagttggagggcgggtccttgacaacgttagcgctggtcacttcgaagagcagccgctggggtgccaaggtgttccgggacttcttccagaaatcctgcagctgccgcgccaggagctgactgccccactgcccatcaggtggggggctccgttctgcgtcttctcctgacgtcccatccccgaggggcagctggtcagggccagcnnnnnnnnnnnnnnnnnnnnnnnnnnnnnnnnnnnnnnnngcgctggtgaagctgagggtgccgctgagtcgggaggacaggccctcggcgtcgtcgtcctccagctctgagctctccggaaactgctcggcctctggactggccgccgcctccccggggccgtcgccggccaaggcgtgccgcagccggtgcaggagccgggaggccatggcacctggggggagcgcgcgaccctcgtgccggaattcgccacccaggcctcgctaccttaaggaccgttaaagttaactgg

SEQ ID NO: 149811 - DNA, 970 bp, Homo Sapiens
ctcttatttgagatattaaacacttcattataaaataggtttgtattagatgatttgcccagctaaaggccaacgttaagtgttcagaacacatttaagataggctaggctaagctgggatgttcagtaggttaggcgtattaaatgtattttcaacttacggtattttcaatttacaatgggtctactggaacataaccctattgtaagtcaaggaacatctgttttctaacatgttatgaataattttttgtacaatgaaaaagtcataatgcccatataattctgaagttaacacagtaaagattccagataacctttacagatttaaaagtacaaacattttaatatacatataaaacctttcatattactttaaggtatatctacctggccattacaggcaatcacatattaagagagaataccattctactggtttgtgtgagaatccaatacctagtacctatcaaatatataccaataaaaattatgtaataacttaaaattatataagcactaaatattaactccaaaacatgacaccaaatacctgaaaaaaaatttactttagttatctcaaacacagccatgaatgaagcaattttctcaggaccctgaaaactgactcatttcccatcataacaaaccaactccctcattttacaaataaaaataatgttcaaagaggcaagaccagtgaccaacactacttctaatacataccaaatatgacctcacattcactgaatatgcaggaataatgcaaataagtagtgactgctttgagaaaacatttgaattttttggaagtggaaattaattattcaaaatttagatatgtcagaaaagctgggatgattgattttcacaccaccattatcgcgacgcgtggcgacgcgtgggtcgacgatatcccgggattccgaccgtaccgcctgctttttgtacacctgtcaatgtacaagcc

SEQ ID NO: 149812 - DNA, 1333 bp, Homo Sapiens
cgacccaggactagaggggcaggccctctgcgggcgcgagagccgagcccgagccgttgtcgggactggggcatggaggactgccagtggacggcgtaggggtgcagggggtcccggtgagcggagtgtcggtgctgagggaagaaggcgtcccggaggagcgcgggaccctgcggcgccgggctggccccagctccacttgacccactcggtcggcgaacttgagggagcagactgtctccccgagatcctccggccgcgtggagatctgcagcagcagcaccgcggtggtgcctgggcccagcgccggctgcagcagtcgcgtgagctgcgagtcgcggaagggcacgtgcggccggtgggcccgcagtgcggccatcacgcctcctagcgccagcagcgagcggtttatggtctgggcctcccgcaggcgccgggcgccgtctgggtctccccgcggcgggccggccgcccctgccttccgtgcgcgttcggatcccgccaggtccaccaggtgcagcgtgcctgcggtgcctggagcgcgcggtggagacgccgcgcgcagcgtcagcgtgaccagggcatgcgagcgggagctgcgctggttcatggcggtggcggcggtggcccggttgctcctccccagtttcagcatctggtgcaatgtctccaggttgggcacgtcccagtgggtgaggccagccacctggatcccgccctggccttctgggccctgcctcacggccaggcgctcgggaggccctggagcaaggaggtccctgacagcctcattgtagatctccaccatgctgagtgtcacccggtgctgccggccggcccccatctcccggaacagcgactgcagcgccctaggaactatgccggggtcctcaggagggccctccatgctgtaggtcttcccggtgcctgtctggccataggtgaagatgcagacgctgtagcctcggaggcaggacagcaccgcaggttccagctctctgaagacctcctcctggctggcgtctggagggaagacccagtctaggcggaatcgacgatggcgcccccggtagcaggtggtgacggtgccccctgggccaggctccacactcacaaggctagaagatgtccctggcctcagccgacacagcacacggatatttcccttgagttctggcagccgccctgggcatccggctgggggcccttgctgcccctcagggagctgagtgccaggccctccagatgacagtgcccccaaggcccagacacctggccccgggcctcactccgacgcgtggtcgacgatatcccgggattccgaccgtccagc

SEQ ID NO: 149813 - DNA, 488 bp, Homo Sapiens
ggcacgaggacaatttgagcataactttaaccataacttatgatagcataataacattcattagtaattcagtagccgtatgtgccaggctgtgttaggtgctttatatattgtttaatttttaaaaacttgtggagtgtacagattggtaaggtgacattgtatcacaaagctagtctttgagtccaaagttttgtggttttatgttatgatatacttttatcatggaattgtcttattaaatgttttgccagtggttcttaaagtgtgtttctgacaccagtagcattgacttcacttagaaacctgttagaaatacaaattatttggccccacccaacacttgagtcacaaactttgcagatggggctcaatctgttttaacaagcgcttcatgtaattttgatgcaggcctaagtttttgagccactgcagtatgcatttctatttttaagcaaagatcttggtctttctttttggacattgta

SEQ ID NO: 149814 - DNA, 1361 bp, Homo Sapiens
  misc_feature (56)..(69): n is a, c, g, or t
  misc_feature (215)..(224): n is a, c, g, or t
  misc_feature (430)..(430): n is a, c, g, or t
  misc_feature (432)..(434): n is a, c, g, or t
  misc_feature (436)..(494): n is a, c, g, or t
  misc_feature (499)..(533): n is a, c, g, or t
  misc_feature (537)..(537): n is a, c, g, or t
  misc_feature (775)..(1000): n is a, c, g, or t
  misc_feature (1026)..(1035): n is a, c, g, or t
gagagaggagaatttagccccccccttgttttctgcgaaagaaaagtgcgccacannnnnnnnnnnnnntataatattttgtaatatttgggaggtcccgcccttgtgagactccccccgtgttgagaagagaacccccgcgtaaaaggacccccccaagaaactctcccactatcggggagtttttgttctcggaaaacccctttgcggttttnnnnnnnnnngcggggtttgtttttatttggtggtgggggaaattccccaagcgcccttttgttccatgtcccccagggttcttccctttgggggaacccagctaatggcccccagtgtccccttttccccttatgggggccccgcgggccccaaaaggaaaaagtgttttagaaaagctttttttgaggggcccaagggcggccacccaaggggngnnntnnnnnnnnnnnnnnnnnnnnnnnnnnnnnnnnnnnnnnnnnnnnnnnnnnnnnnnnnnntgttnnnnnnnnnnnnnnnnnnnnnnnnnnnnnnnnnnnttcngtggtcatcttttattttaaactatcttctttgttcactgaaacatatacatttatccaaaattgtgctggttgctcttcctactgtatttgataaggtttataaatatcttggtggtggtcactgatagatgtgaattactcccatcagcacacatctatctgaaccaagacatttttttacgataaaatatggtccttcaaaaaccatgctttctggtcgggcacggtggctcatnnnnnnnnnnnnnnnnnnnnnnnnnnnnnnnnnnnnnnnnnnnnnnnnnnnnnnnnnnnnnnnnnnnnnnnnnnnnnnnnnnnnnnnnnnnnnnnnnnnnnnnnnnnnnnnnnnnnnnnnnnnnnnnnnnnnnnnnnnnnnnnnnnnnnnnnnnnnnnnnnnnnnnnnnnnnnnnnnnnnnnnnnnnnnnnnnnnnnnnnnnnnnnnnnnnnnnnnnnnnnnnnnnagagtgaaactccatctcaacaaagnnnnnnnnnncctatgcttcccttccatattgtaaccaccttgacacatttccttccttatcacacatttccacacatttgcttccttatctctttcactgagttttttctccatcattcttaagtccaggaagaaaagggctatgcaaattcctactcacctcaagctcccccaccccttactttctctaagtgtccacaaaattaaagttttatcttcgagaggcagaacttaagtgattgtacctacccattccgacgcgtggtcgacgatatcccgggattccggaccggtaccagcctgctttttatacacactgttctatagtacatagc

SEQ ID NO: 149815 - DNA, 1256 bp, Homo Sapiens
tcacgcccacaagactgtacatacagtcctgtacgttgatgctccttgcaattaatgtaaacaggcaagggtggttgtatacaaaagaaaaccaggaggaacccgaactggcatcacggcagtgtttgacagtcaggtggttgcgtggcttgtcttgtcgaccacatatagattaatttattttaataaaatggctgtaccacatgagcttgaataaagtgagatagctcagagggtcatcttgtatgggagaggtaaggtgcttggttggtcctgttgggcagtctctttacacaagactggatatggtgactgggagccaacggggggaagtctctaaaccctttatgtgaaggagctggtttgtagagcccagagtcagtcctgctgaggaaggaggtgacatctgcccttggtatttcagaagaccagagaatggattctaagggtcatccacaatacctttgctgtgggaaggagcaatagctctagatgggcctgcctgaggtacaagacttcctcttttactgtggggccagtgttgctctggaggtggatgtctaggcaggagatggttctcagagacacccaggattagtccttgtgtaaaatttgaataataacaggaaaaggatagtgggaagcaggacctgtcaaacatgaatgctctcactcttcagatactcaaggtgcttccattctgattgtgattctctctcatcgatgagatgccatctctaatagtccctacagttatgctactaaatgtgatctaagagaatatggttccacccagtgtggagccatgaaaaggccaatgttacagagacataaagatgccattgtagtagaaatgcacaaatgcatgtaataactgcacgcagacagtgaattcactgttgaggacacccaaggagtcactagcctcactcagacttcgttcaaagtgacagaacgaggggagtggagtgccaaaggagtgatccaggaaggggtgggtcaaaagtgcaaaacaaaggactctacgacaagtctcagctacagcaagtagtgcttgtagccctagaatgggaagatctcagaatctaggcctagggtactaaggacaatcatgacaattgggtaggagggcaacaacacatccctaggtgaaggagtgtaaatacagatctttttccgacgcgtggttcgacgatatcccgggattccggaccgtaccgcctgctttttgtacacctggtttaaatgtacaagcc

SEQ ID NO: 149816 - DNA, 1334 bp, Homo Sapiens
  misc_feature (109)..(109): n is a, c, g, or t
ggtatggggtcggagctgagaggaatgtgtgcggcaacagacgtgagggtgtttctccaaggagttgtggatcctcttcagtgtcaggggagcgtgggcatgtgtgagngctcaggcctcgccctcctctccactgtcatgcacgctggcctgtctcaccaccttccggaacctgggcgtagaggaaatgcagggctctccctgcccctgcccctgcacctgctcctgctcctggaaggcctgggtccggttggccaccacggcactgcctggagggtaaccactgactggcgggacttcagggcaggctgaggccccctgtccacctgctggcctcccttggtccttgcaaagctgtgggaaggggctgcagaggctcttcaatgtgaagacttgtgggaagagaagacttctggcatgtccctggtctctgaggtgctctccagctccaaggagggctccagaagactgatggacctcatgacccctcggaggtttatacgtggccgtggcccaggctcttctttcggggctgcctggctctcttccatgcctacaaccttctcctccccaccaccctcaggttctggcggaagaggtgggaatggtgtagagacttcaggggctgggtgctcctctggggagaccccacccactttctgctcccagacatggctctggcggctggccgtcaggatgccctggtagatctgcagctggcgcaggaagccagggttggggcgggcgatgggccggagctcctgcacgtggcgcagggcctgctccaggctgcattcgtactgcttcatggcataggccagcactgtggccgctgagcggctgacgcccatcttgcagtggaccagcacgtgggtgccctgtgctcttgcagcctcaatgaagcggtgcgtctccttccagtgcggcagcagctgggccgactcctcatcccagaggcgcacattgtggtaggtgaagcgctcagggtagaagttgtcaatctcccgggccatgttcaagatgtgggtgaccctgttcctctgcagctcctccaggtttgctgcgttccactctgagcccaggtagaggtgggggaagatgcgggaggctcggtcccgctgtgccaccagcagcagcatctggttgtcgatgaagtcacggtactgctggagggggagccccaggcgcagctccagagcctggcggatctctttggaagtgacactctccaggtcactgacatccaacactcttccacagctcagcacggatcgcctgctccatctgccgacgcgtgggtcgacgatatcccgggatattccggaccggtacca

SEQ ID NO: 149817 - DNA, 382 bp, Homo Sapiens
gaggttttctttacctctgggggctattttatgccggctctctcctgagtgtcacacatctggtcctcaggaaacattctcacatccctggcctgaaaaaaacaatttcagggagatcgcatggcagcagccctctctgggctccccagctaaatggttgtacgaaacacatttcaaagctctctgaagggcttccttgaagttcctttcactgggtttcaaagtagaaggtagtaactcctttgtccaagaaggctgaattgagcacttaacaattctccaaagaaatttcttcattggtctctatcctagaccccttctgtatccttgatatggctgaggattctaaaaaatgaccagtcttacatgggagggctgggat

SEQ ID NO: 149818 - DNA, 1013 bp, Homo Sapiens
  misc_feature (34)..(34): n is a, c, g, or t
gggaaaggagggccgggtaatggaattcaggccncccgggaggggactgagttcccagaaactgagtttgcagccagagtgccagccctgggccaggcggtgcaattccctgttggcgggagctggcgctcagctcctgagcctggggtggcaccgcttaccctacgcatggcctcccttccagccccggtgcttagactacggaagactggctccttagattgagattgtactggcctgggctgggacgggggcttcagatgcctcagagccctgggcggtccagagaagaggctgtggccttcccatggctcgccgcgcggggaggagctgacgcacacccagcaggtggttagcagctccagccttgctggactttgtgcctcagtgatctgatgaagggaaatgcttttggagtttagaggagggaaggcaggtgttggcagggcaggtcgggctgaccctataggaggcccaggatgtggcctgcagtctgaggctgaccctacgggaggaggctgtgccagagaatgggacggggcatggagtttaatgagacagaagtagcatttctcccgtgttcccagcttgcaggatagtgaagatgcaggagggccaggagtgcttttggctttgaaaaagagaacctcgcctgccggccaccaccggcccaggccctgggcacaagtccgttcacctcttgggattggtgttctcatctgcccagtgggtgcatcttaggtcactgcagcaaacctcaaataaaataagtgaatgtgccttaaagaaatgtgtgccatgtccagtagagatgcaagctgagctactgttcattgcctcgggcgcaaataagatgactgaaggatcggcggagcgttaggggaggacagggttcacactccaagaaggtggcagctttgggaactgtggagtttagcgacgcgtggtcgacatatcccgggaatccggccgtaccacctggtttttttaaccactggtctatattctatagc

SEQ ID NO: 149819 - DNA, 1131 bp, Homo Sapiens
  misc_feature (363)..(363): n is a, c, g, or t
  misc_feature (831)..(841): n is a, c, g, or t
  misc_feature (935)..(950): n is a, c, g, or t
  misc_feature (960)..(960): n is a, c, g, or t
ggctaaatttagaaatctattggaaacaaagacaaacaggaaagtacagaatagagacttttagtaaataaatggaatttaaaggaaagtgtttatttacagtgtcacgacagaaaaggatgtctttgttgtcatagtctttgagggatctccgtaaaatctggggcacaggtacaagaaatagccaatatttagttcccagaccatgtttagtagtgtccagtttcagatcatgctgccaagaggtatctccccctcaggtgggtcatcactgagccctggaattggagactcatacttgcccagcacaatgttacgggcagacaggccgacatctatgattagctagaagccataaagaanagctgctaagtggccactaggtgccacttttctgtttttgtaatgctttcattagcagatcttttttttccaagctccatggggcctatgagaggcatttatgatttttgtgcctacaataagtcagcctgtctggtgtgagttgttttatgagaaatgctttccaagggaggtctaggaagatcctgacacataagaactttggcttagagagctttccaggtgtagtgccaataaaaactgacctggaaagaaaacctgcccagcacggaacatgctttctgaactcacttgagagtgtatggtgtatgtcacttctcatatattcttgagtttagatttgtcttttatacaatttttagctcgttttccagttcacttgtgctcgtctgtatattggtatttttaaatttttgtggtaaataatgaaaagagtgaaattatattttataattactcatttgtagnnnnnnnnnnnaatttaataaacttcctccaaaaaaggagagggcgagagggaaaagacccggccccgcgcccgacagaggagaggcgcgagcaggccgcgaagnnnnnnnnnnnnnnnngggcgttggncccgcgcgcccgaagagagaagcctttggggggccccccctcgggcccccaaaaaactttttcaacactttcctttggggccggggccccccggggaaagggaaacatggggccaaatttggtcccaaaagaaaccccggggccgaaaatagggggtgggatcccccccat

SEQ ID NO: 149820 - DNA, 1398 bp, Homo Sapiens
tactcggacgagggaatatgcatgagtaagggtaaaaatgagcatgcaggtccacctgtgttcttactctgggtatctagaagagtcctcagctctccctactccacgctgcctagacatacacagctgcagggtctggctgaacaatcaaggggccgccagagaaaggccatctacggtgcgcagtgtatctggagttgctgggcccaagatagctctgtggagttatcactagagatgcctctggattaactaagaggtgtgcctgggtgtgggtgatgagtcagaacctttgagagctttgagatgacagtttctatggtgcgggaagaaggaggtgcatttctacaaacacttccctgaaatccttgggaaaaacagatgcatggccgtggccaactctgtgggaactggcgcctctgtccttgttggcactgttctcagtccgatgacttgcattgtgttttctccaatttttgctgggattttaatgttcagcatggtgggaggaacccttgattccttttgtttgagtatagaaagtaaatttttgaggtcatgatgtgaacggccatgttattgtgattatcttcagctcaggataggctgagatgctttgtggagtgttccatgaagcccgagtcggaatctctgactgtcgtgtacagccataaggagactggtttgaattactgtggcgagacagggcgtgcctgtcagaaatctgagatgtttgtacgctctgagatgttgaacctttctggtgggcagcaccgacacccaggggtggacccccgaggatgaatgcctctaggcctccgcaacatattcaagaatgaatgggagacgctagagtaaaatgggggcagagaggatatcagggagcaagatgcaaactgtgtgcatccactctcgtaaacaagtagctggtcacaaccagaaaggttcatctctcctaagcaaacagcgactctttcagaggaagtttccctctttcaatcgtggccttattttcaactccggtgccttctcgtgatgttaatcatttcctttttttccccacactaagctctcttttctatctttctctctctttccaatcttacgccatggccatcagttcatttcagccttccagtgctacacccacttcttggctgacacacttctgctctaaggtgactggttttcttgccaattttcaaagagtggtataaccccaaccgatttcgcaaccgtactctcgacaggagtactgttgatagtgtgagtgttgatatgtgatatttgtggatggttgtaagatgaggggtgttagtggacacatgcgtgtatccagggtggggttacaggatgcggtttttacgggtgggggagacaggagagacactgggggac

SEQ ID NO: 149821 - DNA, 857 bp, Homo Sapiens
cgctcgtgagaactcaaggccccttcacgtggatatagatctctcccactctggattgcactggccactcccaggttgggtcaggcttcaactgaggatctgcctttctgccccacttgtaacaagcctcaaacttttctacgataggatctcctcccaaacagggaacccgggtttcttgagctgccagtccctcaacccttggcagtgcttatttataccgtgaaattagcaccatcattacattttattgtgtgtgtgtacaaaacaatgatctattcttatttcaatttacactatagcagcctctggccctgttgcactggccctaggaagctcagctgagaactaactggccatagccaatgacaggctcccacagcaactaccaagcagtgacttggaatgtctacacatggaactgctcaaatgagactcagcaagaaaggggctggaggcagctccttctctgccatgatctgagagaggttaggacactgggctcctctaacctggctgataaaccccaagaggatgacagtatcatttaaaaaaccttagtaaaatccaccttatagggactaagggtaaaacctatccaagtttcatgctgtcctcattactccctatgggggaatctgtcaggactaaactttctgccattctgttctcatgaggcaacattagaattacaacctgggagtccggctccagtgagcagacagtgccgagcctgggaagggatcaacagggtgtttcatgccctgaccatagtgcgacgcgtggtcgacgatatcccgggattccggaccgtaccagcctgctttttgtaaacctggttctatagttcactaatc

SEQ ID NO: 149822 - DNA, 1196 bp, Homo Sapiens
ttatcttcatccagtaatcctaccaaatggtggggaccctgagcccagctctgaccaggtagagcctgtgcagcctgggctgctgtcattgccctccagtaagggctcagggttttgcttttagtctccccttccttctgccttgggggcggtactctgtggagctgcttaggcctggaaaggtacagtatgtagaagaggactgtgagacgtgagttagagggagaagatggagggaatctagggaacgaggcagcctattggagatgcggacaggacagacacgttgagaagctgcagggagcagggcaccaagggagtgtgcactgtgcttgctcagagagggcaaaccctgctcccaggctgaagcctggagtctgcccccacttcccttttctataatccacccttctgcaggccctgaaatctgaagggcttagttagtaccttgccactctacccccaacacgtcacccgagtagaagctgggcaaggccctaccatcctggccgtctgttcacaagcccaaggtgctagaactagcttaggagacatgcaggccacagggcttctatgcagggaaagggcacacaccctaggtcagcgtgcagagcagtgatgctggaggacacaccatggggtgaagccatcccaaggctgacagctcagtcttcaccttgcctctggccttgtatttcacaccctgctcagtatggctagccagcagtcctgagttggagtccaggactcccactgtctcaatctgcaaattgttcctatccaggttcagggccttcagggggcctcttttcattttctcccacaggcctctctttctttctaggttgctggggagcaaatgggtaccctatgatcccctccccttctcctccagtaaatacctggaagagggaacctgaatcctgggggagaccgaaggggcagggccacagcctcccccttcttgtggtgagactgaattttgggctcagacaccagcaaagcctcttgggatgccctgaattgcctcccattcctctcctaagccgcttcactatgtgtgtcactcttcctaagactcttacactttggggcctatgcacattggtctcccttccccaatttagtccagctccaagcagtgagctggcacactcgcttctgaggaaggcgtgctctacttaccagcagggctg

SEQ ID NO: 149823 - DNA, 2560 bp, Homo Sapiens
gaaagggaaaaggaaagggaaattaaaatgggtgtgtggggcagaaatttggggggcttttccccggagccaaagggaagggggcctgcggaagggggcccatctgaggaaggcagtagggtgtgtctcccctctgagccccccatggtcccgagacctgaggatgtgatggagccggttgagggtgttgcctgcctgggcaggaggaagcggagcagaaggggggtctgtttatctgctagtcatttcagccacagggctgctcagccaggggaggggctgggggccctgccaggaattagtgtgtgtttgcgtgactgtgtaggtgccctctcctgggaacgtcaccttccatgagggcagatgtatttgtctattttgttctctatggtaatgcccagtgcctagaacagggctgggcacatagtaggtgctcaataaatatttgaatgaatgacggatggatggatgcctgcgtgtgccagtgtgtgtgtgatgtgcctaagtgaacgtgaggctggaggtgtgaagggcggacagagaagccttgtccctcccgtggtcccctctaaatgcttccaccggggtgtctggcggtagtgaggagggagacccccggtccttacagctgggcagggagggcaggcagggcgtgtgtgagccggagcaggggtgtgcgtgcagccgactggagctggggagccacagcagggccatgggaggggggcccggctcactcggcggagcccttgtggcgtcgcttggagggtggcaccaggcgacggggcaggttggcgggcagcccgtggccttccagcttggcctcgatgaggtggctggccagcgcgaactcctcatcatccagcatgccgtcgcggtccacatcgctgagcttccagatgcgccccagcactgagttggggagcttggtccccaccatccaggtcttggccttggagccgctcagcttgccgtcggcaggcgccaggttgtagaagatctcgtcgtatttggacttgtccttggtcaccacccactcggcctcgtcgtccgagccctcctcgccgtcctccatggcctcgtcaggtccccgctccacaacgggcccatgtgggtgccctcaaaagcgcccccctgcacgcccacctcggtgctctccagctcctcctgccgcagcaggggcatgagcttggcgatgtcgtgcgtcagcatctcgtccagtgcctccagcagcttcggcttcagcgagtgaaacttggtgaagtcgtgcgccatcagcagctcctgcattttctggcaatcaggaaagtccccaggggagatgtgatgttccagctgaatcttcgcaaagatgacgggcagtttgaggatcagctgcttcttcttgttctccttcccaaacacagagggcatctccttcttcaggtagctgatgatgtaagcgtgaactcgcaccagccgggccctcttcaccaggtcgttgagcttgcgcaaggctgcgtgccggggcaggccctggatgtcgcggaagaggtcctgctcctccagctcgaagaggcgccggttgtcgggcacgaggaggggctgggaccagaaggagccgatgtagacgcgcagcacctcgggcgtgcccaccaccttgcccagcgcccacatgagcgcgccgtagacgcgcatcagctgctgcgtctccaccatgtcggccttgttgagcacccacgcggatcttgtcctcatggccccgcaacgcgccgatggcctctgagaactcgtccgagatctccagcttgtgcgcatcaaagagcaggatgatgaggtccacgcgctccgcgaaccagcgcagcacggccgggaagtcgtagccgcggctcactctctgcttggcacccgacaggatacccggggtgtcgatgatgctgatgctctccaggacctgattagggagctgggcacacatgaacctgttgaggaaggtgtttccgaaagggttgagtttgcggaagggcttgtccgggtccacgacgagggcgttgccgggcacggtgccctcagtgtccccgtgcatgacggccacaaagcagtcggtggtgggctcaggccccacgcgggagccgggcacctcctgctccagcaggtactggatgaagctggtcttgcccgtgctgtactggccggccaccagcaccatgggcttgccgtcgaagtctgcgtcctccagggccagcgagtggaaggccccaaagcggtagtgctcctccagcggcagcagcttcgtgcggtacagctccttgagggccgaggtcaccgtgcggatggcctcgggctgctggccccgtgccccgccccgcttcagccagctgaacatggtggctgcacaccgctcacggggttcacggagagacgtgcagatggagagctgccgacggggcgcgctggcggctgcagcgggctgggcaggctgggagagggtggggtcccgcgaggatccgaagcgcccgcggagcggcctgtgctcgcggtcccctcgtgcggaattcgccacccaggcctcgctaccttg

SEQ ID NO: 149824 - DNA, 1380 bp, Homo Sapiens
  misc_feature (128)..(128): n is a, c, g, or t
  misc_feature (179)..(179): n is a, c, g, or t
gggaaaactttttttcggtccaatatggcctgtctgaatgggaaggaagttcattctgcatttccggtatcctctcccttattcttccctgttcgctgtcatcatctgacttcgggcttccggtttgngtccggacgcatcctccgtttctgagtcactgccaggcccccctctgaggncccctcactctcagagtcactgactcggggtttggggtagctcctcattttccgaatcactggcctggttccttgggggatcctcactttccgaatcactgattcggggtttgggaagctcttcatttttctgagtcactggcctggtgcctcggagggtcctcactttctgagtcactgatacgaggtttgggaagctcctcattttcagagtcactggcctggtgccttgggggttcctcactttctgaatcactgacctgaggtttaggaagctcctcactttcagaatcactcattcgaggtttgggaggctcctcattttcggagtcactggcttggtgccttgggggttcctcactctcagagtcactgatttgaggttttagagcatcttctgtttcagagtcactagcaggactcttctggagctcctcaatctcagaatcactggcgggatgcttcccaacatcttcgttttctgagtcacttgcatgcccattaagaagttcctcattttcagagtcactaccaggtaatttcctggtctcttcactctcagagtcgctcccatgcctgattgacatcctcattttcagaatcgcttgcaggaggctctgcacgttcctcagattcagagtcgctgtcctttctgcctagtgaagctcctcactttcagagtcactagcattaagatttaagggctcatcgttctcagagtctgtcacatgatgtcctttggggaggccatcttctcgatcactagtttcattctctgaatgacgttctacacttccagtgtctgatccggagtgttgctcatttacatcatcctcaccgtctgaccctgaatcccgttcatcctgtactggggtagcaccaccatcatctgactggtcgccgctgtaatattccgagtccatggcaggcggactctcaggcggggagtgtccgcgccccgcgccgcccccgtcacctccttccaggcggtgtgaccccggatggcagcggctaagtgttcagagactgccgcccgaccggagaacttaacgggtgcggagggtaagaaagcggtagcggcaaaggcgaattctttgacctggaagccccggcggaaaagccgtacccgcaggctggcgggcgggcaggcatgcgcgtacgcgtgggtcgacgatatcccgggaattccggagcggtacca

SEQ ID NO: 149825 - DNA, 1046 bp, Homo Sapiens
tttccttgcgctttctgtgccctgtggtccgtgaatggcttccatgcgaggtagccatagtccttgtggacccccaagaccatgcctgtggtgtagtaaaacgtttcaacgtttcgccaggtgaagatgccgcaccattgaaaattccagcttcagtacaccctgtcaacgtggccccatgccttccaggggggtggacccattagggttgaggatcaacccaagtcacactctcagttaaaatccaggtttggacatgctttctctatgtgctgcacctctctacctgcacacaggcttgggagagtacggtaaggagaaggagcactcctctcctagctcctgagagagcatcagataatcttgcagtatcaggctggtaaatgcagtggtcctggtattgggtgactttctgaactgctctttaatgttcttccagcattcctccacagggtaccatgactgggatgactacgcatccagtgatgtggatcttagagatcaccatagtgagacaacacttgttgccgtaagtctgagtgattggggtatttatgtgtatgtcatggctgcctggggcagagaatctacccactgccctctcctaggtttggctctgctggcctgggtaatgtgctggggaacacatgcccacttgttgccttctagatcaactactttctcaacctgacttctcaaggtagtgctccaagtccagtgcacccaagacagcctgatccacttagaactgtgcccaccacggggagtcctctgggccagggggatgccccagcttagactctcctagggcctcctgaagactgaagggacagggaactggcttgtggaaaaagctacattacatttttctacctgtcttaggaagggggtgagctctgacagcaggattggcgctttagcaaggactaatagcctggttcacagatgttaaaacacaccgacggcgtggtcgacgaatatcccgggaattccggaccgtaccagcctgcttttttacccactggtctatattacctagatgcggc

SEQ ID NO: 149826 - DNA, 1275 bp, Homo Sapiens
  misc_feature (668)..(688): n is a, c, g, or t
  misc_feature (699)..(699): n is a, c, g, or t
  misc_feature (701)..(701): n is a, c, g, or t
acttttagggggcccctgttgtggggaaccagcgtgttggacccgaagaagcgcggggtcgggttgcccgttccccggatttttctccggggaatgtttccttcgggcctccaagggcggtgtcgcgaagtgccccttctgcaattgtatgggtgtaagacctgccgctgcccctcttgcggccccctctttagaaccaggggggccccgcttttcttcagcgccgctgctcgttgaatgttggaccccgtccccggggccctttagcccccaattgtggaagttgttccaaggcgtgttcgccactgttcgccaatgtcaacgcccttgtctccgttctagtgaacttaagggcccctatccgtagtcccccgcagccacgcccccgttgtgcgcgcatgtaggtgccgccgcaagtggagttggggcccccccgaagatgttaaacaccgcgagggtaatggccaccagtgtaccccacaaggggccccaccgcaagcacgcaaccacgacgcgtgtccccacgaaaagggccctttgcgatatccggggattatatttcctcagtgtgtatgtacccctccacgaagatttttttgtttcttttcgccacggactttttgtgctggagcggctctttagacccacacttcccacgcctctatggnnnnnnnnnnnnnnnnnnnnnatttatggagngnggccacactgggcccccccacacacacgggcactccacaccccgcgctataatttcccccctcagaagtgtccccacactcctctcaaaaacacacactccgcgctattaactgtcgcgcactccacggaaggtatatcacaatcaccctcgagggcttcacccacatatggttctatatatagggaaaccacacccgcagaagccccacatataattcacagccacctggcgttatttacccaatgtttacactgggttctcctaattttacccctcctaccacagcctcacagaggtaacttcgaggtcttcccttcacccacatttccgaccggcactttatcgggtcacaacacattttttgtaagccaccacacggcttccaccggagcttcaccgtcacttattggctcacactttcctcacctattctgcttcatcccccacactaatatttcacctttacactcccaacactcacctttggcttcgaaagccccgccctgatactggcacttttgtagatgtggtttgactatttctgtatgtctccatctattgatgagggtctt

SEQ ID NO: 149827 - DNA, 1285 bp, Homo Sapiens
  misc_feature (120)..(132): n is a, c, g, or t
  misc_feature (312)..(342): n is a, c, g, or t
  misc_feature (615)..(615): n is a, c, g, or t
gtttgtattgtcggtagcgatgtatgtcgcgtcttcgcgttttcccggcgctgcccagcgtgttgtgtgtgcccgtccgtcctcttataagtgccgccccacctgtgtgtccgataggtnnnnnnnnnnnnntccgccggctgggggggctccccacatagtgtggtccctttcgctcgcccgccgcagggttagtacgttctggttggaagatcgctgttggcgacggcgctctagtttggggtatggttatatatcccggccgcctgctgcgcctgccggttcctagttggttcgttgcctggtactctnnnnnnnnnnnnnnnnnnnnnnnnnnnnnnntcttttgggtcctcttgctaccgcccgccctgtgtgcccccgtggggtgaacgttgaattccgcccctttattttgttagcccctattaagaatttttattaacaactcaacgaccgttcacacaacgtctttgccgccttttatctggcaccccatatacaccgcccggtagacgcgttttgaaatattcctcgcctttcccaatatcggcgaaataacactccgtgtcccaagattcgacaacgccccacaaatataggcccccccttctntgtgaatgtgtacacccaccccccattttcttccatacccctataacctcgcccctttggagaagcgtcttccaacccggcgcccaaagtcccattttctccataaagatttccgcccctccccggacattttacaatcctcccatatacattatatttctcgcgctttacgccaacatcccaaatctatctcgcaaacgccactcttcaccacttttcgccactcactaaatgccttcttctcacaggaaactctcccaaaacttttaactcccaccttaatagacttttttgtaatgaactcttctagccacagaccctcgcctataacctccccttatccccccacctatttatacacctatctgggaggaaacttcttctgtgtctatgtaacccaccgtttttcctgattcacaaatattcacacttctcctaacttaccacggaactcacacacacatatctatgtcacccgccctataactcccttttacatatgttaccaccccacacacacatggggctcaactcacccacccaccacttaccacaccattaaacccctcacttcaccaccgaggaaaacacccctcaatgttcataccccctatcccccattttcctcctatccctcaaccccgacaatcattaccgggttttcctcttt

SEQ ID NO: 149828 - DNA, 959 bp, Homo Sapiens
cgccccgtgacctccaagttcaagctcccggtactaatgccccttgtaattgtccgcatctgacaactcctttagatctggtcaacatggtctggttcaatacttgaaccctgagcactggaactgggtctcctggtagggacgttgatgatggtcctctcttggaaggcaaattaggaaaatttttcttccaggatagaaagaatttcctcctgcttctctgagatcttctctgattccatggtcatccactttgaaaagaatgctacctctgaggcgatgagccagttgctcggtgatgagctcaggagcctcttggagaatctcctttagcacgagagaagaggaagactctcggaactcaacgttggcatcgctctgctcaaccggattaatgactttgacaactgctgattctaaagttttgtcttcacttgccagcacactgctgccaacaagtgttatcgataacttcccttcatcatttagctgatgcaggttaatttcatcccggaatatgtggaatgattgggaaatatttagctcttctaaaataaacctcgtctcggtgaagtagttgaattcagttcttggtatgttcagcactggtaaacacagaacccctggtggactgaccttgtctagaaagtaagtatatgtgaaggtagaaatgagagaatccaagtcacacgatttaggcccaataaccacatggaccttctccaagcgtttgcttcgattcagtttagatttggcgcgttgcaaaaattcttccatgtcgtggctaggggtttggaacccgggtactgggaggggcgcagtggaaaatctcggcccaaggaagacgagcggggtcccgggaaagtggcccgccggggcgcagcgaccgactgctccctcccctcgtgccgaattcgccacccaggcctcgctaccttaggaccgttatagttactgcc

SEQ ID NO: 149829 - DNA, 932 bp, Homo Sapiens
ggcagtaactacaacggtttaaggtagcgaggcctgggtggcgaattcggcacgaggacttcttcgaccgcaaccggcccagcttcgacgccatcctctactactaccagtccggcggccgcctgcggaggccggtcaacgtgcccctggacatgttctccgaggagatcaagttttacgagttgggcgaggaggccatggagaagttccgggaggacgagggcttcatcaaggaggaggagcgccctctgcccgagaaggagtaccagcgccaggtgtggctgctcttcgagtaccccgagagctcggggcccgccagggtcatcgccatcgtctccgtcatggtcatcctcatctccatcgtcatcttttgcctggagacgctccccgagctgaaggatgacaaggacttcacgggcaccgtccaccgcatcgacaacagcacggtcatctacaattccaacatcttcacagaccccttcttcatcgtggaaacgctgtgtatcatctggttctccttcgagctggtggtgcgcttcttcgcctgccccagcaagacggacttcttcaaaaacatcatgaacttcatagacattgtggccatcattccttatttcatcacgctgggcaccgagatagctgagcacggaaggaaaccagaagggcgagcaggccacctccctggccatcctcaggctcatccgcttggtaagggtttttagaatctttcaagctctcccgccactctaagggcctccagatcctgggccagaacctcaaagctagtaatgacgagagctagggctgcctcatctttttcctcttcaatcgggggtcatcctgttttctagtgcagtggtactttgccgaggcggaagaagctgagtcgcgactatctcagttatccccgatgtttctggtgggcggtggtg

SEQ ID NO: 149830 - DNA, 922 bp, Homo Sapiens
cggtagagaggccgggtttattcggcacgagggcatgacatgcccatccacggggatccctgaggacatgctcacccacatcggcagtgtggccagctctgtgcccctggaggactttaagatccacactggcctctctcgcattctgcggggccgtgcggacatgaccaagaaccggatggtggactgggcgttggcagagtacatggcctttggctccctgctgaaggaaggcatccacgtgcggctcagcgggcaggatgtggagaggggcacattcagtcaccggcaccatgttctccatgaccaggaggttgaccgcaggacgtgtgtgcctatgaatcatctctggcctgaccaggccccgtacaccgtgtgcaacagctccctctcggagtaccggagtcctgggctttgagctgggctatgccatggccagccccaatgccctggtcctctgggaggcccagtttggggacttccacaacacggcccagtgcatcatcgaccagttcatcagcaccggccaggccaagtgggtgcggcataatggcattgtgctgctgctgccccatggcatggaaggcatgggcccagagcactcgtcaggaggcccgaaaggttcctgcagatgagcaatgatgactcggatgcctaccctgcattcaccaaggacttcgaggtgagccaagctctatgacttgcaactggatccgtggtcaactgctccaaccggcaaatacttcccgtgctgcgccggcagatcctgtgcccttccgcaaggcgtggatatcttcacacctaaatctctgtgaggcaccccagagccaagtcaagtttgaccaatggatcgggacagttcacgggggaatctgaaaggggcgcagaggcctgcagtgacggtcacctgcaggaaggaccg

SEQ ID NO: 149831 - DNA, 1121 bp, Homo Sapiens
cctgcatgtgtgtgtctctgtattggcatgctataaacttgcggtgttctcatgcgtgagtgtgattcgtacggttatgtgcgctctcttaaggctcctctgggcaggccctctttgttgtcggagctccctttgggtgcacgactttacttgtgtatgcgcactttgtggttatcagcgtcttctacagaaagacgtttaaaggacccaagttggttctgggaacacccccaacatggcccctgtaaaagttcgaaaaattttccctcctgactgtcccgcggagttgtaatcgcaacgcttatggggaaacgccggtgcccaccgaagtagaaggcgccggtgaagtcccagccgtgcggacgttgtccaccggatgccggcccgagtggcctcctcgtagtgccggaggaatccgcgcagctcgtcgcggctcaggttgtggccgcggctgaagttggccaggcgctcctcccagcgctgcttggcctggcgctcgtgcgccagctccagcgcggagaagacggcggcgccgcccagcaggtagagcacgatgagcgcggccagcagcagaaagcgcgcgttgtcctcgttcaggtggcccgggccccagctgaaaccccggccagccatggccgggcccccgggggcagcccccaggcccacggcaccgggcgtcggcggagtctcgcccacacccccgggaaataagggccccggcgctcagccagctcccgggcgccccaccgccggctcgcccatgaccgccgggctctcccgcaggccgcgaggctcccccggccgccgcctcggtagctcctgtggcgccagctccccacgtcctccttgactcctagtttcaaatccgctttgtcgccgccgttcccctccactccccctgctctcctcggagttctccttaacgctgaaggtcccggggaacgggcgcagagttcacgtctgcttggcgctgggatgcgggcgcagtttccaccccggctccctgtccggctcagataggggagggggcgtggcgcgtcttcagggcaagctcgagccaactcgagtttcccgcctcgtgccgaattctaaacccagcctcgtacctagccgtaagttta

SEQ ID NO: 149832 - DNA, 1288 bp, Homo Sapiens
tcgtcttctgctcttggttggtgttctgctgatctcctctctagcattggcacgcatcacgtctcttctctttttgtggttgcctgcctcacaccccgtctgctaccgtggtcgttagtttgtgctctggtgtctcgcgtgacccagcttgttttatcgccccaccatgtgtgtgggcccacttttccccgaccggtgtggttgttactactctcatgcgtggatctggtgcccaccagacggccccccatagtttatactgcgtgtgtgctgacaaaccgcttgaaagaagggtcttttgggttaccgacacccctttagggggaattctgggggacacactcacggccagttgcctggcgtgccgtaattttcccaccttgctcagccccaccgactggggacctgtggcacttgtttgtgagagcacggccagatttgggatgctgcaaccaaagtgtaccctggacgagtaagccccagtgtgggatctggtttttgggtctgccagtcacaggctctgtctttgcgatgggatgccatgggaaacgctaggattttaccgggtttattaaattgctgagtggctaaaaagattcctgtgggtggggctggcttatttctcttagacgatgcccttctgagggtacatgtggtttttaggaacacacaagattccaagtccctcatgacaaacacaattccggatctcttcctggaggccttgcaaggcggggtccaggctgctccctaggagggccccggtgactcgagcttgttggcgatcatctggctgaccttgtgcagggcctcctggaactgggggtactcgtcccgcacgcggtccaggatggtggcgatgagagccagtcgcttgtccaggcgctggcgctccagcactagggactgcttggagcggaacaggaacacgtagcgcccctccttcacagcctgcaggtgcttaaggcgcgtctgcagggccacgatctctgaaaggttctgtcgtttgagggccccaagccgggtgaggtcggcctcgagtgtgtcgaagtctgcctgaatcaccgacagcttttcctgcttctctaggagggagctgctcacatttctttgtgtttcttccagttccaggacggttttggtgcactcgtcggtggccttgcgaacgtccctgattttccggcgcagctcaagctgcttgtggtggaagtcggtgcgggtgagcgccttcctgtccatcttgccctcgtgccgaattcgacacccagcctcgtacctaaccgatgat

SEQ ID NO: 149833 - DNA, 887 bp, Homo Sapiens
tctcaagctctcaggttgttgaaggaagagaagatccaccagaagatgaccctgaccagacaagctggaccacccgatttaccaggttccaactgttcacctcagctctgctgtggacaagagctggtttggcttaaagctaacatcctcagttcacttccttagagtaaccagtcagttcaaagtggggaaaaaacagggcactcgacagatggatctcagggcagggaggaagagtcagacccacctgtgcttgtctcaccgtgtgggtcagtttcttcatctgcaacatggcttatgttggaatccatggctgtacaaagttcttccagttccaaaagcccatgaacttggacttctcacagatttcaagtatttggacctgagactccaagcaggtcacccaaagattcagaactcagaagctcccctaatactcagccttgccccccacaccttgagcctgagaaaggaaggaagaagagggaagtccagagggtgcagaattcttcagtggggaaagaggatctggagcaggtctctggatcccttagaagcaaggggctgtgggactgagctggaagcctcccccaggggtctgtgaccatggggcccggctaaaccctacttggcaggaatcgctgaccactgtggggcccacccagtccagctgctgtccactcaagcagcggcaggtgtcaggtcacacccaggcctctctcttcccctcccttcagagctaccattgtgtcaggccagcccggtgcggtgtgagctcctgcccttccaccccttgtcctatacccctcttctcccatgacttggaggcagcagacaatcctgtccccttcccctcgtgccgattcaacacccagcctcgcacctag

SEQ ID NO: 149834 - DNA, 852 bp, Homo Sapiens
tcgcaaggccacccgttctaagcacacggcattgatcaagttttgttcccatgcttgcccgggggttaattggcctatattttgggcctccagccattaatgaattgcattatcttcttcacctgcaatttgctcaatttgaatcctctgagaggatttcttccgttagctgaacaagcaggttcccatcaatcttttcagtaacaaagaatgatatgacatcttcggacaaaccaatgaaccgtagtgacttggacacttcctctatagagagtcctgataggtcagcaggtggctgccatggggaaccgtcgccacaggatctgggggccagctggagatggagcggagatgagaaagggtaggaggcagagaagatgtcctgcatgccctttttaacaaaatacttggtcctccgagagatctggtgacccagacttggggtcttcctcagcaccatcaattttcagaggcaaaggagatgtttcggaggcgaccttctcttccactagttttggagccctggggggtaaggcagggcatgacgtactctgctttgtcacaccagctgcaagagatttcacatctgtgctctccagagagtagctggctgacttgggacaaccagagacgctgctactgaattctgcagtgactgggctagtggggctggccaggagctcacagccatcaaaatcaaaaggtgctgggcagtttctctttggtgtgcctggcgtcttttgtctagggtaactataactcctgcttggatccagcaggaagtcactcctggcctcgtgccgaattcgccacccaggcctcgctaccttaggaccgttatagttactgccg

SEQ ID NO: 149835 - DNA, 1050 bp, Homo Sapiens
  misc_feature (117)..(129): n is a, c, g, or t
accaaagagtgttgatcccctgggggggccctttttccgtcccctttgttgtcgggccatgctcccttcgcgtccccggattcccccgggcacgagacccgttcccgtgtggggctnnnnnnnnnnnnnacaggtggaaaaacacagtgcatcggttcgtcgagcctgaatctcaagccacatggggtacagctcgtccacccatctttcactgccccttcagtagctcatcggcccctcataggtctgactcacctgctcctccagcgtgaaatctccagcctcagttcctgcgtcgtcactctgtattcttccagggtctggccaggctctccacatcgcgagtgcgctcagagaggatggtgtctctttggcaaatgaggtgttcacactcaaagagctgccgcttcaaagtgtccttctccatggccagctcctgacttctctttttcactccatcccgctcggcaagcagcttcccgttctcctcctgcagagtctccatctcagccaccagatgctgctgctccttttccgcctgccgggcttgggccagaaggctgcgattctgttcctccaggctcctggccagagtcttcaggtcctccagctcctcatccatggccttggcaaactgcagggcctgctgggtgctgtgaagctgcttacgcagagccaagatctcctccccaaggcgtgctgacccctcctcagctgtctccatgctccgctgcaatttggcattctccccaaccagacgtcggttgctgagctccaggtcctccaggctgctcagcaggtcagctgtggcttgtagctcgggtctggggtcttcgcctccgaagctctccaggttggctggctcctcagcttctgggcatccagatggcagttgccgggaggtcagggctccctggaaggcggtctcctcttccagctctaatcccctgtatcaaagggatgaggcttagcgccccactgtagctgcccctcagtcctcaccagccaccctcgggccgaattcaccaccaggcctcgtactagcgcttt

SEQ ID NO: 149836 - DNA, 943 bp, Homo Sapiens
gccttgggtcccgcaaagggtttggcttctggagtaccactggatccgaatgagtgcgagacgacagggtacgtcagcacaacggagttcctcatcctcgggccgacgtcatggtcaccggcttgggaacctgcgacatgggaatgtgatcctcttcctgggccgcccctcgaccccattcttataccacttgcccgtcactttcgtcatcaagacacctcgcaacttgaacacagcttgttctgagcctttcaccgtcaagatccgcgatgtcctgcaggacctccagctgtttctcttccacaatcagctcggcctcacactgccgccattggttatgacctgatagcgacccctgtcctcctggaccacgtctgagaagatgaggatgtggcgcttcccgtccttcttgaagcggtaccgggccttgaaggaatcctcccgagtcagttccacaccatctttcatccacatcacactgggcaccctcttctgacacctccactgccatttccacccggtcacccacaaacacctgctggtcctcaagaggtgtgacaattaggactggaggttctttgacgaagagctcggtgaaacacttctcatccttgacagctacttcataggcagcgtcatccgccagcgtgcacttgttgatggtaagaattcgcttcttaccaacgttctcaaacacgtacttgctgcttggtttgatctcctggccgttcttgaaccacttgagggtcaggtctgggtcgctgatctctaccatcaacttgatcttgttgcctctgtccacttggtaggctggatccagcttctttgtgaatgctgcactcttcttgacctcgaccttagcctttttcagccgcttcagcatgccccggaggtcggtgatgccatactggaagcgatttccctcgtgccgataacaacccgg

SEQ ID NO: 149837 - DNA, 1001 bp, Homo Sapiens
ggttttcagaaccattgcaggccaagggaaagcccgagccacagggtggtgaccgaggcttttttggagccctcctctgccgtaccaagagagtctccagcgcaccagttaggctaggcatcttcccggccaccggcgagcagaacaatccgccgtcccgagaagcacaccagggggaaacccccaggaaattcggtcaatccccatgccaacatacgtgccatcatctgaatctcttggcttcattttgtgctttcatatttttcagcatatacttgacactttggatggcttctttgatttctggtgacaaagcagagaggacagcacagcatcaacagattcagaactagagcttctcgtgaggttagcactgaaattggagatttttatcctgcggtggtggcagtaaccacacatcccgtcctggcaggggtagccctccttgcagcctttggactctgcgcggctgaagcaattcagatttgagagctcggcaccgtagaggggcctcggcttctgagcgttgccctcgttgcttgttggcctggtcatgaacatgaccctggggagcaggttcaagaatacagtcttcacccatgagggcattgtgtgtgtcgtcggggttctgtagtgcacgttgagcacgaagacggtgatgacgatggacaaggttacaaaaatcatggtgaacaggaggtactctccaatcagggggatgaccagcgaggtggaagggatggtctcagtgatcaccaggaaaaacaccgtcagggagaggaggacagaaatgcacagggtcaccttctcaccgcagtcggagggcaggtagaagacgagcacagtgaggaaggagatgagcaggcaggggatgatgaggttgatggtgtagaacaagggcaggcgccggatgtacagcgagtatgtgatgtcggggtagatctcctcgcagcagttgtacttgatgtcgtgttgcctcgtccgattaccaccggcctcga

SEQ ID NO: 149838 - DNA, 615 bp, Homo Sapiens
caatgagagaagattcctgtaattctccagcatcacttctttgtatagattcctctgctctggactcagtctcttccattctgcttctgtgaagatcacagtcacatccctgaatgtaactggtaccactatttgggcctttccctcctttttctgggggcagtcagtatcattagaaggcaagcctttcgctttatgattttgggtcaatttcttcatagtctctacattttccccattctttggaagcaaaatctcttcccagtattgatctcccagtgctgaaggataaggcaacatcatggcgccagagtcagcccagtgtgtgccttgaaattctgccagaggtccaggtagatgttatttcatctcaagatggagttctgctgcctgtggtgacttcttccaaccttaattataaaaagcccagcttgtttccctgcagccaggacctgataggaagttctcgggagcacagaagtctttcctttctcaagagatcgtcctctcccagcaggcagggattggagaaggtggaccagagccagcgtgcccggcctcgtgccaaatcggcacgaggcctcgtgccgattcacgcggggcctcgtactagcc

SEQ ID NO: 149839 - DNA, 764 bp, Homo Sapiens
ggcagtaactctaacggttttaaggtagcgaggcctgggtggcgaattcggcacgagggtcaccgactctctgacaaacagatcactcattgtcaccacagtgctggaggagcccttcgtcatgtttcggaaatcagacaggacgctatacgggaatgaccggttcgagggctactgcatcgacctgctaaaggagctggcccacatccttggtttctcctatgagatccggctggtggaggacggcaagtacggggcacaggatgacaagggccagtggaacggcatggtcaaggagctcatcgaccacaaggcagatctggccgtggcccccctgaccatcacccatgttcgagagaaggccatcgacttctccaagcccttcatgacacttggtgtgagcatcctgtatcgaaagcccaatggcaccaaccccagcgtcttctccttcctcaatcccctgtccccagacatctggatgtatgttctcctcgcctacctgggggtcagctgtgtcctcttcgtcatcgccaggttcagcccttatgagtggtacgatgctcacccctgcaaccctggctccgaggtggtggaaaataacttcactctgcttaacagcttctggttcggaatgggatccctgatgcagcaagggtctgagctgatgcccaaacgccctgtccacacgcatcattggtggcatctggtggttcttcacgctcatcatcatctcttcctacacggccaacctggctgcctttctg

SEQ ID NO: 149840 - DNA, 752 bp, Homo Sapiens
  misc_feature (139)..(302): n is a, c, g, or t
ctggaccttccccttgcccctgggaccgaactcaaggagaagcaagggtgtggcacccgaactgaggtcccttcttgtgcttgcaagtgcccagttcgtagagactgaggggccaggacaggggaggccatggagccannnnnnnnnnnnnnnnnnnnnnnnnnnnnnnnnnnnnnnnnnnnnnnnnnnnnnnnnnnnnnnnnnnnnnnnnnnnnnnnnnnnnnnnnnnnnnnnnnnnnnnnnnnnnnnnnnnnnnnnnnnnnnnnnnnnnnnnnnnnnnnnnnnnnnnnnnnnnnnnnnnncactcggtttcttcctgtctgtccaggtttcctcttcttacaacacacctctccttcactgggatccagagttaaaatgaggatttgcatgggagcaggtgggcgagtcctagagataaggaaaaccccccacagaatccgtgtcttccaccacatagccgtggccaggagttcacaggcgtcccagggcaccgagcagaggatgcttggggctcgtccagacagggccagcactggatgaaccaggatgaggtcgggctgtgttcggggagccggcatctgggcactgggcagttgtgccatcagctcaggttctggtgcttagatcagctccagtttactagactctagactgtgtcctgctgcccagttgactactcccgtgggggaatcccaaaggatccaaacctcgtgccgaattctcaacgccagcctcgtacctagacgtaa

SEQ ID NO: 149841 - DNA, 956 bp, Homo Sapiens
cgagagacctggacgccccccacaaaggttctcgggtcaggtctccattcaactcccgggttccaattcgagtctcgttccggcacctttccggagaggctggtcccagatgaacctctctcaggtcacgtcccggtcgaatccccaggggcatctaacacatggttctgggaatgaagcttcagaaaggctttgctctggtggtgatcccagatataatcttccagcctggagagggacttcgcaggtcttcgccctccagcatccatgcgccttccctttgttccaactgggagttcatgcaggctgggaaactggaagtcctagtaggacaaggctcctggactttcctggtatcccctccttgaacctgtcccgtggagtagacacgaggcacctccacccttcctgtgcaaaagctaccgtcacactgctgaagaatgtggatccccggggcccagctatgaggagaccagcagccattccttcctctcctgtgttttcctcttggggaagggcagggcctggggaaggcagtactccttcctccagcatttgagtcccgcctcgcgccacagcctcccagcagttctctgggcgtaagggtctatctacagcagcccccaccccgttctgcagggctgctctgacggctcccaggccggactcttcctctccagcctctccccgcagaggcacggtctgatcctgcggtgctgggtcgcgggagctgtccgggcctgcccagccgggtgttccactccgtctcccgagtcacagccactctttggctcggcctcaagcagaacccggtgaaaaagccgctgccagctttccgaaaaacgactggcaactggcaactggcaacaatctaccggcaaccgcgagagctcaagaaccgctgtccaagtaccgcccaacacccctcggccgattcaaacccaggcctctactag

SEQ ID NO: 149842 - DNA, 903 bp, Homo Sapiens
gttgttgtatggtggtgtatttcgtggtttgtgtttttattgggctgtgggttgtcagtttttgtgtgaatctgtcggggttctgtcgtggttaatgtgtttattattggggtatggggccgtccctggccgggaacccgcggaaggttcaataacttggcagtcgtccgagctgagcccaggggagcgggcgaggagaaagaagcctcagagcgcccgggaagcctcgcgcgcctgggaggcttccatctcccgggacccagctctcagcccggggcgaggaaggcgccagacaggctcacccggaggggagggaaggcaagtccgaggcggggctcgaaacagccgagacccggggctcaggtcagaaatgcggccttttagggaggcctttgccaagctgctgtccggttcccccgagagaggggcccgtttggtggccccgggagtgagcagggcctgagacgggccactgcaggtcgcagcctgcaggagaggtgggtggcggcagcgggccgggaggagggaaccccggctcggggtaagcaatgaggataagtggtctctgctctcagtctctggcgagttctccctggggttagaaaatcgtccccgcgctcaccggggcgcccccgccgccgtgatggtggtggtggtgatgcggctgcggggtctgagtggggtgcagcagcggcgccgtggcctgcaggtgtgaggcggatcccgaggtctggtggtaccaggggtagttgcccagaaaagccgaggccgcgctgctcgggctggagcccgagctgccggcgccgctgccgccactgcccggaccatcgccgcccggccatcccctcgtgccgattaaacacggagcctcgtactagccgtagggttggtttgtgctgtgga

SEQ ID NO: 149843 - DNA, 514 bp, Homo Sapiens
tggtgcggaggccatcgcaagccatcggctcgatgatcttcctcaccatgtcgtcccggtcccgaggccgaaagccccggagttcgccattgctgttcaagatgttggtgcactttttcaagaggatctctgaggcccccttgctgaagaggcggaagccaccgtcgggcatgcggatgactgtgctcatggacttgcggaccgagttgaaggtgtacactttgtaaagcttgtcttccgggatctgctcgcgcacgggctggaagtcccgcttcaggtccaagacgaagcccagcagggcgcactccgtcttattgcccacctggcgtgggagggcgccttccttctcaggaggtagtattttggtggtataggcactgttgatggagatggcatggaccaggaggtcgaggatcttaggggtcagggcgctgggggccggaatctctttgtagtgggtgtcccctaggtaggactggaccacggtcatacggttggtggtgagcgtgcccgc

SEQ ID NO: 149844 - DNA, 512 bp, Homo Sapiens
  misc_feature (422)..(466): n is a, c, g, or t
aaaatagtcacttttatttcttagcaaaactatttcctccgtgaggggtatttacaacagagaaaggaaagaaggggtcaattcacagcgacttggagaggctggaggggctcgtgggaggcccgaagggctggagacagacacacttcacacaattaactggaactgctttttccggtttccgacggggacgtccccagagggacttgatggggccggggccccgcgtggcaagggaactcgcacaaaccacccgccctcctgggctggcccccggtcacccgcgggtgagctctgggagttcgggctcaggacccgggaggggggtctggcaggtcccgacgcagcccggggacaggggcagggccaaggggcatggccggggcgcatgcaaacaccgagggggagcgggcaacacggannnnnnnnnnnnnnnnnnnnnnnnnnnnnnnnnnnnnnnnnnnnnaccgggaagggcagtcacgggcgccggagcagcacgtgctcgatgt

SEQ ID NO: 149845 - DNA, 310 bp, Homo Sapiens
gcgtgagccaccgcacctggctattttctatatacatcttataactgtatgttagggtccaaactgaatttcgttaactccttatagtatatagcaccaccttatacataagttataattacaatgtgcgctaaccaagaaaaactgccgatacaatgggagatccaattaaataacagccatttggctggttctaaacctgctaacgagactggaagaggttttcttttgcaatctaaagcccctaaatttcagaataccatacttgttctttctactatgcgaactctccaagtagataagctttttt

SEQ ID NO: 149846 - DNA, 961 bp, Homo Sapiens
tgtggcgctcccatcccgggccactccccggaaggccggctgcctcgaccggtttgcggctccctggacccccgatcctccacatgccaacacagggccagcacaggtcctgacccagcttgcctgctctctgcttgctcagccttgctgggtgactctgccagataccctgcctccttctgtcccactagttcagccacccaggctgctgtttcggttgccctgagcttggcccccaaagaggaatggatacgaacaggtccctcgcacacaggtgctgggcagggcatgaggccagggtgaagcccaggcctggagcagactccagatcagcctaacaacttcagaggggagaaaaaggtgccctagagggctagagcgggacactggccaccgtcccctgccctccagttcctcccaccttgaggaagccttggcacccaaaaggagatgtccatcacccaccatgggtgccctgggcacaccacgctatctttctgggcctcggcaaggagggttgctactctctgccctgtcctccttgcaggaacgcagcgaagtccagtaagaaaatggatggtgaaggtgtggagaaagtaaaagtgtcactttcccccagaaatggtcatctttttaaattcaccaaaaaacacccaggcctgagtcactgcagagccagcacacccctagctgaagtcctaaccctcctgccccacacaataaggacaacacaagcagaatcagaggtgcagaaagaggatgatcagccacaccatcacccacactgcaaagtcccttggagatgggaaggtggaaggggcttgtccccccaccacctgcccttttttcttaggagagaggtagcaggagagtctccaatgtcagggggaaaatgttaagttcaaaagagtgagtttggcccctcgtgccgaattcgccacccagcctcgtacctaccgta

SEQ ID NO: 149847 - DNA, 774 bp, Homo Sapiens
gcaccccgtcatttcagatctgtcaactgtccaggatcttcccctgaacagagtttccctgtcagcatctctgccatgatacagcccacagaccagatgtccactgtctggttgtagtgcatccagctgaggatcacctcgggggctcggtaccagcgggtcaccacgtagccagtcatctcggcgtctgcatgtcgcgccagcccaaatccagaatcttcagttcccagtcctcattcacatgccaggcttgcctggcttcaggtccctgtgcacgaccccagcagagtggatgtacttaaggcctttgagcatctgatacaccaggtactggatcttctcctcactgaactccatccccatgatcttctgcagatccgtctgcatgaagggcatcaccaggtagaagtcatagaagttgcgcagggaggaggctggggtgaagacatccaggagcccaatgacgttctcatgctgcatgtgcttcagcagcagcagctcccggtaggcgcgcttggcgaagatctcggactgaaagggtcggctcagcttcttgatggccaccttctcccctgaccgcttgtcgatggccgagcacacggagccataggccccgctgccgacgtgcgtcggggacacgtaggtcttgggcagctcccaggcggtcttgttgacgtcctgcttgtagaagccctttttccggatgaggctcatccctcgtgccgaattcgccacccaggcctcgctaccttaagaccgtggtagttactgccg

SEQ ID NO: 149848 - DNA, 1138 bp, Homo Sapiens
cacggaaggacggctccccccagccggaggaacgggcggaaaaccaccccgcccccgcgggaaaccccaaggccccccgggtcggtaaagacaagcgggcccccttcccaagccggagccaaaaggatggaggcctcccgctccagcctcccacgtagcgtcagcatgtccccacagtccacctggggctgccgggaacagctgaggaaacctccggggtcctgtgccaggacctgaatttaggatttggccgctttgtcgttcagcttttggcacaaactccgtgccaggcaccccggtcactttcaggatctgggtcagctggtccaggtaatcttttccccttgaacagagttttccctgtcagcatctctgccatgatacagcccacagaccagatgtccactgtctggttgtagtgcatccagctgaggatcacctcgggggctcggtaccagcgggtcaccacgtagccagtcatctcggcgtctgcatgtcgcgccagcccaaaatccagaatcttcagttcacagtcctcattcacagccaggttgcctggcttcaggtccctgtgcacgaccccagcagagtggatgtacttaaggcctttgagcatctgatacaccaggtactggatcttctcctcactgaactccatccccatgatcttctgcagatccgtctgcatgaagggcatcaccaggtagaagtcatagaagttgcgcagggaggaggctggggtgaagacatccaggagcccaatgacgttctcatgctgcatgtgcttcagcagcagcagctcccggtaggcgcgcttggcgaagatctcggactgaaagggtcggctcagcttcttgatggccaccttctcccctgaccgcttgtcgatggccgagcacacggagccataggccccgctgccgacgtgcgtcggggacacgtaggtcttgggcagctcccaggcggtcttgttgacgtcctgcttgtagaagccctttttccggatgaggctcatcccgggcacccgatctcgcggccccggcgtggcggctgcgttcgcggcccaacgggctcccagcgccccgacccccgctgcgcccgccccgcgccgccatcccgggaattccggaccggtacc

SEQ ID NO: 149849 - DNA, 1042 bp, Homo Sapiens
cgggctcttcgttaattttgccaggcgcagaaaagtgcccacgggaagcccgggggggaccccttgggcccccgcctcttttgcgggttttggccctggacaaggctccatttctgggctgccggcttcaggcgtgggaggagtttaaaggctggggccaccgaaggagccttgctgctgagccatgcggtcgagaagaggggttcgggccccgggggcctcctcccccattctccaggatctgggacgcggccttggtctgggcttgctggggccgcggctcctgctctcccccccgacgcgggctccagctccgggtcagcctcctcggcacagacctgttggtctccttggccaggatcttcctgggcctgggacgcctcctcaggatctgaagcctttagggggacagaaggcgatgggaaatcaggtccctcagtctccctgagcctctcctgaggggcctcatcaatggtgagcctgggctctggcccctcttccttctctttcacagcagcctcagcctccctgtcgtggcctggagcctggtctcccctggtgctcttcttcctgcgcatagacgctcggacaaggtcagagccgaagtgggcattgtggtgccgctgggagcgtgcttcctggaaccagtcccctgtcaggatcttcagctgcccagggtctgccactgaggcccggagcttgctgacccgcccctcctccagctggcgcaggcgggcatctcgttggaggacgccagcaatggcctcctgctcctcctctgtcaggaagctgaggtccaacagtccttcagtctcaggctttggcccatgcgccatggggagggagggcagagcccaaagcccctcttgcgatgggtggcccctctggggcatcagctggggctgtgccccagctgggcacacggagcttcctgtaggggtccagtatgggaggacaccttcgcaggtggctccagctcccctggcagccgagtttcagggaccgggagaagagccgtgaggatcccgggaattccggaccg

SEQ ID NO: 149850 - DNA, 688 bp, Homo Sapiens
caattagcagagctactgctccaactccacctgtaggtctagcatttcctgtggcatatacagcaatatctcctgcaactaccagggcataccgtccatcccaagagctggactcaatccagttaacagcattgaagacagcagctgtgcctccatagcatgcattagttgtgtcgattccttctatatctgtattcccagactcttcaaacagctgcatcaaattagtcttcacagactttgatttgtcgatgattgtctctgttccaacttccagccgcccaatgcaatcataggaaaggttatttctctccataagattctgaaccacagtcatgcaaagagagttaatatcttctctatctgtgcagaagcccatcttggcctggcccaagccaatggtatactttccagcatctacaccatcatatttttccaactctgcttgatcaacatattgagaaggaaaatagatctcaagggcaacaattcccacatcttttggccagcaagcttctgcattcaaaggaagtgatccaggcatggtgaaagagctgtgtgaaggatagagaactgcagtctccaggtctgtcactgtttcctccttcgggcacaagcgtgaccgagcggcagcagaggaaagggagtgcctcgtgccgaattcacacccagcctcgtactagccgta

SEQ ID NO: 149851 - DNA, 917 bp, Homo Sapiens
tcattcagcaacatccgaagttagagattttggaaccagtttacaatatgggtggggaaagatcatgaagccaaaatcattcaaggtaaaatctttatcattcccctcttctgccacggggcatgatctttttgcagtagacagagcagcagcggtttaatgcactgaggtagcactgtatggagagttttcccttttcctataggatattcagaatagcatatcaggcttgtaaaaatcataggcatgttgcatatgtgtcccacgaagccctcgttcaaaaattaaaggagcattgtgcccaattagcaggagctactgctccaactccacctgtaggtctagcatttcctgtggcatatacagcaatatctcctgcaactaccagggcataccgtccatcccaagagctggactcaatccagttaacagcattgaagacagcagctgtgcctccatagcatgcattagttgtgtcgattccttctatatctgtattcccagactcttcaaacagctgcatcaaattagtcttcacggactttgatttgtcgatgattgtctctgttccaacttccagccgcccaatgcaatcataggaaaggttatttctctccataagattctgaaccacagtcatgcaaagagagttaatatcttctctatctgtgcagaagcccatcttggcctggcccaagccaatggtatactttccagcatctacaccatcatatttttccaactctgcttgatcaacatattgagaaggaaaatagatctcaagggcaacaattcccacatcttttggccagcaagcttctgcattcaaaggaagtgatccaggcatggtgaaagagcaagcgtgaccgagcggcagcagaggaaagggagtgagccacgaaaggacagtccgcccc

SEQ ID NO: 149852 - DNA, 557 bp, Homo Sapiens
cacagagggggtctgtgtttattcacacactcctggtacagtgaggatggaggaacatttacgaagggcacccctgggttgagaacatctccggggccacagatgtcatccaaaggttcagagcagtccccatttgggttcccaggggcaagacgcaggggtccaaggtaaaatcggatctgggcccttggaaggtgatgataccttggggagaaggggtctgccagaaagcctcctggggtcaggcctgggcagactggccatgtggttggtaaccgtgtcgggggcttgtctcatcccagcctcaacacccatcctatctgccaggcgcagaagagcgtggccgagactgaggggagggcaggaaccatgagcagagccagtaaacaaagagtcggatataaaaatacaaatgtgctgaggaagtcccttagaaagaggctgaggctggggtcacgccagacaggggtgggggcgaggaacggcccggaggactgggctcaagtgggtggaaagctcatgcaagtacgcagccaaacatccctggccgcgcgcgg

SEQ ID NO: 149853 - DNA, 1221 bp, Homo Sapiens
taaaaaaaaggggggttttccacaccccttgtggggggaattttcccccccacctcctcttggtgtaaagaaaaccttggggtgtgccagggggaaaccccccttgaaaattggacaatgtatcttgccaccaagggtaaggaaggcgcttggccctttcgttagggggcgtgatggatgcccaatcttggtccgggcttgggcgcctgcccctacagcaaactttggtggtgatcttctcccacgttcgcagcctcggtcctgtttcaggtaggaggtgcccgaagctggcaatctcctctttggccctgggtcacgtagaagaacatcggtttatcgggttggggccactggaagtcaaatcccttcttcacacgatccgctgcagtgacaccattctggagggagccctcgtagaagatgttggatgggaaggcgctgagtgcagggtgcatccggtactggacctgcaggcggatgggccggatgcccagcaccaccaggcgctcgaagagcgactgtgacagcccggccttggccgccttcttgcacatcaccactgggcccagctggcagtggtcgcctacaaggatcagctgcttggccccgaggaccacgggaaccatgcactccggctcggtggcctgggtgctttcgtcgattaaaatggagcggaactgcatcttggccagcctcgggtcaccggcgcccacacatgtgcagcagatgacatctgcgttcatcagcagctctctctctgcggtgcgcttcaaggcccggtaccgcttctcgtcggcagacgacagctccccagtctcgtctttcagctgctgcagcttctgcagctcaggcatgctgtccatgttcctgatctggttgtgcagggccagaaaagacaccggggagtcgatggcctcacggctcttggcgcagaggcgcacgacctttagccccgtctggtggatcttctccgttagctggtccacggcgatgttgctcggagcacacaccagcaccggcccgttgccttgccgggccaggtggtagacgatggtggccgacgtcaccgtcttccccgtgcctggcgggccctggatcaggctcagtggtctttgcagcacagtcttcacggcataaacctgggagtggttgaggtcggggaggccctgcgccgtgaagcgcttgggcagctggcacttgatgattacgtcccctcgtgcc

SEQ ID NO: 149854 - DNA, 527 bp, Homo Sapiens
agttatgtcatcatctagatcagtcttgatagtagatcttttcttagccataattttggctttgattgcagcaattttttccactgacatagcttcagacaaagacctaatctgttcagtctgtacaatcccttctttgtgaccctccaaacgggcagccaatctctctttatcaaggcgcacacactcttcatcctcaattcgtggtttctttgcttctgctaaaacttcatctgcagctcgtttgacttgagtagatcgctgaagacctatttctaagggagcgcttctgtctatacttgccgatgttgacgcttcaccattgagatatccaagtagatcttttcgatcaggtcttctaaccacaggaatattttcagtagctgcacgtcggacataaacaggatgagaaaggtgcacgttattaagtagaaataaaatggaatccaatgtgtagtactctctgggttggccttcctttccagtcccccaaacaacatagttggtcttcacattctcctcgtgcc

SEQ ID NO: 149855 - DNA, 509 bp, Homo Sapiens
ggcacgaggccttcttttcaaagttcctcaagcctgttactcatttgtcaaggctgggcttctcctacaaagccctcaacctgcccagccagcagctgtgaggctgactgaatatttggtgaccatatcaccctttctggtgctgaagctcatgtcagctccattggacagtgttattctgggctcttctcactgtagaggactggagcagaaagggttccttggaaacctgtgctgggaagccctgtttggtctaaggctaagctttggttaactctgggctccagccctttcttcctttaaatagctgatgcacggccagcaggtctccattctcatcctctctttctattctgtttctttggttcagaaatactcttctgctttttttggacgaactcaatggcccgatgttagatattgggtatttttcaatcttctgttttctgacccttccaagaaagtttgaggaagaacatgtactgctttcacgttcatttcgcccattc

SEQ ID NO: 149856 - DNA, 447 bp, Homo Sapiens
cacgtaaaaaataaaatttatttctttttacacaagcagcaaggcatgccctatcctgacataatttcattccaaatggaaatcagatcaaggccctaaagacacagtgtgaaggtgagagggttgccttggccagcctggcctggaggggatgctgaccgggccgccttcctcctgcagctctgacctggtcattcccttccaggagtgacgccagctcccggaggtgctccagctgctggagacgattgttcgaggtgaggaccagcctgtgcacctcctcatccactcggtcgtacaggcttgtggcggcctccagggtgtcccggctgtcttctgtgccaagctcttctctcctcagccgcgccaggacggtgcccccctccagcctgagagacacaagcagtgggtcttccaggacaagcttcatcatcgtctcatgctggt

SEQ ID NO: 149857 - DNA, 440 bp, Homo Sapiens
tttttagtttaagaaatatttataaagcaggtaacaagtggggagccgggaggggcgctcagctggggtgcagaagggtgggggtgcccccgccttcccctgcatgtgctcgggcttcctgctgccccccaccctctgctttccctacccccactgccccactcccaggggctcgggatggacatcagggaggacggtcttgggaaaggcagcccctgcttgaactctgtcccttaatgaccccatcccatcccccactcagaggaaaactttgagttcctgatcgtgtccagcacgggtcagacgtggcactttgaggcagccagttttgaggagcgggatgcctgggtccaggccatcgagagtcagatcctagccagtctgcaatgctgtgagagcagcaaggtcaaggtaagagtttgaggtggagtggaggactg

SEQ ID NO: 149858 - DNA, 1224 bp, Homo Sapiens
  misc_feature (530)..(530): n is a, c, g, or t
caggggcggggagaggctccctcgggaggtcctggctcctcttcagcttttctctgttaaaaatcacgaagtcttgctggatggcatcgaggcagtcttgaagatagtcattctcggactgggagctgtccctgctgttgtcccgggacttgttcttggccaggcgcttcttcttcttgtgcaggggcctggactccaggatcatctcctccagctcaaaggtggggtcgcagtgcagacggcctttgttgggcacgaagcccggctccaccctcttctcgctcaggtggtcccacagcacgccggccagcgccggggctgcctgcacgtcctggaggctggagagccggtgctcggggttcacagtgaggagcttccgcagcaaggccaccatctccttgggaccacgtgggggacatactggacgctcacggtgctgaacagctgcaccagggactccacggcgttgctggagtggatgtcatagggcctccatcctcgcagcagctcataggccatcaccccccacngaccaccagtccacctcgaaggagtagccggtcccgccgttgacaaaagagtggaagatctccggagcccatgtacggcttggtgcctgctaatgccgtcgcccgctccccgtccttgatgatggtggcaatgttgaagtcggtcaggtgtgcatgtcctctctcatccaggagaatgttgtcaggcttgacatctctgtggatgatgtgctggccgcgcaggtagtccagagccagtgccatctcgcagatgtacagcctcaccgtgtcctcggagaactgcacgttctgctgcaggtggtagcgcaggtccccgcccagtagcaggtccacgaccatgaacatgtcctcctcgtcctggaaggagtaccagaggttcaccaggaagacgtgctcgatctcctgcaggatctccagctcccggaagacgttgcggacctcgtcgcgctcgatgcactgctgcttgttcatgtacttcatggcgtacatcttctccgtgtcccgcttctgcacaatgcacacctggagggcacagggctgttcggcaggacgcctgaggacgcctggggacacgtggggacaccttgccaaagctgcccttcccaatggcccgaaggatctggaagtggtcgaagttcactgcaaagcctcccgactgtgcgacggaggcggcggctccggcagaggctcccag

SEQ ID NO: 149859 - DNA, 2127 bp, Homo Sapiens
ttacagatacaaatgtttattctacataaaaatttcacaaaatgggcagctggttgtaccaagacctttggtgaaggggttggggggaatcgctgttcaagaaggcaacacggacagtggtcacagtcactgggcaggagtaaagccgagggagggtggggcacacggacacggccccatcccctgctgcatgcactcgcatgcatctccctgcctgtccacaagggagagggtcctggggcgggggcacatttcccatgagaagccccaaggtggtgaggaggaggaggtagccctccccggctggctgccgaatactgcatctgggacacgtgacacccacgtggcacatcgatgggaggatggcaagggcaggatgagactgcaggcctgaaatgacatctgacttcccagagcgcaagacaacaggagccaccatcccaaacatgcaacgctggcttgagggactgactgcagcctgctttgcctccctagctgctggggtggctggaaatagggcaccagccagccccttccagagggacacctggggtcagacctagcccaaggggttgctcctggggccggaggaatgtgggaagggaagctgaggcccaggacccgatggactttgcccctaggcaggggagggagcctggagccatggcagcctgagcctccctggcagtgatcagcgactgagactcagagctgggctgtccctcagggccacctctcccctaacctgaaaagcagcaccatgtggccagctggtccccacccctcagggctctgcttgtggggacagctggagaggacagggcaggtcagctggaggcgaggttagggtccccagggaagagcagaacctgggcccaccgagttactgaaggcaaggaagcgtggcctgtgtcaccctggcggccctgcctgggtctgctcctcgctgtgcacactgcatcacgccccgctggctgcctccctctgcctcttcccgtacagacgcacactcacagagatcatgcacacgacacggggcggggacggagggcccatggcagagaagggagcatgggggccgggagggagggtgctctgagccagaggcgggggttgggagggcagcccagccaggtggcagcagccagggcctccttggagtggcccacctggagtggagtggcagtttgggtggtttctaggcgaagatgcccccaacagtggaggcgatgacgatgcccaggatcacacagcagatgatgatcatgattttcttccggcgcgccttgctctggtacttgacggccttcttggtgtcagacacggccctctccacatagtctaccgcgtgttccacattgtactcgatcctgtcaatcatctctccctggctctccacgagcatggccatgtccatgaacatgtcgtgtagctcacggatgctgttctccagcttgatgatctcactgtgccgcgtctcaatctcgctcagagcctgcttcgagatgctggagtccatgatgatcccagaggcaaagatggcggggttcccactctccagcatgtcctccagctcctcactggtcgtggtcctgccggtgatctccagctgcctctggatgcggcctttgcagcgctcgcggtagtcggactgcgtggcgttgtactccgacatgacctccacaaactttctggacagcgtggagtgctgtgtcttccggatcctcaggtcagcggaggagcggttcaggccttcctcttgctcgatggactgctcgatgctctttaacttggaacgaactttgtttgctgtcttctttatgtcggacatgagttcttccagctcctccttcgtcttctcgtcggggttgggggatgccaggatggcactgtgcttccgcttcacctcctccacgttctctgcgatcttgtcaatgaagcctcgaatctcctccacctgctcaaagaactcatccatgaagcggtctcggtccacggtgacagcgacatcatcatcatcatcgctgtccttggccgtgcggagctcctgggttcggtccttcatgctcccgggagtgcatcggcgccgctcctcgtgccgattcacccccggcctccacctagcca

SEQ ID NO: 149860 - DNA, 685 bp, Homo Sapiens
acatgggtgatacagatccttaagtgggccacgtggctaagggaaagagcccctttattccagagctcctgggccacaacagcaggggaggggagtgtggcttccatcgcgccaaaagggggcctggccttgaagcccctgtggctaaacaccacttggctctggtttttcagtaagactttgcctaccaaggtgaacgcctccttgtctgggacagatggctcagctgggcccagggtccggcactggggcgtattccaagacactctgctagatgaggcagatgtgtacatttccaggccagtgacgttctgacctcccccagctgtgaggtctatgttgatcctacagatttccacattaaagggaaatgaaactgtcacatagactggtggcttaatgaaatactctgtcctgaaaccatgacttctctttgtgagatcttcagagatgagattttctacttcgtaaccatcagctgatatcttgttgcagtgaattcttggtctgaactgtgggaggcaaagatttattaccatctttgtggctgagaggatatcttccaagcatcagaagcagcctgatcctcccgaaggtgggcgccgcaacaccaaaccggggacgccgcgggcggcggcgacacagcctcgtgccgattcaccacccagcctcgtacctagcctag

SEQ ID NO: 149861 - DNA, 865 bp, Homo Sapiens
  misc_feature (555)..(588): n is a, c, g, or t
gtatagaaatggtggtttaatgaacaatgttccaaaacacttttcaaaaattatatatataattagatgttctgtagttgtcaggcactgaggacaccttgtcctccaagtgcaattctaaaaagcgtagataagccacaggtgcaaatgcatcagctgaatgtatgactacttctgatgaatccacaattattttcttcttaaatagagggcaatccaaagtgaaagtttcatactctccaccttctccacaaacatgtactccatacttcttagaaagctctatgagataaggctccatttgatccagggttttcccaagatgcttatcaggatctaaacccaaagctgctactttgatgatcattgcttgaatgttagatgatatcatctctctgagcaaatcttcctggtttctctgccaaagataagctaaaggctggagattaagccttttacacacattttccactcgaatacgctgatagtcagaaagtatagcacctactgatatcccctctacttcttctttttccttaacaagtttcaaaagcnnnnnnnnnnnnnnnnnnnnnnnnnnnnnnnnnntggtgtacacttgtcttgtatccaagctccttcctcttatggttcggcgatagaggggaagagccattgcttctgcatacaagtcaatggcatggtgccccactgtctgatacatgtagctatccagttcatcagaccccacttggttttcagctggtcttagatttgctaaagcaacgatctgatgcccagcagcaatgcactgcatcatattatagcagctgtccttcccaccactgatcagagccgcgaccctcatgctgggcgccctcgtgcc

SEQ ID NO: 149862 - DNA, 845 bp, Homo Sapiens
  misc_feature (143)..(154): n is a, c, g, or t
gagcgaggggcagtgtgggggggcctataaaatacagtacgcggtctcactgctatgtgtcggaacgcgggagtggcaatcgtgtatagatgcacgaggtgtggtgtgaaaaaataaagtggcgttccccttcccaaaacgtnnnnnnnnnnnngttctagtcccccgctttcattggaaatggatctgaccacggcagatgcccgctgggtgcaagacgcagccacgaggctcctggctaccactcgggtgtccaccagactccagagggtagtcgctgatgaattccctggagagctggggtgctgtccaggtggatgggctggggccacactggggccatgatggatgcctttgaccatccctggctcacactcataatcccactcaattttactaacttggtggtaaagttgagccacgtacacggccgaggggattgtgactgtcgtgtcctcgtcgacctccttctcctgtcgctccagatccgcctcaatctccttgagctcttccagctctctggtgagctgaaggaggctggctttcagacgggtgtcctcctccccagcctcctgaagcccagcttccagctgctgcagctccacgcctccctggtgcacctgctccttcgcattgagaaggctctgggccacttccttctccatggtgaggatctctcgcagctgcttctcggcaccgtcttgcgtttccagcagccgctccaccacctgctcgtggcgccccagcagccgtcgctgctgcgcctccgcgcggttggcgcccagcaggctgagcagcccctggctcacctcctctatgtcgcggaaggcggccatgactacccc

SEQ ID NO: 149863 - DNA, 691 bp, Homo Sapiens
gaccgttgggtgagggcggtgttggagcagcatgcgcatgtgtggaggaggcgactgccaccgtggtgcgtgagggcggatgagcagcggggccgtgggtgtgctcggcgtggcgcgccagtcctgatgccagcatgggttgttcatcaccgctgctgtccctgctgtcgctcctggttggtgcgtggctcaagctaggtcactgaaccgccggccacgccggaggcgctgggaaaggggatggggccctccgccctggcgggagagagcctgaggcccctctgcccgcttccgggatgcgccatgcagccgccggctggggaggttgctctcggtgcgcagggtgcctcaccgccttgtgctttcaacttcttgctctggaatctttcaatccaggctcagctgaggcgagtgcgcggccagggctgcagctggcgctggctggtacttgctcaggccattgaggagcttctgggcgaccctgcgctcgtgcctaccaggcgccagccagtaggtgcgcagcgcctgctccagcagcgtcaagcctttgctgcgcggaccccgcaggccgggaagtcacgcaggtggtagtagtccaggtggtcgtaacctcctcctcatagcttatgggtggcggcgggtgggctgcctcgtgccgaattacacacccggcctcgtacctaccgtactt

SEQ ID NO: 149864 - DNA, 1072 bp, Homo Sapiens
gtcctttgaaaaatgagggcccacaggatcacccgtaacacggtcactgaccaacatcagctaggtaagccattcaagacatggagaaaccttgccaatttctggagtgtgaccgttccctgctacagagattaggccaaccccattcctgcattccgggtcatgtcagccggttttccttgacaattacctgcaaagaggggaagaatattgcagtcttagacatagtccctgcacaatggtactattctccagcaatgttgcccagagcccagactgcctgttcctggacatcttcaactctgagctgagcactctatgaagatggccacagctcctgcctgaatcacaattcggttctggaagagaatttcctgaagcaatatttgtcagtacccaagctgattcaaactgcagtgtacgattctcttttcgtttgaggaactccacgaacctggccactactcctggtgtgctgataacttcatcaataggagggttaggttcttttgaaagcagcttcctgaatttctgtgttgctgaaagctgttgctctgggcttttggaaaatatcatttcaatcatgtcagaagtgatgacaccacctggtgccatctccatgttattaatctgagcctcatgaaagcctccatctgacataacttcttcttctgtttcttcttctgctgtagcaacatttctccgcttgaataactgctcttctcttttctgctttcgtaactgcagtccttcttcctccctcctcctgcgcatctcatcgggattcagagatttgttcttgtaacttttcaggcgaaagttctcttttcctggggtggtcatgatttcaggctcaaggcaaccgatcccggtgccaccgctgaagttagcccctcgctcgcccgcccgccgtgccactcccgcgcacaacctcgaagagctggcccgcgcctcggcggtgctcaccaggcctcgctctccgccgcctcgcaccgagcagcgagactcagctcagccggccctcgtgccgtattaaccacccaggcctcagtacctagccgtattgatatga

SEQ ID NO: 149865 - DNA, 1252 bp, Homo Sapiens
tgtgttcagtgaagtacctattttcgtacgcatggttgggtttgcaagtaacgatgcgcttttacagtttactcaggatggtacccctgttctatggctcccgtgaagtcctgggtgttcaccctcagttgtgccaatgtgtcaattgacaatgcctgtctgattttgggctgtttccatcccaggggcgcatcatatgtccgcgtgcccccagtatctcggggactggcctggaagcggcccggtctcccgtgcccggtctcccgcaacccgtgacgtgttgcctattaccagaagcagttttgttgctccagctgggcttggtgcacgcactatatactgggactgcaaagggaccctcagaagggccaacagcacagagcctctcgccctctgccaccccagtctgagtagggcccagcccgctatagcccctgttaatcctggttggggccccaggttcatctcgtgggcagcagtccaggctgcggctgcaggtggcagtggggctactcccagatgtgtgagaggggagcagagtaggtgtgtcccccaaggcagctgctccctgaggctgacccctcccatcccggccctgatccgagggcatcctggcccctgacttgccctgcagggtcagcactgccgggagtcggatccaggctcacaaccgctttgttaggaacagaggtggggtcggttggtggctggggaggtctgggcggtgactcccctgcacctctccctgccggagcccaggctctgcacggctgctgcctcctggccccagctcacttgttctctatgagcatctgcaccttgtggacgaggtcccgggcaatccgcaggatctcctgggcatcgtgatgctcagcacgttcattgaaaaacttgatgatgtcagtgaagtccatgttgttgtcacggatgatctctcggtaggcctccaccagggcgagggcgatgaacaggacaaagtgctccgatgagatgtgcctggctgcccagatcacctcccacacagcaaacacatcctcatacagcagttctctcttaaaatccagcaggaaccagcgataacagaagtagaagtgggtgtagtctccattctgatgcatcagctcaaacagctctgagtccaggatctggatgagggagcgcatgttggcaaagtgggtgtccatggcacccccgttggggaagttctggctcatcctcttcatgaggtggctgaagcagctgtaggccagct

SEQ ID NO: 149866 - DNA, 850 bp, Homo Sapiens
agtgttccagcctctgacggaagcagatccagtcaccatggctgtagggaaaggagccgtcgaggtctgcggtcagctggcagctgtcaacaaatttgtgcacggccttcagggagctcacgacctcacactgaattattgcatccttgtcaggcctaaatgcagatttctttatctacccaacagcaagatactatgaattataggagatgtgcttgttctgcaatcctgagagggcctgggagacggcaggggcagctggactcctgcgtgcatccaccaggacaaccagccccaggtcccggacctctttcctggggatgctatggaagtacagcagcaggcgggtcagctcagcacaggacgagtgttccctggtccagagcaggctcctggtgcggaccatgcaccactgctctgccatgacaggtctcgggtccctgggagggtgacgaccccaggactgcagcagctcctgactgacagtccagcacctgcttgggcacctggctggggaagtctcctgtgccagggtggccacccttcttgctcggggtgtggctgccgggcaggcacatcaggaaggcccagctggggttgtggcaatggaggctgccagccgtctgtgctgacacaggctgaggatgcaagaacagtcttcactctttggtgcagccagggaccctctactgggacacagtttggggtcaccacacagcttgtcctcctagcggcccccaggcactggagcctgctgagtggtgggaggtgtggcaggctgcagcactgggcccctctggagcttctgggtgccctcgtgccgaattacacacccagcctcgtacctaga

SEQ ID NO: 149867 - DNA, 1062 bp, Homo Sapiens
ggcggcgtgatgttttgcgcaagaacgtcgtttttgacgcctcgtggtctctttctttccgccccgccgggggctccgcgctaagtctgccccgcgcctacttgactttgccacgcccgcggtttttgctcacagcccccgtttcttttttcggcccggaaccctggcccggtctacaggccgcctcatcggctcaccttgccacccgaaccaacggaccccccgggaacgcgcccccactcgcatgccgggaacatgccgtactcggggatgatgttctgggagaagagggaggcagccgagaggcaccagacatgcactggccccgggcccccatggggtcttcccacatgcgcccatagcctgaggccattggccgccgctccgggcatcccgggcccagccctgtgccctgggaccgaaggtgtcgttgccacgcatgcggaactggtcgcggtaggcatcgtattggccctcataggccatttccatctcagggtcaagctcgctgtagtcatagcctgaccggtacaggtcgcgctcactcaggacggccctcgagtcgcaggactcataagagtcatacctttctccacctgagccgtacacgcctccttgcatcatgtctgtctccaaatgcggcaccatatctaagcgctggttaattctggataaaacggaatcggcactggcgctacccgaggcactagtgtttgcatttgtgtcagagctaggcatttcccaagagtgtgaagtggccataccatacccatagttggtggtgttatcctggccatagccatagccatagccatagccctcgtagcctctatttgtcccagagttccaagttccatatccataatcacaggtcggctgagcgctggtatccgagtatgtcgactgcaaagtggtttcagatcctggacaaagcctgtgtagctcatggtggcgggcaacacaacatccgacgacgccggcttctgctgctctgaacatccgacgctgcgatagctgctgcctcggccgattcacaacccaggcctctactagcctaagtgc

SEQ ID NO: 149868 - DNA, 1319 bp, Homo Sapiens
atatagtaaaacagctgcttgctccatagacagagcagggctatcctataggcagggtggcccagagtagcccagttatttacaatggctttaaatgacaaggcccggctatgtgccagaaacctcacatcctcccactacctggtgcacaggggctcatcccattttccaacaaggaaactgtgcctccagctaggcagcctgtgctttctgccagaccacactgcctccccatgctggtcaccatgcacgcagagctgacacagcattgcctctggccccagggagagcaccactctttaggccagctcgccctgcctgcagacagaaaatgcccagccagagccacttaccactctggagcccttctccacagcctcggtgccttcaaggccctctgtggcttccccctcggtgccctcatcattgtctgagtcgctgttgtccgagcagtccgtgcgggtggctttgctatctggctcatcaggactgccgccctgctttctcttcttcttcttggttcggaagtcggctgtggtccaggtcttccaggtccgcctcatctgcttcatgccattgccaaacccgaaaccaaagcgggagccgcccgggaaggcgcccccacctcgcatgccctggaacatgccgtactcggggatgatgttctgggagaagagggagggcagccgagaggcaccagacatgcactggccccgggcccccatggggtcttcccacatgcgcccatagcctgaggccattggccggccgctccgggcatcccgggcccagccctgtgccctgggaccgaaggtgtcgttgccacgcatgcggaactggtcgcggtaggcatcgtattggccctcataggccatttccatctcagggtcaagctcgctgtagtcatagcctgaccggtacaggtcgcgctcactcaggacggccctcgagtcgcaggactcataagagtcatacctttctccacctgagccgtacacgcctccttgcatcatgtctgtctccaaatgcggcaccatatctaagcgctggttaattccatagttggtggtgttatcctggccatagccatagccatagccatagccctcgtagcctctatttgtcccagagttccaagttccatatccataatcacaggtgggctgagcgctggtatccgagtatgtcgactgcaaagtggtttcagatcctggacaaagcctgtgtagctcatggtggcgggcaacacaacatccgacgacgccggcttctgctgctctgacatcctcggccgattaccacccgcctctactaggcta

SEQ ID NO: 149869 - DNA, 771 bp, Homo Sapiens
  misc_feature (34)..(34): n is a, c, g, or t
  misc_feature (45)..(45): n is a, c, g, or t
cttcatgccattgccaaacccgaaaccaaagcgngagccgcccgngaaggcgccagacatgcactggccccgggcccccatgggtcttcccacatgcgcccatagcctgaggccattggccggccgctccgggcatcccgggcccagccctgtgccctgggaccgaaggtgtcgttgccacgcatgcggaactggtcgcggtaggcatcgtattggccctcataggccatttccatctcagggtcaagctcgctgtagtcatagcctgaccggtacaggtcgcgctcactcaggacggccctcgagtcgcaggactcataagagtcatacctttctccacctgagccgtacacgcctccttgcatcatgtctgtctccaaatgcggcaccatatctaagcgctggttaattctggataaaacggaatcggcactggcgctacccgaggcactagtgtttgcatttgtgtcagagctaggcatttcccaagagtgtgaagtggccataccatacccatagttggtggtgttatcctggccatagccatagccatagccatagccctcgtagcctctatttgtcccagagttccaagttccatatccataatcacaggtgggctgagcgctggtatccgagtatgtcgactgcaaagtggtttcagatccctggacaaagcctgtgtagctcatggtggcgggcaacacaacatccgacgacgccggcttctgctgctctgaacatccgacgctgcgatagctgctgctaacc

SEQ ID NO: 149870 - DNA, 688 bp, Homo Sapiens
ttcagctccttcagactgtcttcagcttcaaggtccagctccttgcctcccatgcctcaaacattttctccagctggacccctcagtttctgcacgttgttcatcaggatgcagggcagtttctccttttgtgcaatagtgctgggaagtccttgtgacaagatgtcttgcatactgcatcagcaccttcccgatggtcttagcaaacctcctcatgtagtgggcaaggatgtctggggtctgggcagttccagcttccggatgatctcaaagctctgattgagttgtgtgaagacatccaccacagagccaggaataagagtgcatgctctgatgtctgctggaatccatccttcttatctcgtttccagggccccacgcaggaattccagggatacatcctcattctcatccagccattgtagcacgaactgctcataccacgctgggtactcaggcacctgcccctggaggacaggcagatcccgtcacgtattcattgtggagcctacattcacccttgaagtgcaggttcatgtagtcagcacttttacacaggtggtctttctcatgctcctccaatgcatatttcatgtcttgggcatacataatgccacatcacttactgcgctgacttttccctcgtgccgattacacacccggcctcgctacctagctcgtatcgttt

SEQ ID NO: 149871 - DNA, 205 bp, Homo Sapiens
agccccctccccatccccatccttgtcctttccccgctgacgctcctcctgtaccgcctccctcttcatgccagtggccaggcacttctgatagcggcagtactgacagcggttccgctggcgcttgtccactgtgcagtctttgttgtcccggcaagagtatgtaaggtctttgcggatggtgcgtttgaagaagcctcgtgcc

SEQ ID NO: 149872 - DNA, 1022 bp, Homo Sapiens
gcggggcgtgcgcggggggcccgcttttcttttcctggtcctctcctcttgctttcttgcggtccctggtcctccggatttcggtttcccccgctttccgtctcacgcctgttccggcctgctgttctcgtgggatgcgctctccacacccgctttagggctgctacttccctccgttgtgcccatctgctgactatcctctctcctgcgattccaggaagtattttcgcactctcacgggtactgtacttgatgagttcatgcccacctttttgaggttcctcagtcaccttcatcccccccatgcccatgaagacctcatagaaatcgtaggacaagcctttggcaccaaacatagctgggtcatcagagctgatcaccatggggtgcccagtggccatcagagtggctacagggtggttcctcaagtcagacaccagtttcagcacctggttagagatgggacagacttctatggggatgtcctttttccaggagtaagtcctgactgcggggtgtttgctcaaagcaaatccatggccgattctggtagtgttcagcatcagagcatccagaatgttcctgtctatggaagtaccctgccagtctgtttctccggcgtggaagaagtaaggcagcttaacgccatccttggcggggatcatcagagcttccttgtagtcatgcaaggagtggccagtgtcctcatgccccaccaggtcaaaccctgccaccaccgtggggaacttgattcggagccccatggccattcggatggattctgcgatgacagccacatctttggatctgtgatccgaataaatgattttgattccaataaactcagggtgagtttccacaaacttctgagctacttcctggtaagtcttcactgaccactcttcgtcatggtgctctccactgagctcatacaccttgttcaggtcctctacggccttgggcattgtctctgctgctgcatggggattcctcctcgtgccgattacccccggcctatccat

SEQ ID NO: 149873 - DNA, 426 bp, Homo Sapiens
tgagtacatgttcagttagggtttattttggtatctgtcatagaaaacccccaaaaccagcagcttacacaaggtagaagttgagattggttctccccttctctctcccatttaagtaagtttgtgctgatatctggctctgccatcatcagggaaccaggctcctgtcatccctaaaggacggcactcgtctgtacacgtggcagtatggctgccagggctccagccatcacacccacattccaggaaataggaagggggaagaaagggtgtatttgtcttttaagaatccttctagaagtgtcatgtaacatttccacatacatttcactggccagaccttaactataagggcagctgggaagtgttgtattttaactcccaaagtgctaggatcacaggcatgagccaccacaccaggccaaa

SEQ ID NO: 149874 - DNA, 765 bp, Homo Sapiens
ccgagggacaccccggtctgctaatttctacagttcaccccttttgatggtctccagagtacgggtgtcccccccatcctgactctggctcagctgtctggctggccgcaatactgtggatcctggccagtcactgaagctttctgtcctctggcagagaaaaggtggcctcgtagcttgagttcacactgggactcaatggcaaaagattattcatggcaagtctccaaccctctaggatgtttctccttccaactgggcacagggaggaggcgggaagtggcatccagaccctgaagaagaaagacgctgcccggccacgaccaggagacccagcgctcctgccgcttccggagatctgacccgagacaacagcctgaaatagggaatgcggacccaggccagtgtgcgtggccggcccgtgtggcccccatgctgcttaggaagtccccgtccaggagcactggaagttgctgtgagagccaactagggttggcggcctgagggacagtcacccagccacagaacgacggcacggaagacatgaggcagcatgctcacgagagaggtgagggtctcacctccaggggcgggaaggagagaaagtgggcagacaaggtgtagcagtggtgacaagcatgagggagaggtgtggcctagtccccaaactacataggaaacaccagacttcccaagaaagcctaaaaacctacagacaccatgacatcctcgtgccgattcacacacccagcctcgtacctagcc

SEQ ID NO: 149875 - DNA, 220 bp, Homo Sapiens
ccttctccttgagcactttctcttcttccccagcctgtttatcttctactgccagctcttcaaagaacgtttttttgatcttcttgtccttcttccctttcttcaccactttgtctgatgggctcgtgctctctccgtccccgatccactcgggctccggcggctgctgcttgggcgccttcggcatcgcggtggcagttacagctactgtggcggtcgc

SEQ ID NO: 149876 - DNA, 696 bp, Homo Sapiens
  misc_feature (672)..(672): n is a, c, g, or t
  misc_feature (678)..(678): n is a, c, g, or t
cttgaccctgatcataggacctacttccataccttgtcatatccccacagacactctacctcctccctgtgacccgccatatcctctattatcttctccatacctactcacatcacgacggtcatcttgtgtgtggtggctgtagttttccctttgtgaatgataggactgctggttttgactataggaatcatgctgctgatcataatttgactgctcatcatatgagccttgatgttgatcatagcctgactgctggtcatatgaatcttgttgaccatagtctggctggtcataggaaggtgctcttccaccttggcttcctgatgattccatgttttgctgctgtccctggttattatatggttgctggctatatgagctctgcttttgattctcataaccaccataggactgtgaataacctgactgactttgtccataactggagtaaccgctgtagttctgtccataagaggaatcagtcgtttgcccatagccagaatagctttgtgatgcttgtccatagccttggctgcctggatttccataggtagaataactttgctgctcacccccagactgaccgtaacttccagaatccgacatgactaacggccgcggcgcggaggccccccacaagcccgccgaagaacaacgaaatacgaaagnccaggncggcgcggcgggccgcaa

SEQ ID NO: 149877 - DNA, 694 bp, Homo Sapiens
gcaagagaagacaagggaaagagccatggccccagtactgcctgagattaccccagttagttagcatccacgaataagaactcacggtcataagatcgcatgctttgtgcacgatggcaagagggaagaggacatctagggcaagatattctgtcacaggcaagttcacatgaagccagtgaaggaggcagaagataacccacctgacctccacgttgactaacacgtacacctccgccagtcgccttgccccagtaggctcgccaaatgcgagtctgttaaagcacgctgtgtgtgcgccaaaagagcatcagtaagttctgcccattagtcagtcgccagcgtgcaagccagtcgttgccagtttagccgcatcacgtaagccgcaaggcctccatgtttgtgccctggttggaaatgtcatatttttgtttgcgccagagtgcctcgatccccagccctacaataaaagcacagaagagtcctcaattccccacccaaccctagcatccctatttggttagcttgcaccccaccctttcccagattctataccttcaaatataaacccagcgagaggacatctgaaaaccctaacagatagggataggtaaaggagtctccggtgactataatggcaggggttggcaggacacaggaggatgctctactggtacagctcaaccctcgtgcc

SEQ ID NO: 149878 - DNA, 1002 bp, Homo Sapiens
ggcaccgggcggggtcccccgggggccccattgggggcacgaaattgcaatcccccaaacaaagccctccccagggtttccggccctgggccccggggcgggtggggcttctggccaaccaggggggaccctcactttccatttcccgagcgcaggtttatgcagacgcctgtgccccgggagcagcatcccaagctttgactggccctgtgcctctggctggtggggccggtaaaccctgaattcctgggtgggtggaaggatgtggaggctggtttcttggtgtccatggtgcccctcaggggactgtgctgcaagtggagggctggagggtgccacttcctgtccatcgacattgggctcctccttcacactgcagctgagctggacagacccctctattctggtgtcctggggaccttccccaggggactccactgtccctgaggggtgggggctcccaagtggttcctctgtcttctgggctgcagggagcacctcctgcttcaggacatgggctgtgatccagcccaacagttgcccagggtcatgctgcagtccttcgactagggcagcggcctcctcaggactgcctggccgctgaccgcgcacccaggcctggatctcgggaggcagtgtgcccaggaactgctccagcaccagcatctccagcatctgctccttggagtgtgcctcaggctgcagccactggcaacacagctcacgcagccgggccagggcttctcggggacctgccacctcctggtagcagaaccctcggaagcggaggcgggcagtctcaggctcctcaagggtggtctctgggtccatgacgggcaggcatgggggacccagaggggatggcattcttgctcaagggggtggtcttggaatcgtcaagatgggcctggacgggcctgagagaccaggcctgacacccggcctatccgagggatgctcgaaccctcgtgccgaattcgccaccccaggcctcgcttcttt

SEQ ID NO: 149879 - DNA, 164 bp, Homo Sapiens
ggcacgaggcccaagtgctgatttttctatgtataaagtaggagagtgcaacagcgtatcagaatgaggggctagggagaacgtgtatgtgacctcgagtacctggcatgtaacagacactcagtattacactcctgctatttctccagagcaggtgaaacaga

SEQ ID NO: 149880 - DNA, 714 bp, Homo Sapiens
tagaaaactaagtgagcagagaagtgtgaacatgacttgtaagttttaatgtactagacaagcaaggcggtagcactagttctctcttctgatcatgcggtaccttgctctctgcccccatggatcacttactgcattctgtactctagcactgtgtatgcatcactcttccttatgccccgtccaccccaccacctggtctccagactcagcagaacagaggtgactgattccttggaggtagcacagaagggcccaaagtcctagatcctcagggaaagaccaactccaagtccagggaaaagctctatgcaaagggctgcccgtcatctctgccaaacttaagtggcgtggcttttcttctgaccttaaagatgttgttctgggtaggggtgtcaatgcccaaatggagcatggcctctctggtcacctcaaaacaatcctcttctaagctcctctctgggttgggcagccaggagaaggcagctccctcaggaaggtgccactggagcctctcgtcctcactggctcctttgcaaatctgatagaagatgtggaagttcctctcactggaagcctggcaggccactcgagttttctctaggaggtaggtctggactgcggctccagtcatttgctgagccctgttcagctggagctggatgaacttcccaaagcgactgctgttgttattcctcagtgtaccctcgtgcc

SEQ ID NO: 149881 - DNA, 1193 bp, Homo Sapiens
  misc_feature (107)..(168): n is a, c, g, or t
tacgtgttgtctgtctgttgtatgtcgttggtatctcttgtggtttctgtcgttctggttgtgccgtttctcgtttgcttgtttttgtctcagggctcgctcggtannnnnnnnnnnnnnnnnnnnnnnnnnnnnnnnnnnnnnnnnnnnnnnnnnnnnnnnnnnnnngtctcctttattttggctctctgcggttgtgtccgtgtatttttgtgtgcttctccggcccgtcttggttatgctacgttggctcttacgtaggtgcccgcaaatgcttcttcaggttttcttggtctatttaagcccatctgttgcagtctgttgtacagaattgtgtcaagccatcgcattcagcagcctatgtaagtggttccacgagtcgtgtctgcacagatgttgctttgatcacgtgataccagcccagtctatcttccgcgcatagatcaggtttggccatacagtctgttacgggtgtcacacgtcggctcgggcgcaggggcttccggaacacctgctgctgtctgcctgccctgatggttctaatctgcaccatctccagcagcacgtcctctgggagccccagtcagcgaggctgccagtcctgacagagtacttggcatcatccatcggctggccagggctgggcttcatcctcggaggcagcaaactggatattgccaaggtgcagcagtccagctaggaccttaaagatgttgttctgggtaggggtgtcaatgcccaaatggagcatggcctctctggtcacctcaaaacaatcctcttctaagctcctctctgggttgggcagccaggagaaggcagctccctcaggaaggtgccactggagcctctcgtcctcactggctcctttgcaaatctgatagaagatgtggaagttcctctcactggaagcctggcaggccactcgagttttctctaggaggtaggtctggactgcggctaccagtcatttgctgagccctgttcagctggagctggatgaacttcccaaagcgactgctgttgttattcctcagtgtacacgcattcccaaaagcttccactgacagggttggagttcaggatcctctgttctatcctctctgcaatcttgtggctctcccaagatgcaggtgaggtggcccctcgtgccgattaacccgggcctcgtactgagcgaggtggggtgtgtt

SEQ ID NO: 149882 - DNA, 1703 bp, Homo Sapiens
  misc_feature (62)..(62): n is a, c, g, or t
gttcttcttggtgtgtccggtcttgtccttgtttcatccctctctctggctctgtatgtccngtggcggtcgccaatgtctgtgtgtctgtccccccatgtgtcacctgcgctaggtttggtctcccccgcatttcacggcgttcacactcgctcgggccatgggcttccctgtacacctgcttgcgtctttgctcctgtatggttctaatcggcaccgtggccagcagcactcctctgggagccccatcagcggaggctgccgtctctgacagagctgccttcgcatcatcccatcgggtggcaggctggcttcatcctcggagacactactggaatatttccaaggtgcagcagtccagctaggaccttaaagatcctttctggtaggggtgtcaatgcccaaatggagcatggcctctctgtcacctcaatacatcctctttctatagctcctctctgggttggtcagccaggagaaggcagctccctcaggaaggtgccagttggagcctctcgtcctcactggctcctttgcaaatctgatagaagatgtggaagttcctctcactggaagcctgccaggccactcgagttttctgtaggaggtaggtctggactgcggctgccagtcatgttgctgagccctgttcagctggagctggatgaacttcccaaagcgactgctgttgatattcctcagtgtacacgcattcccaaaagcttccatgacaggcttggagttcaggatcctctgtctctatcctctctgcaatcttgtggctctcccaagatgcaggtgaggtggccaccacagcatagaacttcattaggcagcgagacgtccatgtctttccagcaccactctttccattgacaacaatagactggttgactggttcaatcaggctcttgacattcctgtaggtctgttcacccacagtgaacacatggggcttcagtttctggggctgaggcgcagcatggtactctctcattagctcgggcgagtagagctgaggaacaggcttgaaggggttcaaggctaccagggtgcagccagcattggtgtagaatgtgtctgccatgtaccgggcctgcaggcacctcaggactgtctctagtgtcacaggattcaccctggtgaggtcatccagtttgtacagcaggacctccccacccaggaactcctgcaggtcttctctgaggtactccctggcttggccatcagaccccggattgtggccattgacctgctggagcatcctccttcaaagtggtcagccagggttctgggttgcaggaggtacaaggagtactatccacctagtcatgggaccatgggctggggtatggttccaacaaagggctcagttctggaggaatctcagacaagtcactccagcgcctgtgaaagcgctctgcaaatgttattacgatgcagcatcagctcctagctggagtcaagtgagattagagcagttttctccagttctcccagctcctgctccagtcggtttcgcggttaccagccaagaatttctggaaagggtgtgaacattcttcctcaccgctgcggggcaaactggcctcccaagccccttccgcgtctgaagggcttcagatataggttcgggttgacactcaccggtcccacggcccgagccgccgtcttcaggccctcgtgccgaaatcgccacccag

SEQ ID NO: 149883 - DNA, 905 bp, Homo Sapiens
gaaggtggccccccccaggcaaggaaccttcattagggcaggcgggacgtcccatgtcttttccagcaccactcttttcccattgacaacaatagactggttgactggttcaatcaggctcttgacattcctgtaggtctgtcaccccccagtgaacacatggggcttcagtttctggggctgaggcgcagcatggtactctctcattagctcgggcgagtagagctgaggaacaggcttgaaggggttcaaggctaccagggtgcagccagcattggtgtagaatgtttcttccatgtaccggggcctgcaggcacctcaggactgtctctagtgtcacaggattcaccttggtgaggtcatccagtttgtacagcaggacctccccacccaggaactcctgcaggtcttctctgagggtactccctggcttggccatcagaccccggattgtggccattgacctgctggagcatcctccttcaaagtggtcagccagggttctgggttgcaggaggtacaaggagtactatccacctagtcatgggaccatgggctggggtatggttccaacaaagggctcagttctggaggaatctcagacaagtcactccagcgcctgtgaaagcgctctgcaaatgttattacgatgcagcatcagctcctagctggagtcaagtgagattagagcagttttctccagttctcccagctcctgctccagtcggtttcgcggttaccagccaagaatttctggaaagggtgtgaacacggtcccacggcccgagccgccgtgcttcaggcccccgcccggccagactggaaaggcgggcgggccaggtcaggcggcgggaagaaccctcgtgccgaattcgccacccaggcctcgctacttaggaccttga

SEQ ID NO: 149884 - DNA, 1016 bp, Homo Sapiens
caggggtacaccgccaattcccaaaaaagttttccaaggaacaaggggttggaagtttcagggacccctccggtttctacccctctacggccaattctggtgggctttccccaagaatccagggggaggtggccccccccaagcataggactttcatttaggcaggcgagaccgtccatgtttttcccagcacccacttttttccaattgacaaacaataggctggtttgactgggttcaaatcaggctcttgacatttcctgtaggtctgtttcaccccacagtgaacacatggggctttcagtttcgtgggggtgaggcgcagccatggtactctctcattagctcgggcgagtagagctgaggaacaggcttgaaggggttcaaggctaccagggtgcagccagcattggtgtagaatgtgtctgccatgtaccgggcctgcaggcacctcaggactgtctctagtgtcacaggattcaccctggtgaggtcatccagtttgtacagcaggacctccccacccaggaactcctgcaggtcttctctgaggtactccctggcttggccatcagaccccggattgtggccattgacctgctggagcatcctccttcaaagtggtcagccagggttctgggttgcaggaggtacaaggagtactatccacctagtcatgggaccatgggctggggtatggttccaacaaagggctcagttctggaggaatctcagacaagtcactccagcgcctgtgaaagcgctctgcaaatgttattacgatgcagcatcagctcctagctggagtcaagtgagattagagcagttttctccagttctcccagctcctgctccagtcggtttcgcggttaccagccaagaatttctggaaagggtgtgaacacggtcccacggcccgagccgccgtgcttcaggcccccgcccggccagactggaaaggcgggcgggccaggtcaggcggcgggaagaaccctcgtcttggaatgccacccagc

SEQ ID NO: 149885 - DNA, 865 bp, Homo Sapiens
  misc_feature (805)..(805): n is a, c, g, or t
  misc_feature (851)..(851): n is a, c, g, or t
ttcttcccgccgcctgacctggcccgcccgcctttccagtctggccgggcgggggcctgaagcacggcggctcgggccgtgggaccgtgttcacaccctttccagaaattcttggctggtaaccgcgaaaccgactggagcaggagctgggagaactggagaaaactgctctaatctcacttgactccagctaggagctgatgctgcatcgtaataacatttgcagagcgctttcacaggcgctggagtgacttgtctgagattcctccagaactgagccctttgttggaaccataccccagcccatggtcccatgactaggtggatagtactccttgtacctcctgcaacccagaaccctggctgaccactttgaaggaggatgctccagcaggtcaatggccacaatccggggtctgatggccaagccagggagtacctcagagaagacctgcaggagttcctgggtggggaggtcctgctgtacaaactggatgacctcaccagggtgaatcctgtgacactagagacagtcctgaggtgcctgcaggcccggtacatggcagacacattctacaccaatgctggctgcaccctggtagccttgaaccccttcaagcctgttcctcagctctactcgcccgagctaatgagagagtaccatgctgcgcctcagccccagaaactgaagccccatgtgttcactgtgggtgaacagacctacaggaatgtcaagagcctgattgaaccagtcaaccagtctattgttgtcagtggaagagagtggtgctgggaaagacatggnacgtctcgctgcctaatgaaagttctatggctgtggtgggccaccntcaccctgcatcta

SEQ ID NO: 149886 - DNA, 1038 bp, Homo Sapiens
tttgttccttgcttcaaagtccctgcttcctgatcttttctcttggtttaatttttgataagtctctcggagcaggtagcaacccagccacttgtatgctgccagggcgactgcagagtccaagcagtcggcaacactggagacctcaaacttctggtcaaggatgccgggataggcgtccagaaagtccactgacttcagcggactgcggaagcaagctccatcgtggacctggtgtgccaggagacccagcaaatagttgcttgtctgctgcagcaggatgttgttgtcaccttcgtatgtgcagttgggatcgttgtcatctctaaggacacccaaccggttcatggccagatagccgtgtcctccacacgcctcccggcattcttgaattccttgctgggtggtccacgaggccaggggcttgctggccgatgccagggcgtggatctcacgtccaagctctgcctgtctggcgctgcggtctcccgatgcaagtcctcgctggagctccaccaggtccaggaagagcgacttggagaaatggtctaaggcgtagacagctgccagatatggaagcaagcgccattgctgcattggatactcaagcactggtatttcctcctcctctgtgggtccaaactgacgccgagtggctgagaagcgaagagcgatggccacggccagctttaggttaaggatggccaggctcacgatggagacccggcccgaggacaggctccccagggacgctccaaagcgctgcctgacgtccttaaaggggctgacataggtgccctcgggggtgacgtctcccatccggttcagaaggctctggcgaggaactctgaccttgtggaacatggcgaaaccattatccagaccgttctgcccgagtttttttcctatgtcgccaaccatcactccaggcatgggaagaagggtcttcgggtcccggatctgcacgataaagggatgcagcccatggcactggtcccctggcacacacagcttagcaaacaccaccgcgtgagtggc

SEQ ID NO: 149887 - DNA, 1024 bp, Homo Sapiens
cgcgtcgtccctgagatcccggtgctgcccactttctgcgctgcatttatcgcacccgttggaagcttggctcgccaaaccctgtcggttgatttcattctagtctggacgtccctacggctgttgatattctcgttcctggctccattactatctttaagtgaggaggtatattatgatctccaggccttcccagtccggacaatctcaattatataaaaatgctataaaatccgtgggtataaaatccgactcgcaaacaggaagcgtcaaggggactgggcctgaggcacttgaaccttaggctctggcctggggtcagggatgagaggaggggcctcctctttgccctctgctttcccactcctgggctctggcctgggggtccggaataagaggggcctcctctttgctctctgcctttccaccccgaggcaggggctggaccacgctgcccaggcatctcttcctccagacccaaccctcaagttccacccactagcctccccgccccggctttaggaccgcgggaactgttcctgcagcagcctggctttgtgaagagcagagaccctcggggcaagaggagcaaaggaaaaaagtgctaatccctttacaagagctttcctggagggcgtggcagcggcctgggaggagagtggggccgccgggcgcacggttctcactgagcctgccggggaggtaagcgcagctggtccagcccgggccccgggcgcgtagccccgccctcggtccaacgcgccttcccaccccgggaaggctcccgagccctgcggcccagcctcccgctggaagccccagtccgcagccggggcctccgagaggccgagaatcccaattagggaagggcagccagcagcccccaagccgggagccgtgcctgccagcgtgcaaggctgcagggaactgggcccccagccagggccagagccagagcccgccacggccccaccttcggccctaatcctcgtgccgattcacaccccaggcctcgtactagcta

SEQ ID NO: 149888 - DNA, 634 bp, Homo Sapiens
ctagctgtggttgctactgggaaggacctcccaggcacagtaaccttgggaaccaggtgccactgctccaagagagcagcttggacttctaaggaggccaagggccaccccggagcttgcagccctaagtccagggtgtggccagacgctccatctaacccacttaggccaaggccacaggtgtgaccctaaagtgtgtcttctgatgctgggcacccacaggtctgtgcgttgctccccatgacactcctggcaagccaaggccttaggttaggggagcattaggggcctttagagagatgctctcagcactggatggcaaacccgggaagatggcgtcaggtgtggcagggttggtcggggtgggaagagtgggccacatctgctccactgggcccattagggtggcaagaagtccatgctcccatgtgatgggcagacccttcctggcactgagatcttgggagcagggcgggctgtgtcacacgggggtgggtgacactgcctgggctgctgagcacagaggccaggcccgctctcccatgccccacactaatgcagatggctgctctcaggccctgcacatcttctgtacctcgtgccgaattcaccacccagcctcgtacctagccga

SEQ ID NO: 149889 - DNA, 1340 bp, Homo Sapiens
  misc_feature (240)..(240): n is a, c, g, or t
gggcccttccggttttttcctttttggcccccctttagggctgggggagcctctcccattccggttctagccgggaccttcaaagccccctttttgtttttccaggggcctttggttttcctagggtaagggggttttccggggttcccctcaatctgggattcgtgaatgtcccatcttctgggggaggtctttcatgggctttcttttcatttccggtttatttctattctttctggntaatacaaagaccctcagttatttgctgttctgcctcagtcttattttggcgtctggagcgcagggatattcccttattttcagggaccgagtcttgtaatttgtgttcctctttgttggttttcatgtcgttgctgttcagctcttccgcaggttcaattctttttgcagaagtcctcaaatttctcttcatgatgaccacgggttcggatgatttgccttcttgcccgtgggagcaaccctctgcttcttgctggctggcagctcctccacaatttcctctgggtgctggcatgcagcgcagcctcttggttcccgtgacgcttccatctttgccacctcccctcttgaagggcagtgggggcagggaagtgttgcttttgctttgtgattttacagggtctctggtgcttaccacgtctcccacgggttctactttaggggcccgaagaactcttctggatatttttagaggttttccactgtcaggtgtttgctttggagcgcttgtaaagctatcagcagcaccatttgccagttcttcagtgtggcctggtgtttgagagagctcttggaagctggccagatcttccaggggttgggccttttccttaggtgctcttggctgtctcctgctgccaattacatcttctgcgtccagcttccgctttgcaggttgcttaaatgctttcgtgcctttgccctcacctaccggctctttgtcggtgtgcgtggtctcccctgaggtttgtgtgagcttgccaactgctaacagctcctccttcacttctactttctgggcacgtgtcctgggccgtctctttgagcttgttgcggtgtcttctagttctggtgatgatttgcagggtattttagtggttttgtcatcagtcattgattcttcagtgtgacctgctgctgggtctttgaagccagctaggtcttctatggcttgagcattttccctgggtgctcttggccgtctcctgctgccagttacacttgctgctggagccggtgtctgttttgcagattccttcaatgctttgatgcctttaccttcacctgctggttctttgtctgcatccgtgcctcgtgcc

SEQ ID NO: 149890 - DNA, 801 bp, Homo Sapiens
ttctgttttttctctcccttctttcgcttatccaatgagcacaaggtgcgggggctgggggggtgggaaattaaatgcttttgcctcgtttataaagagcgagttttcaggaggtcccttctcaaggaggaggggggcacctctcccccaactacaagcagcagcaaagccaagccaaggaggacagagggaaactggaggggccaagggaccccaaacaccccctcggacaggagccacaagctttctccccccacccacaatgcatctaccccaggggacccatctgggtggaagaagggagtatgtacacagatagaggtggcactgggctgggtcggggagggaataatttatccgcggcagcggtgggtggcaaaggggcagagggcagtagcctggaggcagtggtagcctaggggtcccgttctttcttaactttgatgtctccagcaaggatggtggcgatctcgccctgcatgaaggcccagggcacggaggagccgaccagcgggcacttgtctccgctcgggcagtacacctccccggccgggccctgcgccttgatgaactcccgggagcagggaaagcagaacttgtgtccgggcaccgaggggcactggacgaagtgggtgtcttctagccgctccctgcacagggtacagcacaggggggccccaggggtcgccccagtgccgctgccacccccactgcctcgtgccgaattcaccacccaggcctcgctaccttagccgtaatggtttcgcgcgctgctgcgcgtgtgtcggtggtggttgttgg

SEQ ID NO: 149891 - DNA, 558 bp, Homo Sapiens
tttgagcattcaacagttttatttgctgttggggaatgaagggaacaggaaggaatgacatggaggggaaggaagctccttactcccgtcactaaggtagggcacgtggtacagagtggcttgtgtgaagcggccgccccaagctgagcctgcagctgataaccacagacaccctggcagggaaatctgtgatcggaacaacaaaatgccaaggaaaacaaaacccatttgcatttggtatgaatttcctgtttaaataggttttattagcgggcaagaaaggaaaagtggtgacttcaaggtgtcattgggctggcaagggctcgggcccctggaggggtacagtgggggctgggccacactccctgctgcccgtttcctcctgggggcagctgcagcaacctcttggcttgtctgcttcctgtctcttacctaacagtcaaggctcactagaggagtcccgggccccctaggctggctccggggaaaaggaatcaggcagaaccggctagtattatcccaaggagtgtggctgggcggagcttccccacagatctc

SEQ ID NO: 149892 - DNA, 881 bp, Homo Sapiens
tattcttctcgcacagatccttcagtaaagcatcccagttcattgtcatctatggatccattgccgtcctgatcatacagctcaaaagccttagtggactctttcccacacattgtgattccctggaatttaagaagaaaattctcctgcactggtagtaacctggccatctcagttaattccagcttcccatcattatttgaatcaaatagtttcagcattaggtctgtatactcggctaattttgtgtcatcaacagtcttgtttgctttttctagcaggtcctttagaaagttcttaagctcctcagtttctatgaagccactgtggtcagtatcatattttctccatgtcttcatgaattcctcacaggacttcagctgctggcatcggaagagcagcaggaaattctcttctgtgggtaatacgtgagccaactctacaattcctatttttccatcatctctttgcccatactgatccacaaaagttttcatttcaggtgataactccaatccagccttctttcgcgcctgctggagctcctggatcaagttctgcagctcctttccttccaggtaaccacttccgtcagcgtcgaaatggagccagatctcgaaaaactgtgaggctgtgatgagggatgactgcaggtgggattctgccattgtacagcggggtgtgtgtctgggtgtgtgaatatgcgtgtgtctgtgtccgcgcgagggggagtgagcaaaagctcagcgtgtgcgcgagtcagggctgcggaagggagacctgggcgcgggcgctgccgggcgctgtcctcggtgctgctcagctcagcgttcctccaggagcctcgtgccgattcaccacccggcctcgctcctagccga

SEQ ID NO: 149893 - DNA, 1239 bp, Homo Sapiens
  misc_feature (61)..(77): n is a, c, g, or t
  misc_feature (967)..(967): n is a, c, g, or t
  misc_feature (1154)..(1154): n is a, c, g, or t
  misc_feature (1163)..(1163): n is a, c, g, or t
agtcaacaaaagccttttattcattcaaaaattaaccattgggtttattccgcagatattnnnnnnnnnnnnnnnnngaggggggcaaggcttcccatcacagtgcccttaagttaattcacttgctatgccagggatggcctagccgatggttgtctgggtaacgcttgccagcaatgtggtggccctgggcctctgaggactcacagcccccctccgtggcctctccgctccagcctccctccggaccagccgtccggtgggtttgcagcccaccaggtgcgttgtcggcttaccaccaccagggggcgcgccgcgcttccttagctcccttaatattaaatgctgaaaccgcgctgggaacagggtgactttccgcctggcgggtgggcaatggaggctttttccagagacagcctgcctctccaggaagggatgcccaggcatcccgacctccccaccaaccccctccgattatacacaaagttcctgaaaccccaggtgcacttgtctaggaaacgggctgtcaaactgaaaagcatttcaggggaggagatgtcagtacagagggtgacacgtacgcttgccttgatgttattttaaacgtggcctgcttagatcatggaaaatcggaacattctcctaagtcaccatcaacacaaagtgaggagcagacgctacgaggaagaggacagtccgtgtccggctggccgcctggggctggtgcgtgccctggccccagtgggaggctgtgcagagggactatgggcatgccctctgcatcagagcatctgaagcgagccgcattgggtggcaaacgccgctgtggagaggcgcacgggctgctcaggaggcacctggctcaggattctgcggcatcactgcagccagaggcctggggagaggagggggcagagatcggtccctgccaggcaaactctagtgaaaatggccagtgtccagcacnccgccagggccgggaagggcggcccttccggcagctctgggctggctcgggctgtgggcccaccggcatgctgggctgcggtccgcaagcataccatctgctaaggccagaagccacacctgtggcttcaaaccaaaaggccaaagggcaggacgatggaggaaggccagacacaccgaaaaggggngggggtccnacatgcttaagcccagacaccctcagccacaggtcaggttgtacaacagtgtcagtcccattggacccctcgtgcc

SEQ ID NO: 149894 - DNA, 770 bp, Homo Sapiens
  misc_feature (589)..(589): n is a, c, g, or t
  misc_feature (592)..(592): n is a, c, g, or t
tggcccactcttcccagacttcttagtttgagtgcctctgttgacgcaggcccagcctgctgatcagatctgctgcctcattcatgggtagcaaggctgtctggaccttgacgtttctcagtcgggagcctgtacagtcagaagacgacagctcctgctggagtctctgggtagcagtggagttgagggccttctctttgggcctaaccactggaggggagctgtcggaagctgctgctggacctgcagtcaccactaattggtccacacctgtagaggactcacaagtagatggtgtggatttagctctgcaggccctagaatctccagaaggcttctgctccagattctgaatctttaacatgcaccaggtttttaattcatccaccaaggatatctgtcgtttctccccctcatgcttctctgtgtctgagtgctgttgcaggcggttcaggcactccgtcctctctgcagaaagtcgctcaaccatcagcttgtccaaaacacgcatttggtgctgggtcttattctccatctgccccagctttgtattcattttgtcctgaaccgatcccagctctgctttttnttntatttctcctccacagtagcctccaactgattctccagcttgttgattagaggttcacatcgacaaccatttattggtgcctgcatcactttcccatccttgccccggtacaatgtgtagagctgatacgcctgaactcacctcggccgattccacacccagcctcgtacctagcctt

SEQ ID NO: 149895 - DNA, 486 bp, Homo Sapiens
acaaaaggcaagggaggaagagccctgctgaggagaccgatggatcttcatcacctctcatctttggggtccactctgatactatcaacactgtactcaaggcaatgttatcaccagtcaacaattctttaattcctttattcaaataagtttgagcacataaatgagtgctttattattacatagcaactgagtatatggttacgagcaaaatacagtccttgcccctacagagtgcactttaccatccagtgtttcccacagccctagcatacgtactgcctttcagtgcaggagagtacaagagctgctggtcgtgttccttttggacaaaagggctctctgtgtgtgggttacctgtagaggactcacaagtagatggtgtggatttagctctgcaggccctagaatctccagaaagcttctgctccagattctgaatctttaacatgcaccaggtttttaattcatccaccaaggatatct

SEQ ID NO: 149896 - DNA, 968 bp, Homo Sapiens
  misc_feature (217)..(217): n is a, c, g, or t
  misc_feature (249)..(249): n is a, c, g, or t
gacctttttttaccagaaagccttgacctcgagggcccaaacaggtcagattgacacaagtctgtaaccaccaccagggagcctccaatgggcaaaatccggtatcgaatctgcttttcctcagcctcagcaatgtttttggtcttcttggttttggactcccacctttcatgaaagggcccttgaaccaagtcccgcatctgtttgccaccttccnctgaactccaggttcactgcaatgctctcttnacatttctgcttgtactggtgggctttatctgaaggacatgggcaaatgtccttcacatttgactgagatctgttttcctaagacacatgcctgatattctagtttgcactgaaaagagtaggtatgaccatctgaaccacaaacagggctgggatagaccactgggcactgcttgcaggtggataatatgggacccctccactgcctatggtctactcctgcttctttcatcctgtgtgtaagcctccggtgactaatgcagactgcagtctgagaatcttgagcaatgcatactttatggcgactacatttcatctttaagcatggatccttagctggatctaaagcctgatcgaagggttttcctggactccaagtgcggaaataatcatcgtctcggaatttgttccactgtccgacttccttgtcatactgagagattgtggtgagccattgtttatcatccagaaaattaccgccgtccgaccgccccccggctgcagccaccgccgcggcagctgcgagagactgactgcaccaagcggctgcacacacacacagtacggctgacaccttgagcatcttgttgtgagccagcactgtgctcgcagctcctgctggaaatgcagcctgctctgccaactcgctgctttctggagctgctgcacgcgcccctcgtgccgattaaaacacccaggcctcgtacctagccgttata

SEQ ID NO: 149897 - DNA, 992 bp, Homo Sapiens
tcgcggtggttgtgggtagggcgtggagaatccggggggtctggatactgacaaaatggctcaggtctgagctttggctgccccactggttgtgtggctttggccaaggtgcaagttttctcgggctgcttcctctgaaaaacagggagtggccaatcctggccgacagccctggtggcaccccctccccactgaaggcagagaacaatgtgggaaatagtctaactcaggccctgggctgggcctggcccgacccttctcctatgcctcccagggtactgtgtctcaaagaacctcttccctcctggaaccattttccactcctctttctttcaaacaagtcccccagcctgactcacaacccctgcttgctaccctcagccggcagaggcccctcatcagtggtaaagacagttcatctcagctgcctgccagcctatggtcttcacagcaccagaaggaaaatgcaaggcaggcaccagctcaccctggctcaggcctgacgacagcggcccctgcctcagcccaccggggccagtcctcacctctcccgcacgcctggctctggggaagcccaggccgccatcctctggcagttccaggtctcttagaccacttccccctggctcctttccacctggcctgccccttctgtggccatcccaggccccagatgctgccctggtcctcctgaatgtttacaacagatgacacaaccaaggcaggtccaggggtggggcccagggacagatgcggacaccagcctgggttccactctggatgcaggagcacagggctgagaggctggagaagtggagggctactgtcccgaggtgagggaggtgatggtgggaggaggggtgggcttgggacagcagggtctgctgggcctgcaacactcagggttcacagggcgcctcttcctgctctgtaggaggctgctggggaggctcgggcggcttgcaggcccactgcggtttctacctcgtgcc

SEQ ID NO: 149898 - DNA, 1447 bp, Homo Sapiens
cagcagtaacctgcgtctttccaggagcccctggtgccacatagtctgacccctctcaccaacaagctaccctcccgtccagcctgactggagttagaggaggaggaggaggcaagccgactgcagtggggagcccgggtgccccgtcctctgtcagcaaaatgcctcccttccatctgcctctagccccggcctctgaccacccaggctctgccccaggcctgcaaccacctcagcggaagccagaggggctgcctggcagatgccgctctgacccttcaggagtgcccactgcacctgaatcaggcccaggccctggagagcccaggcctgtacccaggatgctctggtctggccctgcctcggcccttgcagtggtccgagccaggatctaggctcgggaggcacttgtgggtccctctgctccaggcaccatcctcccctacctaggcccacatgagtggcctcatcgtagggccaggcaggactctcctttgcccatccatccccaccttgagggcagagctgggtcaggatgccaatgccactcctccttctgcctagcgtggagcccagcacagaggggtatcaataactgggggggcccagtgggtggagcagggtgggccaggctggtcaggaggctactccagctggaacagagtatggctgagactgcccatctgtgggcagcccccaggcccaggatggtggccagggcagacggtgtgaaggtggcggtcactggtccttggtgacatcactgagcccactctccatgcggagcagctggctgctggcctcgttgtaggagatccagtgctgcagatcagcgggcagctcagggggctccaccctgcgctggcacaggtgctgcacgacgcgctcgggtgaggtgcccagcaggtgctgccggaagcgcagcagcgcgcacacgaagccgtcccgcaggctgacaaagcgcgcctccaggtagaacgcgcggtcgtcccagcccagcaggcgggtgcgcacctcgaagggctccagcaggcgcagcgagcggcggtggcgcgcgcacgaggccgccagcaccgtgtgcgcccgcaactccctcagcgccccgagcaccccgcagcgggtcaggtgcgcgacgcgcgcaaagtcggcctcgcgcaggtagcgcgcgttgttcatgtgcagcagcaggtccaagtccgagggcagcacgcggcccgggaagcgctgctcagctagcaggtcacggacgcgcggctgcagcaggcgcgcgcgcagcacggcgcacggaaggcgcaccaggtaccagacgtccagcagcgcaaagacagcgagccccagggccagcaacgccaccagcagccccagcatagcggcggcggcgggcgcggggtcctgcggagtccgtggcgccggtgccggtgtccgcggcgctggttacggtgcccgc

SEQ ID NO: 149899 - DNA, 637 bp, Homo Sapiens
gcccttttctctaacttcaaaaacagatgggcttcgtaaacgagacagactatcagtactcaacccaaaaatatcatcactgccatcgcaagcctctgttatagtagcaccctgtaaaaactctctctctgcattatagttgtcctttcttgtagttaatttagttaatccagctgtgactccagaggtagagcaaggggctgggtctgtaacatgaaagctgatactagatatttccgcacaatttaaacgtctgggggatgaatacacgggttgtgtaggaagttcagaaacatctaatgcatttgcctggataggtacagaggataaagctgaagggtgtggccggtagatgacacttggtgaggtagtctgctcttgagttcctgattcatacacaccaagaaggtccggagaagtaggtgaagcaaggtttacttcatggaagccttccaagggatcattagccatagcaaaagcctcatcataagataacctgaagaacccaccgcggccgctgccggcgctcaggggcgctcacagagccgcagagagcgcgtcccgaagcagcgagaaacggaggaggacggcgagccctttccgctacactccacggcggcgggctcaccctcgtgcc

SEQ ID NO: 149900 - DNA, 775 bp, Homo Sapiens
tcgccttctcagcacaatctcttgtttcctgggatcaatgactctcactttcttgtctttggaagctgtgcagatcagactgccattccggttccagctcacattgtaaatcatgtctgaatgcatatcgtccaagtttataagggcttcccctgttcccacattccagatgataatggcattatcacagcctgcactaagaagcacattgcgggccgttggatgccaagccacgatgccgactctctttgagtggccttccaaaatcaccacaggttcagtcagggaaagggtgagtccattttctgggatctgccataccatgaccgtgcagtcctctgaaccgctggcaatgacctgatcgttatgtgggcaccagtctatgtccagcactggtcctgtgtggccacatactgtagggtaagatttgtcaattcgaccagtcttgtgcagagggaggacaaggaacgctcctcccccacttgcctctatgattatggcaacaaatctgggattgacagcacaaaaggaactatcccaggtcacacgagaaacccggatgtcatcatagcactggtcatttttcaccgcttgcccaaatacatgccgaaacttgctctgtcgtaccactcgcctcatcgtgtccgggccgaggtgcctgaggcgccgccgccgaagtccccgctgcaaagccgggcgaagcctccaaccgctgccgcctccagcccctcgtgccgattcaccacccagcctcgtacctagccgtaaggtcgtt

SEQ ID NO: 149901 - DNA, 907 bp, Homo Sapiens
catttgcctgttcttccacacatgtctgccatttgtggggaaatgactttggaagcaagtctcagagctacactttgaatttcagatcagggtccatgcagtggagaattttcagtatcttgcagaagcattctgggtgattttcctttcatggccaacaataagaacttctctccccatgttgcacagcaagggtggcacgcccttctctccaagtccagaggctgctgctaagaacttttccaagagggcttccagtgttagtgagcgcacttcagggaaggcagattctaacagctgagagaaagagatggggacattcgtctcccgctctccactcttggctgccgcggcccacactgcagcaatggctagtctggtgaggctctggaggtactggggcaggcctggcaccttgaaggcccaagggaatcccgttatcagctctgatcctgagataatccctctgacttcctcccagaagccaagactctccagaactggctggttgtcctttgcagatctgttgaggcagcaagtcaataggaagagaatatcaatatatacagctctggtcaccaaacatggattttgcctcttggccagccagagtttggctttggtacaaacagtgatgtcagtcagctcgtgctggaagtctgaattcgttccgtgtttggagtctgagtaggcttgcaacaaatgaaaaacctggagaagtgtcccatgaatgtggttttgccggaaacactggtcagtgcagctggggagtgtggacaacagagttcgaatggtattaggaatgtgatctatcataacaaatgggaccaaggcacgagctgccatttcacgggagtggtagacaggtgagtgaccacacctcataatgaagggaacaaaaggtccc

SEQ ID NO: 149902 - DNA, 1167 bp, Homo Sapiens
cgggtatgtcccctgctgtctcttgtgttgtctgtgtctacttttcgtgtgtgattctctctgtcgctgtgttttgccgcgtgccttggttttcgtttgccattctgccgactcgttttcgtgctgttcggcctgtggtccagtctacttcggatgatgggtactttccgccatacccatcccgtctcgcttcggatgtgcacacctgtgtcacttcgctgatccaggaaatctcccgactttcagtcacccgctgatttggcttgacaaccccatcagtcttgacaatcccatccacttctggccttccaggctcctgtttactaacctcatagtaggcaacgattttctcaaagtcccttttcctttcttcagtagaacaagcatccattttaaattggagaaggaagttttcctgaagagccagaatccttgctaagtcatttagatccaaccgaccatcgtttatttctgtcaaaaatcttcatcatggtgccagtgtattcttccagtttagcctcagaaatggcctttttgtggtgaagaaagaggtctcggaggaagttgcggagctcagcagctgatataaagccactgctgtcagcgtcatatttgcgccaaatctgcataaactccacgctgctgtccagtgggttttcccggcgaaagagcagaagaaagttttcatcctcagataagaacataccagcaagctctttcatccgaatgcgaccatctttagaggcatcttgggtagtcataaactgctgtttcaccttgtgcaaatttgctttcatgaccgtgtcatcagtacccagtttcatcaacatgtggagaaagaaagcatcgagttccttctcttctatgtaacctttttcatccgcatcaaagcgctgccagacctgccagaagccagcggcgtccaagcgccccagagtcggttcccgggagctgtccatggtgttgacgacgaagaccaggcaccggcgcggaaggacctagacaactttgggaaggactcttcaccgtatttcttgacttgctctcctgcttctttcgctatctgattagctttgagtaactgttgctggggaggacgcgagcgctgctggccgtggcgtcgctgagccctcgtgccgatttcagcgcgcctcgacctagcgttat

SEQ ID NO: 149903 - DNA, 701 bp, Homo Sapiens
acagctcccgggacccgactctggggcgcttggacgccgctggcttctggcaggtctggcagcgctttgatgcggatgaaaaaggttacatagaagagaaggaactcgatgctttctttctccacatgttgatgaaactgggtactgatgacacggtcatgaaagcaaatttgcacaaggtgaaacagcagtttatgactacccaagatgcctctaaagatggtcgcattcggatgaaagagcttgctggtatgttcttatctgaggatgaaaactttcttctgctctttcgccgggaaaacccactggacagcagcgtggagtttatgcagatttggcgcaaatatgacgctgacagcagtggctttatatcagctgctgagctccgcaacttcctccgagacctctttcttcaccacaaaaaggccatttctgaggctaaactggaagaatacactggcaccatgatgaagatttttgacagaaataaagatggtcggttggatctaaatgacttagcaagatgtcatatctaggaagccattgccaaaatccaagctcatgaagatttacccgtttgtttccttctaagagttatataaactataaagtttctgttttatgtaaatccttttcatgttaattgtttaatacagtgtaaggtgggggcacaatttcattattttgcatgtagatatcta

SEQ ID NO: 149904 - DNA, 700 bp, Homo Sapiens
tttagatattttatttctttattaataaaaacaaatattaagtagttccattttattttcaagtagttttttggtggaggagtcgttttgaaagctgataaaatttattctcattttgagagagtgaggggtgtacagcaaagtcactgcgtaaaagtgagcccatttagggaaggatgacttcaaatagctgagtctcagcccacaagccttgaacatatacaatgatattagtcattgtatatacaatatatatgtatgtctaccatatatatggcgcgctcgcacacaaagagagattggaaaggggaaagtggaaattcaccacccagaattttaacaaggtatatagatgtgtatcaccagtatgccaaacgtctgttaatgatactgtattaggtacactgcattaacaacccaggtcgataacttttcctacagtaaaggggaaactccaggtcctttcagcgggctgagcttggagccacgtctacacctgagtgtgcaagtggcttgttctactcaccatccgcatcaaagcgctgccagacctgccagaagccagcggcgtgcaagcgccccagagtcggttcccgggagctgtccatggtgttgacgacgaagaccaggcaccggcgcggaaggacctagacaactttgggaaggactccttcaccgtatttcttgacttgctctcctg

SEQ ID NO: 149905 - DNA, 829 bp, Homo Sapiens
aggtgttatttttaattcatctatttctggatgggtcacattcatacagttctgagtttgaggagaaaacagccaacatctgggggtgcagtgaacggtctccccaggctctgccagctcccagcatcaccgcccctgccaccccctgcacggtgcccagtgtcccttctaaaggggtcgaggccaggagggtcaaggcctttggtttgcactgctggcactgactttacccgcagcccgcctttccccgcgtcagcgatagccaccagcaacttgcaggagacgcagaaacgcgtgcacccatgctgtctcggggtcctgggagggcaggtcgccctctggcaagcccccaacctcactacccccatccctgcaggatgggcgtgtgtcctacccgaagctgcacctgcccttgaagaccctgcattgcctctttgagaagcagctccacattgagctggccagcagggtgtgcgtggtgtccgtggagaagcccacgttgccaagcaaggaggtcaagcacgcggtaggggctgagccggggtcccgtgtccgccgcaggggctgagccggggtcgcgtgtccaccgcacgggctgagccggggtcccgtgtccgccgcaggggctgagccggggtcgcgtgtccgccgcaggggctgagctccgtgtatgcggttgaattgctcatgccctggtctggtcatgcagggcctaggaactcagcctggctgccgctcagggaaaacttgtggggtcccgaggttgggtcttggcctgtgcttctgcgcacactgcagctgggcttttgctcttggctgccctcgtgcc

SEQ ID NO: 149906 - DNA, 933 bp, Homo Sapiens
cccgctgaggtcagccacacctgtgcagtccagtggagctgcttctcaaagaggcactgcagggtcttcaagggcaggtgcagcttcgggtaggacacacgcccatccttggcatacacgtccctgagcagcttggaggtgttgaccgggggcggcagctgcggcgggaggctgaaggtgggcttcaccttgtgcacggccttcagaacagtggcccgatcctcctcagacagcagaacggcggtgaagagtgcctgcagcttcagcccctcctggctcatctgttccagacacctttcgatggtcccggcgtcctgttcctgcctccccatgcactggagggcagccgcataggacagcaggtccggggtcaagccggcatccttcaccatgaataacacatataccagctccttgaaggcaccctgccgcgcccagccaagcatcacggcgttgtacatgtccagcgtgagcagcttccgcttctgccgctggccgtggtggacgaccagcaggtggtgggcgaggggcagctggtcagtgagcaggcagcacttgaagaaggccaggagcctctgctgctgacctgagagctgggcctgcgagtgctgccccgacggggcctgctccacatcgaggctcagcttcccaggggcctcctgcagcagccgggccagctgctcctcccaggggctctcgggggcctggcgcgtgcagtcctccaggcacccggccatctgcttgctcaggagccggggctccacctgcaggcgcctggtcagcgccttgaactccccgctctggaatggcatctgcagcttcgccttcaaccgctgcatacgcatctgctgggtccgcttatccttctccagtatctttgcccagcggccctcgtgccgaattcggcgcgccgtcgacttcatactctctccc

SEQ ID NO: 149907 - DNA, 699 bp, Homo Sapiens
ctggtaagtattttgagggatgtggccaccaccgggaccttgtggggcactcagtccattcccattctggttctcagaggctggagaggcagcagagggtccagtggtaggctgggaagctgaagggttgtctgtcgttctgcaccgccttgttgggtgcctgctgggtgctgtactctgggtttggctcactgaagttaggaacctcagaataaaccatacagaattctccaatcttctgcagatcacccccacggccagtatatagtgtcagacaacctttgaaaactgaagcgtaccctttggtgagccggataatgtccccaggctggatcagattgccaacatcgtcccagacagagatattgatgctgcctgttttgtccgccactttgcaggtccgaacctcatgcccgtcctttgtcttggtcactcggcctgtctccagcacaatgaagataaggttcagattcttgagcccaggcttgatatccttcacaaaggtctccgtcgtcatgctgcctgagcctcggcaccccactggatggggaatagaggatgaaggctcaatgcttggatcctttgcccccatgctccacttcccaaggcctacctaccccattaggctggggtcaggcagcctcaacccctcctcgtccgattaacaccccggcctcgcacctagcgtacgtcctctcc

SEQ ID NO: 149908 - DNA, 1086 bp, Homo Sapiens
ggctggtctgtgacgttgggtggtatggggtgtgtgggttcggggttcctcgatgtttttgcgggcgagtgcgattcggggcttctatcccggatgtagtccgctgttgggcgtgggatatccagggcttccggctatgtttcaggtgtgtcgttttgcctggcccgatgctgcccggtgctaagccgagggaggtaccactttgtctcggttattcggaaatgtatttctgggagggaatagacctggagagtttacttgacggtgagagtaactatggggctacgagttgacacactccttttgttagggggtttctgggggtagagatagctcgcttctgagaacccttgtgaacggtttggtgtaagagttcaagaggatttcctcttcttcttccacttcaattagctcttgaatggaaacaatgtctctagctcctgcatggccactgtccttgcaggtactatgcctggctttcgataatcttttgctcagaaactcatgctcaaaagagttcaggatctctgaggtaaggccaactttatgtgtgctggtgcagaaggctataagctcgcctaccattccctcctcattctgtccatactgaacacaaagctctaccaatttctcaattagagcctcctcgcagtctaggccgaagatctgcagctcctccgccagctgctgggcggatgcggacatggtcgcccaagccaggggccggggagccggcccacccagctccgacctgcgcccaagaagcccacgggggtggcgagcgatgagctcctcgccctcttatccttcccccctccgcggaccgtgacaggaggtgactggcccaagcaagacctcagaccgtcagaaggccccggccgtcggtcacagagaaatactttttttaaaaaatgaaggggtggctcccaaacgccctgaatggagggagcagaaatctcgagaggacgctctcctggtgagaacgtcctgcttcccaaaagctaccgctgagcttctcagtgacggtggcagaactgcggcacgaggcctcgtgccgattccacacccagcctcgtacctagccta

SEQ ID NO: 149909 - DNA, 779 bp, Homo Sapiens
ataggagatcacagtttgcggtgtctgaggtgaggggcacttcccagtagtggcttggggaagttcagcaagggatccatgtccccagacagactggtaaggtgccttggtttttagttttcttgggtggtcccttcactctactgctggatttctcagagaaagaccttacctctcaattcccagttggggggaaaaagggacagtataggtaggctgtagaggcagccaacagcgaccggagaggtggtgctgcgtgggtgtaggagaccaccataccaggaaaaggggctatgccacattgggagagtttcaggcccaaaacacaacctcttcctgagtgctcacatcaccattaaggcagcgacagccaccagttggctggagaggaaacactagggctcccaggatcaaaggatttccacaggatcagctctacactcagcacaccccagcttttgcaccaggagcagggcagatagagtgcaggcatccagcatgggaccaagcaccacacatcacatcacaccaagatagcactctaagcaactgcagcacagaagggggtgggcacccagcggaggggcagggcacactagcgctccggggataaaaggggtgcagcacaacatcccacacacagggatagggaggggcagcaggaggcagcagtgcagttgccacaccaggcacagcatcagcacaccacactaacaccagagaaggcagggccagggcgagggaggagagattccggagcaaataagggggcgggtcca

SEQ ID NO: 149910 - DNA, 1279 bp, Homo Sapiens
  misc_feature (167)..(176): n is a, c, g, or t
ctcccaggtttcgaagagaatatccccgcgagggcagatcataggtgagcggcgggtagcccgatgtccctatctctcggaaggggtcctccggagggaaaacagagtggtttttatccgggtttgaaccctccaagggaagataaatcggagggcccggggggttnnnnnnnnnntgaagtgccccccaataggcctttaaggcaaaaaggtaatggggggacacggttagaggaggcctggccaatgggaagcgaggccctgtgagggcccccaaaaccttaaaggggacagttacttccaggggagcgttcccagctccagtgtgcaggagggatgacttggcgtttggtgacattccattcggccggagttgtctaggacatggcggggcatgcgggccttgtctgtcaggggcagctgggcattgatgcgggcctctgcgtcctgccgtttcaggctgttccgccgcatcagccgtgccagctgtgtgttccggttcgcagtatactaccacggtgtgcttcaatgtacttgagcaacttcttggtctcaaacagcagggggatatccagaatcacgtagcggtatccccggaggaagtacttgaacgtctgccttcatcatcctcctgtgcgaatctcggggtgggtgatggcgttgagcaggctgccgccgggtcaggctggttaaagatcaggtcccccaggaccttgcgatttatgtcgccattcgtccagcaagacctcagtgccgaagacctctacgatgcgccggtgggcagggtatcctggctgcacgacgtgccgggccatcacgtccacgtcaatcaccgcacagcccagctgctggaacacctggatcactgagctcttgcctgaggcaatgccccctgtcaggcccaccagaaacatcttccaggaaagagagctgtccgcgagactacggagccaggagctacagaatcactggagagcagggcaagtgtggccgatgggggcggtccaccagaggagtgccagaaggaccttagtgctggccgcatacgacgcgctcaatacatcgtaactcaggctttcaaaagaggcccgtacgccccactaggccgcgaaattgggtcgcccggggcggtggcagccccgcgtagcagccgcggccagggcccgccccctccccggcgcccggctggctctcaccggcccgcgtggcgcgctacgtacccagcgcctccgccgtggcccaggcctccgcctcagcccctcggccgataaaccgaggc

SEQ ID NO: 149911 - DNA, 1289 bp, Homo Sapiens
atacggtaccgcagggccccaggttccacctggccctccggctcgttactcttgagctcttccccattaaggaaccaggtaccctggatgatggtggagagatcgagggagaagacggcatcttccccgtcgtatacctgcacatcctccagacctgccaccaggcgagctgtgggcacaaggtgagcagaaccgtggaacaccacgtggggactacggccatgtccgctgactgtgcagattgcggaagcggtagtcaccctcggagggcacacagtcgcccggcacctccacggctccggctttctcgatgctgaagcactgaatccagtcttcagagcgcacgtgcctgccgctccagccggtagatgaatggggtctcgggagctggctcgggaggcttccaggtcaacaggaccgtgttcttgtggcccttgcacatctctgcccatatggggggtcctgggggactgtgcttgacacattgtactctgagaagcgtagtggtacgggagttgcccaggctaaaggtgacctcgccagcatcctctcgggtgacccctggaaggaccagggcatgcatgtggcctgagctgctctggcagatgaccggcagctcctccccatcacgggtccagcgtccctcgaccccggcttctagagtttccactagcagcacagcattctctccttccaggacgtcgagcttccggggcaggcgcttcaggatgggccctttgactgtgacgttggccacggtgcgcacccggccccgcatctcgcacaggtagataccatcatcgtctgccttcagcctgtggatgatgaggcgccggacagtgccctcttcgatctgctcgtacttgcggcagggcagcagccgctggtcctcacggaaccaggccgtggggatgcgggagttgggtactttacattccagcacggcgatcccgtgctcacggccctccacgtcctgcaggggccgtgtgaaccggaggcggggctctttcacgtgcagctgcacggcactgagcgtctggcccgccgagttgcgcgcggcgcagacgtagagcccacgatccttggcctggcagtagagcaccttgagcacgaagccgccgtcgcggtcgcggtacatgaggcggcggcggtccgggagcagcgggcggccctcccagtgccattcgatctcgggctcgggcttgcccatcacgtagcagcggaacttggcgtgcttgccctcgttcacccctcgtgccgaattcggcgcgccgtcgacttcatactct

SEQ ID NO: 149912 - DNA, 738 bp, Homo Sapiens
tttctcggctcagtagttctcatgccacaccccagagctcagtctcctccacagtgtccctcgtcagttgctggctgcctcaggctggcacagtgggcagtggcttgctggccaggccacgacacggtagccagcagctgtatagctcttgcagcatctgggcgaagtcggtgggcaactgtctcggggttgcagagcccatgccaccagctcacggggagccattttgacgtaggcctcgggctgagtggcccctggccacgccaccaccacactcatgcgctgcagagccgaagagaaggggaagcggtggaggacagctgactggcaccgggggctcctccattgcctgcagctggggctcccaaagtggaggtctcatcactgccaagacctgggtcccaaatgctgagtctgcagccggctcttcctccaggacccagccagtagactccaccatcttcaagtccatggggtcgcccacgggggtgtcctggagccggctgagggcatggcaggtggccagtgctcggagcaggggccgccacaggcaggcggcgaggctctgggaccaggggcaggaatgcctgccccttcaggggcaccacccccatcacgtctaagccgtcctcagtgagggtgcccgtcttgtcgaaacacaccagctgcagcttgccccccaggttgatgcgcagtcctcgtgccgaattcagccacccaggcctcgtacctactcga

SEQ ID NO: 149913 - DNA, 1058 bp, Homo Sapiens
ctcagctcctggctcacacacgaatcccctccagggtcttcaccttgccagctcctctcccagctccttggtgcacctgcagcgtgtggtgccacagcttgaagagttggcccggacgtaggacaggtgggcaggggtgttccccgcacgatgtccagatactcctcggccagctcccacacggcagggctccggccctcgaacagggcggggttgtgcaggttgccctctgcgctcatgacgccctgcacacccgtgtcccggaggcagcgctccacgtcctgcaggcactggatgttcccgttagcaaacacagggatggccacagccttccgcacagccttgatatgctcccaggacgctgcacccgacaggggccccttctgctccttggtgcgtccgtgcaccgtcagcaactggcagccggccttctccagcatctgggcgtacctcacggtcttgtcaatctccgggaagacacggattttgcacgtgacaggaacagagagtttctcgtgggccagcaaaatcattctttggagcaggtcccactcgtcctgcagaaaggcgccatagtgacctctcttggctatcatctgtgggcagcccaagttcaggtcaatggcgtcacagtaatcctgagccaggagagccgcctgaacaaacacctccgggtcattggcacagaactgcacgatgaggggccggtcctcggggcacacctcgcagtacaggttctccttccggtagttggcgtcgcggacaaagacctgggcatgcagcatgggcgtgtagcagagctgtgccccgtggcgccggctcagcagcctccaggccagctcgctctggtccaccatgggggccacgacgtggcgggcccctcgcagggtgcggctccagaactcgaagccctgcagctttggcatcgtctccaggcgcgcgagggccccgccgtgtccgccgcgcgcctttggctccgagggcgccgggtgccggtgtcccgggcccgcccctctccggcctcgccgccgcccggggcccctgcagctcccggggcg

SEQ ID NO: 149914 - DNA, 689 bp, Homo Sapiens
tttttcattttgcaacatgttcactttattttcatcaccatggggcacactctttggggtgtaaaatgtactctacaccctgttggctatttatctggggttagacctctggagacttttcagatagacttgaagtctctggccttgcccgggaattactggctgtccgaagagagactggagaaggtggtggtctccttgcccttgtggtcccgctatggctcattttgattgagttcctcgttcggctggtcagagtggctggatagtgttggcccactccattcctcaggtttttttgaagcggcggtcttttagggagagccttttgttcctggaacttccttgatgggtcccttttcccttccgggttgtcttgggaaccttccacttcctcgcctctttggtgttggtgggtggttgttggacaatgggctggaggctcgtggtttcctggacatcttcaccagaccagcgtctctcaacagtctactccagtccacctggtctctccaagtctcccccaggacagtgaaggcaggccagcaggctagaaactgtagtcgccgacattacaagcaaatttgtgctgctgtgctctgcttcccaaatcaaccctccacctccatctggatccccatccaggaagaatccagttccacccctgctgtgaacccagggaagtcccc

SEQ ID NO: 149915 - DNA, 1268 bp, Homo Sapiens
ctagagattggggcggctatgcgaaagaatgcgtgtgtaggtgttctgggctatcgctattggactgaacttaagtgaacgagtttggtagttccgggagatcgatggggagggatcacgtctagcgcgtttgctacacagcgctggtaccggatgcgctacttgctatccccgaagggacatgaggacataggggtcacatgccgtgatgcggcagtgtgtcgtgcaccaccgtgggaccagacgttcgccaaagcgcggcggctgtatgagcggttgcgggcgtcggcgtggtggggtgcgcactgatgttaggttccaccagtgggttagaggtttcgcgggcccgtggtgtggtgggttgcgccgccccgcgtgtgaggtcgcggggccggcagtctggttgccggcgttcgcgtcgggcggggagcgtgtccgtgcagcgtcatccgtttcgtgcgtccggcggttcatgcctgtgctaggccgcgtgcggttacgggccctggcaggggcagggttcgtacccgtgggtgctcttgggtgcgccgggggccttgtggctctcgaagtgtccgggtggtgtccggggggcccagtggtgtcgtgcctaagtgtgtgcagcctgtcccgttgtcctctgctctgcggtggctagaggtgcagcttgccctccgctgctgcccggatgggtgcgtgtcctggcaagttcatggctgcagcctgcagctgcctgccagttgctgctgggccagcaggtcctcgctcctgcctgcatggactgcctggagcggttgcccgtcggggcctccagactcctcctcttctcctccttcatcttgctgcccgcttgttaggcatgcatgctgccgctggtaggaggttttagagctccattctgcctgtttggagctgcagatgtcagacatcctgaagtaacggctgttctgctcccactgctgccagaaagccgggcctccatgctctcgcatgtcgtgctagctgctgattcaggcgctgctggctgcaccagtaggacggcagcgtcgggagcgccatatttctctgaggctcggagtttccgaagagtcccccggcccgacttcccgcaggcacgaagcgggccggccagtcccccggtgtaattcccagacgcgctacagcaacgccggctgtttcctcgtgccgaattcgccacccaggcctcgctaccttaggaccgttatcgttcgtgctatcgacttcttcgtggcgtgtgtgtgtctttc

SEQ ID NO: 149916 - DNA, 583 bp, Homo Sapiens
ggactgtggtctccagattgtagtgcttattcaggaatttcagcagcttctgtgagggtcggtcaattgccagttggtgcggttccactcgctccttctgcaacatatactggaagagttctcgcccatggccatggcgttgcacagactcatggatgtaaaagtccaggatgcaaagtggttctacctcattatgagcctcacgatcatccagtacaaagagcttcttgtatccaactttgatgaaaccaataatggctccttttccagccggtcgggctgaactgtctttgagaatataaacaacatggcggttactctgcatccttgatgcactagtgataggagcggaaagattctgggccttggcagaagccttgcccagttcatctataatggtcataatttgctgctgtagatcaacacgggccggcgttgtggttccgggtcggcgggctgaggggcctcaggtgctgttccagcaccgtgatccgctccgggaacagcgcgtccacatcgaacgggaactccatggcccattgtgcgcggtcggacccgccccacacgacgtcactctcgtgcc

SEQ ID NO: 149917 - DNA, 1215 bp, Homo Sapiens
caaccggtgagttagcctagaggggacgcactgtgtcctagttgaggctaacagtcagtatcctatgcctcaacattcagcagaggccccagatcagcgtctgagccaggccaacaatgaccaaggaggatgggatcctgggtgcagctcatcacaagcgtcggggtgcagcaaaaccatccaggctggacagtggctggacagttccaagaaaagaaacgcttcactgaagaagtcattgaatacttccagaagaaagttagcccagtgcatctgaaaatcctgctgactagcgatgaagcctggaagagatttgtgcgtgtggctgaattgcccagggaagaggcagatgctctctatgaagctctgaagaatcttacaccatatgtggctattgaggacaaagacatgcagcaaaaagaacagcagtttagggagtggtttttgaaagtttcctcaaatcagatggaagattcaggagtccatagaaaggcttcgtgtcattgcaaatgagattgaaaaggtccacagaggctgcgtcatcgccaatgtggtgtctggctccactggcatcctgtctgtcattggcgttgtgttggcaccatttacagcagggctgagcctgagcattactgcagctggggtagggctgggaatagcatctggcacggctgggaatcgcctccagcatcgtggagaacaccatacacaaggtcagcagaactcacagccagcaggctgactgcaaccagcactgaccaattggaggcattagggacattctggttgacatcacacccaatgtgctttcttttgcacttgatcttgacgaagccacaaaaatgattgcgaatgatgtccatacactcaggagatctaaaagccactgttggacgccctttgattgcttgggattgtacctattaattgttgttgagaccctgagaaccacgtgggggccccccacccgggattgtgagacaagtttgccggtaaccctggggaggcgcattcaagggtctttgttgtgctggatgtacttcaacctggtggagacttactggtctttgcccaggggcaaatccgatgtgagtcctgaggcacgggtcaggcctgaggaatctcagggttccctttcctaagattaaccgctgcctttcgctatggccccgggtgggtcgctccacggttcaatggttattcccagcttagccg

SEQ ID NO: 149918 - DNA, 762 bp, Homo Sapiens
tatcccccctatagagagtcaccgaacctgctaataggcaacagatgacaactcaaactcaggacagtgctacctcccgaagatgaggaggctgtgatcagagagggacttcctgactgctaagttaaggaattatttcttaacataggcagtgggcccatagatttccagtacttttaagtgtccatacatatttcacatacttttttgtttgtatgatgcattctaccatttaaaaaatttttaagaggcaagagagattgatggcaatcctggcagttgcttctgtgggtgtcgagaacactggaactgcatggttttcattccacatctgtctctggtgctgggtctgcatcaccttgctttgtgaatagggaaagtctcctaactttgctaagcagcaagctacattcagaagtaactttccacttggaaattctatgccttcctaatggataggatgaagtgtgtcttaagagtttgaaaagacaaaggtttcaagtctaaccgacctgtcagtgtgggaattcccttaccaaatcgctggacaaatgaccaccctgggcctgcctgaacacatgccatgaggaggaaggctggggtcacaaacaccccgtcccatgatcgcggagtcccatcaggatcagacccttcctcatgctgttcccaaattgacctcctacatttctgaccactgctcttagcagccccgtgtggaaagggagcctcgtgccgattcaacacccagcctcgtacctagcc

SEQ ID NO: 149919 - DNA, 887 bp, Homo Sapiens
  misc_feature (57)..(150): n is a, c, g, or t
gtaaatattagaaatgtagaatttattgatttcaactgtcatcaatcaaatgtatannnnnnnnnnnnnnnnnnnnnnnnnnnnnnnnnnnnnnnnnnnnnnnnnnnnnnnnnnnnnnnnnnnnnnnnnnnnnnnnnnnnnnnnnnnnnnctcatcatcagtccattcatgaaaatcgccactagcaaaatctccggagatctcaaaatctatagcacaatctgcaacaccatttattctggatcccatgacttcatttccatatctgtcaacacaccagcactgtccaacactgccatgacattgtgttggcttgtagtaaccatcttcatcacacagggggatatactgtcctaggagcttctttaccccttgccgcttctgaatattgctgagctcagtctggcaaggtgggtcttgctgtctctggaagcagtagcaccactcattattagatattaaactgtccttgtatgtgtcacaagaattgaagaatgccttggtacactgttcattcttatcaaggtaaatgcttctgagctctgactggtccaatagcaggtcatagtttgtatcaagtctgttacacatccagccaagtgagtccttgcaaattggcaagatgctggtatcgaatctgcttctctcaggcctcagcaattgttttgtcttcttgtatagacttcaactttcatgagggccttgaacaagtcccgcatctgtgtgcactttccctgaactccagtcactgcatgctctcttaacaatgctgctgtactggtggcctatcggagacatgggcatgcctccacattgactgggactgtttcttgacctgctgcttctttcgtgcgctcgtacgcttgttgcactggaccaaaggggga

SEQ ID NO: 149920 - DNA, 867 bp, Homo Sapiens
ttagcccgccccggaaattaaaaggggaaggaaaggtttgttgggcccgttgggggccaaggggccaaggttcccttttaagggccccctgggccccctgcccgggggtaggttgggccaccagtgggggtattcgggccagggctgtttccctgagaaagtgtttgttactgggcctcccctcgacgggtggggttcccccaaagtgcccgtgttccactccggtctgtgctttctggaaagcttccgccagcccctcggtagatcctgtgcaccttcatgatcgcgatggccatcatggcagccgacacggagaacatgatggctggaagcagcatgaccacggcagcgcccgggctgtactggaagaatccaattgccgacagccagccgcacgcgccccagccggagaagccaatcgcctggatgacggtcaggacaaactgggctccgaagatgaagaaaaacgccatgaaattaaaggagctgtcggctcggaaggccttgtagacaggccggaaccagcacacgtagccgcaaggcgtgaacaggagcagccacacgaaggccaggccgaagttggtccccgagcctccgccgatccaccaggccaggcaggcaatgaggttgacgccgagggtggcgcagtaaaacatccacagccggtagatcctcttcaccaggacctggtgctccactgggatctcgtcggagaagttctggtagaagcagggcttcacagggatgaacttgggcagtggcgggaagttgttctccttttctgacatctctgtttcaccaaccagcgcaggctgaagcctgcagccgcctgagggatccgggcgcgagcgcagcgctcctcgtgcc

SEQ ID NO: 149921 - DNA, 2279 bp, Homo Sapiens
gttttcttgcgtgtgtcgtcggcttctcttttctctcttggtgtgcttctctgtcccccctgtggtctctgcgtttgcgcttttcgtcggtttgtgtgtcgtcgtttcgctgtgtttctctctctctgcccgcttcccctggtgttccttcgttttttgttctgttcgtgccccttctgcctgttggctggcccggtcctggtcgcttgtatcccgtcgtggtctgttcgcttctggcgcctgcgctcctccagtccggggtgtcgcctctatctcctgctctgtggttaccctgttgccccgccctcctctgtattgtcccttgttcctcggcttggtcctgtgggatccctctgggccgtaccgagcctgtctgctggctgcctgccacggctgagctggccggccggacggtctcgccagctgctcccccgccccatctcgttccgtgtgatccgattcactgccactgccccccagctcccgccgcccgacgctccttctcacgcccggggcccggcggctgctccgggtggacccactgcttttgctcccttcactctgctgactcccggtgctgccgctgccatagctaaagcccgggtcctggtaggcaggcgggaagcagggtgggggtcccgggtactggtaggggtagccctgacccagaggccagggggcagccgggtggggcagcggggccagcgtgtcctgatccgaagtcccactggagccactgttgaggttcagggtggcgagattgctgcagagatccccgaagacgtagtagcactgctcggagaaggtgatcttgttgaccgtgtgccgcaggaagccgtgcttcagcaagctgctggcgtacttccgggcctcccgccgctccttgaagccctccacgtgtgtgtacagccagtccaccacgtccgccccgatgacggcattggcgatggtgatcttgagccacatgcggtcgcggatctccagtcccgagtctggcagctgcatgacccggacgacggcgctcatgtcactcttcaccgtcagcggcgcctcttccagctcgtagcggggcagggctcctgtcagtgccgccgtgtgggacagccaggcggcggggtcgatgggccgcaccgggtcagcccgtgggacggtgaagtagcttcggggcgttgggtcccagcacttggccacagtgaggctgatgggccccgtctgggaaacgatctcccgcagcacccgcacggcatcgtcattgctcatgttctcaaagttcacgtcattcacctgcagcaacatgtcgccgggctcgatgcggccgtcagcggccacagccccgcccttcatgatggagccaatgtagatgccgccgtctccacggtcgttgctctgccccacgatgctgatgcccagaaagtgatgtctttccatgttgagcgtgacagtgacgatgttgagggacatggtggagtcggttatgctgctgaaggaggaggcccggtccgcctgccgaaggcgctgcttcctccgccggcgtttgtgcttccggatgagtctggatgaggtgctctgctccgtggagctgctgagcctgctcgtgctgccatcctcgtccgagtccacaaagctgctggactcaagctcgctgctgagggcggtggacgcgctgtctgggggcagccccacatcccgccgtcggtctccccttgggtgcccattggtccgggcggcctcctcgcggttccggcgtcgggcacgctcccgccggtgactgaccatggactccgtgcctgtctcgttgtccatcccgtcacggctgctggccacattcgggtggaaggaggggggccgggagtccccgatgccgcctgtccgctcaagaggcgggggcaggtctgtgtggctgtccgtgccctgggaccccgcatccgagtgagcaccctcagccaggaccagccaggagaccacgcggccgttgaagcagggaagcttggcattgtcatcaaagatctcctccttcaccaccccgaagtcctggtccatggacttaaagaagaatttgtaggcgtgcacgggccggttgctgagcacgttcttgaagtcggccagcgtgacgcgctcgggggccacgggcagcttgaccaggtacggcgtctcctcctgtccatgtggtagataatcttggtctccgccatggcgcggcggcggcgcggagcccgcgcgctcagggcccggcccgaggctcctcgtgccgaattcggcgcgccgtcgactttcatacc

SEQ ID NO: 149922 - DNA, 1229 bp, Homo Sapiens
cggctgtaacctgagaggggtctgtgtctgggacccgggttccggaagcacgtgactgggaaagggcagctcggagaacgcctgcctgacccctgtgggggccacatcctccatgtcccaggctccttgctcggggcttctgtggcctgtgaagtggtgcccggggggctctgtcctcggcgggggcgctgctctccgactcctgcaggttccaggtgacccgcttcaccagggctctggaccgcagcaggggggtctgcgaaaccacctcctcaggccgggctgcctcctgtaccctcccactcgcagaggggctgtcttccttccccgcaggcgccacatccggggaactgggtgcctcagccttctcagccgcgtccggcctgagcaaatgtggctcctgggtgccctctggcaggggtgggggctgcgaagggtcttcatcgtgcatcaatgacacctccctctggatggcggccacggccaggctggctgggggcaacgcaggcttcagtgggaagtctcgctccggggaagagtctgtgctttcgggagaaggtggcgagctcatgtcatcgagctggatgaaaacggcgtcgcttgagaaatcatcaaagacgtgtccggcctccacggagtcgccataatccaggtccaggtcgtccggctcgcactcagctgccacctccaggacagggggagcctgcaggggggccttgtcggccgtagccacctccggcgagacatgtgcttcccccaaggctggcaacctggtggggaggtcttcccgccctggctccccctgtgcaaggggcgctggggaagcctccctcacagcccccttcctctttggggaatgggaccgggtctgcggccacttctcacgggaccgaggtcgcctgtgctcccgtgccctgtgctccgagcttggggaccgggacctccgcttcctccggtctcggggccacgccacactctccttcctgtctggccgctcgtggctgcgttcccgctgatgcttgtgcctgcagagcctctccaggctgctggtgggggagcactcccttccccgaggtctggacgctgatctccttttcttcttcttcctactctcatagtgctcataggaagagctgccagggctccccgaccgcgaccgggacgtcctccggctgtggccccaggggccccgcctcgtgccgaattcgccacccaggcctcgctaccta

SEQ ID NO: 149923 - DNA, 1026 bp, Homo Sapiens
ttgtttaacggccagaacattggaggcttttcgtaccgtctgccaacaccgccgtggccgtgctttgcgccgcgatttatcccatgggaggcaactgtaagtgcccagcagatcttcgacggattctttcacgttcccatatcagcgtctccccccctcatagaaagtggattcctctaaaccagatggaaaatgatgactccatggcccaccatctcacagggcgtcccataccgctgccggctctaccaacctctgggccagatcctcgggaggtcccacagggctccttgatgagccatcttgtagcttagccagatggaagtcaaatgatgacaatgcttgcgagttcttcagccggttgtagtaaaccaggttctccagccttgagattcctgtgcacgatcttgaggtgagtgcaaataggccacggcctccaggagccttgccgtagccaccgattgctctgtagtctcgactccgagtagtagccctggtccaggatccagtcagacacctccctccccagtggccagctccaggaagataaagtactccttgcgggtcacaaacacatccaccagctgtaggatgttgggatgcttcaccatcttgaggatgcctatctcgttcttggcagctttccgcaccttgcggccgtcccgcttctggaacttcttgcaggtgtgcagcttgcctgtcgtcttgtccttggcccggaagatttcacaaaactcctcagtcttgatgacctgtcccaaatcatatctgtcagtcacctccgatggctggttatagttcttcttgtcgcccagagtcacacacccaaacggcattgccaggctctaacctgcagcgccggttggtcacagggaggaagtgatcgcgggctcagcggggcgccgagggctccggggacggcgggcagaatccgctccgagcacgcggggcagacgcggcgccagatgcagccgcttcggctagcctcggccgattcaccacccagcctcgtacctagcctagggt

SEQ ID NO: 149924 - DNA, 1151 bp, Homo Sapiens
  misc_feature (157)..(157): n is a, c, g, or t
  misc_feature (200)..(200): n is a, c, g, or t
tgtttccccgttggattgccaattgtggggccgggtaaaatttcttggccctaagcagggaccaagacttcccttttatgcgccacctcagagggcccggtatcctccccccagaaggattgagcagggggccgcctcggtgccagccagcgtgcancctgggagccgcatgtccctctgagttgctggaagcccaaggncccaggccccactgaggctgctcccagctgccgcagctcctcaatcaccacctgcacgccgctgcccacgctgtcacactccttttccacggcagacagagccttaaaggcttccccgggactttccttgagaggcccaggctcctcaggtggggaactatgtgcccggctttccccatcttcatcagggatggacactttcccttgcctcaggtcacccacttcctcctggagacgttttaacaactcattgttggccctggcaagacccagagcagcttcagccaaacccactgccttatcgacccgctggtagataacatgcaggagctgctctgagctctgaacagccaagccatgtccagtcactgtgatgggggtgctgggaggaggattcccaccctgggagcctgtgttgcctccattagtctcactcttacaggcgcagcagcagcatctggcctcgctgccactgggaggggagaagagaatggtggcactgaaggacatggcggatggggcagtaacaaccacgcttacactgctgggccgctccaacaggtaggaagcatcaacttctctggactcactttcctttctcaatgaggatggtcagaggagcccaggccccaagctgtagggtctgtgaaagaagagtaaacaagccatgaagaagcacacagtccatggcggcctctcctcggcctgcagaagggagacaggtgccttctatttgcagatcctgtgctctcctagcacatcacaaatcaaggccttcctgatgaacggtttcagacggtagagagcattccttctgccccccagcatggaacccccgactagtgcaacctaaggaacagggaagggattcagaaggaccttccggcatccgaaggtcgtatggctcttcctcgtgccgaattatacacgcagcctcgtacctagcctaag

SEQ ID NO: 149925 - DNA, 1426 bp, Homo Sapiens
  misc_feature (50)..(50): n is a, c, g, or t
  misc_feature (95)..(95): n is a, c, g, or t
  misc_feature (126)..(127): n is a, c, g, or t
  misc_feature (195)..(195): n is a, c, g, or t
  misc_feature (339)..(339): n is a, c, g, or t
taagggcttgccaggctccggaacccttttaggggaaaaaggatgggaanccgaaggcttgggccggattccccatggccccactagccatgcanccaggggttccccaaaccccacctagatggnngcaggggcctgggcccatgggggtccggaatggggggtggggcccactagacctgggttggggaggangatgggggcacagcccccaggggtccatggtgttccagagtcccctgagtttcaggttcagctgatgtagatacgatggaagtcgtgggcaccaaaggccgcgttgcacttggggcacttcctctggcgggcctcatagcggcnccgcacgcactcgaagcagaaaacgtggaagcacttggtaaggactgcatccttcttgcgggtgttacagcaggggcaggtcaaccgcgccttgtactccttgatctcctcctggaggatttcgtcggcatctgcgtagacctccaccttcctctgcttttccagcttgcgccgcagccgtgagatgtcctcctgagccctcttgaggttgaagctctctttctcacgagcagcccggctctctgccaggcagggctggatctcccgcagccgagtctgcacgtgctccagctgcaccttcaggtcctcggccagctgggcggcttctacagccttccgcttgttgagctccagggcttggctgcgcagcgtcagctccttctccacacccccgaggctgccctgcaaggctcgctccttctcctccagcttctgcacagtcagcagctgggcatccacctgggacttgaggccaaggacctgctcgcccaactcatccttctcctcccgcagcagcttgtgaatctggttggccttgatccgctctgacattagcttaaagttggcatcatccttgttcccgcaactgctgtagcagccgcccgttctgttcctgcatgtcctcaaaagcctgacctgtcacatccatctctgagagcagagcctcctcctcctgcttggtggcacccagcttgcgctgcaggtgttctatctgctcctctgcctgccgaatgcgccgcagggcatcctcatccgcgatcttcttgctctcccttcgatccctctcctccaattcccggatgcggctccgcagctcatcaacctcggccttagccttgcgttccgctgccatgagctgcaccttatcccgctgctccttgggcgctgacttgtacatatccagcagcagtttcatctccttctggctctcctgggccttcttgagctctgctcggagacccttgacggagttctgattccttccgcttggtttcttccaccttggccttctcccgatcagcccttgagagagcggaggctacaggtgcctcgtgccgattctacacccatgcctcgtacctagccg

SEQ ID NO: 149926 - DNA, 1043 bp, Homo Sapiens
gtgtaccatatataccaggggctatgtataatagaccgtttccctttctttgcagcccacggaaccatcacacacacgcacggttacgccgctttccccggatgcacgcaacccaggacgcgaacccacagctcgagggcttagactttcactactgagctgccgccactgtcctccgtggaggtgtcgctgaagtcactggcgtcactgcccaaggcgtcctgctcctggtcatccctgttgacccttcgtcgatacctcaggtctaaaatgctttcctccgagcccgagctcctcctgtcatgcaaactcagccctgcctgtgccttcctggttggccaggggccgccgtccttctttgccagcaagtgtgggcttccaaagacagggctgggtccggcctgggcctccctgaaggccgagaaggaggggccctgcagaggcagccccaggtgggggctgaagaggccagcctgcctgcccccccaggagacaccctttccaaagtggaagagctgggtggacagcagcggcgagaagcccgcaaggggcaggctgggcaggccccgggcggggccctcggaccccttgtctctctcgctcccgacgccccccctccacactgcatctctgccttcggagcgcagcacccacgggctgggcagccgactctggtgggcgaagtcgctccagggcggtgtgcggtcggcctgggctccagcgtccctctccgctcccgggctgggggtcaggaagctcgggctcccgcagcccatgtgaaaggttcctctggcgcctcctgcctcggtgcccgctgtggcacagctgggcagctgaccaaaagcacttttggcagcaggctcagcccctcgtgggctctggtctttgtgaacgtaaacatttctcctgctcactgagagccccttggcggagacaccgccgctggtgctcctgggcggcaccggatcccctcgggcaggagcagcagggagccccttcccgccctggctgaacagaccagctgtgccctgtgccctcgtgcc

SEQ ID NO: 149927 - DNA, 621 bp, Homo Sapiens
atcgatagtcattgtgtacaattgcttgagtgagttcatggtccgtaggaggatgaccactagcccaccaccttccactgtttctacagtcctggccagcaagtttggagttaaggcttcaaaatcctgcagcacacacatgccgaaggtattgcccaggatcttgtgggtctcgttgtagtagcagtagcgaatgtttgtggctgctatgaagagttcaaaggggtcgtcctgctttatgttcagtgttccattctttgttttcataggcagctgtcgcattcttttcttccggtgactgctaaaccccagctctttcttataacaccacagcactgaaggccgagccttcacagttgctttggataacatgtgatgaagtattaccacctgatcttttcctcgatccccaactacaacaaagagagatctttgccgctcagctactccattctcaatgagaatccggattcggttatccacctttttccgatgcatggtgaaaaattattactaaaagagaaagaaatacaactgcagaaccttgtgggtctcgttgtagtagcagtagcgaatgtttgtggctgctatgaagagttcgaagggtcgtcctgcaaatac

SEQ ID NO: 149928 - DNA, 1028 bp, Homo Sapiens
cactggggtgacccagcactcctttgggccctcctcccccgggggctttcgctttccctttggggggtaaccaagttcctcacgaattgggggcccccactgggctttcccagtctggttctttcaccctgcgtggagcaccactagtcttgactaactcgggatgacccttagtctctgtcccgagaggcctcagatgaaacgttcagaccaggcccaagagacagacggcagataggagttatggagtgcagggaacccctgtggcttttctcagacaaccagaccgggagcaagttctaaagcaggaagatgaacacatcaagctccctgtgtgtctcacgtgtttgggcaatttgcaccagccacctctatgtggagggaggcctgctggggctgcctctggagcaactccagctcgaggctggagggcagggctggccacaggcttgtctgtggaggcgctctgctgaaagcacgagcgctctgtgtggccgaggtcattgtacccccggcttcactgctgggtggttctgtgatggggaaccagctggggccttatggcattagaatctggtggccatgagggacaatgtccaagaagatcaaattagacacaaactgtctgggaactaaactatcctacaaatagaccacaaacaggcagcaaaagaacctacccatcacgatacgtacaaagacaaaaggttaagtcttccaggaggccctggaatgtggacgaaagtttggaaaagcaaatgttgccaactcctcacgacagggccctggagggacgggccgcagtggtggcttcccaagccagcagagtgggtgcctcagtgacagcctaattctggggctccctcccatcagccactgagggggtcttcacggtagtgaatggcacaacgaagtttctcctgcatgttcatggatcaagcttccccagtactcctctctggaaatcatgctggagaagcttgatcatgaccctcgtgccgatttacccaccagctcgtactgcccta

SEQ ID NO: 149929 - DNA, 766 bp, Homo Sapiens
  misc_feature (108)..(139): n is a, c, g, or t
agctgaagcctgctttctttcattgagaaaagcgttttgtgtctctcctggctcttcaaggtgtttctcttcactgctatcttccccttgctcccctttttgatagtnnnnnnnnnnnnnnnnnnnnnnnnnnnnnnnntggctcttctaagaatggcgtgtcttcacttcttcagagacttggctgtcggagggatagaggctccactggggctcatccgctcgctctcggctgtgcccgcctccctctgcccatttctctgtgtctgcctttgttgggccttggatgtcctcctcccctggggctcctgcctctcccctgctggaggactcgtgggcttccgtggcatcagctgggtctcttaacaatcttacttcaaactttgtgttttcattttcagttgtctctttgtctttgacgtcttttctactcgtcttcaggacttggcggcactcaggggtgatgggtggagcgctggacttcgacaaggcatttgagaggacctcaatgatgcagcgagtcaccattccttcattgtggttcctgttatccactggcatggaattgacagccgccagccccacggctcccaggaggctgagaagcagcgttggctgcatggccccgctcggcggcccctgtgcggaaaggaagatggcggctggaccggagaagcgaggcgcaggaggaaggcgcgatggagcggccccggaaaaccagcgtgcctcgtgccgattcaccacccagcctcgctacctagccgta

SEQ ID NO: 149930 - DNA, 1195 bp, Homo Sapiens
  misc_feature (47)..(56): n is a, c, g, or t
  misc_feature (306)..(306): n is a, c, g, or t
  misc_feature (341)..(341): n is a, c, g, or t
aaggttttccaaattttccctttaaggggggttttagaaccctggcnnnnnnnnnnaaacccatttaacctgggggtaggcccgcgattgccaagttcctcccccagaaagggcccaacttggttcggtcctttttccggaggttgcccgcaaaaattattgcaaccaattgcccactggaatgccacttgccagcggggtaaattctttcaattcccgccaatcatcccgcgggggtaaaatggagggcaagattggatgccctgagcggccaccagtcagaacaggacaccagctcctcgggtngtcccgtcttctggttaatctttgagtcccccagngcagaagtcacagtagttgttggggcaagcccaatccattcaggacccttttttggatttctgctcctcagacctctgggaaacaggagtgggtgtttgagagtcttccttgtcctcgccctcctcctcagccaagtgggagtgggcatagtggtaactgaggcctggtcggttcttgtaacgttttccacaaatgtcacaggcatagggcttatcccggtcctccaggatggaagcatccagcttcttacgggcactgcccacacccttacccttggatttcccctttccccgacgcttgggagtatcttcttcatagtcttcatcatcgaggtcatccaggaagtcatctggttctaggatccgctttcgcgctcgactgttggtcacaggaaactcgcccaggctgtcatcatcaactcggggatccggggcacctcgcttctccagggggtcagtgcgcaacagagcctctaaactactgccatcctgagagatcagcccctccttcttcagggtctggtctgtgtctggcttaatagatgggaaggaaagtcgtggatcctcagggggatgggctcgccgctttttccgccagcgccgggcagggtaggagtacagctgtccggaggccaatcctggaccccggtgtcgcttttccatccagatgtaacaattgctctgggctactccggtctgtgagtccaagaaaggcaggcgcacgctgcgctcagcacagaggcgagcattgtaattgtggcactgctccatggcatctttgtagtactgctccccaaggagcttcactacattctccaccacagccgccatcttccctgttcctctgcctcccc

SEQ ID NO: 149931 - DNA, 859 bp, Homo Sapiens
ttagattttctgaatttctctcaggaacttcagttgttcctgagcacgttctgatatcccagccggatgaaggacaatgcccactacgggtttgtgtagactccgtgaatatgcagcacgctcagcttacgtttctcgtgagcccactcgaggacctttttctcatcagtaaggtcaagggattcaagctgtttcccctgatctgctgcatacagttccaagagattatcaaaatttgtagttaatacgagggctccattttccatcaggtggagaactgactgaagtagctgttttccagaatcttccatctttgactccaagtcatcaaatacttcatataaacagtccttgaaaaatgtggatcgaacattactggtacgaggagagagtttctggataaggtcatgggcaacatggaccaggttcttgtcttcatggagacatttctgaaactttttgctctcctcatcttctaaaagatcaaaatcaatggcagcatccagtaaggcctgaattaaccccttccaggatttgagggctggaacttggggcgcaactgcagcactaatgcctgttccaatcactagcacaagttctcgaggcttcttagtttttaagcttggaagcagcttcctgggctttttggtgggaggttcgccatcgttgaagaatccaaaaatctcgtctatatcagaggcctggctccctgtagaagccatccagtttcgtgcaaagaatgacaacttctttctttgtcactgctttcctcctgtgcagcttctgagaaggtatatccgagtctcctccaaacgccactgctccagctgcagctaccggccggcgcagccgcactccc

SEQ ID NO: 149932 - DNA, 351 bp, Homo Sapiens
gctgctgcaaatttctgtttcagaagggaaaatagtgcatatcatctataactagtgaaaatgtctactatgatgagtgtatattagtgaaggtaatgccaagtgttctaataaaagaaacccaataatataccatggcccagcacagtaatgctttgtatgttgctggaataaagtccagttgggtattcctgatcagtcggtggctctccttcaagctgtggttcaggacaagcccatttcctgggcaacagggccccttcctgggtcatctccatccagtcattttatgtgcatttttcccagcatccgtgggtgacaagtttgagaggcacaggcagcagcggccgc

SEQ ID NO: 149933 - DNA, 908 bp, Homo Sapiens
  misc_feature (107)..(107): n is a, c, g, or t
ccctgggagttcatgattgaaagaatcttcgtaccacaaaactggcccaacagaaccacacccagaaaccaccagcacgttcaggatgggaccattgcccaaagttncaggggctgccacccagccaccccctctgtgcaatccaccgggcaatgcagtgatgcagcatgaagtcgaccacgaagcggggtcacctggcctaggaagccagtcaggccatgctggtagacgtgtagggccagacggtagccgaagcccagaagagccaccacacggccccaattgatgccactctcaaacaggctggtggcaatcttggtgaagtactcataggcattctctgccgtgggctgcaggtgctgcaacatggtctggaactctgagtcatagcgtcggttgatgtcgtccccgatgatggcgagctgccgtcccacctgccccatggtgctgctaggttgcagaggtaaggtgaccatctctgggtcggcaggggcagccaccccttcagcctcctgttcctgctgatggcggtaaaaaacgtagctgcggaaaacctcctctgtgtcctgggctacctgctcctcagaagcagagggcagggcaggctctccgcactcctgcctgggaggacctgggccttgccccgaagccatttttcaggtctcagtggaggacgggatcagcctgccgggatcctggcccaacccgggtggctcagcagggtggagatggaggtcccgaggggctggcggctgctgctcccaggggctgagtgggagcccagtttccaggaatgggcgtcagtgcattcccggcatctggatgtagcctttacttgtccctgtgcagcccgagggacccgcgagactccagtgatcatagaggtgccagcggcacccggctccccc

SEQ ID NO: 149934 - DNA, 907 bp, Homo Sapiens
gggaccggtccggaatttccgggatcgcgggtccctcgggctgcacatgggacaatgtaaaggctacatccagatgccgggaatgcactgacgcccattcctggaaactgggctcccactcagcccctgggagcagcagccgccagcccctcgggacctccatctccaccctgctgagccacccgggttgggccaggatcccggcaggctgatcccgtcctccactgagacctgaaaaatggcttcggggcaaggcccaggtcctcccaggcaggagtgcggagagcctgccctgccctctgcttctgaggagcaggtagcccaggacacagaggaggttttccgcagctacgttttttaccgccatcagcaggaacaggaggctgaaggggtggctgcccctgccgacccagagatggtcaccttacctctgcaacctagcagcaccatggggcaggtgggacggcagctcgccatcatcggggacgacatcaaccgacgctatgactcagagttccagaccatgttgcagcacctgcagcccacggcagagaatgcctatgagtacttcaccaagattgccaccaggccagcagcaacacccacagccctgtttgagagtggcatcaattggggccgtgtggtggctcttctgggcttcgcgctaccgtctggccctacacgtctaccagcatgggcctgactggcttcctaggccaggtgacccgcttccgtggtcgagttcatgctgcatcactgcattgcccggtggattgcacagaggggtggctgggtggcagcctgaacttgggcaatggtcccatcctgaacgtgctggtggtctgggtgtggtactgttggcgcaggtccgtggtaccgaagattcttccaatcatgaatcccaagg

SEQ ID NO: 149935 - DNA, 1564 bp, Homo Sapiens
ctatgctatcagcgattgctgtggtcttatttgtatactttctgtgtattcttctacacatggtacacctgcggattggtatgtcctgggctgttcataatatcctggctgttgtggtagtcactgtgtgccagttcaaaaggttgtgtctcctcagttcaggaacgtgcaggctgcatcaggcagtcagctcttctggaaaatgcggctggacttacagtggcatgaggtctaagtgagagatgggacctgagcaggccgttttcggccaaactacccagcgtatcaccaaattcagccacgtctatagactccaagctcgcagcatcccgcagaagcaggcaatcgactcaggccaatgtatgtcccagtttctgagaaggagcctgggaagaggccgggtgagcgtcacaggctggagggctgcgccagggcaggccccgcaggggcggcgggcacagcctcgccctcgggcccggcctcctcgccgcgcgcgtaggtgagcaccaccgtgacggtggcgaaggtggcagcgttgacggggaaggcgcgcagcagcgtggacgccagcccccgtgtgaagacgcgccagccctcggcgcggtagctctggtgcacgcagtccaggatgccgcggtagcgcggggcgccccgcagtccgtccgcctgcagccgcgacttgaccacgtccacaggataggtagagagccaggacacgatgcctgacgtaccgcccgccaacagcagcttgggcaccagcaggcggtcgcccggctcgcagcccagcgcccgcgtgagagcgtcataggtgaggaagtagacgccgaagctgggcgtctcacgcagcaacgtggacaccatgccccggttgacgccacgcagaccctcgtgcccgtagatctgcgcgaggcagtccagcgagcccttgtaggtgcgcgctgggcccgcgtcctgcagctgcagccgcgtcttggccagctccatggggcagcagatgacgcactggatggcgcccgccgccgcacctgccaggaactggttgaggggcgagtcgtggcccagggcccggagggtgttgccctgcaccccgaacaccagcgcgttgatgaaggtgagccccatgagcggcgagcccaggcccttgtacaggcccagcacgctctcttgcttgatgatggacttgaagcagtgcaacgtcccgcggtactgaggcttctccacgctctggacctgaagccgtaccttgaccgtgtcaaacgggtgtcccacaagcacgcctgccacaccccccgcgcatccagccaagaagtccagcgccatggccgggtccccggcgaggccgcctttcctcctcgtcctccccctgaggcccctcgccgggctgggcgccgtcggggtccccgagcgcgcggtgccggggctgggcctggccgctcctcctggcgcggagcccgggcaggcgcggtcagggatggtggggatggcggcagcagctagacccgcgctggtccctcggcctcgtgccgaattaaacacccagcctcgtacctagccgtatgtttta

SEQ ID NO: 149936 - DNA, 730 bp, Homo Sapiens
gatcatcaactgccactcggcataatttacaatggaaccgaattaccttgtccgtcatcatttcgaacctcttccacataatcatggcttcccgcatctctgctgcaatctgagatccaacaagtagtctgatgtgcaagacgtcaagcaggtttatagactgattattgtatacatgacccgacacagtcaccgcagaaagttcatcactttgcagctgctgtagtctcttctcaaccatttctgttagatccacataattttcatcaaatccaagtctctcaacaactggactaaattcttccagtaattctgtaaccttataagacatttctctgtagcgggtcaggtcttctccattaactaataccaactgtggacacttttcttttgcatctctgacattcataagtttcttaactccaagtttcctagcttcatagttgcaggtaaccaccaaatatttctgttgaacccctaaaggtttgtcttttagctctggatttgagatcatttctacttgtgcataaaagcaatccagatccacatgtactatgactctggatgaagcatttggtgtgggctacacttgatcatgaacttcctgcgagctggctgccgcccccacgtccgccgttcctggcccaggcctcggcgtcttcctcgtcgtcgccgccgccttcctcctccggccctcgtgccgattcacccccagcctcgtacctaggct

SEQ ID NO: 149937 - DNA, 1605 bp, Homo Sapiens
  misc_feature (264)..(264): n is a, c, g, or t
acaaggaggccccttgtagggcccttgttccccttttttgccgttctggaacgggctttcccgggttttcggtgtttgggccgggccagccttgacgggaaccggaatgtggttgaccccataatttgggtccgctgtcccggctgagggctcagggtggagcccaccgggccccttcctgccaggacccacccagccgagcgacgttggtggggttcggtggacacaaagagggagctaggggtgccacggccgtctggccgnccctcgaggcgctgtgcagctttcacccggtccccaggtgtccttccagcgctcagcgggttggcccaactctgtctccagcctctgcagctcctccagcaggcgtgagatggcgtcaggctgggcccgcgggcagctgtcgtaacagggccacaccacgcggcgcctgctctggggagcgcctccatcagaccgttcttcctctgggggttcagggggcccctgggccagttcccagtcatagggagggccctcggccagcgtctcctcagtgtagaagtcccacaccttcaggttggacacgttgctctgcgtcctcgggcgcatacatgtaattgtggaacacaggcgtcctcttgctcagccggtccacatactcccacacagacctgcacggcacctggcccctgcgttccgccttctcctcatacagcagccccagctcaatgcgctcatagtcagagtcgagcaggaaggtccggaaacggcgggacacatggtggtagccgaggatcttgaggtagaactggctgaactcaaactccatggggaactgcaggtggacgtggtgtacgcagtccaggaactgcaggaagacgggtgtgaagccgctgctctgcccggccagggtgtgagctccacggtggctgaagcgatggccgaaggacagccactccttctccaccagcaggcgaaagccctccagcgtgcggtagaaggggtctgagagcagctgcaccaaggataccacctgggtggtgatgtcccagccatcctccaggcccaccagcacggaggagcctgaatccaggagctccaccaccagcacagacacctgcagcagcttgtggatctggatcagccactctgagtcctccagtgagcgcaggaaggaggctgggctgggctcagcagcggggcagcctgggacacatgctttcagcagcttcttgaagctagccttcacctgccgtgcctcgaatacctcaatgggcaccagctcccactgctgcagggggtctgaccgcacacccttgagctgggctttgtccccaaggatatagagggctgctcgctgcggacgcaggaagcccgggtcgggagggcccccgttggcctggggtggggccagtgcgtctctgccagctagccgggagcccacatcggtgccaaggccactgctgcgtccactggtccggacactgccccacttaccgtgactgcccatgtgggctgaggagaagccgctaagcgtgttgcgtcccgacgcgtcggcgtaacggggcatggagctgacctcgtgccgattcaccacccagcctcgtactgaccgtaattgtt

SEQ ID NO: 149938 - DNA, 1172 bp, Homo Sapiens
  misc_feature (853)..(916): n is a, c, g, or t
cttgtgagctaatcagtgtgttcttctctagcgttgtcccgtcttagctcctctgcggttctctctcttttcgctgttcgtccgcggctctctgtctgtgcccgctcgtttttatctcgcgggcattgctcatagttctgtattaattccgccggtttcccccgcgtgtggctgtccaacagctttggttcacacaccgtgggacatcccggggcccgcgtgacacccctggccccgaagagcaccagggtcttaaggctcccatacagccatgccacagtgaccatggcaactttactggtagacctgacatccacttctggccttttcccccgtcagcaccatcaaagccactgtaagcccctccggaactgataagtagtaaatgcccctccagctgttgatgcccgtgtagccccctgttggaactgtaagacacagagcttcaggccaggatcaagccaagttcaggagaacctgcagcatttggcagcaggcttctcccagtgcacaagtatttgcatttgtggcattccaggagtcccttccgcctctgactggtaatattccacctcctctcgtccaggcctgggggtcgagggcagatatctctccgaagggggttcactttcgggtctgcggcgcccggggtctcccttcctctgcggctgcggcggctccggggcttcccagggcgcgggcccaggaggcgcggctgcgtcccaggtcagtccccgggctccgtcccgcgtccggctttggcgcggtttttcccaaactccgtgttcacctgcgcgagggcccgcgtccctgtgtgtgtcccggcgggggcctcggtccgggtctctttccnnnnnnnnnnnnnnnnnnnnnnnnnnnnnnnnnnnnnnnnnnnnnnnnnnnnnnnnnnnnnnnntcgggtcccggtccccgtcccttcgccggttcccgtcgctgcttcgcttcctgcgcgggtccccgggtcggtcccgcggtcgatcgtgggtgcggccttggtctgggtgggggcgccgtcccgggtcccgctctctcggccgggcccggggctcgcgagcccccgacggatcttccatggccgggttccgtgtccgcgcccgggagcgacctgagggcaacaaccaacaagtttcttgggcaggtggcctcgtgcc

SEQ ID NO: 149939 - DNA, 306 bp, Homo Sapiens
aatcctagttctaatataacaagaggttagctggctccttggcagcagtggcaagcccgcctcctgagaagtgactctggtgcccatgaggtaggagatacggccgctcccacccccgctttcggaagggcagagccaacctggggaatcccagggaagcaggtgcaggcagaaagccccaaccccacctgctgaggtggggagtcgacacctcggtctccctggtctggccccagagccttggaacctcagttctcactctcaggtcttactcctcttcaccctccctgtcctctgcctcgtgcc

SEQ ID NO: 149940 - DNA, 711 bp, Homo Sapiens
tggggcgcagacagacggaagagtgaggttggagtgcctttcccgcgctcatcttccgtccccactccacgcccagctgtatccgacctccgcggcctctggtgtcccgggtctccactttcgcctgagggtcatgggcgtctcctccctccgcgccagccggggcgctgagcgtcggtaacagcggcggtggctttgtggtcccggggggtccgatgtgtgtgtcaggggctggggcgggggatgggcgcggcccctgggtatccctagcggtccaggttcatagtccagtgcttggttccggccgcgcagctgtccctggcggccgaggaggcggcgggcgcgcccccgctcggtgggcccccgccgctggcggcggcctcgccctcgttcttgaggtcttgaaagtcgtgcgtgaagaagtgggggtcggcgttgagccgcagcatctgcgggttgagccggtggatgaggcgcaggcagcgctgccagaagcgctccttgtcgggctccacgaggaagggcttgagtgggtaggagatctcgttgcccatgtaggagtaggcgaggtagaggcaggtgaggaaggcggcctgcagctcggcggccgacgccagctcgtccccacgcagcgactcgcggcacagcaggaacacggaacaccagcctcgtgccgaattagaccccagcctcgacctagctagggtgggt

SEQ ID NO: 149941 - DNA, 983 bp, Homo Sapiens
tctccgggataagggcaagggtttgcgcccccaggtttatcgccggcccatttttcttccatgatttcccatgtgccgggcggtttccaatatgtccggagggtgtctgtgaagcccccgaaaggaaggcccaggtgccctttgcccgggcttccccgccagaggccttcgttggaaccttctgcggggaccccactttccagggacggccggcgttacacctttgcccgaaacctcaggggtatttcggtgaagagtttcagctcgaactcgtatcctggaggcacgggcagtagcattgaaggtgaccactcgccccaccagcccgtgatctttcttgaagcgcacattgaacggggcgcaggcggacagcgccagtagctgttcccgcactgctttggggcgcccgtgccattcctctgcccggcctcgcatggcctcgttcagttttgccagacagtccgcattcctctgctgcttctctttctcgaaatcggagccgaagaggggacgggcaggactcaagccgggtgccagcgtcaggcctcggcttcccaggccagacactgcagctgccagcagcccagggggcatcaagccaggcatggagccaagcaaggcccttcgcgccccctcagccacggcctcctctcggcccagcccattggccaggcgggaccccagagtgtactccagggcgggcgagggcagggggaggcggcctgatgatgtggccctgtcatagcggtcctggcccgacacgccgccgccggtccctgacggctggggctgggcctgcgggggcggcagctggggcccctgtgcggctgccgccgccaggtccttggtggccgggtgcttaagggccgggggcccgggcgagcggccctcggggagcacgtggctgcgcttgagctggcgggcggcatcgatgagcagttcgatgcggtcctcgtgccgaattcgccacccaggcctcgctt

SEQ ID NO: 149942 - DNA, 1689 bp, Homo Sapiens
  misc_feature (52)..(52): n is a, c, g, or t
cttctcactgtgagtgacgagttcaggcgcgatctcacaaatctcttcagtngatcaagtcagtagccagccctcactgccagcgcgagtctgcgtcgatctgtcatgcacagcacttcgacactgctagccagttgagagtgagccttcagcaaactgcttcatgctgaagtcagtccctccagccgaaccgagcttacagagtcccactagcgcccggatgcggatgctgtccttctcgctgcacttatataggtccttcagcagcgagacaccattggcagtgatgaatgaggcccgcttagccttgccggctgcatggatcagagcctccacggccaccagctgctcctcctcctgctcagaggcacacagagcaatcacactctccatgacaccgctcagctccaaggcccggttgccagcgtcacatgggccctgcaggaggcaggacaccgtctggatggcccgtagcttcccggccagcccttggccctcaaaccagctcttgatgtagttttcacaaagtctgtggaaattctccctctccgcatcacacttgaggtcatcaaagagcttgctgaggagaatagaggcgctcatgcggctgtttgcggtcactgcgagctccccaggagggtcctgtagagagccccccacttccaaaatctttttcagaccttggtcgatgacccagagggtgaggctgttgttggggtccttgagagacttccggggcaccgctttaatcaggagggtcagggcattgtctcggccttggccagagacccccacctctgtcagcagatctaagaggttactgatgaggaccttcagctcccgggcaggatccacaatgatggcaccttctttgcctcggaagccttttttgacaccttccttgagggcatcaaacataacctgcagcaggtggcaggcagccagggacacagcctggctttccacgcccaggatggagactactcgccgagttcccagtatgctcagggttgccactgtccgtgactgatgctcagagcaaatgccaaccagcgtacgcagagccgccagcatgaggtcagtctctcccatgtccagtaaacgttgcaagagctgaaccccattactccggaagatcttctccgctccagcatcctccctggccagcaccaccaggttctgagaagccttttgctttttctcagtgcccttctcttctgggtccaacagtatctgaaacatctgttccactttggcatccgtcgaggacatgtatcgcaccttctcctgaatctggcccccgatgttccgcaaggcctcctggaaaactttgttcttgggctccaagctcacacatctctgcaggtcaaggacagcctggtccaggcggcccagcttctctagggcttggctccgccggtagagtgctttgacatccccaccatccttttcaatggctttggatgcctctgtttctgctttgtcgtaatcttccagcttgaggtggcaggcggcccggttccggtgcagaacggcctggtcctggggcgtcgcgtccagacccagggcctgagtgtaggccagccagggcgcccccgtagtctccacatttgtacagctcattgccctccttccgcagctgctccactgagctggcagtcatcgcggagagggtgtctcgtgcccgcg

SEQ ID NO: 149943 - DNA, 754 bp, Homo Sapiens
gaccaactggctcacgccagatgagatactgcgagttccatatgtcaggtgccacgtcgtgatgatgtcagagcaatgcaaccagcgtagcagagccccagcatgaggtcagttctcccattccagtaaacgtgcaagagctgacccctttactccggaagatcttctccgctccagcatcctccctggccagcaccaccaggttctgagaagccttttgctttttctcagtgcccttctcttctgggtccaacagtatctgaaacatctgttccactttggcatccgtcgaggacatgtatcgcaccttctcctgaatctggcccccgatgttccgcaaggcctcctggaaaactttgttcttgggctccaagctcacacatctctgcaggtcaaggacagcctggtccaggcggcccagcttctctagggcttggctccgccggtagagtgctttgacatccccaccatccttttcaatggctttggatgcctctgtttctgctttgtcgtaatcttccagcttgaggtggcaggcggcccggttccggtgcagaacggcctggtcctggggcgtcgcgtccagacccagggcctgagtgtaggccgccagggcgcccccgtagtctccacatttgaacagctcattgccctccttccgcagctgctccactgagctggcagtcatcgcggagaggttgtctcgtgcccgcgcacctcgtgccgaattcggcgcgccgtcacttcatactct

SEQ ID NO: 149944 - DNA, 911 bp, Homo Sapiens
gtttgcggatcgcactaaggtagctttgctgcagccactgtacattaggtagaggctcagtccgcgatcacagagccttctgctcgagcttttgcactctgagcatcaacatactgcgcagtgcagcagcaggaccagctgctttcacgccaggatgagatactcgcgagtcccagtagctcagggtgccactgtccgtgactgatgctcagagcaaatgccaaccagcgtacgcagagccgccagcatgaggtcagtctctcccatgtccagtaaacgttgcaagagctgaaccccattactccggaagatcttctccgctccagcatcctccctggccagcaccaccaggttctgagaagccttttgctttttctcagtgcccttctcttctgggtccaacagtatctgaaacatctgttccactttggcatccgtcgaggacatgtatcgcaccttctcctgaatctggcccccgatgttccgcaaggcctcctggaaaactttgttcttgggctccaagctcacacatctctgcaggtcaaggacagcctggtccaggcggcccagcttctctagggcttggctccgccggtagagtgctttgacatccccaccatccttttcaatggctttggatgcctctgtttctgctttgtcgtaatcttccagcttgaggtggcaggcggcccggttccggtgcagaacggcctggtcctggggcgtcgcgtccagacccagggcctgagtgtaggccgccagggcgcccccgtagtctccacatttgaacagctcattgccctccttccgcagctgctccactgagctggcagtcatcgcggagaggttgtctcgtgcccgcctcgtgccgaattcggcgcgccgtcgacttcatactctctcccccttaa

SEQ ID NO: 149945 - DNA, 781 bp, Homo Sapiens
  misc_feature (131)..(131): n is a, c, g, or t
ccagatggatactgcgagtccagatgtcaggtgccacgtcgtgatgatgtcgagcaatgcaaccaggtaccagacgccagcatgagtcatctctccagtccagtaacgtgcagagctgaaccccatactcnggaagatctctccgctccagcatctcctggcccagcaccaccaggttctgagaagccttttgctttttctcagtgcccttctcttctgggtccaacagtatctgaaacatctgttccactttggcatccgtcgaggacatgtatcgcaccttctcctgaatctggcccccgatgttccgcaaggcctcctggaaaactttgttcttgggctccaagctcacacatctctgcaggtcaaggacagcctggtccaggcggcccagcttctttagggcttggctccgccggtagagtgctttgacatccccaccatccttttcaatggctttggatgcctctgtttctgctttgtcgtaatcttccagcttgaggtggcaggcggcccggttccggtgcagaacggcctggtcctggggcgtcgcgtccagacccagggcctgagtgtaggccgccagggcgcccccgtagtctccacatttgaacagctcattgccctccttccgcagctgctccactgagctggccccgggggtggccggccggggctcgggggtccctggaccactcacagtcatcgcggagaggttgtctcgtgcccgcgcctcgtgccgaattcggcgcgccgtcgacttcatactctctcccccata

SEQ ID NO: 149946 - DNA, 775 bp, Homo Sapiens
  misc_feature (545)..(555): n is a, c, g, or t
ttaccttctttaggattacactggcagcgtgactttgccaagacttccatttggataatgtatgatagcatcatcatgttctgaagggaatcgaagcacttcatgcttcccatatttatcttacacccaagcaggcatgacagtgctcctaggagaggtagtactaatccttctaactgaaggcttttggacaactttgcttctccagaagcaaccgcccagtgcatgcatttcttctaagtacacacagtcttcagaaattcccttgtaaaccctggttgaactgcgtgctccaattcctatacaccttggactggatcaactctcacccctgaattcagtccaattctgcccaaccaccgggctagtttccaaaattaagcatgccaaacggagcccttcgaaaatgaagctaatctaatggagaaactgaaagaagaattcggaactgttattgcgctcttcgcatatgaaatgctcgaattaccgttccacgtcagtattctgtccattctcgtccctcactttccccccctccatctttnnnnnnnnnnnggggggcggggcattaaaaagcaggtgcgcaaaccccctagatccctgccctgtcctgggagccctcggcgggacaagcagactccgctcgcgatccaacgccagagaattgaacggttgccgactgccgccgcgacctggcccggaatctccttgcctgcccgctctccttagccccgcctcgtgccgattcaaacacccagcctcgctacctagcctt

SEQ ID NO: 149947 - DNA, 811 bp, Homo Sapiens
gccctgaaagaagaggctttattgggggtggggggagtggggcaatcgaggcggtaactccggccctcttaacagtcaagggagagggtagttcagtttgcaattaggcagagaagggctgggccagtttcactggcggagttgtgggtggtggtcagtttcccaatgggggactgtaagttttatagagggggctggtcaatttcacaaaggcaagtcgatttcatcttccccaatgcagagagccgacccttctccaggcctaatgctagacgccccccgccctgttcctctgacgcgtacgttacttccggccgggggtcccagccttttcaaacctcaaggtttgcgctcctcctggggacagaggaccagaaggaaggccggcctcagggacctgcgcactgcatccaggctcggggtggcggtttgggcctcaagaccaccgtctcctcttcaccccggggatgcgtcccagactgagttctgaccagagtggccctccaggaggatgcacttttccccaccaagcgtcctggcaccggaggggtggggggaccgacaagcgctagaggcacacgggtaagggggctcccacctgctccaggccgttctccgagacctttctgcgggggggccagatcaccaccaaactttccgtcgccccctgactcgctgcgggggaagggggcgctcagctcaccagctggcggcagccaggatgaaagggcggcggacccctaaagcacacacaggcgtacaccctacggctcccctgaaaagcttccattaacgccaggaccaggaccga

SEQ ID NO: 149948 - DNA, 549 bp, Homo Sapiens
acggaagacatctggaatgcccccacccccgcgcagcctgggtggtgtggatcagagagtccatcactcccggtggaggggtggatcacagcgagtaatggagctccagaaggggtaggcaagagacaaaattgagagggggtctgggagcattggagggagagaccccgagaatcggagggccacaggaggggccactgaagttgggcaatcggtgggggcggctggaaccctgggggtcccggcgttgctacgcccgcggcttaccggtgaggctcggcgtaggctccttgaactccgcggtgccatagacgctgcgccgctggcgctgcagttcctgctcgcgctcgcgcacggcgcgcacctcctgctccagcagtgacggagtgaaaggcggcggggcgctgcccagcacccggcacccgccctgcacggccgagcgcggccgtcccccaggctctggcagcctctgcgggcccgcgccgtcccccgcccccgccgaggcctcgtgccgaattcaccacccagcctcgtacctagccgatcgta

SEQ ID NO: 149949 - DNA, 471 bp, Homo Sapiens
tgtccatcaggccccctggaatacaccacagatcctatttcttaaagtgcaacgagccccaagggctgtctggcatggggccctctgcaccccactagctctcgcctggggggtgcctagtgtcaggcttcctggccgcagaggccacagcccagccatgcaagtttgaggtgctggggggcagaggtggccaggagaagagcttttcctggggcagtgggaaggctgggctagggtggtggtggatgatatgcaggcacagcgcctctgggtcagcgaagaccaggaaggatgccccttcgagggcaccagcagaccgccattccttcaaagtgccccacctcgcccacatccccatgaacactcctgctggtggcctccatggctgggatgaaacgattcctcttcaacacccaacacaccaaccccaaccccaagtgcacctggcaccttccagctgtccctcgtgcc

SEQ ID NO: 149950 - DNA, 293 bp, Homo Sapiens
gcctttcttatcatttattattaaaaacatttacaagagagcaggctcacattctttaggaatccatccagtcctgctggtaattctcattacgaggtcaggagcacaatactagaggcccttcatcttacgctgaatggaacaaaggctgtcacctccataggattaaagatgcaggcaggaactactcagcaggagcaaaaggactcagttcagcatggctggggaggctttagaaagcttacaatcatgggggaaggcgaaagggaagtaaggcaccttcttccctcgtg

SEQ ID NO: 149951 - DNA, 906 bp, Homo Sapiens
cacataaccctaattgagttatgttcctgctaaagcctcctttgtgcccgaaccctcatctccttgatttactcaggtcaatctcattaaaaagtttcaggcatttgcacatgtattctgggcctccttcagacctgagcaatgcgctgccgcatcctgttcattttctcccgatgtctggaaccaagacctttgccagctcctggctcagctattgtggggcaacaagtgggttttactgcagacacaggtttgccagaaggagttgtgaggcgaggcaccggtggcttctgagtgggtatggttgttgcagggggaggaactgccgctgctgtaggttctgcttttggggctgcagcagcaggagcttcagccggcttggccttagcaggagcagcaccagttttcctgagtgtgaaaagtggagtgcctccttcgacttttcccccatcaggtaccaaaagagcttcaatcacgccatttgctggtgatggaacctgcacagatgtcttgtcagtttcaatctcacaaaccacttcatcttctgcaactgtgtctccaacagctttctcccacctgacatctccctctgtgacagattctgcaaacgctggggttttgactgtaaccaagtcatccttgcatacagctgtagttctgaaaaagcgaacactgaagacactgttgttaatgacaaccttcctgctgttagggtaacctggtccctggcataaggagaccccaggcagggaacgtctccctagagggcagttccccttctggaaggcggagagcgagcggctgaacgcccgagacacacagcgggatcgggacagcatcacggcggaggagccgagggcgggccctcgtgccgaattaacacccaggcctcgtacctaagcatat

SEQ ID NO: 149952 - DNA, 712 bp, Homo Sapiens
atccctgctcattgttctcccgatgttctgaacgcagacctttgccagctcctggctcagctagtggtggggcaacagttgggttttactgcagacacaggtttgccagaaaggaggctttgagggcgagggcaccggtggcatctgagtgggtatgggtgctgcagggggaggaactgccgctgctgtaggcttctgcttttggggcctgcagcagcaggagcttcagccggcttggccttagcacggagcagcaccagttttcctgagtgtgaaaagtggagtgcctccttcgacttttcccccatcaggtaccaaaagagcttcaatcacgccatttgctggtgatggaacctgcacagatgtcttgtcagtttcaatctcacgaaccacttcatcttctgcaactgtgtctccaacagctttctcccacctgacatctccctctgtgacagattctgcaaacgctggggttttgactgtaaccaagtcatccttgcatacagctgtagttctgaaaaagcgaacactgaagacactgttgttaatgacaaccttcctgctgttagggtaacctggtccctggcataaggagaccccaggcagggaacgtctccctagagggcagttccccttctggaaggcggagagcgagctggctgaacgcccgagacacacagcgggatcggaacagcatcacgcggaggagccg

SEQ ID NO: 149953 - DNA, 863 bp, Homo Sapiens
aagcctactgaccgatttggcaagtcacagaagatagcccacgcctacaacaacaggagcccgagtcacagaccgaggagtaagggaagcgaatgaaaggatttcagtcctggccatggttgttaggcgttgtgaggaagcagggaacgggatcccaggtccctgcctttgtggagcttatgttccagaggggaagggggacaaggttatacgaaaaggacacgaggcggtcacagggctgtgcttcaaaagaagcaaaaggcgactgctgggctgcaacgggctgtgaggaagtgctgtttttgctgacaccggacggtgggaagtgagccgggaaaagactggaggagccactccaggcagaaggagcagcacttgcaaaggtggaggggccgagagaaaggggagcaacccagtctggcctggactcagttccctcttgaaaagcaaagatcctgcgtgtccgtttcagtggccgtcatgaggattcagtgacgcacaggaagcgcgatccactcgctcttctaacaagtgcccgggagcaaaggcgtctacggcccccagtccccgcgccgcctcccagtctctctcccggcttcactttcctgtagtgcgttctgtacggctgtattcgacgcggcgcgcactcgcaggcacgagcgaggcgccgatctccacttgacagaggaggcacccctgcccccaccacacccagtgctcctcgcgggcttctgcccgaggggtctgctccttcctcatgacccgcctgtgaatccttcctaaccgttaggacctaacccacagaagcgtctttccctcgtgccgaattctaacacccaggcctcgtacctagcctaacgggc

SEQ ID NO: 149954 - DNA, 801 bp, Homo Sapiens
  misc_feature (270)..(316): n is a, c, g, or t
agatggtgatgagttagacaatgagcgagggtggaaggggagaaatggggtgagggtatgatggggtaagacggggagtagcggaggatgtgtgggtggtgcgtgtggcgcgccgatcccgtgtttcgtggcttccgtggtgtcgtgtcggcagtccttgttgttcggtctgttcgtcgttcggagtgggcgtggggccgcgttcccggtggcggttcgggtggagagctgtgcgtgtgcgcacgagagggcctcattgctgcgctgaannnnnnnnnnnnnnnnnnnnnnnnnnnnnnnnnnnnnnnnnnnnnnncgtcggctggcggcggccaggcctattccgcaggtcctggccctccggagcgggggcgggctgcggcggcccgggcttgcccaggtaactgcccatgaggagcagttcggcagggtcaggtccttcgagcagggtccgcggctctaggaggtttccgttggctgtcgacttggccggaggcgaagcgaacagtgttcgccgatgtcgcgccttcatgaacgaaggaggacaaggggcgcgaacctcggggctcgcgggctcagtccccaccaggccgcggtagtccccacggccagccaggccagcgcagccgcagcaggcacgaggtacagtaggaggccgaccagcgacaggccgagaagcgccgccccggccggccctgacactcgctatcggccgccgccgctcgcctgctccagccgccgcagccctcgtgccgattcaccacccaggcctcgtacctagccgtatggttgcgagagagg

SEQ ID NO: 149955 - DNA, 458 bp, Homo Sapiens
  misc_feature (147)..(147): n is a, c, g, or t
gggaatccttttttcattgaaaatgtcaatttagaaaacacaaaagatttcacactttattcagacaacactgagagaagaaaagggaagagtgagtaggggagatggggagatccggctcccaaggttttcaggaaacacagtggnggcacctgatctagcacacattcagagggtagggaggggaagggatctagctatactctgggcatggagcagggaaggtcgtccttgctatggaggaaaggagagaggaaggacagaaggaagagtggtccccatctcatctcgacaatctcacaagacaggagtatatcgggacctagctaccagggagggatggatgcaagaagggattccaggatctaacagatccttgacactctggatctactctcaagaaacaaactccctcagagaatctggatctgggggaaatggtggtgtcagccaatctc

SEQ ID NO: 149956 - DNA, 552 bp, Homo Sapiens
tttttttaaccaacagcacacttttatttaaggacctgtagctgtgcaggatgcaaacatctgggcatcagtgactttcctcctgcccccgtttgtccctgatggtggcagaagatcccagctgaccacagcccctttctctggggtcagagggagaagacaggtgcagtcagcaggggcagctgttgcaggtgggagggatattttcccacaggaacaaaggtctccgtgatgacacggggtctctatagtcatgttgagagcctaatggcccttggcataattgctggtgttggggtagaaggtgtcttggagtttgctcaagtggttgagagggagggaggtgccatagacttggaggaactggcacgaagccaaggatacaaatccaggcagggctgtggggcaggatagggagcagggccttctactgaaggagtgactcaggaaggaggaggggaaggtgacaagcccctgggcaggagccctgtggccatggatcattttacattgagaccagagagtgagcagtccagggcagctataaccttg

SEQ ID NO: 149957 - DNA, 600 bp, Homo Sapiens
tttcactaaactgcatttttatttaaacaaagttaattacagtctttcctcgtgcgtgtcctctttccaccttcaggaaggcttctggaactttagaaaaaggaaaggtttgttcaataactggccggatctttcccgcatccaccagttctgcaatgtcatctaaacatgggccactggccatgaaaaatgcccagcgataatggactcctttccagaaatgctttaatgcctttgaacctacagtgactcctgtctgcaacatgccatctgctatgcccaatcggtccatgttcaggaggaaaggagtcaccaaagtcacataggtggctcctgaccatttcttgagaaaatctggagcccatgtttcagtggatccgccaacattatcaaggataaaatcaaatggttttaaggatttcaactgctcttccacacttccagatttgtaatcaattacatcgtctgcaccaagcttccttacaagttcactggcatcttgggagcaaactgctgtcacatgagcatcccatgctttcattacctgtatagcaaaagtaccaactccgcctgaagcgcctaagattagaacacgttttc

SEQ ID NO: 149958 - DNA, 311 bp, Homo Sapiens
  misc_feature (110)..(123): n is a, c, g, or t
tttatttgttctccttttaaggaattatgaagctaagaaaagttttgtgttttgggggttggtggacaaagttctagctgattaaatatggtctaacttattgatactannnnnnnnnnnnnnaatgttgtactgtggagaaaaactattttgagccatggggttggtgtttacaagaactttccacttttgccaaaatgttacaattgaaaggcatctgcgtcttcagtttcctgatattttcttaaaagatctagtgtcctttttgtacactaaacaggtgaatgctgacttttttcattctccaataa

SEQ ID NO: 149959 - DNA, 523 bp, Homo Sapiens
  misc_feature (114)..(114): n is a, c, g, or t
cttttaatgccttttcccaaaactgtgcatcaagcgcggtcgcagtccatctacctgcagttgctgactgacaagcatgcccctgagcactacagggtgctgggcagtgtgtcncagtttgaggagtttggccgggctttccactgtcccaaggactcacccatgaacccctgcccacaagtgttccgtgtggtgagccttgctgcccgcctgcacgcccccactgcccccgcacgaattcacctcctgctggctaccggggcaggcatgcacccggtgccagccccgctctgggcaccacctgccttccagcccctccaggacccggtccccctgctgcccctcacttcaggaggggcctggagcagggtgaggctggactttggggggctgtgagggaaatatactggggtccccagattctgctctaagggggccagaccctctgccaggctggattgtacgggccccaccttcgctgtgttcttgctgcaaagtctggtcaataaatcactgcactgtt

SEQ ID NO: 149960 - DNA, 877 bp, Homo Sapiens
tgggtatcgcgaacgttctcgcggcagggaccccaccagccaggggagcagcacggcctcgggcgtccccagccgccaccaaccctctgtgctgccaccacccggccggacaccaccagactgacgaaggtcgtgcccgcggcctcagcgaacccggagagggcttcctgcaagagggacccctctggaggaatcacgcagtccacacactgggtcaggtccccgatgagctccgagtcccccaggaagctgtcgatgaggcaataactggccctcaagtccttcttcagtctctccacgttgcggatattggtcagttcttcaagtcccacaagaaggaccatggctccaaacaccatttggagtagtctctccagcctcagctcagagatgcccacctcagatgacagaacaatgagggtgatgctgtcatggaagcttttccacaccacagtcgtgttctcggtcctcgcagagctcagctgcacctccagattctgcccaaacatgtggactccattgagggaaccgatgacagagaacgggagctgctgacgggcgggggcgccgccgcgactgctcctgcagaatagggggaccccgctggaggccgcgaggcacagcagatgcacagtgccgcccgtcccctcctcccccatttaggactcccaccgcggtccctcacgtggggactgtcagtgcgggtcttggagcatggcggtaatcagagtaactcggcctgtggtccggagccgccagagggcgagatggggagctgattggaagaggattaacttcccgccttcttcacccaactcaaacagaccctcaaaccctattcaggcaccccccctcgtgccgaattcgccacccaggc

SEQ ID NO: 149961 - DNA, 858 bp, Homo Sapiens
cggggtccaagaggctggggcccaggaataagctgtggttccaggacaggatctgcaacaattagggtctcaggcccagggactgggtcagccccattggtttttcccttcaaggtggatgagggtgcctcatccacacctctcccagcatctgctggagacctgttcttcttggggggcctccccctccgacgtttcacagcaggtggggtgatggcgagcagtgctccgtctccattctcggggctgccaccaccagtcacccccagctcaatgtgacggcgagcaatgaagggctgctggggtggagtgggcagtgaggatgaaggagcagcttcacagggcccaccaatgggaggggaggattctggccctgacatgctgcggacagacgggcttcccgggctggcactagtctcagagaccccaggcactagggtgctggcagctccccgctgctgccgccgccgccgcaccagttccttttcctctaccacagttaccagccgtcctggcagctttcgaagcactttggggcctggtggttgtcctggccgaccagtcccttgacccctaatttccacatcagcactggtgcgacgccgaggaggtcgggcaggtgaaggaccctcaggcgaggaagtggctgaagatgaggtggatggagctgcaacctcagctgtaacgagttcctgtggcttctctgggctggaggttggggtcttggcctctgtcagctcttccgaggtcctgtcagcctccagtggctcctgaagtggctcatcagatgctgctgagggtgggagctccaggccattgctctcactcacacacaggggcaactcctcacctcgtgcc

SEQ ID NO: 149962 - DNA, 766 bp, Homo Sapiens
cggcggccggagactaggagaaatggaatggagccccctccggtgaaggccccaaaacgtaggccggtctaacccccggaccggaatcgacctattagataaggtcttgtagatgtcattaaggatctgaagatgagcccctcctggattctgggtggcccctaaatccacatgacacaatgtcctgaggaggagaggaaaagatacatggggacaggccacgtgaagacagaggcagaggcaggagcgacgcagccacaagcccaggatcctggagccacagggagctggaagaggccaggacgcttcttactccgagccctcagagggggtgtggccctgccggcacctggatctcagacttctggcctccagaacggtgagaaaataaatgtcgggtgcatgaccccccaccgccacatctggtttgtggtgtttgttctggcagccacaggaaactcttccagctcctgtttgttgcctgtgtgttgcccgtgtgctccggtcaggtgctgtgccaggcgctttaggggcactgttgtgtatgatcctcaggaccccgtggcatggaaaggatcatccccattttacacccaggatactttggccccagtactaagagcaaagtggaggttgcgggcatacctcactgccaaggaggcagggctgggcttggagacgccctcagaagctgcttttgccctgacgtgccgcctttctttccgccctcgtgccgattcaccacccagcctcgctacctagccta

SEQ ID NO: 149963 - DNA, 895 bp, Homo Sapiens
ggtccgtgggaggccgtagtagtcgtggggtctgacctcatcatcagcggcagtcgatcgtctgaagcttggttcagaggaaaaggtcgtgtgggacctagaggctgcctggataaggtagcccagctgagtcctcatcactggctgcactggtccgcatgccaacaggagctggcactcttgctgttgatcccgggggccatctgtaagggcttgggcctgggagggcctccacactctccagggggtcagcagcctgggggagaagataaggtgctcctcctcctcgtcagtcatcatcatccgtcctcctcctcgtcggcctccccggccgccttctcctctccctcatctggcccctgctcttgagtgctgatgatcaggccaggtcctcgtaggcctcggttggctgcgttgtgagctgagagctccagctcagagtacaggtgtatcaggcctttggggcccaagggtgccatctcaggctcatggctggcctcctccgccaaggtcaaggtcacattgcgattctggtcacggtgggccgtggcggcccgccggagctggttctggccctcttttagccacttggcattggcagggcctggctcaggcccaccaccctcccccatggcgctgcgcaggtccttgggtcccacagctgtggcctgcagcttggcgttgagcagctggttgtgggcagcgtgcagaggcaggggtaggctcagtgcggggcctccgtggctgttggcattaatggccgactggctcagtgatgatggaacagacatggccttggcagctcctgcgcggtgaggccccgggcccagatgacggaggtggctcaggctgcggggttcgggctccgccgcgcctcgccgatttcatcgccggc

SEQ ID NO: 149964 - DNA, 2198 bp, Homo Sapiens
  misc_feature (396)..(430): n is a, c, g, or t
taagggcgagagagtatgaagtcgaggcgcgccgaattcggcacgagggcccctgggaagaagcgggagttcaacgccttcgttctggacaagacctattttgggccctacgatgagaccacctgcatcgactggacggatgactccaggtgctttgtggttgggagcaaagacatgtccacctgggtgttcggagccgagcgctgggacaacctcatctactatgcactggggggacataaggatgccatcgtggcctgcttctttgaatccaacagcctggacctgtactcactcagccaggacggagtgctgtgcatgtggcagtgtgacacgccccccgagggcttgcggctgaagccccctgcgggctggaaagcagacctgttgcagcgnnnnnnnnnnnnnnnnnnnnnnnnnnnnnnnnnnngcgacagagagaccaccatccggggaaaagccactccggccgaggaggagaagacaggaaaagtgaagtactcacggctggccaagtacttcttcaataaagaaggggattttaacaacctgacagctgcagcatttcataagaagtctcacctcttggtcactggctttgcttctggaatcttccatcttcatgagctgccagagtttaacctcatccactccctgagcatctcagatcagagcatcgcctcagtggccatcaatagctcgggggactggattgcttttggctgttcaggcctgggccagctgctggtgtgggagtggcagagtgagtcctacgtgctcaagcagcagggccacttcaacagcatggtggccctggcctactcgcccgacggacagtacatcgtgactggcggggacgacggcaaggtcaaggtgtggaacaccctcagcggcttctgcttcgtcacttttacggagcactccagcggggtgaccggtgtgacctttactgccaccggctacgttgtggtgacctcatccatggacgggaccgtgcgagcctttgaccttcacaggtaccgaaacttccgcaccttcacctctccacgccccacccagttctcctgtgtggcggtggatgcgagcggtgagatcgtctctgcaggggcgcaggactcctttgagattttcgtgtggtccatgcagacaggcaggctccttgatgttttgtctggacacgaagggcccatcagtggtctgtgttttaacccaatgaagtccgtcctggccagtgcctcctgggacaagacggtgcgcctatgggacatgtttgacagctggaggaccaaggagacgctggccctgacctctgatgctctggctgtgacttttcgccctgatggtgcggagctggctgtggccacactgaactcacagatcaccttctgggaccctgagaacgcggtgcagacgggctccattgagggcaggcatgacctcaagactggcaggaaggagctggacaagattacagccaagcacgcggccaaggggaaggccttcaccgccctgtgctactctgcagacggccacagcatcctggcgggaggcatgtccaagttcgtgtgcatctaccacgtccgtgagcagattctcatgaagaggttcgagatctcttgcaacctgtctctggacgccatggaggaatttttgaaccgaagaaaaatgacagagtttggcaacctggcactaattgatcaggatgctgggcaggaggatggagtcgcgataccactgccaggcgtcaggaaaggtgacatgagttctcggcacttcaaacctgagatcagggtgacctcactccgcttctctcccactgggcgctgctgggcgtgcaccagcacggagggactcctcatctactccctggacacccgcgtgctctttgacccgctttgagctggacaccagcgatacaccccgggagggtgcgcgaggcactgcgccaagcaggacttcgaccagggccatcctcatggccctccggctcaacgagagcaaactggtgcaggaggccctggaggcggtgcccaggggcgaccattgcagtggtccactcctcccttcctgaactgtatgtggagaaagtgcttggagctcccagcttcctcctatcgaagtgtctacgccacatggaatctagccactcctggaatccacaaactgctcatgttccacggccagacgctgaagtccca

SEQ ID NO: 149965 - DNA, 1058 bp, Homo Sapiens
cggacttcctccaccccccacgcccatctctgccgcccggctctgtgatcgacccccaaagaacggatccgggtccgccccgggaggtttgtggttgggcccttcggagggcgatcctttgcattcgcgagattcttccaggggagtggacggaaggtttaatccttgtggccaggctcagggcaggctggaaggatttcccagaagcacaaacccagttccccaagaggtggagggcttgttcttggaatacgtgcaggccgtccaggttggttaaaatcccctttctttattggaagaagtacttgggccagccggaagtacttcacttttcctgtttttctcctcctcggccgggagtggcttttccccggatggtggtctttctgtcgccctcgtggtcctcctcctcctcttgttcctcctcccgttgcaacaggtctgctttccagcccgcagggggcttcagccgcaagccctcggggggcgtgtcacactgccacatgcacagcactccgtcctggctgagtgagtacaggtccaggctgttggattcaaagaagcaggccacgatggcatccttatgtccccccagtgcatagtagatgaggttgtcccagcgctcggctccgaacacccaggtggacatgtctttgctcccaaccacaaagcacctggagtcatccgtccagtcgatgcaggtggtctcatcgtagggcccaaaataggtcttgtccagaacgaaggcgttgaactcccgcttcttcccaggggcatgatacatctgggcaatgttaccctttgtgacaacaaacttcctgccatcaggggagaaggacacactgtgcacagagcccttgaagtggaagtggtgcagcacagacctgcagaccaggctgaccagcagcgcatcgcccccttcatcgacgatgatagcgaggcggccatccggggacagccccacgcacttgacgttgtaccgagtggccaggggcagcgtgtcagatttgttgtttttcctcgtgccgaattcggcgcgccgtcgacttcatactctt

SEQ ID NO: 149966 - DNA, 967 bp, Homo Sapiens
  misc_feature (133)..(134): n is a, c, g, or t
  misc_feature (955)..(955): n is a, c, g, or t
ctttatgaaaggaagtacctggcccagccggtgagtactttcacttttccctgtcttctccctcctcgggccggagtggcttttcccccggatggtggtctctctgttcgccctcctggtccttcctctcctnncctttttctcctccccgctgcaacaggtctgctttccagcccgcagggggcttcagccgcaagccctcggggggcgtgtcacactgccacatgcacagcactccgtcctggctgagtgagtacaggtccaggctgttggattcaaagaagcaggccacgatggcatccttatgtccccccagtgcatagtagatgaggttgtcccagcgctcggctccgaacacccaggtggacatgtctttgctcccaaccacaaagcacctggagtcatccgtccagtcgatgcaggtggtctcatcgtagggcccaaaataggtcttgtccagaacgaaggcgttgaactcccgcttcttcccaggggcatgatacatctgggcaatgttaccctttgtgacaacaaacttcctgccatcaggggagaaggacacactgtgcacagagcccttgaagtggaagtggtgcagcacagacctgcagaccaggctgaccagcagcgcatcgcccccttcatcgacgatgatagcgaggcggccatccggggacagccccacgcacttgacgttgtaccgagtggccaggggcagcgtgtcagatttgttgtttttaaggtcaaatacagtgactctattgcccacgggactgataactgaatttccattgcaggtaaaatttaggttcccacgccggtacaccgtacccagcaaattgaaaaccggtaagcgaacttcatcacggctgtcgcacgtgtgccgcagctcaacccggcggccgcccacagagacacttcccgggggtccgcgccctcgtgccgaatcgccacncaggctcgctcc

SEQ ID NO: 149967 - DNA, 990 bp, Homo Sapiens
gatgtttgaaaactcatggcacttgtgaaaaaaggaggggcagagagatggggagaggtcagagcagaggtggaggggccacctctggggaaacggcaatgcaggggctgggctagggtggcttggggctatgctgcccctagagttgaggaaagggggctggggaggctggcctgacaggctggagaggagggggccgggacaggttctcaggacacatcccgagcctggagcttccggggtctgggatttggggtcaagccgcccagaacatgggtgtcccgacccccagccctggcacctggcttcgtcttccctgcgggaaggtggaggatagggaaggtgatctctcacctttgcccctccccatcccccagtccgccttgccgttcccagcaccctcctcagccatacccatgccctccacaaccccagtgcctccccattttccttctgccatcaacctctctaggtgggaaatcagccccatcttccccggcgagagtccccagagcaatatacaagaagcaggaactcaaagggacagcgcagccatcttgactaagcatctttgggtgtgaagaggtctcccccgggccggtggggagggaagggggagacaggcctctggtcctggggcaggcagtgagaggtacacgccccagaagggctgatgatgccgggcaggcggagcaggaaaggaggggacagaaacgggtgccaggaaggaaatgggttctttgtttcgctgttgcatctagattttgttttctgtctctggacttgtaaaaagctgctctggcggcccgcccgccccggcggggactggggatgcacgtacacggagaagtcctggctgccaggccagcagcgctgctctgctccggagaaagcccgggctggcccgggccgcaggctcccggtggcttcaagtgatgagattttttttccctcgtgccgaattcaacacccagcctcgtacctagccta

SEQ ID NO: 149968 - DNA, 812 bp, Homo Sapiens
tagcgtggttttttgcccaaagaggcagccatattaaatttcccattcccatggattcctgggtcaaaggatctggcacaaatctgattggggcatttcacctcgggatgcaaggggagtgaagtgggtcaaaatcatggagtcccagctttcggagacgctttgcagctgcccggtaacacttccagggttggggctccacaaggaggtagtggcagagggaggaaagatgggccaggaactcccataggccatggtctccatgattcagatgaatccacatggttattgacatgcagaagcccaatgtcaaaaactgaacgtccaaattggcttaagaaagagctcaagagaaccttccgggtcctttgattcatgaagtccagggtgataaaagtcaaggcatcaggaaaaggacattctttttcggctcgcttcaccaggactggatctatgtcgcagcagaggagacggaattctcttgaggcatctgagcaggtttccccgtcaggtagggagaggaagtgtttgtatagagccacactcagatccccggagttacaccccacgtcgagccccagaatcggcccgttctcgggactctcaggaaagagctgtcgaagcagctccgggggcaggaggcggagccgttgctccggagggtggaagcgagaataatgaggaaaatttccgaacggggcggcgccaggtgccagaactcgcgattcctcttccgctgcggtctccttaacactccctccatccagttccgtgggcaccgccattagcctcaacacagcctctgggccccc

SEQ ID NO: 149969 - DNA, 639 bp, Homo Sapiens
ctgaacatggcagcacatcgctgaggactgtaaagtcggctggtgacacctggttcagctgaatgtcacagacagagggtgcgccagggcagctctccacgtcaacgggagggacgatgacctgctctccgaggctggtctgcacgtggatgggaaatagcttgttccacgaccacatcctcccggactccaccagctgtgcatagacggtggctctgtggggcacggcctcacaattttcctccacgagatgcctgtgtgcgtgctcataggagggcagcgccccctccccgatcagctctgtgtcaaacaactctgtgaccaggatgttggcacggcatggcatgtcaccctctggacctacagtcacctcggtggaatgcttgttgataaccttaatcttatcactaaagccatttttctccacaatcttcacagcagcatcagccataggcttgaaaacctcgatggcatagcagaagtcggcacctgctgtgaccgccatcattgacaagagtcccgtgccagtgccaatgtcgagaaccaaggccttctgtcctctgtccttcaccctgctcacggcagcccggatacccctcgtgccgattctaacccaggcctcgtacctagcgtatattt

SEQ ID NO: 149970 - DNA, 786 bp, Homo Sapiens
gccggactcggcttcccggccgccgcccaaggaacacccactatgacagaagacagttcctcgagctctggaacccgggtcacaaaggagagagactctcggcaggggtgggatacactgtgggcccatcccacagtcagctctttggaagctgtcagggaggcacccctccaccccccagtttagaaaatagacaacatctgtatttttgcatttctgttctccctgcctgactgctgatggcagcagtgacccccatgtgatccctgggccctgagtcacagccgccatccaccccccgccacctttccaagtcatggcttcattcagccctaaatgggaacacacgcctcagaccccaccatgccctggggggtccccacatacgcacactcacacacccacacttgcgtggccccccgatgctttgggggacactagactaggcacagcaacagagcagcaattggggtgtctgcagagcctgcacccccagagcaggcagacccatcctcctggctccccagctctgcccatgggtccctggggcctccctgaccccatggcgcccagccctccatcagcccctccctgagtgcaaaccttggcggtggctctgctaagacgaccccaggacccacaagtggacagagggacggagggaggccagcagcatcgagaccacaaggtctcaacagtgtggaatgagcagcagcagcaacaaatgggaaacacgaggacatcgcaaagctcgtgccgattcaccacccgcctcgtcctagccga

SEQ ID NO: 149971 - DNA, 926 bp, Homo Sapiens
ctgggttgagggcttcatttggtttccttctccaatgttcttcgtcttgggcctgggtcctccgttgtctttggaacacacttgggttcagcgtttgggcgcttttttgatgggtgttggccccttcttgggtgagcctttgttcttccccatgtcatccttcaggagccttgtgtcccgggaatcttcccgggtttgtgctggaccttagactcagggtcagggtcatctcctaagtcctcgatggtgtccaggagtctgccagggctgggtcggagcggccgtcaggcctctgcaggggcagtgcgtcctcgtcccggatcagggtcaggtcctgcatgctgaagctgcggagcttctctgacagcacccctggcccttggcggcagctgtgactgcagcattggcggcaaggttcaggcccctcttgcccaccctcatcatggtctcatagctcttgtctcgggcctgcgtgatgtactcgtcgatctccttctccttgttggacagcgttgggtgcacgaacttgcggtagagcacgctggagcccttggtgtaaggggacagcagccatatcacgaaggcgatcttcagttcaaagtagaaggggaaccaggagagcactatatccgtgagcgtctcggccgtggtgaagaaggcaaagacgatccagtacatcatccatttcacatattccttcacgttttttgtcttcacggccttgtaggaagaataggctgggtacagggtgccaaagatgagcaccaccaggcgagagatgatccaggacaccatggcggggccgggcgcggcgcggggcggggacccggcccggccgaggatgcagctgcctgaggccgagcggcggcggcggcggcagcaggagccgcagtagcagcagcagccgctgcagcagccctcgtgcc

SEQ ID NO: 149972 - DNA, 986 bp, Homo Sapiens
ggcagggcttccttcaggagcccacaaccttaggaaaatgagtcttcttcattggggaactgtgggagaaagttttgaacataggggcacagacgatgagtggggtggaatggtgttttgctgccagtgccagagtgtgagttcctgtcacagctctcagggccccattggccaggatggtcttcgtgccaatgatcacctggttgactcttgacataacggcaaaaatggcagcatcagtcatgacagttgtctcaatacctgctttggacaaattcacagccatttcatgaccctggcagaaaggagcacactctgctacaatgacatggaatttcctctttcgggcagcctctttgaggaaggcctctactgttcgggagaagccaatggtcatgatcacctcattggagtgaatgtgctccagagcctgggctgcaatgttctccattgtcccttccagctccactagcagctcattaatcgcctcaatgatgttggactggagttgggcataatggaagctgaaatcctcgtttaggcctccggatgtcaacagtttgtgcagggactcctgctgatcactctcgtcgctgcgtccatggagtctgccatactcctcccggataatcttgagcactctccgcaccatgttgcccacggtggtctcggagggctgagcggccgtcatcctcctgccctctctgcggatcagctccatcagctcccccgcgttgctccagcggtggtccgtgatgatctggcgcagcaaccctagggtctcccgagccatttcctcggagctgcgcggcccaccaccccgcttcagggtctccacgaagctctcgatcctctctgacaactccgagcccttcgctgcggatcccggcatctttaaggtagctgccttcagccttcaccggcggaatccacacctgcccctcgtgccgaattcaccacccaggcctcgtacctagccgagggtt

SEQ ID NO: 149973 - DNA, 689 bp, Homo Sapiens
ccatccacccgccctccaccgccgtgttcacaaattctgcacttctctccaagaaccttctgggggcaacagggagggtacaagtgccctcaatttatcaggcttctttctaccagatttgtgtcaaaggccagactaggaagaaatggaaaggaaactaagttttgaaagcagcatttccatttgccctggtgtccaaaatgcccacgtccctcctcctcccccatcagcatgggccttctgtctcctgaagtagactcagtggaacgctccacccacgttcaggtttcctctggctcccatctacaaggagtgtgtgtgaaatggtgctggccgcaggccccgacccaggcaagacgggggtggcgtgcactggagctatgggggtggggaggatgctcgggtctctcccacttgcagaggcgtggggtccgaagcatccggatgacagatacacaaaagggacagcaatatgcctagaaatcacctcccctgcgacccacgcatctcagctataggacagccgcaggggtgatgacatggccattttccaagttaatgttatgccctaacttaatttgggtggaggtgtcccattttcatggcctgtggattgatttcaatttcatcatgtcacagagaggcctcgtgccgaattcaacagcccaggcctcgtacctagccgtaag

SEQ ID NO: 149974 - DNA, 914 bp, Homo Sapiens
ttgttcggaagggaggaaggcaccggccagttcatgtcacaccagagggcaccttatagtgattcacatggttgcgcatgtggtcccgcaatagccgctcctgtggcaaatctcttggaacagtgagaacactggaagtgctgctgatccaatgaggtctggcgacggatgtgatctaagaacttggtattgtttggcaaacatgccccccacaggtggggcaggctaccactttctcctgggtatggctgcggaggtgctctcgaagttttactgcggtccttgaaggtgcaggtacagcctttccagccacacagcaaccaccgggttgtccttgccgactgcttcgtattcacagcacagactgtgtgcttccacatgccgataaaaccactcaggattgtcgaaggaattctcacagtgctcccacagacacaggaagtggtcagggatatcagggatgacgttccggctctggaagtccaggatgcaggggcacaaggtcagcctggctttgcaaggcctgcagcccccactgtttcagcttggtgtggtagcagtggaagtagacatggcggatgaggtcagcagaactgtccagagaacaaaagccacattcctgccacaagcaggagaattcttcctcaagtgggtcatcctcctcttcctcttcctcctcctccccagagccatgcaggtgctgctgcaggtgctgagtgacatgctcaaagaacttttccatggttgagcacacaaaggagcaggacccccactcacactgtagccacagattctcctttcggggaactttcccaggaggcggcatggccttcacccgtctgtcggctccaggtctcttacagctcttctcccacctcgtgccgaattcaacacccagcctcgtacctagccta

SEQ ID NO: 149975 - DNA, 932 bp, Homo Sapiens
ggttgcggatcggcttacggcccacgagcacaagtgcaccaggattttgccctcctggctggctcagcgcccggtggatgaagtcggcagccgtctggaagtggatgctcatgtcaaaggctggcgagtcgtgggcctcaacacccaggtagcggatgcccagcccctcataggcctcgggcgtgcctcgccaccggctgtgtgaggcattgaggacgtgcgtgatgcccaggcggcgaagctcccggcggttgttagccatgtcctggtctccgagatagaggcctggccagacctcgtcggcatggttacaggctgtcttgcctgtgtagaggagccgctccaactcgaagacattgaggaaaggatgttgaacggttggcatctcctccagggtccctcgagttcgaacaggagaccttgagctactccgggagaagcgggccataaaagtcatagaagcccaaagccagttaccagggcacatcttagaggtggcagaaaccgtggcagctgcaggagtggctgtggtgatgatgggttcagttgccaggtagctgctgctctttgcaagcgctgcgctgggcctcagtccgaaaggcggatcgccggcgcagacagcgccacggccatgacgctcctgctgctgtcgccgccgctgtttctgcccaagacaggttgacagattagcagctatttttaagccatgacacacacgtcgaagcagggttcaaatcagcgtgtgcgctggtgacataaagggactcggtctcacattcggtggcccgagtcgccaggcagcgtgggctccccagccaaccccccacgagcccgcgcgccttgcagaccagacacggccccgccgagccccagcagcaccgcctggaatgcatgcgtgtgttctcagagctgatcccgggaattccggaccg

SEQ ID NO: 149976 - DNA, 677 bp, Homo Sapiens
tatccgcagagcaagatgtaggcaatcactccgatggaccagcagtcaacggctttgctgtaaggtttctgggcgaggacttcaggagcgacatagcctggagttccacaggcagtggacatcacatctcctttgccctccatttttgacaatccaaagtcactgatcattattttggactcctcatcttgactgtagtacaagagattttcgggcttgaggtctctgtggacgatgcccattctgtggagatagtacacggcgtccaagacttggcggatcagagtgctggcatccttctctgtataaaaccccttctccactatccggtcaaacagctctccaccggacaccagctgcatgaccaagtacaggtgatttgggctttcataaatgtcttccagggcaacaatattttcatgcttaatctttctcaggacggctatctcattctctatgctgctttccttgcccttcagcgccttcttagggatacacttcacagcaaagagcttgccagttgccttctcttcagctaaaaccacttcggaaaaggccccggttccgagggtctctttgaactcgaagatcttcttgatgtcttcagcttgctttttccaggaggagctgctctcgccgttctcccgggccatggccgacgagcgcggcgcggagga

SEQ ID NO: 149977 - DNA, 1082 bp, Homo Sapiens
caggatgatcagcttgctctcctggttgccgtaggccaggagctgcaggcagtcggtggtgatggccaggaacttggggttgttcttgttgagcaggggcaccatcttttgcagcccgtcggccaggcgcacggccatcttgggcgccctcctggttacaggagcaggttgtggcagcgtggtgatggcatagaacaggaccgactccacaggggagctgagcatgcggaccagagcagggatgccacccgacttgaagatggcgagcagcccctcccggtggtgggagaggttgtgcaggatgctggtggtgcagcgggctgtgtccaggtcgctggtattctgcatggtacgcacgacagcggccaccagctggggcgagcccatcagggcccgccgcgacgcctccttcttcgacagctggttcacaatcatggccgccttggtcaccaccaccgggtcctcgtcgttgagcagtttggtgagctcgggcagggcgcgagtggccagctcggcatcgtcctggtagttgatgagatgcacaatggccgacttgagcagctgggacggctcggccagtcgctgcaggttggtggcctgcccctccacctgggtggccagcagaagcgagctgtcctcgcctgacacaccagggcacatggcctcccgcacccgtttggccctggctgttgtggacatctggtactccaggtcaccttggctggggggcaccccctgggtgtaagtggtggttttcttgagcgtgtactggcgcccgcaggcctcatcctcctccatgatgcccttgctgctgacggagggcacgcaggtgttggcgcccgagtggatacccgagtcgtaggtgtatgtctgctgccactcagtcaccttgataggctgctccatcaggttcatcacctccatcgtggctactgagtatggggcctgaccgggccgggtcggggtcgggccggggtgggagccggcgcggacagcgaactgagctcggcgcggtcgggcggcggctgctccggactctgcccctcgtgccgattaacacccggcctcttacctagctattt

SEQ ID NO: 149978 - DNA, 1244 bp, Homo Sapiens
ggggggcttccaggagttgtggacccaatcccccgcttatttgggaagagggtcttccccactgtttcgcgccccagaattggtcttttccattgacaatcttgcggtgcccgggttcccttccgaatagcaactgggcacgttggcggcgggggccctaattgttgaattatttcggaagctctccgcttgtggcacttcccctggcgccgggtaaggactccccccgttaaaatggccctcttccaggagagctcccaccttccctgggatgttttggtttccaggaaacccgcctccgggggtttgccccctcccgggggcggttgtttttgtaaattggtggtagggaattcccccaaaggccctttaggttcaagtgggcccaagggatttctcccctaggggaaaaccgggctattgggccccaggtttcccctttaccctaccggggggccgggggcgcccaaatcggaattggtctaggaaaaactttttcgaagggcccgagggcggcccgacacggcccattaattgtagttgtgggttagttttttacttagcaaatattttattaatacacactgtcatagtcctaggatagaagagtcctcagaacactgctccacattgaagatgctgaaatgggtggtcaggtccttagtcttccttctagtctgttaaccccacactcctttaacagaaccatgcttgctgcccttaccctgtccacatccctgaaaggaaacgggtctctctcagccagatgcagatagttgacactcactgcctttgctatggcagggggctccttatgattaacccagaacaggaaaaacttagtgtcagctgaccgaaaggaactcagccttaatttttcaaaaagtcactctcattccagctatctccaggaaggcgctggagtatcttcagcatgagcacagagattcccactgccgaaatattcggaatactttccttgatttctcagagagactcatggagtccgtttcagctggctggctagactgtttgtgcgccaagaggatggtcagcactgctttccagcctggctctgctggggcgctggcatctggttcagttccaccattctccctgctttctttgccaagtgtgatattcacccaagggcaccagtctctatgctgagaggtgggatcaaagaagcttcgggaagatgtgtccctcgtgccgattctacacccggcctcgacctaggccga

SEQ ID NO: 149979 - DNA, 642 bp, Homo Sapiens
ttttatgtcaagaaggcctcatgtttcttggacccatcctcctcattttctcatcccaggcttctccgagatactgtttatgctgaggaataagcatattctggcttactgttcacagtggagggagtttctccccttctagataagtttttatcccaccagtgttctgcttccccagtagagactgtgttaagaaaagaggcaaatttgctttctcagactggacagagcatctcattattttgtgaagccccatggccacctatttctgagacatgggggatgggggaaggcagagtttattcttggttgtagattttattcatccttttccaccttgatttcaatgaatgagttcaagtcaggacagcaggttttgtggggttggtcaaaagatggggagccaggtgcattctcatcccctccctcatcttcctcttcttggaaattaggattgtaaagttctggtggaaggagctgggcttcagcagaaggcagtctgtctgagggaggcccatacacacggttggctttggtgccatgcttagagttagcatccaggtggtagcagagctctgtgaggcgctgggcccggaaacggggagggcgggccacccacacacctggctcgttaagactgtc

SEQ ID NO: 149980 - DNA, 247 bp, Homo Sapiens
aggaacgtcactgggatgaggaacgtcactggctgtgaacgtcactgggatgaggaacgtcactacggatagagacaacaggaaggaaggagaccttcctggtcacacttgggccacagatagaacaggcagcggcccaggaggatcctgggtcctgatggtggttgagaagctggttcttagtgatcactcagaaacgtcggcctggccttgtggggtcagaccttgcatctcagtcagcccaggg

SEQ ID NO: 149981 - DNA, 794 bp, Homo Sapiens
  misc_feature (360)..(421): n is a, c, g, or t
  misc_feature (452)..(729): n is a, c, g, or t
ccaattcagtaaacatttattaaggtcaattttttttcactttgaatttgagagtatctggaaaggtgtaaccttgagggatgaataagaatttatctgaaaaactgacagttggtgggtgatcaaatttctaggcagaagcagcctgcatgcacaaaagtacataaacatgaaaataacatgttatgtctggaaaactgtaaacaggtcagtatttctagagcaagaagagggaagcacataatggccaagagatgaagctggatagttacatagagcccacttatggatcttgcatgccccactgaggaacttaaactttatctgtatttgacagggatcagcatcacttgaacccannnnnnnnnnnnnnnnnnnnnnnnnnnnnnnnnnnnnnnnnnnnnnnnnnnnnnnnnnnnnnagactccatctcaaaaaaagaaataatcttnnnnnnnnnnnnnnnnnnnnnnnnnnnnnnnnnnnnnnnnnnnnnnnnnnnnnnnnnnnnnnnnnnnnnnnnnnnnnnnnnnnnnnnnnnnnnnnnnnnnnnnnnnnnnnnnnnnnnnnnnnnnnnnnnnnnnnnnnnnnnnnnnnnnnnnnnnnnnnnnnnnnnnnnnnnnnnnnnnnnnnnnnnnnnnnnnnnnnnnnnnnnnnnnnnnnnnnnnnnnnnnnnnnnnnnnnnnnnnnnnnnnnnnnnnnnnnnnnnnnnnnnnnnnnnnnnnnnnnaagagtatttctttatgttgctttctccctcgtgccgaattcacaacccagcctcgtacctagcg

SEQ ID NO: 149982 - DNA, 252 bp, Homo Sapiens
gctgcttataacaaggttttaataaaataaaaagttcaagtgcttccaatcccccaacatacccctttctggtgtgggggaggggagggagctccccaccccaatagcaccaggatagcaccatgagaaagatgaggtcacacccggcctccctgagacccacggggggtggtgaggggaacatgcctccagacaccccccaaccttccccccaccgcagacagctgcaaagctgagagcgaacccagtccc

SEQ ID NO: 149983 - DNA, 495 bp, Homo Sapiens
ttttcttattctctcataaaaatcatttattggcacatcagaaatgacaattttttctagtatagtagttgtatgcatctgtaattgcaattcagtgtaaactacatgttacaagtcactagaaatctaattagcaggatgaatttaataaagaacaagaggaactatgagtctaccacggcccagccattgagtctcattggagagtaaatcaaatatcaaactagtgttgccctgcaacagtttttctgtagccaagaaaaaccaagacacacataaacaggatagcacccattccataaattaggtacacttaactagaaaaagattgtaactgatagaaataatctaaataaagtaagcacaaaagtaaataattagctatttacatatattcctttttgccaaaactttaatttgttagctttcccatcctatctcttcccttctatttgttattcttgttttttcatggtgaatttcttggctcactga

SEQ ID NO: 149984 - DNA, 849 bp, Homo Sapiens
aacagagtcccatacctcacgggtattttctcaatcagtgaacacctcaagtactagcccatgtgttttgagtaaaaagggctcctttcaacgaggatccccttctagaggctttgactaaccagtctcttggcacccttagaatgaagttgagagcgtcacagggatgcttaacgaggccgaggggaaggccattaagctggccaaggacgtggcgtccctcagttcccagctccaggacacccaggtgagtgtcctgccacatcatccaagggacctggggggtggccttcctcggggcaggtccctgggacctctttgcatcccttttgcaggagttgcttcaagaagaaacccggcagaagctcaacgtgtctacgaagctgcgccagctggaggaggagcggaacagcctgcaagaccagctggacgaggagatggaggccaagcagaacctggagcgccacatctccactctcaacatccaggtgcatgccccgtgtccttgcttccttcatgggtcctctcaacttctctgcgctgagatcccccgcaggcagatcccggtggagtgttggtgaaatggtgcttgaccccccagcttcccctgctattgggtttctccaacgaggagacatggtcttcgcttctcagagtctgtggggccagggacaggggccactcatggtccccctctcaccctaccctggacgctgtccttgtagctctccgactcgaagaagaagctgcaggactttgccagcaccgtggaagctctggaagaggggaagaagaggttccagaaggagatcgagaacctcacccagcagtacgaggagaaggcggccg

SEQ ID NO: 149985 - DNA, 140 bp, Homo Sapiens
atcagagtcccatacctcacgggtattttctcaatcagtgaacacctcaagtactagcccatgtgttttgagtaaaaagggctcctttcaacgaggatccccttctgtcgtcttctcgcagccgtatagtagtagtaggc

SEQ ID NO: 149986 - DNA, 868 bp, Homo Sapiens
aatccttccaattttaattcccctaaaaggcccaaagaagccaagcaaatcaaggtatacatgtatatgttttaattttacaggagagagaaagaggtataaggcaagaattaactacattttcagtttcactatttctttatgagctctattttgctgctaagttcaagtttcaaaaaaattattaattcctctgctatgttatcttgtcccaattcacaaaataacagggatttccccatgtgactcaaaagcaagaatcttacgtcctaaataacataaacagcaatatgtgtgactactgtcattcattaacttcgatggtgaagttcattaaactgaccattaaaagaacatttgaacaattccaaaagggagcaaggataaatctccaaatcacccaatagacaaggaacccagagatgacatacagtgtgctcacttccacccactgccactgagaacactgattgctctcttcaaacacagagcgaagaatgggcctcatgtcacatggggcagggcagctgctggatggggccctgaccccacaaatctttggccccggctgcggctggtgctcagactccctcttgctcctctcccaaaacctcttcatacaagggatgggtagcagatgggctctcttgcattgaagcattgaaccaaataattttatgaccttctcatagctggtttcagcgtgggccttggaatccccacaggaactcgttattgcgcagaatccctgccgggccctgccggtaccccagggatttcccgacccaactagggtgaggacctccagggtccccaaacatttctcctcccaataaccctaattcatgtctcaaaaccttggccaggt

SEQ ID NO: 149987 - DNA, 832 bp, Homo Sapiens
agggtttcactgcattttattcttcccactcccatcatctgatgggggatgagtgttcagggaagctgccacaagtgaggtgaagaaaaaaaagacactaggggttagagaagcctcgtacagagttatcaggcctgtgtagtagagagttggttttgccttcaacctaaaagcaaagttgtgaaagagaagcagaattccaaagtcccttattcaggtgagggtcaatggggaaaagtccacaagctagagtggacttagggagtgcccgagtttctcctgatctaagagagcatgttttaaagccatggtgagctgctgggggtgggacaagggtgtaagggccttgaacacccagtttttggtggaagggttcagaccttggcttgtgattgctgagatgaattggcattggaaacagggcacgggactttgtctgtgtcttgaaaatgtccctggcattccctgggtcctgaggggcctaagcagaaatcctctgtccccacctaaccaggactgtaccccctcctccactgggctgtacccactctagcgtactgccagatggaccagagcaataaccagggtgatgctgtaggccagcaccgccagcaggtaaatgtgggaatagcgagcttgtccagcacggagcccacgcgcagccagtctcgaggccacctctcggatctacatccgcatctccacgaattgccggatggcggacaggactggcaaaaccaagacagcagggaagacaccgagaggtggggacggtacctgaccccggactgacaaacctggggcccccactgcgcaaggaccagagcacaca

SEQ ID NO: 149988 - DNA, 480 bp, Homo Sapiens
tttgatgtagttgatgactttattgcataaaaaacacaggctgtttctccctcctcctaccccctcaaagtgagttcacagcagttaaagaaaaaataaattcctacatttttcctctagggggactgcctagaaagacaggcagccaagcagcctagatttataaaagaggggagcagaagaaaacctatccaaagcctctacccgcatacctcagagcttgggggttccattggggggaggatctgtgtccaccagcaacacccatttgggagttccccttaggatggccactggaaaaggctgtcttggtggcacagggaaggggtggctggtttcgatgggtggaggagaaaggcatcttacacccacggtgcccttcctctttccccctctccacctggccaggcaacctgcaggcactgccaaatctcctcctgccccaaccctctcagcaaggaaggggatctctggttgggt

SEQ ID NO: 149989 - DNA, 835 bp, Homo Sapiens
ggtttcctactcagggcggggggctctcctcgccctcggggacatcttccccggcagcggggtctgggtacatactggcctcatatctcccggacagctgcccaagggattgcaagtgttgcggcagctcatcctcctcctcctcttcttcctcctcgtcttgttcctctgtcttgatcacgaatcccctccgtgcagttcttctgctgcaccagcatctgcttcagttcgctgaactcgctggagccttccgtggactcctccagcgtgttctctggctcctgcatgtccaggtctggctgttccccacaggggtcacccagctctgagtcctggaagccgtgctcttccacctgtcccatcaggggctcaggtgtctccaaactttctgagccctcgtcgttggtctgtacctcgatcttaatcacgatcccatcgtgcgcagcactgggatctgtcggcgtttcgccctcctcagagtcttcctgctcctgcatggtgggccgctccccgcgctccatctgtgacatgaggtctggtttggaaattgcatagtccatggaaaccagggactcgtagttgcccctcatcacgttcttgtagagctccttctgccactcagacaggtttccccactcctgctccgagaagtgcacagcaacatcatcaaatgtgacagggaccttgggaacttctccattgctgccggggggcaagccgcaggatccagaaatttctgtttttcagcaggttctccatgttctccagccgcctctgcagcagcccatactcctgcagcagcctcgtgccgaataacccagcctcgtactgccta

SEQ ID NO: 149990 - DNA, 787 bp, Homo Sapiens
cctcgttgcccctctgtccaagggagcacctcccgataggaaacaaactttctgatgaagagcttaaggcaggccagaggagtactgagccatggaaggagttgtgtgcatggatggtgagctagactaagtcctaggtgcctcaaggaaggatgtgtgggccgatcctgactcagggaacaataagaaattgctttcaccaaacaggagaaacctgaaggtctgggtccagagcctcaagatcttacaacctggcagcacacatgggacacttacagttggactggcagcaacagggcttgcagcagctggactggcagcacacggggacacagcagctggactggcagcagcagggccttgcagcagcctggacctggcagcaggatgatccacaagcactgaggagcagcaaacagggctttcaacagctggactgggagcagccacaagaaccacagccccccttggaaccccctcaggagccacagccccccttggagccgccacagtagccacagctggtgcaggaacaggctggcatccaggagcacacgggcttgcagcagcagacaggcacataacatctggagccacatcccccacagctggagctgcagcccccacagccagagccacagccacgcacggccggagcctcagcccccgcagccagagccacaacccccgcagctggagctacagcccaccacagccgtagccacagcctctggagaagcaacagcagcccctcgtgccgattataaacccaggcctcgtacatagc

SEQ ID NO: 149991 - DNA, 672 bp, Homo Sapiens
caataacatggtgaaaaaattcctcccagggaagcagagaatgatgccagtgccacatggggggcagaggggatgcttttggcagttttttgttttaatctgacccttctttacagtggggctgcctctgcctaccaagtccttggtgcaaaatggctcctggaccagcgcaaggcagaaactctgaggaaaagtgcccgccacagccatgacagctgcccccatgctcctgtctgttttccacgggagcttgtctctgctggaccatttttacatctcaaggggagaggtaaggacttcctcaggaaaggggtctcctgagcaggtggctcctgtttccacaggagcctcagtgctacctgccctaggatggctccctgggaccatctctgggacagaggcgaccaggaagccaagaccggcagctcagctggagatgtgagtccaagaacaggggaagaggctaaagggcccacagctgccgtttactagaaccatgaggcctaagtgcaattagcattctggcagactggacagcccctcagagtccctagcccccaccacagtggggaaaccaaggatgtagcctgggcccctcccttggataaccctagacctgtcctggaactatgtacagtgtatgggcctgtctgctgtagctctctactttat

SEQ ID NO: 149992 - DNA, 540 bp, Homo Sapiens
agggccttgggatcaagaagtgaatgggggcagagagcaggtgcatactgtggggtcagactgagtcggatgtcaagcaagttggttgcaccaagcccattcccacctctgcaaatgacagggcactgtgctcctctcaggctggtacaggattcactaagcagctcaggaaggccctggacaccgtggggggttctgcatgtggtggccgctgctgccatgcgtctatgctgccaccaacccccatgtaaccatgggcagcgcccaccccatgcgccatgtggtggtggccccagagctggccccatccctaaggacggctctcagagtgacccccataggcttgcgaaggcacggcctggccacaccccacctccaggccggtgacatctccaagctggaacaacagcgtcctcagacaaagcccttctctgcctgcctccagagacagacaggcgggcagatgtgctccagccctgggcaccacctcagcaagccttgggaccaatgaaccggaataaccagggttagcctcgtgcc

SEQ ID NO: 149993 - DNA, 797 bp, Homo Sapiens
  misc_feature (160)..(164): n is a, c, g, or t
  misc_feature (166)..(168): n is a, c, g, or t
  misc_feature (170)..(176): n is a, c, g, or t
  misc_feature (178)..(185): n is a, c, g, or t
  misc_feature (187)..(189): n is a, c, g, or t
ggtgagggaatttcaaggcacttaggtccatgacccagggatctttcttagggaaaccaggttatgacccatgtttcacttaccctactggggccccgcggcgccaaaacgaaatggtcttagaaaagcttttctgaggggccgaggcggcccgacaagnnnnntnnntnnnnnnntnnnnnnnntnnntatggtggaggttttttggtttctatcacaagaagagatggtggtctttcattggaagactgatttggaggatttttttgatctgcaaatcttgaagatggcttatagattttacctcttttttcatctgtttcatgttcttctttagctgcattaacaacaccccctcgcacaaatgttttcactttattaccatcacttccttcaaaagcagcaagaaactcctcataaatctcagcagctgccttttcatcctcctttttctttaattcttcctgttcctttttacttaaagttcgcttagctgtactcatttttccaatactgaatgctttaagtttgttttccagaagaggtcttgagagattctgatgaggagaatcacaaaggctttcacgggcactttcattcctataattatgttttcttgggctcttaggtcgtgtccgacttggcatatcactatctgagggtccagatgcatccatatgtgcatctgaagatccagatgaatgaacatctgatgatctcgtctttgaactggccttctgagatccgcctggcgttttgtccgccatcttgagctttgcccctccttcggcggcccc

SEQ ID NO: 149994 - DNA, 1449 bp, Homo Sapiens
tggatccagcgtcctaggccaggaccatgttcaggcaaaagccagtcgcctctgatgtccaaccggtccagtgtcgaacatgcgctctccacagcacagggcaaggcagccaagcaatccacacttcctggcccaccaccaatcccgcagctcaggtaattaccaccagttgctaggccttgcctagaactgggacttgttttaccttgagatgtcagcactggaattctcgttggccctcttcccccgtcagaaactccacttcagaggtctcggtggagacagagctgggccatggccattgggcctcgcaggcctcttggctcggcgactgaagagcctgctgctgaagcgcccggcgggggcggcctccccccggccgcttctcccatgccatttcggctgggtgcctctcgggatttgggcttcaggtctctgtgcatgtgagagaccatcctgccatccttctggctcagctctcccaaggggatgggctccacggggggcagcacctgctccaccgtaaccaggtctttcaggaagctctccaggcgccaggccgactcgccaccgctggcgccctcctcctgcccctccgggttgccgcccgcctcccgctgttgccgggcagcccagcgcatcatctccccaggcgggtggcggcagcctgacaccaaggcgtacttggggttgataagctttcgagccacagtggaggagtaatggaggccaaccctgcccgccaggctcagctgccggtacaagtccacctcctcggagatggcgtacagctcccggaactccgtgtcaaagggctctacgttctgtcctgtcaggagcaggaggaggtttctgtccacatgggaggaactccaggtgaacctgtaagatccagtggccactttgtcaccgtccaccatcaggaaccttgatgacagggtccccttgatcctccccatgggcatgtagaagccgacgcctgtcacagagcggacacggatgttccgaatccggaagtcagtgagctgcaggtcctgacacatctccaggaaatacttcactcctgcctcgtccaggatgatgtacactgggacccggcgcttacaggcagcatccacaatgtcttgaaagatatcaccatcagtgaagaggtccatgaccacagcaatgaccttctgggcctgttggatcatctgcctgaccacctgcttgaggtgcggcgccttctcgtccttgggcgggtgggtgaagagcgtgacccggctcacgccgcggtagaaaccagtgtccgtccagcccaggtccagaggaggcacctcggtgtcggaacggtcgggccagtaggccagggactcgccggactcagccggcgccggcgcgggggccttggccttggccttgctcttgccccgggcgttggcggcggggacggcgtcctcgcctcgtgcc

SEQ ID NO: 149995 - DNA, 687 bp, Homo Sapiens
acacccagtctcggatcatctcctccacctcagggcgctggctctggagtagaagctcaatctgctccatggtcttcatcttgctcctgagccggcgggcctcctcttgtgcttgtttggtctcatcctgctgctgctctaagtacttcatctgctttttcagtgtggagcacagcatctcggccttgcccaaggcctgctgcagagataccacagtagcattgcgttcttccagcgtatcccgcagagtgtcgatgatgacctggctgtctcgtttctccttgtctttctgggaaagctgggctctggcattgtccagttcattctttaagaattctgcatccaaggcattctcctcctcctgggcaagatcaaagaagagcttattgataatggttcttttgccaacctggattcggcactgtgggcaggtccgacttggtgctgtctcaaaccactgaattaggcactgcaagtggaaggtgtggccgcagtggatggcggccacgtcgcgggagtgatcgaagaagtcggagcagatagtgcacagagcacggataggcatgatggctggactcaaggggcccaggcagccaaagaaactgctacaggtccggcttcgtagacgcgcccccgcgcctccgcttgcttccctcgtgccgattcacacccagcctcgtacctagc

SEQ ID NO: 149996 - DNA, 857 bp, Homo Sapiens
ccagacagaggagtcgcgccccaggccagcaggtgcagcgccaaggccccgcccacgggagggcacccagccaggaggccaccagccctcgcgccacgccagcctgcgcaccccctgggtccaacgcagctggactggccaggccgtgggcaacgcggctcctaggcctggttcgggaaagctccttcacctgttcctctcacaggtgtggcattcacagtgctcattcttctcgccgaagaagccctcgccgtagaagcatgtcacctcgtccccaggctcaatgtcccggagcaccttcacgcaggctgcgttcccatctgcaggcacaaacttgcagttgggtttgcagtcatggttgatgaaggcggctgggcccagccacagctgagcactccgcttgcgggttgagtacatgatgctgaagtcattctcaccggccctcagcagcccctcatctgcctcccgcagctctgcaatgcagcccaccagcagctccagcttctcattctttttccaagcacgagtggacacgatcttggccccgttggtctccatggagtagcgcgtgcagggcaggatggtaaagccactttccggcaggaaggcacggaggtagcgatagacctgacgttcatcttatgggtgcggaaaccgaggtaggggtccaggacgaggctggtggccaggtcgtcgttctcgcacagttctcgtgctgtcactctgtcgggccccatggtgcctgccttcgtgccgattctgcctctggcctcgtaccagtagcctttgagggcaaggcaggcgcggggagcctggcttggtgctgactccactcccacgctacgtcagaagccatg

SEQ ID NO: 149997 - DNA, 1467 bp, Homo Sapiens
ttcggatctctcccgcttttccaggacttcccgatggaggccagctcctgtcagcagcccacacaccgccagcgaggcctcccgaggtggttggggagggctacatctgtccctcgggctcttctcgaagtcctggggtcctcccatgtggctgccagtggtttcccatgtctgagcagtcatcagtcttggtggcttgggaggtggctgggggcctctgggaagttgactgctccctcaggcaaagtagccaggcgattctctccagaaccaggtgacgcagccaagcaggcacgggctgctgcaggtcttgcttgtgcaccagccgcacaatgaagatggtctcggccaaacttatcaccagcagagccatgcacaccacaaagtagacaccaatgagaggagtgccgatggcagtggccggcagcgtgtcagaaacgatgatcaggaagaccgagtagcccaggaggagtgtaatcttgaaagagaccctctcgccactgttggggggcaggtagaagcccacgatgtccatgaccatgaggaagatgctgggcagtagcaggctgaccacatagaagaggggccgccggcggatgaccacatagaacttcatttctgcatagtagttactgctttccatgctggaactcccgaaagtagggcagcaccccccagcaactcccactctccctggttcatgaagacactcctgtcggatttcaccttttctggcaagcgccacaaagagatgttgatgtcctggatggtgtgcagccaactggtgaaggtcagcgagcagttctggacatcgaaggggaagttgtagatgtcgaggctacaggcagtcaccacctgaaggggcttgtagttctgaacttcgccttgatgccgaatatacacgtacgggatatttggagacttccccacatccacgaactcattgatgagaatgtccgggacccagatgctgtccgtggggatggacaacttggtgatgttgtcaaagtcctcagggttccactggagaaactcatcagtccagtactgccggtaccagatgtaggtggtcagcacctgattcttctcatccacgttgaggatggcatagacaatgacgtcaatggatacggtggttggcttcctccagtccctcacggggcgcacacccttcctgtagttggtcaaaaggtaatccgacagcctcagcagagcgggcctggtggtgtttcggctcctcctggcttctccctgtgccaggagtgtggggaggagcaaggcgagcagcgcctgctggacccacagcagcatagcgagctttccaagcataggagtgcctccgagtgctcaggacgaggcccaccaagggccagcttgcctgccctctgccaacctcatgtcccagccagcctgcctctcgtggccactgccctcgtgccgattcaccacccggcctcgtactagccg

SEQ ID NO: 149998 - DNA, 1121 bp, Homo Sapiens
cctccagggcccggagctcggcaggggccagggcacgctcgggtgcgggtggctccggactctgcacgcgcacccgctcctggtggcgccgttcagctttggccgtccgcaccggggcgccacttcccaggggcgggggggacgccgggctctgccttgaggtggggctcgggctggcccagggtggctgctcatcctcctgttcctcctcgcccagcgtctccccgtccagggcgagcctcgcttcggccccagcctctgccgcctcccgcagcatctgcgctctcttctgctgtagttttctggcttcctcctcctgcatcttccgcaggtcgtcagcacccaccagggacacgcgcttaggggggccctcggcctggggcacgcgcacctccagctcaaagtacttctgccgctcccggaaggacagctgctccggggaggctgcaggcccaggcgtggggggctgggcaggggcatcctcaggcgggtgagaagtgggcacggccgcgaaggccctgtaggcctgcttcacattggcgggcagctcatccggagaaggcggggagggcggctgctggccactaggggagcagggagattcagccatcttccctccagctgctccagacggtaccctctgcacgctgccagcgctgggcacggcggccagggcgcggtagtccagcttcaggggctgcagaccccgacctgcggcttctgtggcctcgggcccccagtgcagggtctgtccaggcagctccttctccttgcctgggccctcagggctcagctcccggtcgatggaagagatgctctccaggctgttccggtggccgatgcctgccgcaaaggggttggcaatgacacctggggacacctccagggctgcgtcggtgctggcctcgaagccgtcacagaccagcacggtgagggtgtcgcccacactgcggagcagctgcaccgcctcgccgtgcgtcaggcccagcaggctctgctggttcacctccaacagccgcaaacccacacgcagccgaccgtcgcgcccggctgcccccgtggggctcaccttggagatgaagatgccctcgtctgtggggtcgagggggttgccagcgtgg

SEQ ID NO: 149999 - DNA, 1241 bp, Homo Sapiens
  misc_feature (1012)..(1043): n is a, c, g, or t
ttgggacagagccagcgtcaaggactcagaggtcgtcctggagtctcctaggacggaagacggcggccccaggtgggaaagactcagaccaggcctgcgcgctccaggtcctgcggcaggatgcggcccttcttgcgggctctgagcagtcggcgctcggcgcgggccgcctttttcctgggcagggttctgccgcccgccggttcctggcgctgctgctttttctccaccacgccggccgtgcggttctcccaccggcgctgccgctgcgccctgcgcttctccttgcgcttcagggcctcctgcagcaggcgtttgtcgtcacggattttcacggccctccgccttgtagaggaggttggtccacttcattttcgcctccagctcctgcgccttcccctcatcctggccgcgcagctcgtccagccggctctgccgtgcctgcaggcgctccagcagctgccggtagttcctcccggtcagcggcgtgaggttccccttcaccctctgcctcttctcttttctgcgctgcgccttgctggccggctcgtcttcgctcacctccaccttattgaagatcagcccgggcggctcccgcggctccgtgcaggccccctctggggttgcctccaccacctcctgggcctccgtggcctcctcagccttcctggccttctctttcgcccgcagctcctttcgcttcctcttcttccggtcccgttcctgctttctccgccgccttttctccaaggcggcaggggacagctccttggcactgccctggccccgggcctcctggatcttctcatgcagtcgctgtcgcagaacatccagagcaaagacagactcaggctcagtggccaggccatctgcagggttccctgctgagctggaagcccaagctgcttcctctttggctgcctcaggcctcctggccccagaggctgctggagatttctcccccaaggacttggccttgtgctcagcagccttctcttctcgcttccggaannnnnnnnnnnnnnnnnnnnnnnnnnnnnnnnggggccctgcagtttctgagccttgagttttgccagcccgcgtgcgcgcctgctgttccggggccgaatgggagcagatcttcttggccaggctctgcaggtaggcgtccttggcgagtagagaggccatggcggagacccgggccgttcacgactcacaccttccccgctgcgcgtgcgactctcaccacctccccc

SEQ ID NO: 150000 - DNA, 1225 bp, Homo Sapiens
  misc_feature (121)..(137): n is a, c, g, or t
  misc_feature (1086)..(1161): n is a, c, g, or t
tgtggccctagtactgagggaattatattacgtgaacgcgacggggggaatattgaaggccctcgcggttggtttgtaccaccccaattaggggccctggtggaagagagtaataggggannnnnnnnnnnnnnnnnattggggcattgcaagtcccgggctttttggcggttgttgagcgccgttagttaacgggccaagcgcccccattccacctgcaatggtaagaaaggaaggcaccctgaaagccaggggccaaccgcaaggggtattagtgaccaggaaggccttgcagatactctcgttccagtcatattcggaggaagcctgacgacgcagctgcaccacggcaaaggtggtgaggggcacagctgccatgagtatgtgtgtgcccgctaggaagcagagcagcagctccagtggcttgtgcttctgctgcttggccgagatgctgaggatgatccaggcattggccagcagcgccaggagcccacaggccagccaggacaatgcgttggagcgcagggaggcctcctctgcccccgccccgccccgagccatcctatcctcagccccccacccccttgagctctgtgggggtgggggctaggtctcacccaggagccccactcacaaacactcccatgatccccacaatcctcgccctgtcagcaggcaggctgcccccaggctcaccccagtgctcagcattgcatgatggacccagctgagggcagatgtagagggcaggggaggagactgagggtcagcagaggcaatcctcagctttcatactgggcggggccttccttaagcatccctgcaattgatggggcaggcaagctggctactttcccaactatgaggctggctggggggttctggtccccatgctgggacttccaggtctcttttgcctctggttcttgaccagtcaggaatcttctggatgccccagggatttgggggtggggctcagccccctggacaggctctctccggctgcgcccagcactgccatggagaccgcactcccgacgcggctctctcgggctccccgctgcctgccggctccagctcgcccgnnnnnnnnnnnnnnnnnnnnnnnnnnnnnnnnnnnnnnnnnnnnnnnnnnnnnnnnnnnnnnnnnnnnnnnnnnnnggctcagccccggctcactcggtctctgcctcgtgccgattaaccacccagcctcgcacctagc

SEQ ID NO: 150001 - DNA, 896 bp, Homo Sapiens
gttggcttctggggataagacttttgctgtcccaaaatctgtgttctggatgtgcatatcttcatttaacaaatgtttttcggttttaagttccctgtaattaatgcccttgccgtgcaagtactctaaaccagacacattctcagccgtgtaaaatcgggtacaggtctcatcgaatgaaccgtttttgcgaatatatttaagtagttctccatttttggcataactaaggccgaaatacagcttctcgtcgtcctgaaatgtgaagtaaagcttaacaaagaaggggtgatccaggcgcgacatgacatcccgctctctggttacataggggaccttgttctcttttatgatatgtcgcttctccagaattttaatcgcatattctctggaggttgccagttctcgagccaggacaaccgtggaaaaagagccttccccaaggattttcccaaacttgaagtcctcaggccgcttcttccgaggctgcggcggaggctgggcatgctgcagggagccggcgccgggccgaggctcggctgcagtgccgtccatggcggggccctgcctgctgccaccaggaatgccagggggcgtgctggactcagtctgggtcctcaccattgatggggatgggcaggaacataacaccacgctggactggatgggcacggcgtcatacagctggctggtggtcctggccatgggccccgcgtcggcgcgggcgcctcccccgcagcgctgcgcggctcggcgcctcctcagcgtcctcctccccgaagcggagccccagcaatggccgccctcatcctgcgcccgcatcggaaagaattccggaccggtaccagctggagttagggtgggtggggatgtgtggtgggttggtgtgagtgggg

SEQ ID NO: 150002 - DNA, 553 bp, Homo Sapiens
tttcccaaccaggttgtcctggctcgagaactggcaacctccagagaatatgcgagtgagtatgggctgcagggagctgtgcgtccgggagcagggcaagcggctccgtgcagggcggctggggtggcagggccggtgtttctgtgctgatttcagggtacaggacactgttggctttagagaccaccaggctgttgtgtacaatgtttgaaagactttaatttgtaccagttacctttgtgagtcatgtctttagtgttttttgttgtttctgatagtaactcacttctctctcacctgaagttaaaattctggagaagcgacatatcataaaagagaacaaggtcccctatgtaaccagagagcgggatgtcatgtcgcgcctggatcaccccttctttgttaagctttacttcacatttcaggacgacgagaagctgtgtatcctttgcgtggttggtgccgtctgaagccacaccagtcacccctctcacttggaatcagaccctgtgtgttcccacaagcagcccccgctccctgccgagtggggtcc

SEQ ID NO: 150003 - DNA, 920 bp, Homo Sapiens
gctgtgcttcattgtgggccctccgtcgtctccagtgtgttccgtgtgggttcgtgtttcctcatactgctattgtttcccaacgtttggccctggccatggtgatgtataagtgttgcttggtcaagggcttggccctgggccattggaagggttgagcccttgagccttcttcgccttattcaccatgcaccagcaggattggcttcttcctgaactctgttggatactggttttacgagccagtccacgtcaaagcggtagttaaactgagctgaagaaacaagcgtcccagataaaggagataaaatatccttgatgtggagggctccagagttatactttggcttaactccagagactctagtgaggtaaaactggaaggggttccctttatccagcatgtcccaaatgtcctggccctcccctgatgtctcatactcgtcttcctcctctttgagcctgtggcaggcgggagcgccatgattttcagttctttgggcagtgccgtcattgggagcagagatgtctttctcctttttgatcaccactttctcagcctgcttctgcggcatttctggttgcagctcatcatcactgctggacagacaccagccgaggtcctcctgggaaccgcttttctgccttttgggaggtaaaactgaatctgtattgctgaatttcacaggtgatattttcctcttgtgtgcagctttctgggcctcggaacaggtgtacctgggctcatttgctgctccttgcctggcacagagaagagaagaggtagatggcttgtctggttttggcttttcttcctcactttcatcactactagatatggtccacctcccataatcgccttcctgagacattatactcctgaggcgcacagaaccaacgcttgcctcggatcacggatc

SEQ ID NO: 150004 - DNA, 586 bp, Homo Sapiens
gttccaagcgctcgcatgaacctgggtgccagggggattatcagcgtctgcgcaaggccgatggtggcagcgcggcgttaggaatcaggccccctatccctgagcccaacagcctaccgctacagcacccaacgaaaatgggaacaacatgttgagacgctgcagcaacagcaggcgcttcccaccagctacagtcggagatttggagcgcttgtgtctgaggctcaatcccgtcaggtgccgcgcaactcagcggcgcattctctttggacccgaggcaccaccatactttccattgcttacttccgttaaaccccgagcgttgaccatggcaagccggaaatagggatgaagcaatttagccagaagagggcggaagtggctactcagggcgccgccatgacgagccggtccggaagaagaggtagggcgccgccgtgacagattagtccccatacgtgctgccgctccccttcttttacccagtgatctagacctagtctaggacctcgggaactaggaccagcctccctccttcttggagatctgaccctcaggattcagcgccttcgctcaccctcgtgcc

SEQ ID NO: 150005 - DNA, 932 bp, Homo Sapiens
gccatatctttgttagatcacacccagacaatatcagaggcgccttgtcaagttatgacatcaccagcatgctatcgcacgagagccaagacagtgacaagatttaggatgccgcggggtccacctccttcacatcagtgccaaagatcacctgcatgaactcggaggctttgccgaagatcacaggaaagtagcgcttgtaatttttgatgacgctctccagcatttctgcctttgtgaccggctccttgactcgatatttgtggagcaggaaatgaaccaactcagccaccttcaatgttcagtgcttcttggaacatgaactccagctgagctgggtcgaccgaggagcttggctcttcctcttcttgactgctggagccctcatcgaattggctccataaagtgtagtagacggaaatggaggaggaagcgcctccctgaggactctggggaggacttgatgacccagcagcagacacctcctcctccttgctgtcagaggaggaggtagtctcctcctcctcgcctgtgggttcctgtgcacccatcaggcccaagtcctctccttgggcttcaaggtcttcatcaggcttgcagtgcggactcctctgctcgagagacatgatgactctggtcagggcagcagtcaggagcgtgggcaggagctgggcgatggagacccacaggcaggtcttcgtcagtgctgctctggggcctcttggggctcctgtcctcctggttagcctgtcccgagaaccttcactgctgacactgcctgggtctcctctgctctgcgacctgaggacactgtctcagaccaaggcctgcctgcttcctggagctcctccaccggtatcaagccgcccctcagaagaggcctctcccttctccctcgtgccgaattcgccacccagcctcgctacctagcc

SEQ ID NO: 150006 - DNA, 789 bp, Homo Sapiens
gccgagtcacacaggaagtgatgataaatgtaatgaatcgttctttgtgggtatctcaggtagactggagattccttgtaccctgggccttaatgtccatctttcagcatgtgcatgaggtcgctgttgtctaggaccgcctgtccagggccccaaactttgacgacagacttggacatcttcttatcctgcaggataacacaggacctgctgaataatatgcatcctgctcctcagtttccaccaggcacacaagcacgctggacttccgtgctgttatggcttctgcacgtgccaggcgcaccatgagctccaggttctcgctgtagcccggcacttgcagcaaaaactgcttccgagacacctgctcaccaaagatctgtggcatgtcctccagcagcttgaccaaaggcttgatttcgtagaactgagcctcacggtacacttcagggatgtgctgtgtgggcacttgcccagtgcgcaggtagtccaggatgggtctgaaataggtgactggggcggtcgatgaagaagcggccctccgcgtccgtggaggccttggctaagctagagaacatctctgccagctttgagcccggaaacttcctcagggtacccagggtggtggtgtggaactcacccccgacgttcagctccacaacagtagacatcgtcggccgcactgggccggggggactggggcagaggggtctggctcgtcatcctgcccactggccgctccactgcgccctcgtgccgatttaacacccagcctcgtacctagcctta

SEQ ID NO: 150007 - DNA, 834 bp, Homo Sapiens
accaagtctagtcaagcttttcccctagtcactcgtgctgccagctttaacgagtgctgcccgggtggcatctcactctctaaaaggggtacacactcagaacccaggtgaggaggcccctgttgggaggctgaggagtttagagagaggactgaggtacacagtcctccacatttcactcccctccccactgcaccctggcaacagctctgcaggactggggagcggaaggtgagtgatgtctgtgcagtgagcacagtccctctggacctggagtgggggcccagttagataaacaacagtggagggagcggcagaaaggaaaccccaatcttggggtcagcgccaagaagagggcagcaacatttccacggtgttggatggaggcctagggctgacacctggccccagcctcagacctgctgaatgcattagctagttggaatccagcctgctggtcaccaaaccattgccccctccatagagagaggccccaggggagtgaggccacgaaggaaggaaagccccaagttcccttctccacagcctctaaatctcccatccgcatgccagggcctctcccttcagacaaggcccaaggcggggcccacggcacggttgtcatctaacagaagatctgttgaagggctggacaggagggaggtgtccctttaggaactcagggttggggctggaagaatgactctgccagggggatctcggggagcagccgaccccctcccacccatcggtctctttatgtacagggacagcggggtctcgccccatccggcctcgccgaattaacacccagcctcgtacttagactatgtt

SEQ ID NO: 150008 - DNA, 857 bp, Homo Sapiens
  misc_feature (108)..(108): n is a, c, g, or t
cgccctccaggaagaacccgggcccacccataacacccatagtgctggaaagttccctcctcagacccatacgggagtacacaggcttcccctgcctcactcagcacnaagacatgctttctgttgcaggcgccatgcctccgtggcatcctcctcatcccctcgttgtgccctccctggggggctctgtggctggtcgcccaactgccccctgggggttccagccaatcctcagagcttcctggcagcatctcctcctgcaggtcccgggccacacccgtcagctgggtgcttagctcgctaaagtcctggctgatctggcgcatgtctgtaggcagcggcgggggaccctggtaccctccttgtggctgtccccagaagctgccccatcctctgactcagtcaggtcctcgtaggaacgggcatggacgaacatggcaccctcctggcccgcacctggctccattccctgggccattcctggtgtggggctctcagctctctccatactctgtccatcagaaggagtcaatgtgccatcaaggcattcgctgcttctcttcctctgcatgtcagtagccatcctttgagctctcctgtttctcagaggagtccaggacgcacagaaggtgccggtcactgccctctgccggacccatggaggggtaagggtgtccggccggggccggcctgagggcacagcttcgcggggccccggccccctgcgtacacagacatggccacagcgcaggcaccgctccctcccaccgccctcacccggccgccggtgcaggaagatagctttcgccggcctctcgcggccaaggcccagctccacctcgtgctgaattcgccgc

SEQ ID NO: 150009 - DNA, 877 bp, Homo Sapiens
ttttacctctgtgtgctcgctcttactctttgttcgctcgtttttcttttccattctgtgggcgtttggcttttttgccctctgtagactcccaggccaccagacacccaaggcgtggagtgcctcttaaacctatgccggagtaaccaggtttccctctcattcagcacatagcatgcttttgtcaggcccatgcctccgtggatccgtcgtatccccctccggtgtgccccctccctgggggcctctgtgactggtcgcccaacctgcacctgggggttccaccaatcctcagagcttcctggcagcatctcctcctgcaggtcccgggccacacccgtcagctgggtgcttagctcgctaaagtcctggctgatctggcgcatgtctgtaggcagcggcgggggacccctggtaccctccttgtggctgtccccagaagctgcccccatcctctgactcagtcaggtcctcgtaggaacgggcatggacgaacatggcaccctcctggcccggcacctggctccattccttggccattcctggtgtggggctctcagctctctccatactctgtccatcagaaggagtcaatgtgccatcaaggcattcgctgcttctcttcctctgcatgtcagtagccatcctttgagctctcctgtttctcagaggagtccaggacgcacagaaggtgccggtcactgccctctgccggacccatggaggggtaagggtgtccggccggggccggcctgagggcacagcttcgcggggccccaggccccctgcgtacacagacatgtccacagcgcaggcaccgctccctcccacccctcgtgccgaattcagacacccaggcctcgtacctagccttacg

SEQ ID NO: 150010 - DNA, 545 bp, Homo Sapiens
atctttcttaagggttagggggtcggacagatcaaattcacggcgagtttctggcttctgaaagctctgttggaagtcattgatagccctacagagatttttcctatccctctttttccggttttccaatatgcacatgattttgtcattttgcctcatttcagcagcaaaggtttcatgtctagctttttcagtagcttcttttatcttctggtcatgaacttgaacatcccaggcttcagtgtctcccccaattatcctgtttctggcgttgaagacccgcttctgcctgcacagctccgcgtgcctcctctttgccaggttggcgtcctgccgcaagtccctgggcagcgccaccgccatggtctgggaacccatggaaagcctaaggggtttttagaacacgcaggatcaggagaacaggcgacgaaaataaggaagctgtagcgcaggcaaggtcggctccttcggtcgggcaggggaaagacaagcctttagcgcagttttccgtcgggctcccagtgacgccgcagaggcctcgtgtc

SEQ ID NO: 150011 - DNA, 998 bp, Homo Sapiens
tcggccgccttttgtgggcggggttccccatggggcccgcatcggatcgccccgagggccccttctccggttttggccctccacttggattcaccagacccttgaggttatgttctggttctgccctgtacttctcacccatcaggtctgggacatggcccccacctgcccaggcttggagtccctcttggatgtgtgctcctccagtgtgagaagcaccacgtctgggtctgagctcaggccagttgatggggagcctcaagcatctccatgaggaaggtgtcgatgggggtgtcacccatgagcttgaagaaaaacagatgctctagacacttaaggccaatggaccggagggcaggaagacgtagcagcagcttggcaaaccgtccctgctgctcagggtacttctgtttgcagtaggtctacagtgatgcatacactttctcccgcaggacctccacctcactagggttggagaggcccttggcatctggattaaacagaatgattgccctcaggcagccaagctctgtcttgtccatcctcatgtcacgcattttggacactagctctgtcagcacccgatcaaagatggctcctactcctgctgaatgggctgagttgcggtgcacgtgaagacctgtggcaaggaggatgccatctcgaacatcaatggatcggtgtgaaaaggaggcaatgaggagttcattccagcctgcccgcagcaatatgacctgatcatccagaggcaaggaggaaaagtgtgggatcctcttcgcccactcaacaagcgtgaatagctgtttgtcagctgcctgacagatgttagtcacagggtcatttgggctgctgccgctacccccggttcccccaggaccctcaacgcctggtcactcttctgttccacagcaagctctgcctccaggatcctgtccacaggcatctcctgcggggctcccccagccccacctcgtgcccgattcacaccggctctctag

SEQ ID NO: 150012 - DNA, 587 bp, Homo Sapiens
tcaaagaggggtcaaatgtcaagaagtcaaagggatccaaggtcactgacctgcccgcagcaatatgacctgatcatccagaggcaaggaggaaaagtgtgggatcctcttcgcccactcaacaagcgtgaatagctgtttgtcagctgcctgacagatgttagtcacagggtcatttggctgcaggggacgggggtaagagttatggaagattttgagatatgctgggagcccccttgtaagaggcttttgacaccccctccttacatatagtcttcctgtgagccccatccaaaccaatccctgtaagtgagtcttctcttctggcattagtgcaaacaattatttatttgggacatgcctatggttctgccagtgggttgtttggggagtggagacagaaggagctatcacatccacctcagatgtttgaaagaccttgtttggcagcacctccagtcccaagtagtgttaggaaggttatgaggggaaaggagggggaggggatgtagaacagacctagactgcctcccccaacccccatcacgaaggagagtggattgaccccaacactcacgctgctgccg

SEQ ID NO: 150013 - DNA, 836 bp, Homo Sapiens
gttatttttcggtgacagcttaagaagatgtccagtaagctcaggcctccactctggagtggaacccagtggaggtcccttctgatgagacacccccatctgccctcaaccagcccaagaaaccctcttccttccatccctgaggggaaggcaactggtgggaactacatggattctaccgctggctgccttgaaaacacacctagggtaatagatggggaatgtgagactactgaactttatttatcatagaccaagaattaagggctgaatcagaggtggagagggaaggggttagttccttccagtaccccaccaaatccctatctctcattttagaagaggacttccctactcgccccctccatctatctcggtcctttatcgccagccctggctgggaggctgtcaggaatggcagccctctttccctcttccttcatggctccaacagactgggtctgaaaggtttaataaggaagctcatcaaaggagttatttttacagcaacaaccctccaaaccagaaagagacacccctgccaagggggacccccaggctcccccatcccatctcggctctccctccggaaaccctaggggcagaagcactttaagtgggatgaaagggaccccgccgcagggcggctccggaggcgcttttatgtcctggttcccaggcgctaaggacgtgtccagacagccaccaccagcgccccgggccggccccacttctctctgctccggggactgggacttgctgtctcctctagcctgtccccgccagccagccgcgtacgggtccccctcgtgccgattcacaccaggctctaccta

SEQ ID NO: 150014 - DNA, 697 bp, Homo Sapiens
ccaggatgatggcaattctttctgagacagcgcaaatgaaaccgcttctttctgggaggtgtccaggcaggtgttgaagaatgtcagcgggtgtatttcactggcaggactgggagcagatctgccaaagagcacttctatgagtgaggaggctgggccagaatgatacttctttagagcaatcagggcttttttcagtcgcctgtaagtgacatcattggcaagttttaacagtctgtaggaattctctcggtccaagctcaactggaaatcgtgggactcatcaaaggccaccgtgaccgacttctgggtgacccgggtcaagatcccagtggccagctgactgccctcattagcagcatcgtacaggcccacgatatcaccagaagtaaagctgttactgggaagagctgccgcggacccgtatcgcctgggctcaaaggtgaccagcagccgtccgtacagcccagtgcgctggctggatacctgcagcttcagcaaacacacgcctcggctctggagctctttcagagagatgttctcctgccaggacctgcgctcctccacctccgcgtctctctcgagctccagcaggtccagttgcttggtcacgaagctctccacagctgccgaggccatcgccgccgccggcctcctcggccgattaaccacccagcctcgtacctagccgtagttt

SEQ ID NO: 150015 - DNA, 1280 bp, Homo Sapiens
  misc_feature (67)..(101): n is a, c, g, or t
atccgagtttcgacccagggtggtgcccggcaccttggtggtttgaaagtcgcccttttaccggaannnnnnnnnnnnnnnnnnnnnnnnnnnnnnnnnnncgcttcgggcagatgctggcggcgcccggtgtagcagcagcgccggggaggtgcgggaagcgccggccgcatgtggcggcagggggcaagtgcggcatcgctgcgggtgtgcgcccaagtgtaggtcaagacggccgctgtggcggaagctttgtccgcactcactgcagatgtagagggtctggccagcatgcgtgcgcctgtgcgctcggaggtcagcagcccgtgcacagcgctcaccgcattctaggcaacggaagcggccgtcaccgccgtgagctcgttcatgtcgcagcagcactgagctgtagcagaagctcttgccacattcgctgcacgagtaaggcttccccgctgcccactgcccccagatgtggcaaacatggtgaggacgggttcacagggaagcgtgccactcacactctggggtccacctcctgacgctgcagctaagttttacttctcttaaggcctggaaagggcactgtaacagagaggaaagggggagcccgcaaaatctggtctgatttcagggttcttctctaaggggcagacattgtggctgttccagggtgagctgtggccaggttcaccctgcaccgtgagcctgcaagtctgggctctggagcttctgctgccccaccacgctgggcaggagtagccgcatgggatgtcctcctcttgtgcctctggagtaagatgtgcatttccttccattacggatgcggagtaggacactcgctagggtacaggtttggcgcttgagtcccaaggcacgctcttcaagtctctcttctgtacctcaccccatgctggagctcatcccacaggcaaaagggtcacgcttgaagtggaaaccggtcgccgactgcctcctcagacaccgcgcggttcccatctcagccggctgccgacccccgcctcccggactgcgggactggggcgggggagcgaggaaggggctaacggcgcgccggcctccgagtggggggagcggggaggcgcccgagcgtccggcccctcgggatggggaggtcacgctcctgtccctctcgcccgcgtcggctagtggtcagttctggcgcgggcagtgtcaccggttgctgggaagactggaggccagcgagtagcgtaccgaccaccctcgtgccgattcaaccagctctactagcctaaggt

SEQ ID NO: 150016 - DNA, 1558 bp, Homo Sapiens
  misc_feature (165)..(165): n is a, c, g, or t
ctcaggggggtcgctttataggggggggaaggattttccaacccccctctggggacaagcccccaggtgggaatttttttaaaaagggattcttagcccttgttcccccaccattcttagtgaaccccccctcaagaattttctttagtgtatgaaggagggccncccttgtcccacttttggggttcaccacagttgatctcaatgattctagtaagcagaaaaaatgctttcttgaccctttaaggaagccaagagtagctcatgcagatgaatggttagggagcaatgccattgcccttagagatggttacaagtagctgggatgggcttacaagggcagaaggagcttcttgatgagttctttcaccctgcagatgggctaggaccggttgacgcagatgatgcagtagggctgtactggcagaaccccactccactgggaggagaggagtgttttggataaatggaggatgcaactggcctaaagaggcagctggcccctcccacctactgagggctgagaggggctgtggtggtgagctggacgagcacagcactaaaaagggcttggccctgcagcaataacagctgagaggaatggagtgagaagcagcgcttgaaatggccttcattcagcagtggggcagggggtggctggcacaggtggaaggacagtgcccaggaggccttctccctgcaggggggttgagaacggttgagggtgtggagaccagcagctggcagcagacatataaaataccttctccagggaggctcagatcatggttcaggggtgccaggcaccattcctactcagcctttccaacgcccacctcccatgcccatagatcttcccctgctggtccaaggtctccatacaggactgcttctacagtagccaaggatccctgttctgttgaaatgtataacctctgggctgtagcgctgctgctgttctgtcctgacaggtgcctaccctgtaactttgtgagcaagggaggatgagggctgggttggcagcctccaggaaagaccgagaccataggttggggtcactggtgacctgatcaccgcccccctttctcctggtccattgaatcttgggtcttgagtctatgttttttttcctagcacctgagtgataaaagactgggattataagtgctgggattcatagaggaccagtgaaacacctaggctgaaccaggagatgggacagaaggttgtatgaggttattgtaaacagtttcacttagtgttttcccttccctaaggctaaactgtttccctggccccgaatttcatgaatcttacagattaaaggaaaagagtaacttacttgtacaacaagcaggggaaatatatgcattaataaatacagggcttcagggaaaggcaagaaaagcctaaatgtatgacggtgggtatcattgggaatgtctacaggagtcaggaggagagggaattagggaaaagtagagaaagacagacataaatatgattagctttagcacaaaagtgatggggaatagaaaagagaggtcaagtatgtacc

SEQ ID NO: 150017 - DNA, 978 bp, Homo Sapiens
  misc_feature (301)..(574): n is a, c, g, or t
acggttgctaatcccaaggtcacctgtggtataccccaatagagactaagccgagcccgtccaccttgcattcgccccgtccaccggtacttgctatgcttagtcactcaatgtgccccgacctctgcagcttccaaggtccatacccctgcctaagagctctgaggtaggggaaagtctggagaatgcataaggccacatctccttctacccttggctcagagccaagttggccagtcctcagaaagggtatgcctaccagaagaaacagcaccagcaatgtcccggggcatgaacaagnnnnnnnnnnnnnnnnnnnnnnnnnnnnnnnnnnnnnnnnnnnnnnnnnnnnnnnnnnnnnnnnnnnnnnnnnnnnnnnnnnnnnnnnnnnnnnnnnnnnnnnnnnnnnnnnnnnnnnnnnnnnnnnnnnnnnnnnnnnnnnnnnnnnnnnnnnnnnnnnnnnnnnnnnnnnnnnnnnnnnnnnnnnnnnnnnnnnnnnnnnnnnnnnnnnnnnnnnnnnnnnnnnnnnnnnnnnnnnnnnnnnnnnnnnnnnnnnnnnnnnnnnnnnnnnnnntgtgataactttctgatacaaaaactccttgactgaagtggtggtggaaggaaatggggtggagggataaaggaagagaaagaccctttggcctggtagggcagagaagagtggggaagagtaagctctctgaggaataggacacatcaggggctcccagaaaatgacaaggaaccttcaaaactatgtgggattgaggcctgcttcactgtcttgtgtttatttccaagtagtgatcacaacagccacatagtcagaatccactgtcatccagtgatgtcgctgggtcttgccctaagctcacctggtacatcagtgctgacactgggtcctctggtcaaggcccgcctcgtgccgaattcgccacccaggcctcgctacctaagaccgtagtagtactgccg

SEQ ID NO: 150018 - DNA, 760 bp, Homo Sapiens
gggcttgcggttcacttctgggagataagtctgcggcccggcgggctcaggttgcatgagcgtggctgatcgtcagacagcaccgtctcctcattgggctggataggcagttgatgatgatgtgggacacctcctgcgtgcaggatgtgctccttgttggccctgtcctgggcacaggtttgcacaggcctccgatagcttactccaccagggtctcattctcctccgtcaggcgaatcgcagttatttatccaggacctgcagctgccgcagatactcgtagttgctggggtcataagcgaagttggcgaggttgtcgaggacttgctccttggcgtcttggctttgggtctcctggaattccgtgaccagcgcctgcaggtatcccagccgcccgacgtgggggtccaccttcggcttctgggccatggccgcggtgacggaggacccccagggacgggcgggagggtgggaaaggtgcagggggaaagccgagcgagaccctcacccgctctccacctgtctggagagggaagagggggtcggcaaatgggtttctttcctgggttcagattctgcagtaatttgcagctggaaatgggatatgggagatgggacggggtctcagaatcctgtaggagttgcgtttgaaaatcgaaattggggcgcgggagacagggaaccgtctactggttggggctccgcggagggggcactggcgcaccgtccccggctcctgggctcggttccgcctcgtgcc

SEQ ID NO: 150019 - DNA, 627 bp, Homo Sapiens
tgacagtggtccaagtgacacatccagagacatggagtggtggatgccagaaagttaagacctgggcggtgggtgtgagctttgtacaacaggagtggttcctggccggggtccacggcgtcgcacagtggccacagtgatcagactgccatcagagatgaaggcagtctgggtccccggaggagacagcacctatcggcggtagtgatttggggcatcggcaaacatgtagcttgagtctgtatgcctcggcgagaagcagcccaatttcttcgttgccccagtgtattgtaggtaggttctgtagcagcatgaggagaccctgaaaatcctcctcatccaagatctctttcctccacttgatcaagaaggctgcacacacgtagagatgaaagtgggagaacccttctggttcagactgatatgtgtcccacaggcggatggtgcagcgaagaggaagctcccgcataagcaggttgttcatccagcggaaggcaaactgcaggtattctacctcgtacctcctgaagtgattatgtacctgctcatcaatccggctgacaagctcttccagtgcctcctcgtgccgaattaaaccacccggcctcgtacctagccgtaagtgcc

SEQ ID NO: 150020 - DNA, 1327 bp, Homo Sapiens
ttctttcgatgggacgagacagtggtgttgtacgcctcgtgttgcctttgctctcagtcttgtgtggaggccggatcgggcctctggttcgtccgttctggctctccggctgtgtccctccgctggtgtgttgcgccctatgtgtgcgcatgtgccggctgcctctctgtgtcctactcgctctgttgattcatggcctacccttctgtgcgatatgttccctgcttccgttggccccccggacatgttgtccacgcccagtgtctctccagtatgaagcgcccctaaatctgaagattgtcctatatcagtattaataaacgctgtctctgtcatgtgaccacattctcatcagcgagctggaatgatgcgacaacattaagcagtccgtgatagggatgcaccaaggtcgcccttcctcagcctcttcctccttctgcatcctgctccacccacatcgtccattgcttcagtatcctcacattccaattcttcatcagaatcaatatcttcccaatcgtctccatccaggtcctcttcctcctcctcgctgtcctcctcctgctgctttgccaacttcttcgcctgctgttcaaaccactggagccggggtggtttctcactcgggtctcggtcgtgggtcccacggccaccagtacccacggccacgacattcctggcctcctttgcaggcgctgggggcgccttcttgggagacatggacggctgggccttgatggcctgctggatggccgcgttcatggcatccttgtccacactgtccacgcccagtcctttctccaagttcttttcattcatcatctccactttccgattcactgcctgcacggccttcttctccagctcaacgtgacgccgggacttgaggtggttctcgtaggcgttgaaagaggcaaacttcttactgcaaacggtgcagtaggtggccgagcccttgctctcctcctccgcgacggcccgctgcgcccgcactcgctcctggaagccctcggcggtcactggggccatgctggccaccttccgccgcaggttgtagcggtgccagtccgtcttatagtgggcccgctgcatgtccgcgtcgcggaacgccacccggcaagttatgcaggtgtacgtcgccattgccaggcgagaaataagaaccgaccaagccaaacacctggtgatcagcgccgtggccccacaagaccctcagaccttaacccgcctcagcagccaggaagagccactcgacacgccgacttcccctcgtgccgaattcgccacccaggcctcgctaccttagaaccgttatagtactggcctt

SEQ ID NO: 150021 - DNA, 661 bp, Homo Sapiens
ttctgagccgatctggcccccaaaagccctgcatgccccctttacttcttccttcctctgacaggtggatctgtctctggcttggccatgccaggcatgtggcttttgctttcttctctccttccaagcaccagaaagtgccctccagaatggggtactaagctgtagacagagcaaaggcaagcttgtggaggatgtcaacatggggaaggctcgagcaaccaggcaacctgtgccatgccacagaaacgaggaggaggagaaggcttacacagtcacacccctatgacattccggagctagtcttcagctgaggcacagatcctctgctggcagcaactccaagttctggtggaggacagaccaggcccccaggggctcctcccacaatccccttccaacttctccttttgtaaagaggccaaggggcactgaggccttgtgtatttcctcatcagctattcctacatgtagcagtttgacggtgggcagggccaatccagccattcaaggagcaccttccctggagggccaccctaaggtgagaggcactaagaaaagtttggccctgccttcaaagagggccaaaaacagagcttacgcatcaaaaggagctcaggagcctcgtgccgattcaccacccagcctcgtacctagccta

SEQ ID NO: 150022 - DNA, 877 bp, Homo Sapiens
  misc_feature (693)..(693): n is a, c, g, or t
  misc_feature (812)..(812): n is a, c, g, or t
attatgaaagtggaatttatgttaaaattctaacacacacagggagcaggagaaacggaagccaactgtgctttcctgggtcttctgctgctctccacactgagacctcaggcccagcctctgcacagacgagtgggaaggcacagtttttgaacacccacctgaggcaaggaggtcccaggagagggagtgttgtcagcccaggccatgtcacagggagggagggagcctggtgcttggcagtcaccccacaggcactggtcagccatagaagggaacccagacctccctctaggaggcaggggcaagaagagagagagcagctccttttccttgcacccaggtcttttgggggagaccagaccaggggcagggaactggcttgggaccccttgttcactctggcatcccctgctgcctccagagtcttctgctggtgccccagaggctgtatccaggccccgagaacaccgaggccccgagggactgtgctgtctggctgctcatggaacctccggccggtggcccttgcggtggatgaccagctgcgacttccagtcgaaggcgcggccacagtcactgcagaagtgacgccgctggcctgtgtggctcttgcggtggatgaccagctgcgacttccagctgaagctgcacccgcactcctcacacgggtaactccggggggcctgtgantgaacgtccggggtggtgcggaaaggccacctccccttgtggtggcttctctgtgctttccccggtggctagcccccgggactgcacacctgggcccactccgtgtgtgtcccggtggnggaatgaccaaccctggactttccagtccaagcccgcggccacactgcttcgcacgtgtagggcc

SEQ ID NO: 150023 - DNA, 1001 bp, Homo Sapiens
  misc_feature (446)..(734): n is a, c, g, or t
cgcctcgtggctcgcgcttgcttttcgttggtgttctgttgctggtgcgcggtgtgtttgtcacctcgtgtggcctccggtcgcggactcgtttgcgggttgtcgctactgattcgtctggggtttctgtcctctgtcggctgtttgtcctgttttcgagctttgttggtacaggtgcttttgcctgtgcacctccctctttgtggccagctgggtgtccctctcatgtggcgcaaaagggtccaatcctgtccctattctccctgtcgggctcacccttgatgggtttgcatcctcgccccttttcgtgttgtcctccttgtgggtttatagttttgttttttctgggggcccccgtgcgtgtgtacttggaatgtgggatttcccttgccgttttttgcccaaggccgatttcatggggtgtgtcggtgtgtgtgcttttgtgnnnnnnnnnnnnnnnnnnnnnnnnnnnnnnnnnnnnnnnnnnnnnnnnnnnnnnnnnnnnnnnnnnnnnnnnnnnnnnnnnnnnnnnnnnnnnnnnnnnnnnnnnnnnnnnnnnnnnnnnnnnnnnnnnnnnnnnnnnnnnnnnnnnnnnnnnnnnnnnnnnnnnnnnnnnnnnnnnnnnnnnnnnnnnnnnnnnnnnnnnnnnnnnnnnnnnnnnnnnnnnnnnnnnnnnnnnnnnnnnnnnnnnnnnnnnnnnnnnnnnnnnnnnnnnnnnnnnnnnnnnnnnnnnntaaaatgctttctagaagggattcttctggaccgttaaccacgtccccaaaggaaaaccacacacacattatttaagtactttccatcttcctagagaaatttagttacactgttgactccttccctaaaggggaggattgagggagacctcttcttttgcaaatgccatataaaaagccaggtaagcaataaacagaaaacaaaagtgagggattttttttgttggcgacgcgtggtcgacgatatcccggaatccggagcgtacc

SEQ ID NO: 150024 - DNA, 1218 bp, Homo Sapiens
tcttcccttccattttaaatttttaaaaaaagtaaccagaaaattttcattattctttaaaataaggtgcaaagaaggactgcacactactccctcatccacacctccaataacatctcactgttgttcagcataatctaccatgaactgattcaggagcacacctagagctatattcacagctcctgaatgtaccatgttttctataccagaagcctcttcaatggcagtgtttctctgttcagaggtcattaccataacttttgtcactgctggcctggaacttaaccaattccaagaatttcccagaaagccagttgttttaattgtccccagcttcttttctttcctctttaggatttatcaatgtttagaaaaagggcatgtttgttttgctattttcaaagggtttgtgcgtatcacattttaccacattttaccccagttttaccacactggggaatgttgtcacattccccaagctagaaatgttttccagaaaccacaggtactttctgtaatcttgttgttcaagtacaaaattcttacatgttaaaaaattttttaattggagattagtacctctgctttcttctgacagaagtacacattcattataccatgtttaaaaaccaaacatcatgcatacaaatggccaaagaggtatgaagttttacagagcccttaacatcattcgagtacatttggcattggccagaccacaacaggaagcatgtcagcaaatagagcaaagagactttcccaagtacacgatagtcatccaggctccatgtcagtcacataaaaatttacataacatgtaatcctttaaaattatccccagatatcccattcctccaactgttcccatacccccaccccatgcccaccccaccctgaagtcttgcaccgtcacagagctatctataatgttccccattactaatgacagctgcttcaggttctgctgtctgtggcagggcagtcttcggtactttcttggcagggcttggaatatgctcagttgctcatgtttgaatgcacaacgtcctactccttcatccaaatgtgtcatcagtttggagtgggacgccgagcgtaagttcttctgtgcttttcatccaccctaactgagtaccacgttccttcaaagagtgaatctattgaaccctggggaatatagttgaccacaatgatgggtgtcctctctgagcttca

SEQ ID NO: 150025 - DNA, 859 bp, Homo Sapiens
gctcttccgtaggcttgacaacccccctcccggggtttgccccgcacgttctttctttgcaagagctgcttcggccccaagatgcgaagttttttccctgctaagacttagtccccttcaatcaaagagaaaaagatataaaagcacagaggaaaggctactctgagatgaggttcttcctccctccgccctgccagcagccccgatgggacggagcgggcctcctgtgccgcggctcccggcggccgcccctcctccgctccctctgctcctcccgccgcggccagcagggggcgctcgcctcggctcctctccctcgtgcgctctcccttcctgttgctcacacagtggtgcttcagttttagcagtggaaaacaggtatccgtttatttttattttttattacccagaataagatgctgatggactaagccacgttgcttagctcttccgccgccaccttttaatactgggacagccccgtcaccccgccatgctggtaagcccgctctccctggtacgtggagtcctgtgagagcgccacgtcgatttgtgatttaaactcgtcaccaaggtaactgtcctgggacagctccggctgggagaggccgggctggctcatctgggaaggctggctcatggagatgtagccctgcgtcagggcgccctgagagaagggctgtgacgccacatcctggctggcttggctgttggggaggttagtctggctgggtccaggaagcccaaagcggttcttctggcgtcccccacgaccagtcttgcctttcggggtgcctcgcctgcagcagcccgttgcttgtccaaatagccagcggtgcatgggtggcttgaccacctt

SEQ ID NO: 150026 - DNA, 750 bp, Homo Sapiens
cagggctagagaataagtttatacactgcctcgttaggtccaggggcccgcgcacgtggccaggcgggtggtcctgacgcttcaattcatttacaagtattggattccacgcctgctcctgtgcccgcaggcttccccaataggccagcaatctcaataatgctttattaaagggcagattcatatgcggctcttgggggaatttttacaaatatcaaaggaactaatccagcatcctatatagaactctgcacactttggggaggtccgtgaagcaggacaaagtgctctttacacaggaattgagtcggttcaagtatctgctctgtggggaggacaccctaagcgttctacatacgtcacccctgctctcaggatgcacccagtgggctcgcggtcagggtggccttgccggtgtccacccccacaccacccccagctccggaagcgggtccacacggggcttggacctccacagcatccgggacatccacgatcatacagtcgccctcctcctcttcctcctcctccgtgtctgcctggaagccgtccatgtcttcagcaccaatctggccgtcgtgcctgcgcttcttcatgaattgggtgatgcacatgctgcccgctgacttcctcttcagcgagatgggagtgcctggctgggccccgtggaggggacgctgccactgtcctctttgggggccgagggcaccgacctcgtgccgattctacatcccagcctcgtacctgcct

SEQ ID NO: 150027 - DNA, 521 bp, Homo Sapiens
ttcacttttgtcatatttttatttaccattattgcaccaatacagcatacactttatatacatatatcttaaacattttccatttttcaggaattcaaatacataatatattatcatctcaagaatacaaagaacacaacatggcggaagattgagaaaataggttcccagtatttagtcactagtgattccacagactttctttttagtgttttctattgggaattttaaccatgtcctgctatgggctctgcaagaatagagctgcctggaaaaggaggcaatgaaaagaaaatggacccaaagtcagaaaaagtgaagaagagaatccaggaaagtaatatattttgaaactaaacataaggactcccttcggccagagtgtacatacccaataggtgcaaaaaggaagcaatgatatcttcccatttcatcctcaaaattgctcgtttagaaacaaaatagaaagtacccattcacctaagaagcagaacttttttcacagcattgtaataggaatg

SEQ ID NO: 150028 - DNA, 401 bp, Homo Sapiens
gttctcttttgcctttatttcttgctatagtgggaacgtgagttctgctacctggggctgagtgcactgggcagcaggcccagcagacggggcctgcagggggaaggcacggctggaggcccgtgcgcactgccactctcctggaaccgctgctggccgagccacagccctgcggaaattctactgcgtgtggcagagaccgatgtgcaaaaggtttctggtgaatgttttatggaaattgctccaagcactaaggaaagcgggaccgtgcctgtgctgaccgtggccttgcgcgagcgcctccctggcggtgctctctgggtctctccaaacaggacgcttccttctctgattctaaggaaggcctgagacagcctctcttggcagaatggcagcatgta

SEQ ID NO: 150029 - DNA, 1033 bp, Homo Sapiens
catgaccccgccctggtcccatgccgggtgacgctggaacccctcacccgggcgcctttttcccaccccattcacgccccgggggtcccactcaaacccaccgacagttccggctggctagatgggaagtcccccccattcagcctcccgagaccactcgcaactgcacggccagcgctgagctcctcacctgagtagacccatattgaattgtgatgagttgtcctctgcccagtctagcattagtttctggccagcgtgcttttcccaagcctgcaggaccatacagcaccaccgtgtatgagaagggcccgggaagcaccctggggcttgctgaatgggatcagcatcttggtatctctcagccataacctggacctctttgctatctccaggccagctcttccacatctcccggaacttcgtcttcaatatatacctgcacctattgtctttgtctggcttttttcctttaaagacttctttacccaggcagatgacatttcctttcgtttctgtaaacgcttgtgcttctgttttgaagcgctccagcatttcgtccacgtctagaggtggtcgttctttccgtgttatccctaatgatagaggtttccttttattaaaggatttcaaagctgcttctctgacttcatcctttgctctctcagacagatccattcggtgcatcttttcaaagacctggaggctcgccatctccacccagtagctgtcacaatgggtggtgaggatttctaccagttgcttcccatcagccttgtctacctccttgtgggggatcttctggagctcgtgtgccagggagaaggtcgtgatcagatacttgaacttgctcaactcatcctggctgagctgctccaggagagcctgcaggttgaagcccatctgcgccgaagacaccatcttgtcccacgtgggagctcccaacacctggccctactcgccggccggagatgagggctgcaggttgcctcgtgccgaattcaacaccaagcctcgtacctagccgtatttt

SEQ ID NO: 150030 - DNA, 849 bp, Homo Sapiens
  misc_feature (723)..(783): n is a, c, g, or t
cagagatatgtcggggggcccaaattagggtgagtttccttcctcgcccctgtgtgcctcgtgcccccttttccggggcccttgggtctcccccggtctccttgttccgccctcctgttctgccggggctcttattagcgaccgtccgcgatctcggagccggcccgcgcctccccgatgacctgtgagcctggcttcgcgccgcttcttgccgctgccgcgggcctccgcctcctcagcgccagctgcttctcgcacttgaagcgcttctggcggcgcaggtagcagccgttctcgaacatgttgcccgagtcagggtgcagggtccagaaggagcccttgccgggcttgtcgggcgagcggggcaccttcaggaaacagtcgttgaaggagagcgagtggcggatggagttctgccagcgctgctggttctgccggtagaaggggaagaggtccatgatccactggtagatctcgctcagcgtcagcatcttgttggggctctgctggatggccatggtgatgagcgagatgtacgagtagggcggctttgcgtgcgtgtagctgcgcctgtaggtcttggggtcgcgggcgcggctcaggcccgcctgcccgtacatggggctcatggagttcatgttggcgtagggggccaggccgcccatggccccggccgcctgccccccgagcgggctcaggctgggactcaagtgcggccccatnnnnnnnnnnnnnnnnnnnnnnnnnnnnnnnnnnnnnnnnnnnnnnnnnnnnnnnnnnnnngacatccccgccagggacgggctcatgccagcgcccacgtacgacgacatgttcatggagcccgcg

SEQ ID NO: 150031 - DNA, 975 bp, Homo Sapiens
  misc_feature (594)..(652): n is a, c, g, or t
cggcgctcttccgccctgtgctctgcgggcgcttcggggccgccccggtttggtgccgccggccccccggtgctgtggccttgcccggcgccctttccgctccggggccctgcgcctcttcagggccatgctctcgcacttgaagcgcttctgcggcgcaggtagcaccgttctcgaacatgttgccgagtcagggtgcagggtccagaaggagcccttgccgggcttgtcgggcgagcggggcaccttcaggaaacagtcgttgaaggagagcgagtggcggatggagttctgccagcgctgctggttctgccggtagaaggggaagaggtccatgatccactggtagatctcgctcagcgtcagcatcttgttggggctctgctggatggccatggtgatgagcgagatgtacgagtagggcggctttgcgtgcgtgtagctgcgcctgtaggtcttggggtcgcgggcgcggctcaggcccgcctgcccgtacatggggctcatggagttcatgttggcgtagggggccaggccgcccatggccccggccgcctgccccccgagcgggctcaggctgggactcaagtgcgnnnnnnnnnnnnnnnnnnnnnnnnnnnnnnnnnnnnnnnnnnnnnnnnnnnnnnnnnnngcgccgggggacatccccgccagggacgggctcatgccagcgcccacgtacgacgacatgttcatggagcccgcgctcatgttgcccgagccgctgcccatggcggccgccgacatgctcatgtacgtgttcatgccgttcatccccaggccggcgttcatgttgctcacggaggagtagccctcgggctctgcatagtagctgctccagtcggacggctcgtgcccttccatcttcaccgctcccagcatagtggaagccgagtgcatggcagtttaaaagttaacagccacaaccctgcatgacccgggcccgacgttagg

SEQ ID NO: 150032 - DNA, 911 bp, Homo Sapiens
  misc_feature (267)..(318): n is a, c, g, or t
accaatggcaggtcaggctggggggaattggcacgagggagatggaagggcacgagccgtccgactggagcagctactatgcagagcccgagggctactcctccgtgagcaacatgaacgccggcctggggatgaacggcatgaacacgtacatgagcatgtcggcggccgccatgggcagcggctcgggcaacatgagcgcgggctccatgaacatgtcgtcgtacgtgggcgctggcatgagcccgtccctggcggggatgtccnnnnnnnnnnnnnnnnnnnnnnnnnnnnnnnnnnnnnnnnnnnnnnnnnnnntggcgggcatggggccgcacttgagtcccagcctgagcccgctcggggggcaggcggccggggccatgggcggcctggccccctacgccaacatgaactccatgagccccatgtacgggcaggcgggcctgagccgcgcccgcgaccccaagacctacaggcgcagctacacgcacgcaaagccgccctactcgtacatctcgctcatcaccatggccatccagcagagccccaacaagatgctgacgctgagcgagatctaccagtggatcatggacctcttccccttctaccggcagaaccagcagcgctggcagaactccatccgccactcgctctccttcaacgactgtttcctgaaggtgccccgctcgcccgacaagcccggcaaggggctccttctggaccctgcaccctgactcgggcaacatgttcgagaacggtgctacctgcgccgcagaagcgcttcaagtgcgagaaagcagctggcgctgaaggaggccgcaggcgccgcgggagcggcagaaggcggcgcggagccaggcctcacaggtcactcggggaggcggcgggcggctccagatcggggggac

SEQ ID NO: 150033 - DNA, 960 bp, Homo Sapiens
tggatttaggcaccctgctttgcctcagatagcacccggtctttataccctgcccggaggtgtccacaccagtgtgccctggcatcagctgtgctaaggcctgttcacaccacactgcaccatgttccgagtcacttctttcgggcctagctgggatcaccctgtgcccggcttggaacctttcctgtccccggaaggggtgtcgtccagccttcctggcccttgaggtactctccgaggccggccctggtttcgcctaagggcctctgttgagggctccgggagctccttccggggcttggggcctcgcttcttcgagctggtcccccggtgagctgggcttgtcatccactctgctggtaccccgctctcgttccctctcacgttcccgctccctctctcgctccctctccctttctcgatcccgctcccggtccctatcccggtctcggtcccggtcccgaggggcctctgcgcggcaggtgctgctggtgctggtgctgctcgctggtcggggacaaacccatgtttcgaaggccctcccgggcccgggaagtggaggccaggtcctggggcgagcggccagggtaggggatccggatgcccctggctgagtcacttcgaaactcgtaagttttggcctttgccttggcctgcgctttgaggaggaaggttttgggcttgggtccacgctttttggggccatagagctccatctctctttccctttcctcaaaggctgcgagcaagcgagcatccaggatgttttcctccggttcccatgtgctgtacttctgcgaccatcccttccatttcacgaggtattccatgcgtcctttccgtatgcgccgcttcaggagggcttcggccgcgaacacccgctcccccaccgctgaaagctccatgttgagctcgccgcttccccccttggccgcttccaggagcagaaaagcagcagcc

SEQ ID NO: 150034 - DNA, 472 bp, Homo Sapiens
cttgaacaaatttactttgacacctgaggtgaaaaaaattgttttttcgtggactttgcatcaagttctctctcttctttcttattagaaaaggaaaggtcagggactcacttttgggtgggagcggttgctcatggttgtggcgggctcagggcgagctgggcgggttgatggtggggctgctggtgtctgagcggctgtagtcgctgagggagccggtccgtgagcccccgccgcgccgctgcagcattcccgggtggaagttggcgtggcggcgcgcgtgcttggtcaggtggtcgctgcgcatgaagcgcttctcgcagatggggcagctgaacttcttctcgcccgtgtgtgtgcggtagtgccgcgccagctcgtcggagcgcgcgaacttcttgttgcagtcctgccagctgcaggcgaagggcctctcacctgtgtgagttctcaggtgcgccttggggtgcga

SEQ ID NO: 150035 - DNA, 468 bp, Homo Sapiens
gagtggcagagctttaatgggggcaggtgagaggagatcctggaggcgggagacgcccggcacccaagccacagcaggagaccataggggacgctccagttttagggtgtggagtgaggcattgtgaattgccaagaagacaagctaagctccttcaccagggcttgacgggcctgggagggcccatcagtgagcaggggccagccctcaggatcccaatgcaagaggtggcagtgaggtcaggtcagctcaggaagggaagtgtggcaagagccaccatgacagcctgtggggcttggcagccacataactggcaggtgagggatgcacataggtccaggggagaagcacgtaaggcgcctgggcctatagtgggctctaccacaggggcagagggtggctgggggagaagcttgggcagggactaggctgcaggcacatctggaggctcttggcagaggtaagaag

SEQ ID NO: 150036 - DNA, 672 bp, Homo Sapiens
  misc_feature (629)..(629): n is a, c, g, or t
gtttccaattgcagatttatttccacacacacaaaaaaaatctatgttgaagttacaggattgccatgaatgccacacacctttcagactaagcagaaagcccataagaaaagcacaaaatgaatgcactcagctgcccctgtcccccccaccctggtgactggggaaggacaggcagagccatctaacaggggagctgagtctttgggaggataggaaagcccagggtcaagggaaaacaacacagacactacacaggggctttcagtgagacagggatagatcacgccggtggaaggaaggccctagcgtccctcttcttgcccaagaatagcacaccatttgtgagtttgcccactgtgttcccaacatcaatgcacagatacaattctaccagcaagatcacagaaacatagtaagagcaaaaggcaaagcagtctgggattatgggttgattttcagcccaagacacaaagccagctcagacttctgaatttttccatccttgttcacagtcgcagtgacgcaggagaatctcgcggaacttatcaaggtccaccccgctgatgctgggcttgacaagctccatcatgtctttgacaaacgcatgcacttgtagaccttccaangctcctatgtactaacatcatagtaggccaaaattttctcaaa

SEQ ID NO: 150037 - DNA, 738 bp, Homo Sapiens
cggagtagagctgaaaggagagggagcgagtgggggagtgcctagcacgttgaagagccgcaaagaggaaggagggcgcagggacagaggccgatgagaaaggcaggaccaccgcgcagcacactaaggacttgcgtttactccgagtgagatgcggtgctgagcatcggctgtgtagactgaggcgcgccggccgttgcccctcaagtccccgagccagcgctcagcccggctgccccgcagctcccacggccacacgattccccatcccgcgcgcccactcgcctcgtgcgggccgtagaccacagccagtgccttggtgttgccctgctcaatgtaggccgagccgtcagcctgcgcgaacacgcccatccgcgcctggatcttgcgcagctccccggcgcgccgcccgtccacccggtagccctggtccgacaagagctccagccccgccatgctgcccggccgccaggtccgctctctgcctacttctctgagccgcgggagaactacagctcccggcggctccgaccgcccggaatctacggtttccggaggtccgccatcacttccggttccggggaactacagctctccgcggcctgacctccgtggatctgcggtttccggcgttccgctgtcacttcctgtcctggtgaactggagttcaccgcggccccgacctccccggatctacggtttccggcggtccggctctacttctgtctccggggaact

SEQ ID NO: 150038 - DNA, 562 bp, Homo Sapiens
acgtatgtggagtctttgttcttcgccttccaactcctggtgacgactccggagaaatatcattggttactcttttatcactttctacaccaaactttttcttattcttttctgatgatctatttgctttcttctgttgggcaccccaatccatattgttgagcctgtcatcaacattctcattactccagtttggtaaatcctgatcattcatgccatcttcaaagggacctcctcctgtggccatactggatttaacaattaactctctgtttagaaactagtttttgcagctcagaaactgctcctttcccgctccacacttcaaagctgtttcctctacaagaagcagcctctcctgtcaaaggcagagcgacagtcagcccccacgacccgccgccggcagcggtcggccctcggagaccgcagcagagaggcccacacgtttcctggctgcctcggccccagtggccgccttttcgacctcagctacgcagcgccaaccgccgcagccaccgccatctagcctcggccgattcacacccggcctcgtactagcctg

SEQ ID NO: 150039 - DNA, 1101 bp, Homo Sapiens
tttgagggcctcggatttgtgtgttccccgggtttatccggccttgttttaccgggtttgcgtccgtgacggcataacggcgggtagccaaggcctcctgcaacgtcccgaaaaatacacgaaagtctccatgatttccccggtgcatgcaaataggaagtgcgcccaacccctatagggctcagttatgcgtcctccaggctttgatgccgactgtatactgccatgtaagataaggtgccggtcagacacagagtttgccagacctgatggtctcgaggctcctcaaccttaacctgtgcgctgctccaggtgacaattctccgtggcctccatctcttgctgaatctcgggagcccagtccatcagaactcatctttcgaaccactggatgtttggatagctattgttgatatgcacctgctgcctcaccagtctgcacaggtctcccgtttctgctcgcaaagggctccaggtggtctaggaagattcacatccctagctgcaggttttggtcccaaggtctccagggtcacttctgtccttttggcatcatagctggtttgggtttgaggccggagtcctggaggctgagttggggctcccccacagctgatgaggatgaatttgttgggcccactactgccactctcttttcccttggcagtcagtgctgtgatgatgctgtgaatattagcattgttggggatggccactacttgcgtgttgggcatggtggggtggttaataatcttgatcccagctggaaacttgcaagagttggactctgccacttccttggaggcctctgcttgattagactcctgttgggcaggggatctcttaggttcctcctctgatgtttcacttggggcattttgaacaggaaggggcagcctccgtcttttgagaatcagtggccgacgggggctagttttcattatgaatctgcgttttcactctccattgagaatcacaagtgtggaccctccagactgcagtcgccgccgccgttaggccgtagctccgaaggcgggctccgggctcctccaacctgggggccgagccagggccccggacgggggctcgcgccggaccggc

SEQ ID NO: 150040 - DNA, 730 bp, Homo Sapiens
ctgctaaaaacgccacctcagtccagcggcgctggcaaaactgtgcacagtcttcatcaggtctttgccccggggcttggtcagctccctcagcccagcccaaacagaggtttggagaaggggggtgaaggcggagtagccccctgaggccagtgggtagggcatgcagggcaccgcccacgtagaggaacctgttctgggcagctgggtggtctccccggacaggcagcacttctgaatccaagccaagctcagaaaccaggagcaaggtccgggcccctagggctcccgctggcctaattccccgaggtccaagctcaaagatagcaccattagggcctcgaacggagcgaatccagcctcccagacgctcactgctctccactaggaccaccttaggggggcagggggcccggctcaggtggtaactggcggccaagccgctgatgcctccgcccagcacgaccacggtccggcccatgcggaaaccccgccggcgctctgctgggtgcagataagggccacaccctcgctatcggccctcgcagggctcgggcggcgggcagtacgcctgagttctgaggtgctctgcttgccacacctctgtaggccaacaagtgcttcaaatccgctactcccacccccagccttttcggtctctcctacgctccgtccactctgttctcgcggccctcgtgccgattcccccccggcctcgctacctagccta

SEQ ID NO: 150041 - DNA, 1003 bp, Homo Sapiens
cccttattagtcaggtggttttcaaggcctggaggcaacatgctcttagacctccacgaagtgaccactggctccagcgctcaccaaggcctggcgaatgagttgctgagtctggctgtggggtccgactctgcccccagcagcaggcccagtaatatggaaacgatgggtttgctcagcttggaagagactgggaaagcaggacctgatgctgagctcacggctgttgcctgcatacactccacggcagagactgtccatggctagagacgccacctcaggtccaaggcggcgctgggcaaaactgtgcacagtctcatcaggctctttgccccggggcttggtcagctccctcagcccagcccaaaacagaggtttggagaaggggggtgaagggcggagtagccccctgaggccagtgggtagggcatgcagggcaccgcccacgtagaggaacctgttctgggcagctgggtggtctccccggacaggcagcacttctgaatccaagccaagctcagaaacctgctctccacatgccaggagcaaggtccgggcccctagggctcccgctggcctaattccccgaggtccaagctcaaagatagcaccattagggcctcgaacggagcgaatccagcctcccagacgctcactgctctccactaggaccaccttaggggggcagggggcccggctcaggtggtaactggcggccaagccgctgatgcctccgcccagcacgaccacggtccggcccatgcggaaacccacaataggtagggatgagagaaaatgagggagaaggagatcgaggtcctaagaccgtaccccgccggcgctctgctgggtgcagataagggccacaccctcgctatcggccctcgcagggctcgggcggcgggcagtacgcctgagttctgaggtgctctgcttgccacacctctgtaggccaacaagtgcattcaaatccgctactcccacccccagccttttcggtctc

SEQ ID NO: 150042 - DNA, 619 bp, Homo Sapiens
caggttccatccagcaagctcctatttcttggacgcaggcactgcgtgggaatcggaccggccgggattgcagagctgggcgcgcacctcttgcagctctgtgcgcagttcctccagggcgccctgtggcggcgccgcctgcacctgcgcctgcagcgcttccagcgccagcgccaggtggcccacctcgtcccgcagcgcgttccaggcagcacgctgctcctcctccttgtggcgctgctgcgcctggtggcgccagtactccagcactaggcagccgccgcccacgatgaagatggtggcttcgcccagcagctctgcgcccagctcggctgccgcctcctcgttcagcggcttgatgaccgtgccccggaagcccatgatgcgcatcttggtccgcatctccacccagtgatacagttgagccggcgggaggcagatataggtcttgaagaactcgcttcggcgggcggcctccttaatacggttggcaagcggcttgctgacctgccggatgcccaagtatagcagcttcgccatagggaacgcgcccaccaccatcttggcggtctcacagggcaccctcgtgccgattaacccccagcctcgtacctagcct

SEQ ID NO: 150043 - DNA, 931 bp, Homo Sapiens
  misc_feature (26)..(26): n is a, c, g, or t
ccagggcggggcaagcttgtggctgntgggagggctggtatgcagggcagaaagatggagatcaggaagactggccacaggcctggtgggaggaccaggatagggtgaggaggctctgggctggcggcctggcaggacttgaactctcagagcaagacgtgaccccagagtccctctctggtctaaccccacaggtcacagagggtaaagaggtcccaagagggaaaggtttccttccagctgacacagtaaaataggagcttggagggaaaaggcagggaaggaagttggagcgccacggcgtgggtggaagaggtcagtccacagggaagaacgggtgaacagggctcctgctgagacatctcatgagctggaagcatccaaggagccagccccttgcagacgagttgggaggaacacctggtgttgctaactctaggaggctgctgtgggcaggctggcatggcagctcagtcccggggacaggcgtggtgggcagcccagagcaggtcgggcacgacgccggcgtgcagttgcaggatggagcccacgctcagcaggtgcatgatctggtgggagttgccccagtagtcaaagcgggcaggtccccagcgctcgggcagacgggttacatttgccagtcctccaagcagcgccagtgcgtccatgcgcaggtagcagggcagggagcctggagcccctgaacccagacccactccccgggccccaaataccagtaggcgggcagcagcctgccatccaaatgcccggagccgagcactggtggagggggcggtgagagcacgccagccggccacacccgacaacacagtgtagcccaccagggcagccgggcgcagccagggcctgcaggccagggtgcagtggatgatcctcgtgccgaattcgccacccaggcctcgcttccttg

SEQ ID NO: 150044 - DNA, 859 bp, Homo Sapiens
gagggcatgggtcccagttgcggagtccaacaatcagcaaggttcaattgtggatgagcaggatacagaggaaggagacaaccacacacagtgccccagatagggccagcgtgctgcgccagctgtagctctgggcaaggatggttgccaggatagggcccagccctccagccaggttcatgctggttgacaggatggcccaccaagtgccaaactgagatggctcaaaccacttccgcaggaccttcccacatgggggccagcccagcccctgggccaggccattaaggaaccagagggcagcaaagacaggtactgtggagctccaggcaaagaatatgttgaccaggccaaccaggagcagcccagaagagaagagccagcgagcactcatctggtcagacagcaccccactgacaaacttgctgatagcataagctgccgactggctgctggtgatgaaccccaaatcatccttgtccaaagggatctcttccaccaatgatggcatgacaaaggagaaggtcttgcgattgaagtaatacaggctgtagcccccaaacatggctgagaagatcacagtgcgataatagccatagccctgggctgccatggtagaaaagagcaggccctaccagccaagacgcacagcctctgaccacagttcctgcttgccgctctcacagttcccagatctgctgagttgggttttttctgctccctcctccacccagcctcccaggctccctttatagccgccttctggacaatcattaagcctggggaggctccaaggggacccagtgtcctgaaccctcgtgccgaattcaccacccagcctcgtacctaccgtatcgtt

SEQ ID NO: 150045 - DNA, 1103 bp, Homo Sapiens
aagtgcgccatgttagtgtgttggctctgttgctacagcagtaaacgtgtgaggggcccatgacagtagggcaacacctaatatggcttcactgttttcacatcgtgctgcatgcgcatgacggaagcttactgtgtcatttgttagttttgacatgtataacccagagggagtgtgctatgagtctcggttagtgtccgctgggacgtattctctgtttgggcctggcctatgggtcgtagcgctcggcggagtgtgctgagtatagtagttggaacgtgtgataaaccttagttccaggaaagataaactgtttcctcattgaccttggtgagttacaaagcttgctaccatctctgtgattctctggggggataggtgttgtatgtgtgctagtaggtggagggcggttaccgtcagttaccagccccttccatagccagggtgacattgagctacagaggtctgacctgtcaaggtcacatggacatggtcagggaagaatatggtcccgggccttccagagcactggttcctgactggttcccaggtaggcctgccctgccatacagagcatttctttctatgtggcaggtgggtagttctctatttagacactccgggtccactggagactggtaaatgagccttcagaggagtgttggcagagactttgccataggggttggggcttaaccaaggtgcatgcccagctccctacctcctcctgctgtggctggctgggctcctaggccaaccacccccatgaccctctcatgacatcacccagcgtcctaagtgcccctgggcacccagttctttgtggcatgggccaggtgcaagtttctatatgagagaccagagtagacagggagggaggcccgggctcctggccttttgaggaaatagatgcctcgtctcagacgcagcaaaaggaagtcagctgctttaggagcccgggtaaatgccatcacatgatagtattattattattttcccattttccctttgtgtttatttaaactgataagttcagatgccatcgggctagggtagtagtgcgcctcgtgccgtattaaacacacaggcctcatactagcgtt

SEQ ID NO: 150046 - DNA, 852 bp, Homo Sapiens
cattcttcattttgatctttttttcaagttctaaatcatagggtacatctgttctgtgatccctggaatccccgtatcccgaattccttctcccagggctcatgttctcttgtggtatcccactgcccaaggtacccagaatccccggatccctctcttccaagggccttcaatgagctccggggtgtaatggttctatcccaaccggctcccaaggaccccaggaacacccagatgcactccttccacgtgcctcatgtccaccgttgatagtggtctcccacggtcgtcggaatccgggacccctagagcccctcttctccaagggtctccatgacatcgggtaaggtgaaccacgtctctggatccggatcccgagcactcttccagatctcagatcacggtgtaatgggaaatccatcgcttcggatgccggacacccgagcctcttccatggcctcagatcacgggaatggtgataccacagcccggtagccagacccgagcctcttccaggctcagacacaggtacattctcggagccggatcttgtagcaaccgccagtccatcaagctatggtcagaggaaggcctccgtggctgtctctcccccatgagatggggcatttacacagcacacttagtgacacggaggtccctgcaggtttggtgaggtctccacgaggtccctgagctgcagaggtgagagttgaatagacgctgccacccaggcacacagtcatcatgacatgtacacaagaaccacacgctccacatcttcccctcaaactcaacctcaagcgctccctcgtgccgaattcaccacccagcactcgctacctagccgtaagt

SEQ ID NO: 150047 - DNA, 900 bp, Homo Sapiens
  misc_feature (182)..(182): n is a, c, g, or t
  misc_feature (265)..(265): n is a, c, g, or t
  misc_feature (291)..(291): n is a, c, g, or t
  misc_feature (294)..(294): n is a, c, g, or t
attccattcccagaagaggggttgaaattttccccggaccgggcaaacccccccggttttccccataaaaaggggccaacccaggcaagggttcttccctacatgacgtgggcaaggggtgaggtccatgtgtgcggaatcccatctttgcccctgctgccaggggtgagtgtggttgtganccaagaagggtgttaccgaggacccccccaccaaacttgggtggggagcaagatgggactgctccctggaacccccccagccnctttccaggatgcccggacacgcctnccntgagggagcggcccagggagctgctgagtttggtggcaagcctcttggggccgccagtcagggccccctcttcttccacacaggccccatacagctctaaccgcagttcaaagtctggccccgcctcagcgaagagcacattgctctgaaaggagatgtctgtgagggtcctgtccactaggatcatctctgtgtcctggatgtgttcccccagctgcagcagcaggaacacagcccagcggtgcaagtcacctttgttcttgaaatattctgtgtccttccacatgagtggaatccggaggtcagagatgcagacccggccgcggcagggggagcgctcagcgggcgggccactgtcagaaggccgccggcttgtcttccccagcacctgcgcctccttgcgccgctgcagctcgcccatgtagctgaggatgcggctgttgcacactagcaggctcttggtggcctccagagcctgctctcgctgggagcaggctgccagcagcttacaggccccttccctcatccggatctcatggtctagcttcctctgcaactccgtgtcctcgggcaggtcgctgaagaggctgagtcggaagcggccgc

SEQ ID NO: 150048 - DNA, 1092 bp, Homo Sapiens
gctcttccaggattcgtacccccttggatcccagttgggcaatcatgagggaacccggtaccttcccggcaagcaaggccaactggttcaactcttaactaccctgattcttatcaaaagggcattttcagattccaagacatgccccctaatctacctgtcccagagggtggtttcgctaatatctcgccggttcttacctcttgtttccaaatcaagcagtgcttggcgataaggctgcaaaacagaatccagccctgtgcagaaggcccgcaggtagattccatgtaacccaccttggccctgttgagatggatggtgatcctgaaatcaaacaaacagaagccaacttctcagctcaggccctgaaacctgagaaagacattatcaggcttgtttcttttaaaagttatacaaacaaaccaattagaggccttgccttcacttgaatatttctagtgatgagaaatccataacttatttcacatgaattaccgataaattcactgaaagcttgacatagctcctgccctctagaggtgaaagcttgacatagctcctgccctctagaggtgtacacccacagagaacaggacccacctgctgttgcacatggcccgtgtactgttcaatgaactcagtgaagcgaatatagtctgtgccgagccggcagagtcgattcaggacactggtctcactggggtggaggaaagggaagtcctgcgatacctgcaggccactccgcttgttccaggtgaaaatggacccagggtacccgctcagagccaagagcagttcgtggatcattcccacggcggacctcgagtccctggttatgtcaccccctcctccagcgcacctccaggcgaccacgaggggagtgcttccccttccacacgcgcaccggcccctgggtcgggcggtttgtgccgaatcaacccaccgagacaatcgctgcggcggagcggacgggaagctgggaaggggtcgcgggggagtcccggaagttcggcagctcaacggggtccaccagctactcccgcccgggctctgcggagactgagtcgcggtcgctgccctcgcgcatgcccc

SEQ ID NO: 150049 - DNA, 1081 bp, Homo Sapiens
  misc_feature (145)..(145): n is a, c, g, or t
tcttcttctccttctcccctatgactcctttcactgtgttgtctccactgagttgtaaatgagcaaaagagtcttccagagaagtgcttgcatcaggggatggtgttgcagggcttgttaactgaccatctactgatgttagggnccttacagaagacactaggggctgaacagaagctccactctgtgctgatacactgtccgctccgtcagcagagctctctcttgctaggtttacggtattagcatcacagtctagcctaagtccagctactcccttctttggtatatctattatatctcgcttaatcttcctgcgacgtccatgttcatttctcctatattgaaccatgttttcaagatcagcgacatacagaaagccagcaattaacatttcagtgttctttttacctttggaaaaagcatcttccagctctctactagtgcgctcatcgtactgccaccacccatttcttccttcataataccatgcatattcaccatttcctctacttgctgccttgagttcttctggtgacaacaaggttggcttgtcaaggaaatcctcgggaatttcttgtcgacaaagagcacaccgctttccaagccatgaagctccttttacacatagatagcagaaaacgtgcttacagggcagactgactggatgaacacatgtttgcagacaaatggcacattcagggacggttaaagaaggtgcagtattagaacaggactcgttcgctttcctgtttgtaggaagcatgtttattgaatgatcaatttcaccacagccagccatcatttctattacagatcccacagatgcctgccacaaaaataaagcattttcttcaccagcagtcagccagcttacagtattttctcttccactgctggttcattctttgtgccggagtacgttgcggctggaggtgacaccgcgagctatgcctcctctccccgagtgaggatcctagagtggccggcgttcaccctgctcccccgagagggcctcgctccgactcccacctctccggccacagctgcggccacctcgcagtcttttctccctcgtgcc

SEQ ID NO: 150050 - DNA, 940 bp, Homo Sapiens
gcttgctgcaagcgcagagccgcgtgcaccctcctggaggactgcccctggtaggcctggagcgcccactgcagccgcgccttctttctcctcctttccagtacaaaggccagccacgtggcccacacctttgcctgcagcgagaaggcccagaaccacagggcccgcactgtcgcccgctgctcctgcctcctggctgccagctgttgtctccactggcggaagcaggtccggctgagtctctgtgccagcagttgggtgctctgcctgtgcaggagcctcttcctgacacactgcagatggtgcgtcttccaccgggccagcccctccagcagcagctgccggtggtggtgttgcactgccctctccagctgcagtctctgctgggctgacctccggctgcagtcccaccagcgctgaaaccaggtccgcagacagcccctgtccagcaccttctgggcctcccagatggcacagtcctcctgctgtcggtaatacatctgcactgacacagcttcccgccactggaccaggaccttggaacatatggtccttctgtaatgagtacttgcttgaaaggtttttttggcttcatccactcgggccatggtgttctctttccagcgacgtaatgccccgcgcagcagctgcctgttgtgctggctctccctggctgccacctcccggaggatgcttcgcaccctgccctggtaagtcacccatgcctgcagcgccctgtgcagcacgctgtgctggtggtgcaggtctgctcgcatcagcttctgccgctccagctccccagcagggccaggcactccctccgctggctcacaggcccaacgcaggagctgggccatgtggaattgtgctgcccgcaccctgcaacagtcctctctgttctcctcgtgccgaatttaacaccaggcctcgtacctagcct

SEQ ID NO: 150051 - DNA, 538 bp, Homo Sapiens
cttgacacacacgacctgcaaccttgccaaccgtggtggccagcacctgttcggttgcttctgagatcacttgggagattatctggaaggcagcccgcttaatctcctcatttctatccaagccctcctcatttctatccaagctctcctcatttctatccaagccctcctcatttctatccaagccctcctcatttctatccaagctctcctcattgcccagttctccctcgacacctctatcctgggctttggcgtctgcgactgggggtgctggcgccgcatcgtcctttgccagctctgtgtgagccgactcgatgaacctacttggcaacttctctgctacatactcttcctcctgcactggccccaccacctgggatgagctgctcttccccttatcttcttccccctctaaagaggccaggctggggcccttgctgttctccaattccaagacatgctcccgagacaacagagcttcttcaagcaccttttcccccaacacggcatcaccagtcccttcggccccacctgt

SEQ ID NO: 150052 - DNA, 908 bp, Homo Sapiens
tctccagccgaagctgaaaattgacagtgtctggagacccccaaggacacttgctgctgtcgacatcaagggacacagtgcatcttccaccaggatgcctgcccggtctggcaactccttcactgggtgtggtcagtccaggcaggagccagggagatgtgtgtgcagagatatttggcttactgtccttggtgggtctggacagaaggctcttcaggcagctcacgtaggtctttgtttgctggtgagccctctgctggttaggcctggcaaggggagccagcatccggcggggcaacagctgcctctgctgtggcaggctccgcagtgtctgggcccaagacagttttctggtgaactgggacacaactctcttccttctgcccttggagctgactggcctgacacacacgacctgcaaccttgccaaccgtggtggccagcacctgttcggttgcttctgagatcacttgggagattatctggaaggcagcccgcttaatctcctcatttctatccaagccctcctcatttctatccaagctctcctcatttctatccaagccctcctcatttctatccaagccctcctcatttctatccaagctctcctcattgcccagttctccctcgacacctctgtcctgggctttggcgtctgcgactgggggtgctggcgccgcatcgtcctttgccagctctgtgtgagccgactcgatgaacctacttggcaacttctctgctacatactcttcctcctgcactggccccaccacctgggatgagctgctcttccccttatcttcttccccctctaaagaggccaggctggggcccttgctgttctccaattccaccaagacatgctccccctcgtgccgaattcaacaccagccctcgtactagcc

SEQ ID NO: 150053 - DNA, 801 bp, Homo Sapiens
gcagtatattaaatttaatcagagattacacagagtatgacataaaacagcagttgactagaataatttgcaacacatgaaaacagtttagaaaatggatttaggtcatattctctgacagtaagtttgttggaagtacaggcatagaatcagacagatttatgtgtcatctggtgctcccttcccttgtcacatcaacttgaaccgatagttttgtatggatccaagcagtagacatgctgttgattggtaaactaaatctgtaatgagactgttaagcttcataaagccacaattaactatattttggtgagtattttagatggaaaagcacattcctcctaatagttagaaataagcttagaaatattttgtgggacagttctatggttgtctaaagataagaatgtttggcttgttatacataattccattattcagtgacaaatgtgcatttgcaaatcagagactagaattttagagattaatcctggtggaatttttagggaaatcttgttcaactatatttgtgaaagcaagaatatgttattttgttaaacattgggtgtactgactggcctaagcatagactttcttcttttcaatcatatggttacaaaaactgtatattacaaacagtatagaaacgagctgcaaagaatgagccacacatcctggatattatctatatgcagtaaatttaccgatataaagacaataatgccacccctttatgccagtatttgtagaatctgtttcagcagggtttggcccaccttttccccacgaataacagacgtg

SEQ ID NO: 150054 - DNA, 501 bp, Homo Sapiens
gagttgaaatatatatatttagatatttttcttaaataacatatttacatctaatagaaaatataactctagagataatctttccaacaaaaactgagggggaggaaggagggatgaaaggggctggtggggtgggggtgacatcagggacgggccccgccaaaaggccacatcccacccagaaataaaaatcactatgccaagctcacgctcactctctcccctgctctcctcctggacacacccacccagcattcatcttttctctttaaaaaagccttgggccgtgttactttccttaatggtgacggtcaaaaagtttgaggtcacgtccgtgaccaccaccttctccaggttagtcagggaggggctccaggactcttcctccgggtcccccaggattctggccacagggatcctggcgatgagggagggccttcccccctgggcccccatgtcccggtacaggccccccacagagctgggggggcctgagccatg

SEQ ID NO: 150055 - DNA, 598 bp, Homo Sapiens
acatttactaaaagtttatttcaaatctgcctccaagtccatgtgttctgaaaaggacagagggggccttggagtgcagccagatggaaggactttgaaggctgtccaagtgctgctttcagagtgcaccaagtttttattgtccctgactgtggctccctgcctgtttgtcaggcgggagcctggagcctgcacagggacagagctggtttcatccggcactccctagccctggacaccctccttgtctcgcctgccctcctgcaggccttcactctcccctgatgctgtcctggcccggactgtggggagcacctccaccccccggagcaggtgcacacccagggatgccctggacctaagtgacatcaactcagagcctccttggggctccttcccctcctttgagcctcggaacctcctcagcctgtttgaggacaccctagacccaacctgagccccagactctgcctctgcacttttaaccttttatcctgtgtctctcccgtcgcccttgaaagctggggcccctcgggaactcccatggtcttctctgcctggccgtgtctaataaaaagtatttgaaccttgaaaaaaa

SEQ ID NO: 150056 - DNA, 538 bp, Homo Sapiens
ttttttgcaagtggctggtttggtttatttccttctcatcaaaagagctaacgcaggattgaacctgggggcaccaagaccgcatgtgtgtccgaggatgtgtctgaaaggatgtggtgcttctcagatgatgatgtctcgactaagacataacccaggccttgggttagatctctcggtgtcacagaagaacctgtcgggtggtgtggcttggctgttaagtccctggacctcttgagatcactttcttcactggaaggtctagtcactgggttggcttctaagctctgagatttagatagcaattcatagctaagtcttcgatataaaacacaggaaccaaaagtgtgaataaaatcttgactgtgctcaagtgtcctgtgaagtgtcctgtctccactctcaattccattctctgtagggtcttccttcagctgcaacaagggcctgcagtttgtgctctctctcggatgacaaaattgggtggaaatgtgctttattcacttgccgtccccagggcccctgatcttgggtgtgg

SEQ ID NO: 150057 - DNA, 1774 bp, Homo Sapiens
acacctcaggcctcttcctggtcctttattgctgctcaggagccctgaccttcctcccgacacagcaccagcctctaaagtcagggaggaggggtcactggatcagagccaggccttctagagaacaatacgtcaaacagaatccatcacggcagcccacaggccggccagtctcagtcaacagacctgaatgaaccccttccaggggagcccaattcgacttcagtttccaagcaggaagcaagatcagagccagtgggacgcctcagacgctgatggtgcggaagatggtgaagcctgacagcgccgtgctgaccaggagccctgggcactgcgggtgccagtgcagctccttcagctcggtctcgccctggtgcacgaacagcagctgctgcgggaggtcggccagtccggggtcggcctccacgtcgcccgcctcagggtcccgctccactgccaggtccccctgtgtgatctggtggtctgcacccgaggctgcaaagaccccctctgtcctggggttgccactcgacggaggtcacgggggccacgttctgcttgtaggtggccactggggaaccagacttgaactgccgaaggtcccagatcttgagggccccatcatccccgccactgagcaggaagggctcccgtcggctccagctgatgacattgacgtccccatcatgggcggtggctttggtgatcatgcaggccttgctgggggctgcccggatgtcccagatgcggatggaggcgtcagctgagcaggaggcaaacaccgtgttctcagtcaggtgacccactgcaggtcctccacagagcgtgtgtggcccacgaatggccgctggtccacgtgccaggagccgccgtccgtaggtgtccagaggtggatgttcttttgacagtcaccggtcagcaggcgaccggtcacccggggggaccagtcaagggcaaagccctcgcccatgtgtccagcgaaggagaagatgggcttcatttgggcctgctcatcccggaggaaggctgccagggcctggggctcctccaccacctgcagaagccgccgcagcgcaaacacctccacctggcccttctctgaccacaccccagccacaggctcttcacccagccatgacacccgaactcggttgatgccaccatagtggggcaccatggccagctccagctgaggtttccgctcttcttcatcctcttcatcttcctcctcttcttcttcatcactgccctctgagggtgggggctttgtcccatgcagattgtgcatccgaagcatcatcagtctgttgctctgggcgctctcagcctgggtcccagcacacaagtaaagtgtaagaggaagctctgtccggttgtctcccaggtgatcccggactatgtcaaagctgagacagggggcgccagtctgcgctcggtggtagagcacataggcctcctcgtccatgaccagctcctccccttcgcgtagcggcggcccccggccgggcaggtagacctgggccgggccctcggaacttgtgtcgccggactcggcttccatgggttccccggtttcacacgtgcgacgccgacccttgcgcgccgccatcttcgaaccctctcgctgctgacacccggtaagagcgtcacttccgggtttcgctttccgcctaatgagatccgccctactgcgcggttaccttggaaactcctgggaccgctaatcggagagggtgcggaaacgctggaggagaacttcaggtaatggcgccag

SEQ ID NO: 150058 - DNA, 255 bp, Homo Sapiens
gcctcttcctggtcctttattgctgctcaggagccctgaccttcctcccgacacagcaccagcctctaaagtcagggaggaggggagagggtcgcatgtatcccccacacggagaaatcctggccaaacccagctggcaggaagacaacgggcagaagcaaattgtgttggaggaacccacacctccaatttggtgcagccactgtatatcccccgagtcccctgctgggaaccagcagccaaaactgggtcctg

SEQ ID NO: 150059 - DNA, 2022 bp, Homo Sapiens
ttttttcagtcctctggtttttatttgagctctcttgccctgggggctgaggaaggagtgactccaggccatacacagacagatggagaggctatagactgggaggtgggggtgtggaagctgggccaccagttcctgagggggcaggggagatgagtgaaggagcgccaaggtcaccagaagaatggagcaggcttccccaggggctccctgtggcttgggcacccctgcctcctggcccagcgtgctttcttccgcagcccgtgctggcaagggcagaaagctaaggtgagcagacgagatcttccccgagagaaccctggctgggtgggtaagcgttctctggaagggtagcctggattgggggactcttgttgaagaaaggtggcaggtgtccatggcccctggcaggtggggctggcactgcccatgctgttcctcagctggggctcagtgctgggctgccctcgggactgtcgctcaccaggcactcgttggatttgaagctcgccagggacttgcagctgggaatggaggccagggagccgcagaggcccagcatggagggcttggggtccttcccgatgggaccccagggctcctcgtcccgcgtgccctcttcccaggcgctgggagtccgagctcagactggcttcagctgacagcggctccgtgctcatgaagctgtgtctccggtagagcttggagttgctggcgccctcggccccattaagcgttcccagtgagggccattgattgaccaggggtgtagtgagctccttggaacctgggccagaggggcgtggtcactggggatcagacctgtcagctgctcctgcagctccaggatcacgccttccagctcccgtttctcgcgctggttctgcgccgccgcctcctccagctgcagctgaagccgccggttctccgcctccaggtccttcagctgcgactcgcgcagacgcaccagctcctccaggtagcccttctgcgcgtagacgatgcggaacttctgctccatcttgtgccacttgctgtaccagctgtcctcgtcggtgacgagcgggaggtacgggtgctcgggcgagttgtcctcgctcgtgctgctctcggcgctgtgccgctcctcctcgtccgtcaggtagtcgtagctctgcgtgaactttaggtagggcgtgtaatcgatgaccacgggggtcttcccgtccaggacttccccctttagacagaagctgaagtcgatggcgctcaggtccgatcagcattccggtgaggatggtggcttcatcccgcagcatgatggctccagagtcatagaaccgtctggtggtccgggtgtcacgcagagccgtggtgatgtattctgacatgcgcttctccatcagtgccacccggatccatgcccggcccttggcccgggctgtgctgatgttctccatgttctcgatgctgctcacacagttgttgggcactttgctgcaggccagccggatatagtcccaaaagccccgctgcccgtctgagctgaaccagctcactggacctgctggggcacaggctttgaagcggtggctgaggatctgctctaaaatggctgcaaaattgacaaactcctccgatgagtcatcgatgggctccgctgtgtacttctccagcagcgttttcacagagaacctgcacacggtgatcaggttcttacgctccacagccacgttgcgagaggacgctttcttggaggacagccccagagccatggtggtctggacaaagctcgcttccatccagatgtgcggccactgctgccgccgcccgctgcccccccacccctcccggagccccaaacccgtcgctggatcacggctgggccctctgtccgacggggcccctcaacccttccatggccatccccctgcctttgcgcccggtgcccggccccctcgctccctcccccggcggcgatgccagagcaaaacaaggccggggagggagctctcacggggtgctgagccggggccccgtcac

SEQ ID NO: 150060 - DNA, 800 bp, Homo Sapiens
tcttggtccttggggtgtttccctcgcgtccgtcgtcggggttggttcgcccgggggactttctgtccggtgtcctcctctgttgcctgcctttccgtatcggcctcttggcttctttccgtgggcgtggtcgtttcctcgattcctgctgtggttgtgtctctatgcttctctactgtcttcgttgttttcgagccttctcttcctggttcgtttaccgtgtgtttctcttcgtttgcacctgttctggtggatgggtgcaggacaggagaggctccacgggctcaccaccggctcagggccatctcaagacagcatcaaagctcttagccacgcggaagtgtctagcggcagacagtggtatctccctgcatgcttggcgtggagggcagccagcttgtagtcgcagctggcggctctgcaactgggccagagggccagggctgcagggacctgggggcatctcggggcttagccaagcctggagatgagtctggcggcgttggcagaaggtccctccacgggtgaccctgggctctggggctagacgcgattcataggggccggctgggtgggtgcagggctgtaggtaggcgtggacgccgggccttttcctatggccactggcggcgggatgtccgcattcgtcaatggcattgcccttacggatggaggcgagcaggttttccagtgttttaagcccccgatcctgtagcgccgcatcttggcgctgtctccagcttgtccctcgtgccgaattcgccacccaggcctcgctaccttaaaccgtagagtactgg

SEQ ID NO: 150061 - DNA, 589 bp, Homo Sapiens
ccgagatactgaaggtagcccacatttgattctccttcaggcgtttcttgagatatcagtataacgctcaactcagcagacgcacacagcagatccaagaggagctggaggcagacaggcggatcctgcaggccctcctcgagaaggaggacgagagccagcgcctccacctggccaggcgggagcaggtcatggccgatgtggcctggatgaagcaggccattgaggagcagctgcagctggagcgggcgcgggaggcagagctgcagatgctgctgagggaggaggccaaggagatgtgggaaaagagagaggcagagtgggcccgagagcgcagcgcacgggacagactgatgagcgaggttctgacagggagacaacagcaaatacaagagaagattgagcagaaccgacgggcacaagaggaatccctgaaacacagggagcaacttattcgaaatcttgaggaggtgagagagttggctcgtcgcgagaaagaggagagtgaaaagctgaaatcggccaggaagcaggagctggaagcccaggttgcagagcgccggctgcaggcatgggaagcagaccagca

SEQ ID NO: 150062 - DNA, 740 bp, Homo Sapiens
  misc_feature (316)..(392): n is a, c, g, or t
cgccctccaaaggatatcagccccaaagccaccagctcgaggtgagtaactgtgttaagagtgacatgtggcatgagaaatggggcggttttggctcatgttgtgatattctagattcaggtatttccctgagcagagaggctgaaatgctgaaaatttttcatttgatgacccttgatgcttccgtttcctgaccatcgtaaagaacaaatggctcctttgctttggcaagaaatactgaaggtggtggcttttttctgtttgttttgaaatgaagtcttgctatgttgctcaagccagtcttgaattcctgaannnnnnnnnnnnnnnnnnnnnnnnnnnnnnnnnnnnnnnnnnnnnnnnnnnnnnnnnnnnnnnnnnnnnnnnnnnnntcaacgtgattttttttatttcattcaggtgacaaactcatgctgaggttcccaatttttgtctcagagctaggatattcctgcaactgcatccaagcgctttctccaagcgttcggggagccgccggaactcttcttccagacaggcgttccgagactccgcacaataggcacctacccttggggttttgagccgcagtgtctgcctctgttcaagtatccaggctcaggtacagacctttcagtgcaggcggcgggaggcgcgaacacggaggaccccctcaggcatactgccgcccgggcggcgcctgacagattgcctccttgggatccctcgtgccgagtcac

SEQ ID NO: 150063 - DNA, 790 bp, Homo Sapiens
  misc_feature (492)..(513): n is a, c, g, or t
ttgtatactaccatgccaactgtacacacattacagcttttctgttgattgcattgtttgtgcattttttgtgtgtgtgaggtcttggctttgaaacagttaagtaaaaaacccaaaaggaagaccagttcactcggagttttactaaaggaggcagaaaaaagggcaggtggctcagcgtttggccctgtagcctcttccatggcacctttcatatgaaggagggggtgagggaggacaggagagaaaaatagggaacaaaacccaggcagatttttggagaagcagcaggtaaaagaggcaagttcaagtatttctcccagcacagccggagtccccacagaaggcactcagaaagagtcggaagaggtgacagggacttaaaatggtgctagtcctatcccatcccaacctgtttcccccctacctgacccatcgcggcattcagcagaactcatgatgaaggaaacagttccatggcagggttctgannnnnnnnnnnnnnnnnnnnnngggatatttcagagtccagcaatgctggacacctatgagaagaagagagtatctatgggaggagttgaggcctaggacccctggagagtcactcttccccactgttgggaggcagcctccaggggcctgggatctggaatgagttgtaaatgttgttcctgtatcaagcactgtcctgcttggcgagacgtgtcactggtactcgggaagctggagacagaagcttcccctccctcgggcatctgacaagagaggggaggacctgccagaaaggctg

SEQ ID NO: 150064 - DNA, 546 bp, Homo Sapiens
gatgtagaggatcccctaggctgcggaagacggaggtggcgaggggggagggacgggtcagtcttccttcaggctcccagacactgcggctggcacgctctgctgctccagccgaacctcgttgggctccaggtccatctcgtcctcgtcctcgtcctcgcccagctggatctcctcggggttgacctgctgtgccagctctgccagctcctcccgggaggcgtcactcctcacgaacaggatcttgctctgggcgcgtaagggctggtcacgctccgcctcagccgccagctgctctgcccgctgttccagcagcttcatgtcgtccatgccactctgcccaggggccaggtcagacacggtgcccgtggcactgcccgagaccttgagcatctgcgaggccatgaagttgacctgcgtgttgtacgtggcctgcacgctgcgccggatacccagcatttccttgatggtgtcctcattgccatgccggacctcaaagtccttccacctctgccaaaacgcgccggtcgtccgggagtcacagat

SEQ ID NO: 150065 - DNA, 398 bp, Homo Sapiens
ctctttaagagtttttaatttataatttgttattcataattagtacaatgtagaatctgagaaatttcaaatgaagccacattagaacaaaaagaaaatactgactttttagccgcgatcacatgaatataactgatgagtttttttcatctaagaaataagaaactctgagcagcaaatagttggccagatgagttgtttctaattagagcatcacagttctgattagtgtgtttttttagaagtgatttcccttaaatataaggaaaatgttaggaatctctgtgactacatttaattccacttggaatatagacaataatgaccttttatttaacccagcctatagttgttggattggattaaatatcactaccagggccaggtgcggtggttca

SEQ ID NO: 150066 - DNA, 758 bp, Homo Sapiens
cttggaggtatgaatgttagtcgtctacacaggtcttccctactagattcgtgagtttcagaagcaaggcctctaactcgaggttcatgaatggacctgcacaagggggcggacgggctgaagtcctgccttgtgtgtttgtgttgttccaaaaacccgtatgctgtgccgttaacgttcataaaaaagtccttgtcgaacgttttaaacagccaaggtgtttcagctttaataaaagctgaaaatttggcaataccaaacaggtcaccaagccacagtccgcttcttggcctcctctttggtatcagcgttcggctggcggcttcctgtggcctcttaaacaaggacctcattttgggagccattcgagagattttttctcattatctaaagtagcattctcgccttgcacagctgaaagtcatttctcgaaatcggagcgccagaagcgacaggagccactccaggcccgggggaagcgagcaaaggggcagcgggctgcgtttgccaacgtaggcctctcgggtcccgcgccgttctgggccttctccgtgtttccggcgccgccctcggggtcccttacagagggcgggaggcgggtggagagacggggcaggaagcaggcgggatcggcctgggaagaacccgttctgggaccctctagaaatcccagacagccctcccgggctgacagcgcctgccttggagcccgacgcgctcatcgaatttagattgactccttcggctctccgttttcc

SEQ ID NO: 150067 - DNA, 527 bp, Homo Sapiens
ttttggggtgaaatcacttaacaaacagcaaaacacacatttattgggcatcgccggctgcccgccaggcgctttcactagtgtagtcctcacactcctgaggcaaacagacttttctccccactttacagatgaggaaactgaggctcagaaggtggtacccaggacccacagccaacctctgtgctcgttcctctcatctacccttgaggaagaggggagtccaagagcccagctggcatcgggaaggttcagtgacaaaaagctcagtgccagatcttcatgtcccctccccaggagcaggtggcgaggacggagggcagcacggggtgataggtggtgccgacacaggcctgtgtgtgcccctgcagtgtgcatgctcggctggctttgcggaaggtgtacatcaggacccggccatcggggctgcccggcaccagcaagtcaccggctggggagcactcccagcccaatgagtagccctccaccttgtgcccttcatagcgccggcgtctgctcattcggta

SEQ ID NO: 150068 - DNA, 884 bp, Homo Sapiens
  misc_feature (266)..(266): n is a, c, g, or t
gttttcctctctgccgccctcttttatccgtgttctgtgccccgcgcgcctttgtcccggctcgcgggtcctcacgaaagtgtgcccgggggtaccaccccccttcggcgccttgatttccatttctagcgaccgtacccactcctaagaacaggtcccaagccgtgaatttcatttccgcaatcagttcacataagccatttcaggctttcctgagctattctcatctgagtatgaatcctggatattaaccagaccaccttaanataggcatatggactcatggatttatgtactttttaaagtgtgctcaagtgtttcatttatggttttattaataatttttaaagtagaatgttcaatattattactatgatttatttttatagtcagcaaacatgagacttaaaagcttttccttctagctccacatgtcggtgcacagtgtaaccttttcttaaaaaaatatggaatgctgcatgaatctgcagatcttcctcgcgcagggggccatgctaatctcctctgtgtcattccaattttagtatacctgctgccgaagtcagcaccagtttcaccttttcacattcacggtaaaactgatgggaaaccgcacgctaaatgtttaggcagcgatggccctcaactgttaatcccaacaggatggtgagtgagaagcacaggctgaaaatagagttgtctaaaacatttccacatttcaccatctgaacatcattttccactgagttattaattgtaaagagtttattctgctgaacctactaattattctcacctactgagttgacctccacgtgaagaaaaggtcactgatgaaaaagggtggctatgttctgtttctgtaatttcactgttttaacatc

SEQ ID NO: 150069 - DNA, 808 bp, Homo Sapiens
gggacctgcaggacttccaactcccaagggcttgaaattagtctcttaagccaactgctgggactcctagaggtctgatggtttatgagatgccactgttgctgctgctgctgggcgtgggcgaggtcagctgccccgatgtccacggccggcgtctctccgttggaccgcccctcccgaagaccgccgcactctagtaagtggttgctgccgcccgacccattctggatggctgaaccgttactttttgtctcagtcccagattcttgcatcatgactcaaaaccttttttggcttctgtaaagcaatcttcagttatagtcacctcaaaaggtcacgtcttacccctgaaattttaacgtgtctcacagccataaaaagcctggggtcactgggagggggcatgcataatgccacaggactgcaacacacagagggaagccttttggctagcaggcatcacatccatccgttcatggctgacagcaaatcagagaagggatcgaagccctcaccattgccgaaatgttttgttcggaaactggaattgtcaacaaaagcttctgggacaccgcggagtccggggagggagtaggagcgccgccttcacgcccgcggaggaggcgccggcagcaccatggtccccggcgccgctgccgctgcccccggcccgctcgctcgctcgccgcgcgctctcttcctcttacaaactttcgggttcccgctgggcactccagcggccccccgagccctcgtgccgaattcgccacccaggcctcgctaccttaggaccgtagtagttactgcc

SEQ ID NO: 150070 - DNA, 1103 bp, Homo Sapiens
  misc_feature (30)..(30): n is a, c, g, or t
atggcaactgcacccttggagcgcaccagncagtccccaaaattaatcccctccacctcccgcaaggtcttcaaggtctcggccatggccacggcgccctttctcagtgaaggttttgtcattcaggttgatgacccgcagcaggggtttgacagcgaaagcctgggccagggcagtgatgccagggtggttgatcccattctgtggcatgtggacctcctccagggtcccgatgaccctaaaagcttctgccaaggcagtggcgccatcattctccagacggtttctgccagccacaaagaccttcagggccagaggcttgccttgggcactggatttccggtgacattcggtcagagctgcagccaggatcttgccgccgccaatgcccatgccacagttgttgagcttgagttcctgcagggtgaagcaggctgagctcttgagcagggcctcgaagccttgcacaccgtcgggcccgaatgcgttgtcgcttaagtccagctccaccagctgagccccagctgtgatgagtccttcccctagtgagatcagggctggtgggatctcggtccgcagccttcccgtgaacatgtcactccagtggcagcgcttcaactccgacttcttctctaaggccttggcgatgaccctggctgcttccacgcccactgtgttgccttccagacgcagagcctccaagctgtcaaagtcttcaatctctttaatcacatctttagcatcttctgcagtgttgagtttgaggctcttgcctttgaaactcagctgtcccccggccacctgagtcttggcaagtgtctctgccagcttggcaatgtcttccgaggccatgttgactaggctggtgggctcccctggagatctgcagacgtaaacaggcggcgccgccgcgtggggggaatcgagcgcgcgcctccgccctctggggcggggacggatttagggtccgggtcaggccggggtcgccacctccggatccagcggtccagatgtccagccggctagtctgttagctctctcgagctcccggcctcacgcgcttccagcaccacctgctctccgcaccgcggcgcctcgtgccg

SEQ ID NO: 150071 - DNA, 538 bp, Homo Sapiens
  misc_feature (503)..(503): n is a, c, g, or t
acatcatgcagcaccataaagaaggaaatggcaagcagaagctgaggcagaccagcaaggccagcagcgagccagcgaggaggcccacagagccccccaaggccacagaggggcagtccaagccccgggcccagactgagtcaaaggctaaggtggtcgacctcatgtccatcacagagcagaaaagagaggagagaaaagtcaacagtaataacaataacaaaaagcagctgaaccacatcaaggacgaaaagtcaaacccaacccctatggagcccacctctcccggtgagcatcagcagaacagcaagctggtgctggcagagtcccctcagccaaagggcaagaacaagaaaaataagaagaagaaaggagacagagtcaacaattcaattgatgatgtctttctacctaaagatattgacctagacagtgtggatatggatgagacagagagggaagtggaatatttcaaaaggactccttccgcccacccattcctncttccgagtcctttccccttctcaagtgcagcctg

SEQ ID NO: 150072 - DNA, 949 bp, Homo Sapiens
gccccccagctgaatgcacccagggacacatcttcctcgggacccttcacacggtccatgatgatcatgcctgtggctgaggcccgcagcgagaacttgccctggatcttgggggccgagagaccccgcatccccttctccagcaggaagccccgaatgcagccatcttcacaccgagcccacactacaaacagatcggccataggcgagttcgtgatccaggtcttggtcccattgagggtgtagctcttgttggatgagttgtagtgggctctggtctccatgctgctggggtcacttccgctgttgggctctgtgagcccgaagcagcccaggagctcccccttggccagctggggcaggtacttctgccgctgttcctcgctgccataggcatagatagggtgcatgacgagggaggactggacactcatcgccgacctgtagccactgtccacccgctccagctctcgggccaggagcccataggccacagacgaaaccccagcacagccatatcctttgatggtggggcccagcacacccaactcccccatctccgaaatgatctcccgatgaaaaacttcgttgcgattggccaacaggatgcgaggcatgagtctctcctggcagtaggtgcggaaggtgtccctgatgaggatctcatctgtggtcagctgctcctccagcaccagcgggtcctgccagtcaaactcgggacgcgaggacttagccagttggctctgtgttctcccgcctttctcggtctgcgccgccgacgagacccacgtgcgaaggacgtgcaggccgggtccgcggctcagcagccgcacggagacgcctctcagggccatgctctctcagagcgagcggagcaacgacggcgacctggtagtacctcccggttcactgccgaggctacagtgcaacctgacgcaggcctttgacc

SEQ ID NO: 150073 - DNA, 824 bp, Homo Sapiens
gggatcctccaatggtcgggagggagatggcatttttgagcaccggggagggcgtttctgtgaacacagagtccgaggtgctgttggcccggaagaactcattatgcccagggaactggcccaggtgtgctttctcctggtttccaggtaaaagctcgtagttcccttgaagaaaggaaaatatctccaaagacatcgtgctggccctctttgccaatgtggatggtgtggcgaaagtctccaagcgggggactgatcatatcaggagacagaatgtccctcagtttaaatttctttcctttcttgttattggctgctttcaggtaaattggggtcttggctggcattttggaatttgagaatgtctattttgcaagcgggagaaagggccactttcttcacagatggtatatgtttctgaatcctttttgataggaactgtcacatcatttttctcaagtggcttcagaagtggcttcgaaatgagatggggtcaaagagaaccttcctgaggttacggccaagtgaggcttcctagagagccagttacatcatccagtcttgaccacaaccaggacaaaccggccgccgctgaggatcccagccgctgccccgggcctcccgcgggcgcacgcaatccctgccgctgtgcgcagatccagccgagtctgccggcgtggtgcctgctcaccgcattatccgctccgagacggcgtgaaggcgccccaggccggtggccgggtctccgggctagccccgcgctgcggtcccccggccgcgagagcctcgtgccgaattcgccacccagcctcgtacctacacta

SEQ ID NO: 150074 - DNA, 900 bp, Homo Sapiens
  misc_feature (80)..(80): n is a, c, g, or t
cactgaaaaaggggactggtgcttttggtggaagagacagttgcgccattgctggtgcctgaggcgtcccccacttccantgactgtcttttcagatggtcaccctgaggggaatgtccaccccggagttttcactttggacgtctggctcaaaatcaggttttctgatgccatgcataaggctgatgtggctctccagaagggagggccgaggaaagctggggctgtcctctgtgcagtacccgcaggtgtagaacttctttactgtgtcatggttgttgcggatgtgtttgcgcaggctgttgggggtgtggaaggactgttcacactgccggcatgggtaccgcttcaatgtccgaccgtggctctttttcatgtgggacacgtagctctcccgatctggaacccactcctggcactcctggcaggtccagccagtgttcctcagccgcggcctggcttccaccctgcggtgggcttcaggcctaccccagcggccagaaggcagggagctgctccgagcagccacactagtggctggtggctcagtgggaactcgagagccagggcggcttgaggatgtgtccgctgaagactggaggcttgacagctcgtccacatttcggggaacaccgtgggtgctcttgacgtgttgcatcaactccggcttctgcacgaacaagagtgggcactcagggcacttgaagacgcccacctgcgtcttgctgacattctggtaaaaatgctgctgaatgtgcctcttcttgttgaagaccatttcacaggagcacttataaatgagctgggagggtctgtggggctgggtggggtgctgggtggcactgtggtctgcagtgctgctggcagtcttgaaggccatggggcagaatgcacatttgt

SEQ ID NO: 150075 - DNA, 1237 bp, Homo Sapiens
  misc_feature (987)..(1042): n is a, c, g, or t
  misc_feature (1080)..(1165): n is a, c, g, or t
agcgtataggctgcgagggtactcgcggcgtaagactcggctgcgcgggggcgtaactttgtgcccccttctcttatgacaccggacataggttcgcggagagcgggagcaggggggggtatggctatcggaccagggggagtgagagtaggggggggaatgcggaggcgactattgggagaaacaacgaacgggcggagcggacggcggtagggtcggtgcggggtggttagcgggaatagaggccatctgatcatgggaaggatgcggcggctattgggagcggcccgctgtaggtagggagaaacgcgggttgacaacggttcggggacactccgactgtggcgcgctagggcttcacgtgatagatcgcggacaccttcgatgggcagataagagggaatgtcctgatggtgtaccccagttgatggtgtgtgcacccccatcgagggaaggggccgcgggaaggggggagcgactgtccaccgggggacctggcgtggagattaggccctctttcggaccttttccaaaggttgatgcctaattgggccaaatccagggtgcccaccaagttaccagggttgcggctgttcttctaaaccctggcaggagagtcagatgtccatctcgaactgagcatcatccccaactgcatgtttcctgtcgtgattgttcaagttgttcaaattgtttacttctactttggagtcttcaattaaggtgccagggctagtgactcctgggatattgggcagatggcagggtggggtctgagccatgggagaattgcgacgatccaacagaaactttctgtcataaatgattcgagttcctcccggtgtggtggagaagagcgtccccccgggcgtggtgcaatagtcatgaggtagctgcgcggcgtcgctgatggccacggtgcgggtggggatggcgcggctctggctgggctggtggccgctgccggctgacgaggacatggctgtnnnnnnnnnnnnnnnnnnnnnnnnnnnnnnnnnnnnnnnnnnnnnnnnnnnnnnnngcttcggctcctcaggcggacggaaaagcgcgctctgnnnnnnnnnnnnnnnnnnnnnnnnnnnnnnnnnnnnnnnnnnnnnnnnnnnnnnnnnnnnnnnnnnnnnnnnnnnnnnnnnnnnnnatcctccggcctcagccagcagcctcaggagcaacagcagcggcagcagcggcgacgacgacgaccggaagc

SEQ ID NO: 150076 - DNA, 606 bp, Homo Sapiens
ggctgcaaattcagggttccccagtaactggtggatgtagtaggtcgtgttgagctgaacagcatctccaaagtcagccagtttgatggttggcttggctaaactctcatccaccaggatattctcaggctttaggtccaggtgtgctatcctgcagttgtgcaggtaccggacagcttccagaacctcccccaggtgcgccctgatcttcccttcagtgaggcttccccatcgcaccacgcagtccaggaggcgaccctggtcaggcatttctagtaccaggatgtagctggtgggggtctcaaaggtgttgaggaggccggcgagcagggggtgctggaggctctgtcaggatgccaagctcatgggtgacctggtctgcgcttcatcaacttcttgttcacaaacttagtggccactgctcgcttggttcctttctgatcacatttcttaacgacagagaatctgcccctgccaagctcagccacttcactgtagaaggagtcaaagttgtctttccaggtcaccatgatcccatccatccctggacctaggaccctcaggctggccgacgatgaggctgaacccatgtcattgacagcgatg

SEQ ID NO: 150077 - DNA, 1389 bp, Homo Sapiens
  misc_feature (101)..(101): n is a, c, g, or t
  misc_feature (505)..(505): n is a, c, g, or t
atccaatttttgccctcagattttttaaggggctaggaggaggtatttgcggccaggaactcaagtccccaccctttgcatttcaatacggacccggtttnttaggggagccaggggagcccagcccaggccaaagtttggagtccatgcgggtgctctcccatgtcccccggggtcccacttgcatgttgtaatcaaaggtgagcttcttcgcctgccccggatggttcttgtggcaaagaaagcgatgcggggcagccgctcgtcaaggttgtctatgaagacgttgtacacctgcaggttggggtcacaactgtggttgacaaagtgggagatgttgccatagtaggcggcatccacggtgtacacgtcctccacgtagtccaggtcaaagaggtaggtggcgccctgacggtcgtagatctggccccgccgctctgcctcctctgaggtaatgatctctcccacgtactcccatgacgaagctgttcttgcgaatcttctnccagggtgcggacgccccagcccacgcccatcatccgtgcggaagatgcagaggtcatatcggatacccttctgtaccacacgatttgggcagtcatagccgcagcggcagcgggagttgcactcgtagatgggcagcccggctcgaagccgcacctggccctggtcattgtaggcaaacttgtgcagtgacgcccccgggcagcagcctccagtgggtgcccacagacagtcctggcactcgcagcccacagccacctggttgagggtgatgccctcaccaacacggtactcattgatgtacacgaaggcccgcggagggccgtccaggtccacctcattctctacagtgatgcgtcccagatggctgcgcttggcattgagctcctgctcccagcgacggagcgcccgcctctgcttggccttctgcaccaggtagttggccaagcttgggtccaggtgccggggggtctttgaccggtggtgccgccggagcagctccctttctaagtccttgtggaactgcttgaggatacgcacacacttgagattctgccgtggctcccaggtgctctctgagtctggatatccacgccatttcaccaggtaatattcctgttcgcggatcttcttgtaatcgcacaggtactcgacttcaaagtcatagaggttcctcttagagataccgagggcagggcaggagagcttggccaggcggcacaggtcctgcagctgattccaagaagacttgcaacacacgctgcagccttttaaattttccgccatctttcccccggctaacgaccggacgcgtggtcgacgatatcccgggattccgaccgtaccagcctgctttgttaacccactgttctatattcactatgc

SEQ ID NO: 150078 - DNA, 968 bp, Homo Sapiens
  misc_feature (876)..(876): n is a, c, g, or t
aaggaagcgaggcctgggtggcgaattcggcacgagggtccttgagggcatccagctcattgccaagaagtccaagaaccacatccagtggctgggcagccacaccacagtgggcgtctgcggacggcttgaggggttgacccaggacctccgacagctgcaggagagcgagcagcagctggaccacctgatgaatatctgtactacgcagctgcgcctgctctccgaggacactgacagccagcgcctggcctacgtgacgtgtcaggaccttcgtagcattgcagaccctgcagagcagatggttatggtgatcaaagcccctcctgagacccagctccaagccgtggactcttcggagaactttcagatctcccttaagagcaaacaaggcccgatcgatgttttcctgtgccctgaggagaccgtaggtgggatcagccctgggaagaccccatcccaggaggtcacttctgaggaggagaacagggccactgactctgccaccatagtgtcaccaccaccatcatctcccccctcatccctcaccacagatcccagccagtctctactcagcctggagcaagaaccgctgttgtcccggatgggcagcctgcggggctcccgtgggaggaggaccgccctgtccccgctggtggcggccgactcgctcctggagcatgtgcgggaggacttctccggccttctccctgaggagttcatcagcctttccccaccccacgaggccctcgactaccacttcggcctcgaggagggcgagggcatcagagacctcttcgactgtgacttttgggacctcacccccctggatttctgacagggcttggagggaccagggtttccagagatgctcancttgtctttgcagcccttggaccccctgttcctggccgtcctcccagcctgtttggaaacatttaatatataacccctctcctctgtctcca

SEQ ID NO: 150079 - DNA, 387 bp, Homo Sapiens
ggggctgataaagcgtggggcactgaccgagcgcttgccctgctcgaagatgcggtagatgcggttggtcttggtgagcagggctgcatagctgatgctcatccctagtcccaggaagattcggcgcagcgagcaggtgccaaggtcgggctcagcgatcatgaggaaggtggtggcatagcacaggaagatgcctgccagcagcacgtagctcagttcacggcccgaggccttgacgatgggcgtgtcgttgtagcgcacaaaggtgatcaccacgaacaacgtggcagcgatgcccaccacggccaggaagaggggcagcacggcccagggcgagccccactcaagcttgatgatggggatgggccggcagcccgtgcggttctc

SEQ ID NO: 150080 - DNA, 569 bp, Homo Sapiens
ggtacacaccatccccggcagaatagggctgccatcacccccaggagctgcatgcagccggctgcaggccctaggccccaggagggtcacgggcactgtctggagggagctgatgcctgctcctgggcgggcccgtcccagaacccagccacgctccccatcaggcaggtggtggtcaggatagggcaggcagaggggccgcaggctggctcccagtgtcacaggctgggccagcagcaggagggccatgtcgtagcccccctcagggtgggtgtaggctccatgcaggatgagctgcttcaggccccactcctccggtctggtccccagccctacgctccattcctctggggcctggcgcccaatgaagcagtgggcagcagttagcaccgcctcctctgacaccagggccccgccacaggccagctgtccctggtgcatcagcctggcctcccagggccatggggagggtgctcctgcctggggacctgctgtcctcaaggatccacaggctacacagctgtcccctcgtgccgaattcacaacccaggcctcgtacctagcctata

SEQ ID NO: 150081 - DNA, 824 bp, Homo Sapiens
ggcgcgcctccccaggcccggatcgggagttttcccgccccccctgtaataggtattctggggcctacgtttttagtgccataaatcagatgtatctgggcccctgatgcggatttctattgaagtagacctagtgacataattgatataaattcactgctttgttcaagtactttatacaataaattggcaggtaatcgaacatcatggttgttaattattagaggaaggacatcacagacaaatgattttctaaagcagttcactggagattcttgttcttcaatagtttcagcctctaatagtgcctccccaaggccaaccccatgctgcaccaccgtttcagggaagcgcctcaaaagtagaagcaacatttctgatcgttctaacgtgttgaagcattgttccgtgacctttagtaacatttcacactggactcgaccaggaagagtttcaaataaacttcttaaaaattgggtttgtttgtcctgtgaatcgttccttaatgctgatgtaataatgctgatttctctccacaccaccggctggtctgggaaattcacaaacatgtcgtacagcagcctcccggcggtggcggtccgctctgcattccgctcgatggtgtacatctcatactggatgttaaagtctgccgggtagaggctgcgggccgtgatcagccacgccttggctgcccacaggtcttgcggcaccaactcccgggctcgctgcaccaggaactcgcagtcccctgggcagacatgacccgagcgctctccagccgccagcccgaagcggccggaacgtccggctctggactctca

SEQ ID NO: 150082 - DNA, 933 bp, Homo Sapiens
  misc_feature (261)..(269): n is a, c, g, or t
agcttagggggcagcggtcgcgtacaggtgacgccaggtgcggcgacggcgagcgcgctgacgataccggcggtaggcgacgttcgtatgcaacgggcgggtatagagggtgaatgtggtctgagacggactgacgcggcgattacatttacgcctgcccgcggggctagaggcaaccccgcagcggggacccggcgtccgctgcgaagcctcgtaaacgctgcggcccgagccggagcggccggtcggaatggcgggggnnnnnnnnngtcgaactggtctccggggcgtgctgactgtgggcccggggcgcgggccgcgcccgcccgccgttggggccccagccctcgggctgtggccgggagcgtcgcacgaacacattcccgggtccaagggcggtggccgtagttggagcccgcggggttcgtccagggcgcatccgcaggcaggggcaggaagcgctccggtggtgaagtagcgcagggtcgggtttcgggccgcgcaaaagcggtgaggaagacctccgccacctcctcagggttctgcgccgcctcgcgaaagacttgcttgctgtgggcgaggtattggtagaagcggtggaaggtgtggatgtccgtgcggtccagcacctcctctgggctgcccaacaccttctccatgaaggcggtgtgcactgggccgcactcgatcaggctcaagtggaccccaaagggcagcagcagaaccgccagactctcgcataagccttcgagcgcgaacttgctggcgcaataaacgtcattgaaaggcagccccatcaatcctcccacgctcccggtcaccaacacgcgtcccgaaccgcgcctcttcatgtctggcaggaaggcctgcagcatccgcacagtccctactacattcacgtccagcacagaggccacggcgtcctcccccccc

SEQ ID NO: 150083 - DNA, 1528 bp, Homo Sapiens
  misc_feature (214)..(214): n is a, c, g, or t
  misc_feature (216)..(216): n is a, c, g, or t
  misc_feature (228)..(228): n is a, c, g, or t
cctgagccacagagaagaggtgccgcagggcccgagggatcagcccctccaactgggggtctcccccaggcccaccctccattgtgaaggtcttgccactgcctgtctggccataggcaaagatgcatactggatagccatccagggctgactggacaagcatggcaatctcttcaaacacttcatcctgtccacttcctggtgggaatacgcncnggttcaaaaggnaaaaatcatggcgagttgggggagctggtgccccactcagggtcccacgccgctcgtcagaccgggagaggctaagtcgggttggaggatcagagggcccaccagggccagagggaaacaggaggaggccagggggtggagtgggctcccccggcaggacagggcggacccggcagaatacacggatgttgcccttgagttcctgcagctggttgtgcagtcgccggcgctccatttctagcccatgaagacgttcttcccgctcagtcagtaaggctgcctgggccacagtctcctgccgcagagatgccacctctgcttggctgcttgacagggctgcttctgatgtctgcagcctcctctccttctcctctagttgggacatcagtcccctccgttcttcctgcaattccacctgttttttctgaagctcttgcaccaagccctcctgcgtgctcagccgctcttccagctccaggacacaagcacgcaagttcttcagctcctgttggccctgctcagcctgggcctgtaccttggctaaatgcccctccagtgttgtgcgctctgtccccagggccttgacctgctgctgggcatctctgagctggtcctgaagctgctggttctcttggtccaacgtttgagtcctctcacggcaccgttttagttctgcatttaggtcacataactgaccctttaagtcccaggctggacgtttgctgggtttcttccctcctgccatgggaggaacaccttgatgtgccagacttctggacaggaacagcaggaactggcttctggttcttcaaccctgtggcaatagctgtggaacaccggggtcctgtcttcttggaaactttttgagctgtggtctggccttgtgtctgtggcactgtagtgagggatggaactcttgggtgggatgtggtaattttggtcgttgcacccaggcctcttgtccgtttcttctcaggctccaggccatcttccatctggtcaggcctcctcttgagtctgcttcctgagagaggcagctgggaaggggccttaatcagaggtctcttcagttctatgttcccctttacttccaataggggggacctctgcggatccatgtccacctcggtcccacacgcgccgggggaatgcagtggaagagaagtgggtgccggggatcctgggactcgcgttctctcgcccgctcgcgaagcagggtagagaactcgcacggctccggccgctaccagccccgcgccctcgtgccgtattaacacccagcctcgtacctagccgtaag

SEQ ID NO: 150084 - DNA, 1275 bp, Homo Sapiens
  misc_feature (293)..(311): n is a, c, g, or t
tgggagcccagggggttccttggggcactccgagcagggccgggccctccgtgtgtccattgacgacgacggcaactggcccctcggctctgctggcaggagcttccggggcctgcaaagccctgggggacaggtagtgggcgggggctgtggcaatgtggtgcctggcttctccgagcccactttcttcttcttcccaactttagagggttggatggaggccagccccagtgtggaggagacggagcccgtggggcgcgtgctcagaagctcctgcagggccgggccgccgnnnnnnnnnnnnnnnnnnngtgtgaagggcgggccgcccttcctgccgcccctgctccccttcccagccttcctggtgggctggccgctgccggtagcctgcgccgagagtgggggctgtgctaccttcttgctgctactgctgctgttccaggcagagacaaggctggtgggggcggtgccaggcttgggcaccgaggacaccagggcggggaagtcctcctcctggaaggcactcctgcctctggcagggatggcgtacggcagcgccaaccccacagggcccggggttgctgcagtggagcaggaggagtaagtggaggcagagaggctggggaagtcttcgtccttgagcttcgggctgggtggtgggagggccgcctggggcggctgggcctgtcaccgagaaggcttcttggcttacaggaccatttgtcgaggtttccttggggcctgggccttcgccctgagtccggggtgagcgccgggggccacggggatcctcaggtccccgcgccgctgcctcctccttcttgggcctaccgccttcctcctgatcctcactcctgcgagcctcctcctgctgctgtgcggccacggaggcccggacagcagctgctacttctcggtcctcttcttccctccagcttcctcggcggctctgctgggctccgcgagtgccagcccgggccactcggccctggcggctgtacctgtccacctcctcgtagtcttcgccaccaacgaccccctcgttccggcgcgagtgccgtggcgcgtagctgaactgcaggtcgatgtggcggttctggcgtgcctcggcgcggctgcgactgtggcaggccgtcctgtgggccttgaggtcgatctcggtgcggaaggcgtgggtgaactgctccgtgctgcagcggccttcctcacacagaaagtgcttctcccgggcctcgtgccgattaaacccaggcctcgtacctagcccgtaat

SEQ ID NO: 150085 - DNA, 1244 bp, Homo Sapiens
tatcacccgatatcaggttgggtggcgtccacaacactctacttgggatcacgccctggtctaagtgtggcgaaacagtgtttggtgccagctcgcgtttccacttgttcccctctgtccttccctcttgctccacccctttcgcctggcggtggcggtccgccgccctcgcgttaaaccctgccccggaggaatcggggcgggatgccgtttcccctcttcgccgattactagtcggccgtttccagcccagagacccaaggcatggtgggggggcggttgccctggtttgggggccccggaggcccccaagggcggcggaagtccttcctcctggaagggcaatcttgcctttggcacgggatggcgtgtggcaggcgccaaccccacagggcctcggggttgctgcagtggagcaggaggaggaagtggagccagagaggcgggggaagtcttcgtccttgagcttcgggctgggtggtgggagggcgcctggcacccccacacaccctggggcggctgggcctgtcaccgagaaggcttcttggcttacaggaccatttgtcgaggtttccttggggcctgggccttcgccctgagtccggggtgagcgccgggggccacggggatcgtcaggtccccgcgccgctgcctcctcctttttgggcctaccgccttcctcctgatcctcactcctgcgagcctcctcctgctgctgtgcggccacggaggcccggacagcagctgctacttctcggtcctcttcttcccttttgtacctccagcttcctcggcggctctgctgggctccgcgagtgccagcccgggccactcggccctggcggctgtacctgtccacctcctcgtagtcttcgccaccaacgatcccctcgttccggcgcgagtgccgtggcgcgtagctgaactgcaggtcgatgtggcggttctggcgtgcctcggcgcggctgcgactgtggcaggccgtcctgtgggccttgaggtcgatctcggtgcggaaggcgtgggtgaactgctccgtgctgcagcggccttcctcacacagaaagtgcttctcccggaagtgctcacgcaggtaggcatagtcgctgtagtagtcctgggccccgtccgagtcgcagaagtggcagaagtagtggtcgcggcgcaggtgcttaagcagctcatcattgtccaggtagcgcctcgtgccgaattcggcgcgccgtcgacttcatactctctcc

SEQ ID NO: 150086 - DNA, 1162 bp, Homo Sapiens
tcgccgcatcgtcctgtccgtgcgtttgccctcgggcgctctctgtgctcctcccttcggcgccgatggtcgtccacttggctgtccctgttggtgcgctcttggtcccgccccgggtctgatgtgctctggagggccaatgcttcgatgtgtgtccctgagttgttcggttgtggtggtctcgaccaagggttcttattgtcttgtgggaacccacggttaccttaaccttgacatgctttcctccttcgctacagtaatcccttggtcgtttcgtctcccctcaatgtttcgccagcccatgtgtaattcacccgccccattgcctcggctccgcggatctgctcctggtgtccgcatgctatggctggtccatttctgctcctccgcacggcgggccctgcgttcgccagttgggtcccgtccgtcgcgtgtccgttggtttcgtgccgggtaccctggcgctcatagatcccgtgtcggggctcgccgtggattccccaggagggactccccagttcccggcagccgcgccccccgcgtgatgggacctcgtatggtagccctccggcttctgttatctccctggaaaggttgattggcccacattcacctggtctgtcggtccatcacgctgggaattacctgccgtcggctttcgggccggccgcaccccgtcagactccgtgcacagtgcccggtgaactcctcgtcgtctccaggcctccccgagcgttttcgtcgtcgcagtcgtgcgatagactgtagtcgcagccggggccagctcctctccggtccccatccgcgctccattcccgcctggcgggggcggtccgagagggctccggagcgccgcggggtcgcatgggccctccctggaaggacggggccacctgctgccgccgggaggcccggcgagtttggctcgtccggctggttcggccacttgatgggaacgtcgggcggggcgaggaacagtcgggggtggccgagcggctcccttcgacgacggttcgggccagcccccaacaggtcccgggagcggtggggtgcgcccgggctccaggcaccagccaaggagcgcctcgtgccgaattcgcacgaggcctcgtgccgaattcgccacccaggcctcgctaccttaaacccttagagttactga

SEQ ID NO: 150087 - DNA, 1242 bp, Homo Sapiens
  misc_feature (87)..(87): n is a, c, g, or t
  misc_feature (92)..(92): n is a, c, g, or t
  misc_feature (113)..(113): n is a, c, g, or t
  misc_feature (116)..(116): n is a, c, g, or t
  misc_feature (128)..(128): n is a, c, g, or t
  misc_feature (132)..(133): n is a, c, g, or t
  misc_feature (135)..(136): n is a, c, g, or t
  misc_feature (143)..(143): n is a, c, g, or t
  misc_feature (160)..(160): n is a, c, g, or t
  misc_feature (166)..(166): n is a, c, g, or t
  misc_feature (181)..(181): n is a, c, g, or t
  misc_feature (203)..(203): n is a, c, g, or t
cctttggggaaaaattagcggcctttttgaaactttcaggaagccaacttccctattcccttctcggcttttagaaaaggatgcctnccccncgacgaaccgagggggtttcntgntgtcagggcagncctnncnngtctcanttcatcacagaagaggncaaagnccagcgagtacaggnccagctcgggggggtgtgccancgaatggaaatccatgagcagcacgtaggcaaccagcaggaggaaggcgatgtagaagaccacattccaggagaagaccacgaagggggaggtgaagaacgccacatagtaccaaagcagcttcttgtgcttgtcgacaggtttcttcctaaatgatacaaagccacagcccaccaagggtataataaacagacacaggataatcttccagttcttggtgtctcgggaaatctctccataccattgcttagaaagaaaattctggaccccaggctgggcgatgaaatgctggtctgtggcctccaccgccagctccagacagttgcttccaccccaagcttcacaggaatagaccagcagctgttctgccaagtcttcatcgctgctgtaacactcagtgaacagctcaacagcccgggtctcgtactcattagccagctcctcggactccccagcagcattgatgtcgttcttcactttggccagagtcttcagaagcttgctggctcccagggctgccagagtgcagcccctggtctgctcccaaatgactttggagagttccttcttattctgaagaatggcccagatgaagagagcttgcagggggtgccgagtaataggagacacgtcgtggagttctatgtccatctcgtcccggccatttctgtcttccttccggaagcctcttcggaagttcgcaaccagtttccagacaacgtgaggagggcatcattataggaattcttggcgatctgcagattccggtacacaagcgtgctgaagtggttggagaagagttcagtgaggacatcatgggtgagaaacttccgtaggttcaagccattctccagaaagaggcggacaacttgggtctgtcctttatgagagccgtaaacatgacttcttgaaggtcagcagactcccatcggcggtcattggtgaaaatctcatcattggctaagtccagctggttccactccagcagaagcttcagcctcgtgccgattcaacaccaggccttcgcaccttagcctat

SEQ ID NO: 150088 - DNA, 970 bp, Homo Sapiens
actcggccatgctgttcgtccaggccctgctctcggggctcttctccacgcctctcaacccactgctaggcagtgccgtcttcatcatgtcctacgctcggcccctcaagttctgggagcgcgactacaacactaaacgtgtggatcattccaacacccgcctggtcacacagctggacaggaaccctggcgctgatgacaacaacctcaactccatcttctatgagcacttgacacgttcgctgcagcacacactgtgtggggacctggtgctgggccgctggggcaactatggccctggtgactgcttcgtcctggcctctgactacctcaacgccctggtgcacctcatcgaggttggcaatggcctcgtcaccttccagctgcgtggccttgagttccggggcacttactgccagcagcgcgaggtggaggctatcaccgagggtgtggaggaggacgagggctgttgctgctgtgaacctggccacctgccacgggtcctgtccttcaatgctgcctttgggcagcgctggctggcttgggaggtaacagccagcaagtacgtgctggagggctatagcattagtgacaataatgctgcctccatgctgcaggttttcgacctccgcaagatcctcatcacctactatgtcaagagcatcatctactacgtgagccgctcaccaaagactggaggtgtggctcagccatgagggcatcacggcagccctgaggcctgtgcgggtgcccggctatgccgactcggatcccaccttctcgttgagtgtggatgaggactatgacctccgcctgtctggcctctcgctggccctccttttgtgctgtggcacctcgaggtggatccagtactgcgccttccggcgcagccagcccgtggaccaggattggaactccccgctggtcacgctgtgttttggcctgtgtgtgctgggccgccgggccctgg

SEQ ID NO: 150089 - DNA, 238 bp, Homo Sapiens
tttctgtgtactttgaagccagattggcagagaaagaaaaatggtaaggaaatagcttcttgagatatttggctgtgaatatagtatatgtggtagctggaggggataagggtggggttttggctttatgttttaagatggttgcaatttgaacttaagagtcaaagttgagagttccccggcacgaggcctcgtgccgattcgaccacccaggcctcgctacctagccgtacgattt

SEQ ID NO: 150090 - DNA, 404 bp, Homo Sapiens
aggaatgggactttacaaggctgtctgccttgtcctgggcttcctggggtgggtggcattcaggcccggattctgcccaaacaagaagaaagataactaggcacccagcagattacagaagtgcatgggctgcggacttacagctctgtgcagagcatcaggcaacaaccggagcctttttgaaaggtgaggcccctctccagagaagggccttgggggtgtcccagcttcctctccccgcagtggcctctgtgacaagcagcagggaggaccctgaaccaccacaatggcagcacttctctaaacccaggatatgggagaatagagttaaaaatgcaaattcctgggctctcagagattcccgatgagtctaagctaggcctcaggaatcagcacccttaccc

SEQ ID NO: 150091 - DNA, 824 bp, Homo Sapiens
tgggaacagagtggcccatgtgaatggagatggtgtctgtgctgtcaggcatctgctgacaacattgggggataggccttggagagaaacgtctataggcctggagacagcagggcgtgggcgggagaggcaggctgataccatgcgggtactcactgctagcccccagatccagcccgagaggaggaggctggcgggttagggcaggccccaacctatctcacccctgtgatgggttggcctctgagcacaggaatgatggtgaccatctgaggtcacaaggcaggaaaggagtctgaatggagtgtggccagtggggaagtcggagaggccggaactgcccccaagaggctggcagagggctgcagagggcaggtgcaggaccaggctccctcccacccagacaagcacagtagcttagaaggcaagagcagcagggtcaggaggaagagcaggggtgtggcgcctcgttccttccgccaggagctcatggggcttcgttggacccaatcccgttgcctttgttgacgtagaatggccggtagtgagacagcatagtctgcttgccagatttccaagtctggggctgggccttggggctttggctccgcatgagggagggatagcctttcagggagaaggaggagctgtccttggacgacgggcaggtcattgtcagagttctgaatgctggaggagtactcccagacccgggaggtgtagttacatggcacctcccaacgtctgcatgtgccttcagctccatccccacatcgtcctgcaccccctcgtgccgattcaacacccagcctctactagcctat

SEQ ID NO: 150092 - DNA, 1120 bp, Homo Sapiens
ggtcaaatcggacgagggacctggagaagcataaaggaggaagtgagggctgcgctggagcagcgggagcaggatgctgtggaccaagtgaaggtgatcatggatgctctggatgagagagccaaggtgctgcatgaggacaagcagacccgggagcagctgcatagcatcagcgactctgtgttgtttctgcaggaatttggtgcattgatgagcaattactctctccccccacccctgcccacctatcatgtcctgctggagggggagggcctgggacagtcactaggcaacttcaaggacgacctgctcaatgtatgcatgcgccacgttgagaagatgtgcaaggcggacctgagccgtaacttcattgagaggaaccacatggagaacggtggtgaccatcgctatgtgaacaactacacgaacagcttcgggggtgagtggagtgcaccggacaccatgaagagatactccatgtacctgacacccaaaggtggggtccggacatcataccagccctcgtctcctggccgcttcaccaaggagaccacccagaagaatttcaacaatctctatggcaccaaaggtaactacacctcccgggtctgggagtactcctccagcattcagaactctgacaatgacctgcccgtcgtccaaggcagctcctccttctccctgaaaggctatccctccctcatgcggagccaaagccccaaggcccagccccagacttggaactcttggcaagcagaactattgctgtctcactaccggcattctacgtcaaacaaaggcaacgggattgggtccaacgaagccccatgagctcctggcggaaggaacgaggcgccacacccctgtcttcctcctgacctggtgctctggcttcctagctactgtgctgtctggtgggagggagctggtctgcactgcctctgcagcctctgcagctcttggggagtccggcctctcgattcccaggccactcatcagatctttctgctggactcgaggtccctcttccgggtccgggcacctcaggtggatgtgggctgcctacggagccccccgggatggggagaacgggtgggctcccgcgtagttattctcggcc

SEQ ID NO: 150093 - DNA, 855 bp, Homo Sapiens
ttgactccaaacttccgccgtgtgtggtgttgtgccgccgttaggttcccctctacattccaaggacccagccgagaaaagagcctctccccgcgccaggtttcagacttctggaggggaacctcaaggcaccccttccctgagcataggcatcttcaatagaacaagaagacatgtttggtgtgctccccacgagtagcccagatcccacaaatcagctgcatatcagtcaggcagaaaatgttgagaggctgccccaagtgtcctttgcatactggcattttgggagagatcttgatcttgttatacttttccacaatacccttcagggagtaattaacctgcaggctattaattccagtagctgaagtttccttacggcatgtaggacacttgaatggagctggtctccacaaggaattccgcacactcccttctaagataccttctaagcattttttgcagaagttgtgggagcaaggcaaaacccgtggatcatcaaacagactacaacaaatagggcatgtgagatcttcttcaagcagctccatcacatcctctgtctcctacaagctgatgtatttggcagggttactatttcccagggcaaagcaggtcttttttttcacgttttgactaacgaactagaggctactgggcaactccccaccctcgctgaaggttcgaggaccaccccgctttcccgagaggagccgggcggcgggtacttatctccgacctccggctagtgggaaaggccgcgcgaccgcccgtcctccaactacagggaccgcacggtacgcgccaagcaccctcgtgccgaattcaccacccaggcctcgctacctagccgat

SEQ ID NO: 150094 - DNA, 795 bp, Homo Sapiens
caaagtcaccactatcacctccatatctgcctcgttccagagccctggattgcagaaaggactccagcaggtcacttaccacacagcagcaggatccgtagctcaatctcttcataccgcatcaccgtgcccagattggcattctcatctacaaaggtgaaacgctccaccggcgggcggacacagcagatccggctgaggctttctcccaccttccccaagatcttggctgcagtgggcttggtggccacgttgctgttctggtaaatgggctggggggtctcgttttgtggctgtccgatcacaggtgtcatggaaggtgtgttgacattggagaggatgcagccagtcaccctcttcatgaggtcccggtggtgttccaacacgctgcaggtcgtctgccaggtgtcctggtagcactcccaagggtccaccctgatccaatcagaattctggacggccagctgacacatgatgagacggtgccggcttgacacgaggccctgttttccataggagtcgtggacaggggagacaatcccgccaatcacaataaaccttccagttttgtgcagataatcctggctctttctgagagagtaacaaacacttcccagagcccctggcaggcctgaatttcctctagttcctggatttccatctatttgtctggtttttgcagccactacttgcagccctgtgctggccatcagagagtaacacaaagtggtgcagctgctccctcattgttgctgatcttgtttgctccactacctccagcttgggagaatttga

SEQ ID NO: 150095 - DNA, 631 bp, Homo Sapiens
ttaattttcttgcagttttattcttgctagtaaaggtaattcgttagaaacccttaagtgcagtttctcctctgtgtcttgtttaacttttcgtgttagcgaaattcacaaatttgaccaaggaaccggagcgcggccgtcctcgccgggattccggtcatcgcaataatctggctctcggcccctactcccaggcacggaggtcgaagagacgggcttcccctacaccgccctgtgtagatgtagcctcttcgtcccggcagccctccgagattccctgtgtccaccggagcgaggagaggtgtggggctgcagcccagaactcagcttcctggacctccccaaactcccgcctctccgggattaagggagtaaatccctgacgccaaagaccaggtcaaggacaagttctcccccgccctactcccccctcctgggcggggattcatctcccttccggatgaaaggtactaaagagccgacggggggccgcggcgggccccaggcccttgatgttccggttgaacaggtgctggtgaaaaggaggcggacccggcggaagagtctgccagggggcagtgcgccgaaggggaggcggcctcctccacccccagtcccccggcccgtcttc

SEQ ID NO: 150096 - DNA, 1094 bp, Homo Sapiens
gctgccgagtctaacacctcttcccacacccgctatgacccgagtgtttcttactcgtcttcctcggagacccggttcttattacaacccacctgcgcaccatccccgacacgtgctggcattaatccggtcctctcttccgggccgaagggaatcacagcctctcgctcaaaaccggtgttcaccagctgactcccgcgtagagtcttggacaatctggactgaagggcagccctgaggggtcataacacaggccagcttctgcggggacgaacgtgcacccatttgggagcctgagccccggggagccccgcgggtccccgaggcctggcctgtacgcggtgggccaggagccttcagcgtgcggtgcctcctccagtgttcctgctgtccagcagctcagtgctggggccgctgcggatgatgaggagtttctgtccgggtggtccggtggcaggcggctccgtcagcccaggaggaagtgtttctacctcctgtacgcagagtcgagtctgttcgccatcggccccgctcagcaccagcacgctctgcaagccctcgtccgtctggagtgtctcaaagaggacatcctggaccacaccagtgctggcctcgccatcccccgcctccccggggcctgggccagtgagcaactcctcagctgccccgctctgaacaaccagcaggttgggtgcctcagtagccacagctcccccactggaattggagagctggccggccacgggctggagctggaccgtggtcacctcctgtgctggctggagctggaccgtggttacttcctgtgctggctggagctggactgtggtcacctcctgcgctggctggagctggaccgtggttacttctggggctggtcggaggggctggagctgcaccccactcatttcctgtggccctgcctccccaccccccacattctgcagaacgatgaggctctgccctgtcccgctggccccagcgctggccgctcctgcacccctagacccccagggcctggcagccagaccacctcgtgccgaattcgccacccaggcctcgctaccttagaccgttatagttactgccgttcc

SEQ ID NO: 150097 - DNA, 924 bp, Homo Sapiens
cgcatcattgggcttgtaccctctctttctccatctcctcactgctatctgcgtcttcatacaggctcccacaccactgccttgagcctcctaggtccacgtcgctccacagcctcttcccagtcatggggtcggagtgaagggccctggcattacctcttagagcatcctcacaaccagggcacgaaaagagtgaagacaaagttcacaaccctaatgaatgtgggcagaagtggccagagctctggccctctgcccatcgtgctgccccccacctgccaggagtcacccttgctgttgggctttgtcacacagggcacgcaacccgaggagccacggcagacataggtgccccctgtgggtgccacagggctcctcaggtccccagaaccacactggcttatgtgaacggagcatcggcagccagcctggcagccccctccctgctcagcatcagtcccatgacaaggtcctgctgctgtgccacccaggagtcctgagaaggccacccccaccaggggcatcctcgggtctcagggagggagaagtggccgcttcccttatccacagaaatcaagaggtatccgagtgaagatcggggtggcagaggaggaagatgggtccacaaagaggcctggggcctggagacggaggggctggtgcaggggcatgaggtatttctggccccgcccgcctcttggccagctgcgccgtccggcgctgcctccctttcctcccgttcctctgggcctcagctagcactactgtgggctgcccaggacctgcagcaggaggccgtccccgctgaggcagaggcttccacggacgcaggtagtgcagcccccaaccgcagcatcaagcctccacatcacaagagccaactcttgcctcgtgccgaattaaccacgcgagcctcgtactaca

SEQ ID NO: 150098 - DNA, 882 bp, Homo Sapiens
tgttcccaggtgcaccagaagtcatggctggcgtcattttcaaagccttcataccgaagcagcacccgataccctgctgtctggatgacagaggcgatcccagtacacccggctggggagcacagcatcactgttgagcacctccaccttcatccttttcatcacatcctcccactggtcatagagtgggacgtgcttgaaacagctgacgggagcagccttgtaactgtgatccttcaggaacttcccccagtcgaagcccaagaccagagcgtcttgtcctgttggtgtcccatctgccagctgtcctgtcccttgagagtggaggaaggctccaattttggcagaccaggcagccttgtgcaggactttggcttttttggtcggtggttttccctgtaatctagccaagatactggctttcttggagttggaggagtagctcctggagcaggagacgctgcagaacctcttggtcttggagaagaaggcttcccttgtacccacgataccacacatctcacagacagctggctcagaaccactgccatccaaggagcgaggagtcccagggctgagcaaatgcagcggggaggtcggcagttcccctgcttcccgatcctcattttctgcttcacttgactcctccagataggagctgctctcactgcccacactgctgttataactccggaaactatcatagccaccaaacagctccaagtcgtcatcttcctcttcctccattggttctgaagatggggtctcctcaatactccggggcttctccatgagacctcagtttcgccaagcgtcaccaggtgcaggaagccctcgtgccgaattcggcgcgccgtcgacttcatactctctaccacataa

SEQ ID NO: 150099 - DNA, 964 bp, Homo Sapiens
  misc_feature (938)..(938): n is a, c, g, or t
ttccctttactaatttttccttccttgtactcttctctcccttctttcacttcatgtagttccaactcactccctaatctttaccgattacttttccttgtagaagtgtccctcctattcatatgcagattcttcctcttttaccacaatcatcctctattgtcttccaattttctctttccatactccgcatgcattttgtatgccacattcattaacatcctgttgatagattcttgtccttgtttcacctttctctgcacaactgttgggtaagccatgtgcaaaactgcagtagaataatagtgtggaatactggaagaagtgtttatccatggaatctcactaatctctaaggctgcagtaatatactgctgctgaagccatttcccctgaagctctcaaaggcacctgcataccttttaagggcatctttgagtttcaggcacagaacgaaatacactgaactgtggcattcatgtaacaagtgttaccaaggtttgtcaatccacatggtaactccatagcagatgctaactgttcttctgtcatgtcttctacgaagacagttttggctgagggttcttctggaagagcatctgctgaccccatcattagtagagtcattccgttttttattttgatgtttccccaatcatcatcctttagcgttcctcctttcaccataactttctgtctggcaggctggactccagtcaacgcaaacagctgagccttgaataccattggaggttcatctgtattcaattctacaccttcaaatttctcctttccccattttacagtaacggagtagagcggcatggcggggcgcgtcgggaggcggcggcgcaggagagctgggcctgacgagggcggcaaagggacggggaccaggagcagctgcgtcgtcggccgaggcggaggcgcggtggtgncggcggaaacggtgcgacgagtctca

SEQ ID NO: 150100 - DNA, 608 bp, Homo Sapiens
  misc_feature (16)..(16): n is a, c, g, or t
gccactttcccctccntgcggacacttccccgatcccccaagctcctcaggtcccctgcaacactcctctccccagaaggaccccggccgcctggttccaggcaggtctgcaccttgaagtaggcgacctgcaggtagttgtaggggctccgcttgcggaactccagctccatctcttcgctgagcgagtgggcggccggcggcccgaggcagcggcgcaggcaggcagcgcgacgcagaaggcccccgaagaagctcaggtcgcgcagggcggcggcgcccgaggcctgggccgggctgggggaccagtcggggtccagctcccacgggaagtcggcggcacactgggtgcggcagcgcaggcgaagggcgcggagggctgcccgggagcgcagcgcccgttccatgctcaggaccaccccgggccagtccccgcgcgcgtaggctgcggtcccctcggcgaagagcagatcaggcgtcaccatgccccatcctgcctcggactcgacctcggcttgggaggcagcggccacgacagccagcagtgtggtcagcagcttcaacgcgcgtaccgccatcgctccctcagaccaaacggaaccgccagc

SEQ ID NO: 150101 - DNA, 515 bp, Homo Sapiens
gcagagttgacggaactggggtagcactgaggggcccgcttaccagaggattccattgcttcattttcacctttgtctgatccttggtcctgctcatttgaagagatccctaaggagacatcagtgacattctccgggttcaagtgagtaatggcatcagatattctgtcgagagagatgagggcttctgcagcatataaatgtcccaaaaacttaagagatcctgacagcttgggctgctgaagaagtttatctgcatgattcaaagccatgaggttatcacccaaagccagagccacgtaggcactgcaagcaagtatggagcactttaagttttctaattcctgttttctcaatggagaagaaggtggagctggaatgaatttatctccatcatggcttttactgctgcaagtttcactgctttcgctgctctctgtgttcccacctaattgattactatttttagccccattttcctgctttggatcttgctgaaattcaggtagcagcaa

SEQ ID NO: 150102 - DNA, 894 bp, Homo Sapiens
ctcagtcagtaagctgaatgccttggtttcacgcttgttctcgtgggcaatgggtttccaccttcgggaccctgcgtccgcttatgaccctgcgcgctgtttctcgcaaaggttcttgacctcgttcgtcctctgggggtgaaacttttctgagaggctgcctgcgacttctgtgcttcctgtcttatctcagccaccttcttcctgtagtagaggaattccctgctattcttatcgtgcaaaaatgcaaatgctgggttatccttgtagtcctccatagctactttttctaactcggggcctccttctgccacaaagcgggccaatttctcgtatcactttccgagtctcggctccctctgggggtgttactttgatctccagccactgctcatagtcctcctcctcgtcctcgtcaggggactggaagacactcgggcggtgcgccacgggcagctgcttggcgtgggagtagctcttcacagggcccggcatggctggccagccccaggcctgtccgcctgctgatgagcagggacctcttcccagcgctgggggtgggtgtgctgggaggggcgctgggcgcactggtcggggcgtctgtgctggtctgtgccttctgcaacttcagaaactgctgcaagaagctaccatcgttggccaacttgttggaaatgcaggaagagttgtgtgcatttgtgatttcgccaggatgtgggggctgagggctggccacctgattctgcttggctttctgcttccattttggcttccatttcccgtttcttctgagcgatgagctcttcctggtgaaggatgttcatgttcatttttccagatttagggggagcaccccaaccccggttagcctttcctgcacatcccggatcccgg

SEQ ID NO: 150103 - DNA, 749 bp, Homo Sapiens
ggatgagtctcaagatggacaaccgggatgttgcaggaaaggctatccggtggtttggggttgctccccctaaatctggaaaaatgaacatgaacatccttcaccaggaagagctcatcgctcagaagaaacgggaaattgaagccaaaatggaacagaaagccaagcagaatcaggtggccagccctcagcccccacatcctggcgaaatcacaaatgcacacaactcttcctgcatttccaacaagtttgccaacgatggtagcttcttgcagcagtttctgaagttgcagaaggcacagaccagcacagacgccccgaccagtgcgcccagcgcccctcccagcacacccacccccagcgctgggaagaggtccctgctcatcagcaggcggacaggcctggggctggccagcactgccgggccctgtgaagagctacatacccacgccaagcagctgcccgtggcgcaccgcccgagtgtcttccagtcccctgacgaggacgaggaggaggactatgagcagtggctggagatcaaagagagagtgtgcctattgactgtggggtgtgtgagttgaaccccagtactgacagcctccttaaagtttcacccccagagggagccgagactcggaaagtgatagagaaattggcccgctttgtggcagaaggaggccccgagttagaaaaagtagctatggaggactacaaggataacccagcatttgcatttttgcacgataaga

SEQ ID NO: 150104 - DNA, 896 bp, Homo Sapiens
gacttgagtagaaatagtttaaaacacagtccactgagcgaatagtggtgagcgcgagatgtatcgtcatgtgtcatagcagtcaaagagcaacatgtcatgagcattctcaagtagattgagaccggcagttcatgttacaccatgcagcaatccattgcaaaatttcctcactgtagtctactacatcttgggattctttaccaaaccagcctggcgacagatctgagctgcaatctcattgtgtggtagcccagcagcagagaagataggaattttctgccccctagcaatactgttcatcccatcgatggccgaaatgccagtctgaatcatttcctctgggtagattcgacattgagggttgattggctgacccatgatatcaaggaagtcttcggccagtacaacaggacctctgtcaatgggttttcccgatccattgaatacccgaccaagcatatcctcagacaccggtgttcggagaatatccccagtaaactcacaggacgttttcttagcatctatacctgaagtcccttcaaatacctgaactactgccttggaaccactaacttccagaacttgcccacttctctttgtgccatccggtaaggtcaaatggacaatttcagcatacctgggaaacttaacatgatctaagatcactagtggaccattgactccagatactgtcttgtatgtgaggcgaggctgggagaggtagttccgactgactgccagcgcctgctcccgagctcccaccgccggcccaccggtgggcacgggtagctcgggtgcggccccgttgacaatcccccgcatcgcccgcagcgccatctgtcgcctcgtgccgaattcggcgcgccgtcgacttcatactctctcgcccttag

SEQ ID NO: 150105 - DNA, 775 bp, Homo Sapiens
gctgccccaccccccgctgaacgccaacgcaggatgtgccccgccttcctgacagagtcggaggatccataataaacggcaataaataacactgatcccagcccagcggcctgcctgctgggaaggctctggtgccacagggtgtctctgtttccacctcagccagagaggagcgccagagcccacagccgccccagatgaggcaagggaggcgcgggtgagacgagaggacgggaggcagctgttcttgctgaggggtcaggtgaccgggagtccgggtcggccgggctggaggaggctcccccgagcctggccttcctcccacgggccgtgcggagctgaggcgaggagctgccgcggggtggacggggcgctgggctgggcctcactgcccggcagcaacagcaggagcggagggagggcgggtccgcagcagctgccttcggtcacagaggatggcctcgtggaggtgacatgttaacttttcgggataattccacatttggaaagccgccccgtcatcatttccatacagttagtggtgtctgacaagtgctgggccgcaggcgggtcgtgtgtgctcagcagctgggcctggatggtctccaccaccctcttgaagcgacggctggggcctgagagcagggtgaaggtgacggagtagatgccgttctccttctgcgcctccccaccctccgtgtaggtgatatcaacctggaccttgaccggcttctggcctcgtgccgattaaccacccggcctcgtacctagccta

SEQ ID NO: 150106 - DNA, 939 bp, Homo Sapiens
  misc_feature (904)..(904): n is a, c, g, or t
  misc_feature (919)..(919): n is a, c, g, or t
  misc_feature (926)..(926): n is a, c, g, or t
ctagggtgaggccggcgtgaatcggccgaggcagaccaaagaattgcagaatcattcaggtctatctatccctgtgcctcgtggacgccaaaggaaaaaaagtaaagtcacaaagcacttttgatatccataaggcagatggatccggaaatataaccctgacacttgttccaagatgaaagttataagaagcacttgaaacatcagtgtaacaaggtactgttgcgggtacgaatgctatactacctgaggcaggaggttattggagaccaagcagaaaaggtgttagggggtgcgattgccagtgagattgacatatggttcccagtagtggatcaactggaggttccaacaacttggtgggacagtgaggctgacaagtcgctgctcattggagtctttaaacatggctatgagaaatataataccatgagggcagacccagccttatgtttcctagaaaaggctggccgaccagatgacaaagcaattgcagcagaacatcgagtgttggataacttctctgacatagtagaaggggttgactttgataaagattgtgaagatcctgaatataaaccactccaaggtcccccaaaggaccaagatgatgagggtgatcccttgatgatgatggatgaggagatctcagtgattgatggagatgaagcccaggtgacccaacagccaggccatttattctggcctccgggctctgccctaacagctaggcttcggcgtctagtaacagcgtatcagcgcagctacaagagagaacaaatgaagatagaggctgcagaacgtggggaccggcgaaggcggcgttgtgaagcagccttcaagctgaaagaaattgcacggcgggagaaacaacaacgatggacatggcgtgaacaaactgatntttatcgagtggggnctacgtntggtgtaggatat

SEQ ID NO: 150107 - DNA, 797 bp, Homo Sapiens
cagccccacgtgctgcaggcctgccccttgtgccgggccaggaactgctccacctggtcctgtcgtgtcgtcgcccccggaagggactcagccagaacaagagtggggacaatgctgcccggctgggcctgcagggctgtaagcctcagtcccccaagcccaaaccctgctgtcatttcgaggcccagctcgggatcctcacctgggctcagcggcaagtggcaaaagcccaggcagtcgtggaaccagcgcaaaagtgtgggggagctgccgggggtgcaggccaaggtcaggtggtccacgcggctgacccacccggggccaggcgcagaggacacgggcctgaagccgggtaggaagggtccgcggtagccagcgcgctccagcaaggtcaggctgaggatgccggcaggcgagctgaccacggcgtaagtggcggcaccctgcgcgtcccgcacgcgaacgggagggacaggcacgctgcagcccagcgctgccagctcccgggttgcagcgccggcgtccgccacgtcgaagcacaggtttgtggcgctgggcacggcgtgacgcggatccaggccgtacagcggctctccagaccctgcgccctcgttcaccaaaaagaccgcgtcgccgctgcgcagggctagctgccgccagccgtccacctcccgcgaagccaggggctggaagccgaagaggcgctgcaggttccgggctaggggctgcccggcgggcacgtggaaggcgatgtggccctcgtgccgaattgacacccagcctcgcacctagccgta

SEQ ID NO: 150108 - DNA, 881 bp, Homo Sapiens
aaggtagcgaggcctgggtggcgaattcggcacgaggactttcctgaccccaccatcctgcccagtctccgcttccccgtcttgtacacccctaactcctgaggctcctccgaatcacgcgagtggaagcggagaagctcaagtggccgccatgtcagaggcttatttccgagtggagtcgggtgcgctggggcctgaggagaactttctttctttggacgacatcctgatgtcccacgagaagctgccggtgcgcacggagaccgccatgcctcgccttggcgctttcttcctggagcggagcgcaggcgccgagactgacaacgcggtcccacagggttccaagcttgaactacccttgtggctggcaaaaggactttttgacaacaagcgacggatcctttctgtggaactccccaagatctaccaagagggttggaggactgtgttcagtgcagatcccaatgtggtggacctccacaaaatggggccccatttctacgggtttggctcccagctcctgcattttgacagtcccgagaatgcagacatttcccagtctctgctgcagacttttatcggacgttttcgccgcatcatggactcctcacagaatgcttacaacgaagacacttcagccctggtagccaggctagacgagatggagaggggcttatttcaaacagggcaagaaaggactgaatgactttcagtgttgggagaaggggcaggcttctcagatcacagcttccaacctcgttcagaattacgagaagagaacattcactgatatggaagactgaaagccggaagaacacagaatggctcctcacagacgtatccctcccgtgtgtctttgatagggagctggttgaccttgc

SEQ ID NO: 150109 - DNA, 1278 bp, Homo Sapiens
tgtgcgtgagctctctgtgttgaagttggtccaggttcgacatctccgatctggggcgccccccttcggtcgcggacctgaaccgtgcgtgaccgccggcccagcgcacgcgccgtgagagagcccatcgggtgacgcattcacaaatttgggaagtttactctggagcagttgcgtcataatcgctgagctggtctagataagggctccggatggctgtttgtccagaaacatccgttcttgggtaataaagcatcgatccactgtctgttgcccccctcgttcctttcaccttcagcgctctggcccggaaaacataagtccttgctgtcctcctctggagtttgctgacaacaatgacatgaccatggacttgcctgtcccctggaggcccaggacaccaccaccacacatcagtctgatccacaggtactcgatggcactgtcacaccaattcatctggtcatccaccaacttgatgctgtgcttcatgcgctctgggggcagtagtttggcctgacccacgacagggtccatggctgctgtcgccagtgcccatgccccggttctggatctggtacacagctgttggtctctgcccctccttctcccccttgggtggcgcaggggctgcaggggttgtgggggcggtgccctcaggggtagaggcacctgtcacggccacaggccccttccccctcctcccgtggcttcatgagaacgatgggcttctccagaggggctggagcaggcggggcagcaggggctgttggaggtggtggctgttttgaccgctctgctggaggttttgagaggatgatgggggttttctgcatgacggaagtgcttgtctcttcgctggcatcccttctctctctttcccatggtgcaatgtagtccctctcccgaccaccaggcccagagagattctgggggccaccagagccaggctccttccaccgtcgccgccgctctatcccatagagtccaggctgactgtgtccagactcagacatggttacctaacgcggctgctgattggttctcggggcgcggtgtgcgctctcccgtgacgggagtcgggtgggggcggggaggctgacccaagccacccgcctgcaaatggcgtctgggggccaggaacgtgggaaggagagaaaatgggcactccccactccgaaaccggcctcggcgtccgggttgcagcccctaaggaaagctgggccgaaggaagaagaggaggaggatgtaacgcgggcccgagctgagatcagttcc

SEQ ID NO: 150110 - DNA, 875 bp, Homo Sapiens
ggcacgagggcagtggacaccgtccagaggaagacgaagaggaggagattgtgattgggtggcaggagaagctctttagccagtttgaaggtagatctgtaccaaaatgaaacagcctgtcagagtcctttggattatcagtaccgtcaggagatcctgaagctggagaattcgggtggcaagaaaaaccgacgaatctttacctacactgactctgatagatacaccaatttggaggagcactgtcagagaatgaccactgcagccagcgaggtgccttcattcttggtcgagcgaatggcaaatgtcaggcgtcgccggcaggacaggcgagggatggagggcggcatcctcaagtcacgcatcgtcacctgggagccctcagaagagtttgtcaggaacaaccacgtcattaacacccctcttcagacaatgcacatcatggcagacctggggccctataaaaagcttggctataagaagtatgaacatgtcctgtgtactctgaaggtggatagcaatggtgtgatcacagtaaagcctgacttcacgggcctcaaaggaccctacaggattgagacggagggggagaagcaggagctgtggaaatatacgatcgacaatgtttccccccacgcacagccggaggaggaggagcgggaacggcgagtgttcaaggatctttatggccggcacaaggagtatctcagcagcctcgtaggcaccgactttgagatgactgtcccaggtgccctccggctctttgtaaatggagaggtcgtttcagcccaaggctatgagtatgacaatctctacgtccacttctttgtagaattgccaactgctcactggtcaagcccagcattccagcagct

SEQ ID NO: 150111 - DNA, 1438 bp, Homo Sapiens
ccttttgctgtgtgactcacgactagtgatggtcccgagacggtatgcgcgcggagcgttcctgtgatatgcgtctccatgtcgtgttcacctggtctcggttgttacgcggcctaaccatgttctgtgtcattcttgttgtccatgacattgtcttatcgacaacggggccacgtcagtagttgcgtgcgtttcgttgttacacaggacttcgtgtgatacatggtccttaggaatcgcccataagccgctctgaatatataccgttggtcaccgaacattgggcatgtaaaattgtgctgccatctaatctcttcagacagtttcgctgaaaggggtagccatagtgtgaccatgctgtcctgaatagggcgaggtgcacgtggttcgtctgggagagccaccatggtgtacctgttagtccgatgtgtgcaggattatccagcccagtggtggggcagtgacaggcaacgttgggttccctaacggtgttgggttacacctagcacgtccccaaacgacggcgctgtccggcattatgaactcagttgcgttggcatactacagtgggcaactccaccgagttataatcgcaaggggtgaccacccgtttgcccaccggtcactgccgtccctccttcctcagccgcatcccgaaagcctttgaccatgagtggcgttaccttttcgcgttcctcctcactcatactctggctgacgctgagtaacatcaacatgttgtcacactcagtaatccccatggcgtagaggtcactcagcacgttggcacaagctatgcgccccatcatgtagggatcttctaccaaggggtaaaagaagtccgtggtctgcaccagtgacaggcccccgtgcctcagggggatgacgcaggagtccatcccgatgcccagggctggaaaggtggggctggggcccgctcctgccggcaggccggcttcctgggacgcctcttcctggccacccaccaggccccggcccagcgggggccgcacgtccggccgcgtcagtcccgccaggagtttgagcagcgcctcctgcgggaccttgcagcctcagcccttcatgccggagaagcccgtcagccgccagctcgggctgaggcccaacgcctggggctcgaagggccggtagttcgagaagctccggcccagagtcaagcccgccgggcccgaggagccttccgccgctgccatcgcctctccgcaggcgcccgtcgccgaggcttccgccatggcgcctgcccggcagggaagcgagaggagaagagggcccttttattttccactcagattaatatgaagcaaaagtcaaatattacctgcagggattctccctagcgctactcaagccgtcagaccctcgtgctggattcgccacccaggcctcgctaccttagaaccgttatggagttactgcc

SEQ ID NO: 150112 - DNA, 1826 bp, Homo Sapiens
  misc_feature (900)..(929): n is a, c, g, or t
  misc_feature (1806)..(1806): n is a, c, g, or t
cgtggtgcttgttcctaattttctccctttgacttttgccatcgactccctggtcggtgggtgtctttgtaaacttgtcttctgtttttattggttggtatgtttctaattatttctccggaaatcaatgccacgtctttggccttaaaggcatgatgttccgctgttagaggcagggcaggagattcttacccaattatgtttctctcggaggcagtgtcgttattgcaccaggttaaagcttttgcagctttgtggaaccaatcgattaggtgggggtttcggtggagtattggaacttgggggttccctggttttgtgctttccccaggcctggcagtttttcccatccaaggtaggggcttcagcctggccgaaagaaagaaatggtctgtgatccccccagcagcagcagcagcattctcggttacaaggacccttcgagccccgttcgccggccgggggccgggcccctcccttccccggccgttagggggcgggcccggatcacaggactggagctgggcggagacccacgctcgggagcggttgtggaactggcaggcggtgggcgcggcttctgtgccgtgccccggggcactcagtcttccaacggggccccggagtcgaagacagttctagggttcagggagcgcgggcggctcctgggcggcgccagactgcggtgagttggccggcgtgggccaccaacccaatgcagcccagggcggcggcacgagacagaacaacggcgaacaggagcagggaaagcgcctccgataggccaggcctagggaccctggcagggagcagcaggtggcggcggtgcatggggcctggccccaccagcgggcactggcccacagccacggccggggggccatctagatgggaaggtgnnnnnnnnnnnnnnnnnnnnnnnnnnnnnntgacagctgtggctccctctgcctgcagcaactccatccgctcctgcaactgccggacgtgtgcctctaggtcccggttccgagcctctgcctcgcgtagttgactggcgaagttctggttgtccgtgcggatggcctccatctcccggctcaggctctgccgggtgagcacctcctcctccagggcttcctggagctcccgcagcgtcacctcggcctcagcctctgccgcagggacagccgctggaactgccacttcagctgtttcatcctgtggggacaccgagggctccaggctgggcgcttgcacgtgtggctcaagcagctgctcggcctccagttccatgggtgtggggcctgggacctcactgtccctgagggccatgcaggagtaggagtagcccacaaaaggcaggtggacccctagcggcgcaccttcccgaatgtccgacagtgtctccccgcccccgctcaccatggcagtgagcccgtcctccaccaagtcgaagttgcatgtgtcggtggcaccttcgaaatccggtgtaaaggggggcacgctgtcccggagaccatcccagtcgaggccaaagaagaagggatgtgtccggaagtcgcctgctccaccccggcccagccgtgtctccgggggacacagcaaccgctgaatgaagtctcgagcctcctcagggaccccttcgtccaccagcggcagagagaggtgctccttgtagtggacgatcttgccataggtctccgccgtggaatccgcgtagaagggcgtctgcccatagaacatttcataggcgaatacacccagcgcccaccagtcacactcgggcccgtagctgcctgtccccctcgtgccgaattcaacacncagcctcgtactagccgtaa

SEQ ID NO: 150113 - DNA, 746 bp, Homo Sapiens
  misc_feature (62)..(72): n is a, c, g, or t
  misc_feature (93)..(103): n is a, c, g, or t
  misc_feature (123)..(135): n is a, c, g, or t
  misc_feature (163)..(177): n is a, c, g, or t
cccccccacattttttcccccccaaaaaaccaaacccctttttgaggggctttccccgaaannnnnnnnnnnggccaaaatataacacaaccnnnnnnnnnnnttttttttggggaaaagggnnnnnnnnnnnnntttagtccctggggaaatgtgtttcaannnnnnnnnnnnnnngggagcccatggggttagctcccaattcaataaaaatccatttaaattttcggggaaccatattggttggaattttcgcttttcgtttgccaggccccacaaaacaaatagcatttggttaccatataaagagaaagctatgtccaggccgaggacaagggggtaaaccagaaggagggggatggggtttcacttttttcccataaccaacgacttgcttgtaactcatataactcattgctgtatcttccatattcaaccattcccccaaatactaatattctggtaccatcacagacaaatccatgggcagcacagcctggagggatatctcctctaacagctggcagaaaccactgattcgtagccgtgttgtagacgtgcagctcatccgcgatgccctcatttccccctccaaagatgatcatcagctcccggatggccaccgctcggtgtccgtgccgggcgcgggggaccggccccgtgaaggaagaaactcgcctccagttgaggaggctgggagccgccatcttcccaaccccatcccgggaatccggaccggtaccagc

SEQ ID NO: 150114 - DNA, 882 bp, Homo Sapiens
  misc_feature (113)..(113): n is a, c, g, or t
  misc_feature (701)..(711): n is a, c, g, or t
caccgtgggcccttgtgcatggtgcagggttctcccaccacgtggagcagcaagcccgcctgcagccctgccatgctgcgcagctctgagacgtggtccagtgtgctgccacncaggtgcagtgagaagtgatgtggtgacatgggtattcatggtccatgaacagctggtggatctccagcaccatctcctgcgggaacacccacagggagaagggttcgatctcggggccaggatctccacagaaaagtccaaatcctgaatggtgacttctatctggtggtgtcgtctcctggcttggcctcatccagcccatgttcccgggatggctcagcctcctccttcctccttcaggctccttcttcttcagggtctccaggcagttcccattcaagaacatgagtgatggtggctctcaccctctcccatggcttcaaagatggtcccatttcccagctctcatagccaatcctggcctcgatcaggcctttcagaccaaggaggcagctggtcctgggcatcaacatgtggctctcccttcagtatcatggaagacccatcctgccacccatcctccttcccagagatcagtgaatgaaggatgtggagccccagaaggagggaactatgtcttctgatctgtccacagccttgacctccaaagtttagatgtggatggagtagaataaaggcaaacttcnnnnnnnnnnngcaatttggccttggccctaatggtcaggctgcatctgcttgaaatcatctcgcggcttcaggagcgtcccggtatcctctctagggaccgtccagtacctgcaggtcacagggcaaaggaggctgcggaatgaaggagaaagagcagggtacacagatcaagcagggaag

SEQ ID NO: 150115 - DNA, 2479 bp, Homo Sapiens
tttttaaattgaaaggaaacttttattgagtcatgttttcaaagcaatctagttttaaaaaaagttgaagacaagacagaaaaaaagaacatgacacctaagagaatcagacaggacagacagacgggagcaggggggcggggacagcggctccgtggaggtcagatcttctccatcttggagatgaggtcgtcgcagatcctggtcagctcctcgttctctttagtcttctgctccactgtcttctccagcgactggatgcgcatctgctccttcctcaggctggcctggagggccaacgcttccgcctgggccttgctccggacctgggcgatctcctcgtttgccagctgcagcttctcctccgcgtgggccttcagggcttggtacctctggccctcctgggtgatccttgccaggtaatcctccacgcacttcttcagtgactcttcgttcttgcggtagccctcgatcacctctttctgtttctcaaaacgcttgaagaggtcggagaaggacttctccatggagttcagatctgtggtaagttggtctttttcttttagaactttctggatttcagctttggaaagttccttctgcttctgaacttcctccatggcctggtacacaacctcttcgaacctgtccatgatcttccccagttccaggttcttcccgtggagctcctcacacctgctcctcagctcccggttctcctcctgtgtcgcctttaccactgcatccaggtccttctggctgtactggagcaggtccactataggtccggtggacaggggtgggcccccaggcgcgggaacacctgggggtgggcctggcacaggaatgtccagtgctcccaagaaatcgaactccacaagcttggcttcccgcggacgtcctgagggagtctcatttgcaccgtgcatgctgctggtctcggtggccacgggcactggtctaccaggactgtccctcaggagggggtcgaacttgaggtataaggactgcttcctcaaggccgactccttaaacgaggaagttccaaactgctccaggtaatccacctccgcgcccgtgcctagaacctcagcggggtctctgaagctctcctctttcagctccaaggcaggctgcccctgctgatgggtgggcactggctcactgcctggacagcttgtgggaagcgaggtgctggcagagttcaaggctctctccttgctctctgctgttggggtctcggctgccaactgcaccacaggcgtgtcctccgctgaggctgaatgcagctgctggctcagacagggacctggctcctccgtggcaggcccagcatgcaactgttcagccgctggctggcccagcctggtctcagggctttctgggggctgggcctcactgcaaccagacttggtgtcacctccgaacgggatgaagtttgggtcatccattttgtcccagtcgaggtggtaagagccccgagaagctggcatggggggggtcctctcctgctccgctcctaccgtcgtcctcctccacctcctgcggggccttttgctgcctcactgctgctttcctcaagggaggcttgaggccggacctctctcccagtctccttggtgggggtgcccttttgctggtggcgccatcagatacatcaaattctagttttacaggtccgctcctcgaggagctggccatttggcctgcagccacttcttcctgaggactcagggtcatggccctgccagccaccaggtggttggttggggctgtgctctcaggagcagaggtgtgtgcacaggtaagggtctgagtgccatctgctggcacgggggtgcccacacccgcagggcagcccagggcttcgccaggcagaccctgcaggggtgctcctccgcaggcttccttagggattgcaccaggaggcgaagtggccactgctgcgggagcacagaccccaccgtgccggcattcctcctcggctccgtgcggagtctccgctttgcattcttcctcggctccgtgcggagtctccgctttgtgctgggactctgtcctgcaagggtcttctagggtctcagaggcgggtgtcactcttctgtctaaggaataggaactaaggttttcctccacggcttgctcagggctgccagacacttttcctggagacaccatttggttctcagaacttcctgggctctgggaagagcttgagcagtccaggtcagccagggcacctgggccagactcgctggagctgccactcccaaaggctgggcttgcatcccccaggaggtcggtgtcagcctccactggtttctgtagaattccatgagtagttttggcatccacttccttgatgagctgttggcttttaaaagagacttaatcaacgtgaagcagcgagtacctggctcgaggttaggggcctcagcattcattctcaacataggtttaacattctcacaccagaagc

SEQ ID NO: 150116 - DNA, 1017 bp, Homo Sapiens
  misc_feature (139)..(147): n is a, c, g, or t
gccagggccacacccaggggtgtttgggcggaggcacgccccctgccaacggggggctcccctcccgcagggtctcctctacggggcattgcccccacggggggggaaggtggcgcacttgtcggggggagccccaagnnnnnnnnngggcgcggcattcccccttcggttccggggcggagtctcccccttggcattcttcctggcccccggtggggagttctcccctttgtgctggggatttggtccggcaaggggtcttttagggttccagaggcgggggtccctcttctttctaaggaatagggaactaaggttttccctccccggccttgctcaggggctgccagaccctttttctgggagacacccatttggttctcagaacttcctggggctctgggaagagcttgagcagtccaggtcaggccaggccacctgggccagactcgctggagctgccactcccaaaggctgggcttgcatcccccaggagggtcggtgtcagcctcccctggtttctgtagaattccatgagtagttttggcatccacttccttgatgagctgttggttctctttctgtgtccagaccgggtgtgagttttccagtccaagggtgtcatcctgagtgaaaggagcctcaagtttgctggccatgctaggacttagaatcctgtgcgtctgtggatcccgcagaggtgtctgaaaagtcaccttcatagctttggccaggttcttgggtggcacattttctttctgtgacacacgaagaacagacgatcttccggtaacttctggtggcgaaaacaggaagtcgcaattttctgtatttttttcattgctgacatttttgtcgtttaagacctgcagactcattctgcccgcccgcccgttgccgggctctgagcccgcgccgccgccgccaggaaggaggggtccgcgtctgctgccacgccgggggccaagcctggctgctaccgccgccgcgccctcgtgccgaattcgccacccaggc

SEQ ID NO: 150117 - DNA, 389 bp, Homo Sapiens
aggctttttttaaccttgccgggggggaccccggcccgggggtttgatccccaacctcccgggggaaaagttttcaccatggggggaaccaattttcccccagggagctccaggaaaaggaatcgctagaccccttcttatccaaaggagagggcaccgtttttcctggggaagctgccagtatttgctgaagcggtccaggagctggcacaagctgaagaggagtggaaaccgggggagcaggtctggagccagtattcctcttggcacgcgtttgcctctagagtctggatgaagatcctcagactgaggtctacctcttcaacatctaacctcaagaaaggcaggacaaattccttcagcacctcgtctggctcaagaagagcagc

SEQ ID NO: 150118 - DNA, 951 bp, Homo Sapiens
tctccgcgttgccatggcccgaagcccctgttcctgcccctttctgtgctttttgtccttactgtgccccttccgggagggaagttgtaatgcgcctgtatccggtggcccggggtgttctgtggtggcttacttgtgcaacatggtggtgctctctgggataatggcacggacgcccttgggggtgcgaccagagattcttcccccatcgtgggaccgttcccgcgtccaggtacatacgccctagggtacatacgaagtgtgtcgtgagccctgcatcgttggtacatgtccctcagtgctactacctcacccccgctgctggaccagcatgtttcggttttctggttttttaaaatccccgccccccaataaaatatggtccactagaagaggctctgttgggtcagcgcttggtgtgaggagcgcttgggggatgtgggcgtgcaccttcatggatgaggatggtgtcgctcagtcagatctctccttcctgacccgtccttctcaggagctcttcccgttctcgactgagcaagtggtccctcctggcctctctctcaaagtcctcccttctgaaggccgaggaggcagagacaggagccccggaacctgcctctgtgaggggacagctccaggtggagtgggccgtcagcttcgaggcctcttggggtccagccgtcaccccactccccatccctgaacagtagcagggccctggggagccactgctagtccagagcggggagtgctgggccccgcggacaccctccggctacagcgtcttcatctggcgacggctccacatgcctcgcttggaatggaaatgatggaagaaattcctgagggagagacgctccacgtccaggcccgcttggagtatcctgtccagcctcgtgccgaattcgccacccaggcctcgctaccttaaaccgttatagttactgccgt

SEQ ID NO: 150119 - DNA, 974 bp, Homo Sapiens
tttttttagccattgacatcaatttattccttcaaataattgttaggcagtataaatgaaggctaatagaccatttacaaatgctgtttgttggcaaccagagccccctggagctgcctgtgtgcacggggacactagcaggcacagttgggctgcggtggaggaggagtttccttgagtctcgtgttctgctttgcagcagtgatggcaggatcagtctccaaactctctgacattttgtcgcagatgatatccacaaggcgctcaaatgtctgcttgacattaatgttgtccttggcacttgtttcaaaaaactcaaacccaagctgttctcctaaatgttgacctcgcttcagttgagatgacccgctcgtcttccatgtcacacttgttcccaaccagaataacttgggcattgtcccaagagtatgttttgatttgagttgaccaatcttgtactgcattgaaggattcttcatttgtaatgtcatacattaaaataaagcccatggctccacgataataggctgtggtgatagtcctgtatctttcctggcctgctgtgtcccaaatctgaagcttgattctcttttcatttttgaatacagtttttactttgaaatcgatcccaactgtgctgacgaatgcagatgtaaaggagtcatctgcataacggaatagaaaagatgttttccccacactgctattgccgatgatgagtaatttgaacatgtagtcaaagttctgatcagaggagtctttctggccgtacctggcatcttgggcagaggccatctgcatgggcgcttcgtgtctcattgttggcaaatgtcctttctctctggctaggaccgcactggtctgggcttccggtcaagcgtgcacagtcccggcgctccacgctccacactctgcactcttggggttcgctaaccggctccaacatcagaatggtaacatgttggagcggccgc

SEQ ID NO: 150120 - DNA, 802 bp, Homo Sapiens
gccgccggcaagctcccctcggcttctttttacggccagataccaagtcccccaagtcgagatttctcatttctgcccaaaaggatcctcaatgtccggagttactttgaagttcaacgatgaagtttccaaagtgttctaagatccttccccatcccacagcatgctctggggtctgagccgggagctgtctcagctgtgcagccacgtattctttactatcacaaaaggaatcgagaaggccgtccgtgccatcctccccaaaatctggagcactgctattcgccacttcagtttcgtctagcacactcatgtccatcatgcccatattctgcaggttctccagacttgcttccatgtcctcctgcccgtctctggaatcgtcttccaggccattatcttctgtgccttcctcctccatcttcagtcctttaacacatctcttggctgacttcttgctggtggcttctaactcgatgccaatttcatcaggatcttgcccctcttctttaaccgccttcttgagccgctccatcaggacgctcttgttgccgcccgtgtccaggttccgcttcttcagctccgcccgcagatcgatcacccgcagctcgctgagccgcctcgtcccagtctccgcaacgcccgggccgagagaagccgtgccagggcccgagtcgcccgaccccgggcagagtctccgccatcgtcgcgttcccgtcttcgccaccgactcagtcgcacaccgccggcagctatagcggccctcgtgccgataagccacccagcctcgtacctagccatt

SEQ ID NO: 150121 - DNA, 1115 bp, Homo Sapiens
  misc_feature (182)..(190): n is a, c, g, or t
ctgcatcccatctccgggcgagatcatagcgccccgcgcgggagtagtgtgtggtctcccccaccgggcgtgtttagctgctctataaacacaggcggggggatagcccccccctagttccgaccgcggaacccctggcaaataatttgcaacgtccccaggggagcgacaagcgagcctgnnnnnnnnnacgccagttcccagacggggccaaaggtttatctcggccccccctcaccaacgatggcctgcctagggcgagctgtccgttttcgcctttggcaagacgggctcctcccacagcgcctggtccacctgatcgtcggtgagcacgacaggcttgtacttctcatcgaagagccgctcgttggtctcggaaatgcagctgctggggcccgaccacccgcaatgcgccggcaggtgcaggaattcgtcgtcgttgatgtcgcagtcgcgcatccaggcccccagcacccaccagcgacccacgaagcccacgttccaggacccggccggggaagtcggtccagacggggctgcaggtagcggcaacgcgcactggtagaggctggcctgggcgctccgaagggcgcctcgtacaccagcgagcagagcacccaggttgacgtagcgcaggcggccacggccccgcagccagagcagcctctgcacgaaggcttcggactcagcggttgcgggtggccggcgccagcagcaggagggtccccgacgcctccagcagcgcctcctcgaaggcaccctcgctgggcgccagcgtgaagcaggccgccgcgccgcccagcagacccacatacacagcggcgcagccccggccgggccctagcctccgccgaagcgtccctgcaggcctcaggcgtagtccacggagcagcgcagcgggcccaggaccccagccgcgcccacactcccggcttcgccactaccgcgtcgcccgcctctgcgcggcgccgggaccaaaatctcctcagagccgccgcggccatcctcttccgtcttgggggtccttgctccgggaagaaactcctgatacccgacgttaagagcccgggagtctcttccctcgtgccgaattcaacacccaggcctcgtactaa

SEQ ID NO: 150122 - DNA, 545 bp, Homo Sapiens
  misc_feature (105)..(105): n is a, c, g, or t
  misc_feature (545)..(545): n is a, c, g, or t
aaaccgcggggggcgcctcaccccgcgccgccaggcggcggctcccggtgccgccgccccgccaggaatagccagggaagtaaacaacgtcacacgaacgtatancaaatattcatagcagcattatgcatgatagctaaaacacagaaacaacccaaatgtccatcaactggtgaatgaataaacaaaatgtggtatatatacacaatgaaatattatttggcaataaaaaaaagagtactaacacatgctacaacatggatgaaccttggaaatattatgctaattgaaagaagccagtcattaaagaccacatactgtaagattctatttatgtgaaatatctagaatagtcaattctacagaggtgaaaagtacatacattgcttggggctgagagtgaacgtgagaatggggcatggctgccaatgggcaagaggtgtttctttgttggatgatcaaaatgttcttgggttgtagtgatggttgcacaatcctgtgaatatactaaaaatgattaagccgggaccggtggctcacactgn

SEQ ID NO: 150123 - DNA, 177 bp, Homo Sapiens
ggcaggctttctaaagagaagttccatggcctccttcaaatctcattctagccccaaatacagctaaagagtgatcatcccacgggaaggaacactgcagggaggggaagacacactccactgcttatgctattcctcgtgccgatttaacaccccagcctcgtacctagccgtagg

SEQ ID NO: 150124 - DNA, 970 bp, Homo Sapiens
ttgtttagcagtggcccagggggtactgacgactcccgggggttttttccaggaaagctcacggggaggcatagacatgccttgagtatggagctttggcggtcagacagggcttgtttcctgcaggcacttcctcagtcatgaatgagagagacgatgtcaccactctcttcggccataatggcttcatctagctcttgggacagcttctggagatgctgaattccccgcccccacaggctctaggtcactgtcagactcgctgggagagcagaggggctctgttgaggagtaggggctccggaaggcagcctcccgccttgatcgccgtaatgggtgggcatgtgagcccatccggacagagaggcggtgatgctccttctcccaggggtctgcggctgagtgggcaggggcggctccagacagccgggtgctcttctggctcaggctgtgagttggggatccactgcccttctgtgctcctctcttccgcctcctggccttcacctgggtctccaccagccacttggtgccactttggcaggactcctggattctctgggacacggcacccaaagcactcttagctgagcgagctgcagcctggaggccctgctgacctggctctggggtttccaggcgtttccaggagggccctgcgcggaggttgaggttgacggctctcaggggcagcctcctttggaactgtctgcacagggaccccagggcccctacagaggtctcctgatggctgaccacaggctgcagctccttgctgtcctccagctgctcctggtgctggagagatctccggcgcacggaggtccccatgttctgccaccgagaagccatctgcctggccaagagtcttctctgtccactagaccccgacaccactaaggccgagcacagccagcagcacagctgctcctccctcgtgccgattccaaccaggcctcgtactagccta

SEQ ID NO: 150125 - DNA, 1597 bp, Homo Sapiens
  misc_feature (269)..(269): n is a, c, g, or t
gcgccacgtgggggggcctcccgggaacgcccaacaattgaccgggcaccagaggcaccaacccgccctctagcttgctcactcgcggcccctgctcttctttggctcgctcacactggggctgtagactggactgtcctatccggcattgtggctctccactggtaccaacttttctactgctctctatttacgtcaatagcatgatctggcattggtgtgcccagcttttgggagccccgcaagtgtagttccccatagtccatggntcagaggacattgaaagaaggaatgacttttgaggaggaaaaaggtctgttttccaactgttcacccctttcttttccttcaatcagtcttttgtcatccttgtaccactggaattctgctgaggggactgctgaggcttcacactgcagtgtccccttttgtcccacggggacacctgtacccttggcttctgaaatgtatggtggatagttcacggtgacctttactctccgtaccacgggcgcggccacgtcattggaggcactgcactcgtagtcccctgactgctccctggtgatgccctgaatttccaagtattcgtcttcactcacaaagccaaccgctttgggagagatgtgtctccaagtaaccgtaggctctggtctaccagttgctatgcaggtgaggctaatattgttcccttcattaatggagatatctgaagaaatctctacaattttgggagatacttgcacaatgaggtggaccctagaggtctttgggtggttgtctgtctgcaccgagcaggtgtaagggccctcgtcatacacatccacgttctggatctcgatgctgtactgcgtttgggtgttgctcagaaggaccacgcgaggatccaggcaccacttgtcattcccagcatagaggatggtgctgcggtttagccaggccacccgggtgacccggttgtccatagtgcacctgagggtggcgctctccccctgccggaccgtcacgttgtccatagctttggggaaggtggcatctccgctgcgcacgggcactcctgtgggtacaaggaacagcagcctgagagacacgaccacgaggcacttccagggcaggaacaggtacccacagacccccattctcgacagccacaacttccccgaactccggcagccgcacggcacacgccccccgggcgagcacaggaagtgggtggggtgcggagcgagcgcggggactgagcggtgaacccgcggcgaccgggaggcgcggggaggagaaaagcgcgcagactcctccgagtctaatattcctcccccaaatccagcctcggcttttgccagcctcggaaaaccggttccacggaggacggccaaagggggctccctcctcgctgcttccgccgggaaggtggccgaggagggggaagcgcgcggcaggtgaaaggtgtgggcgcgtctcaggagccgcttcttcccagcggcagttcagacacggcactttggagaggagtaagcactttggtaccagaaggggacggggtgggcttcaatccagctacccagaggcggtctgcagtccctcagttcgaacgggg

SEQ ID NO: 150126 - DNA, 706 bp, Homo Sapiens
  misc_feature (69)..(69): n is a, c, g, or t
cgcagctggagagaagttaggcaggtctaggaaagggcaggctcgagtgctgggcccgccttccccgcngggactgtaggcccgggggctccgcctcgtcgcagcggcaggtaggaggcggtgcgcgcggcccggcgacgggggatcctgaggcccggtcagtctcttgctctggggtcttgggtggcgggcggcacctccgcttgcagtgccggagccgcggccccgctcggaaaagggctgccgtcggagttagatgccggggactccgggccgtcccagcccccgggcctcagctccggcccgggcagagtcgctgcttccgcgtttggttcttttttccccgctgggagtgagaacaaggcgtccccttctactcacgtttgcctaaagcgggtccgacgtgttagcggaaaagtgggtggagtttctctttttgccggtgcagagagaacttgtggcgggaagttggggcgcggggttggccgtaggtccccggcgtgctaagggcggacggaccaggcggctgggccgcgctgcttctcgttaccttccgcagggtcaggggccgcggcggggttggaggtcagcccaggcacatgttaacccctgggtaccagtttgctcggaaactcgtgttgaggactcatcttagccctgggaagcctcgtgccgattcaccacccaggcctcgtacctagccgtg

SEQ ID NO: 150127 - DNA, 803 bp, Homo Sapiens
ccctgtgctaatgccagcccatttatctcggttaaggattcctctagtcaacatctggagtaaaatcattcttgttctgggatccaaacacctgttctacaggttgctctgtctgcccttatctttggatgcgatacatatctgcttccttttgtctagacttttcggtgactttatttatgacggaatcagtaacatttagcttatctaaattaattttattccccaatttccgtaagaccttgtctgctggagtagacattttggctgaactgctgtcggaggtctgtcgatttgcctgtgggttgcttcctccattccagacataacccttggcgagttttccaactccttcatcccagtcccagtcatcatcatcatcgtcataaccctcctcctcctcatcttctatttcaccttcaccattctcattcacattgtcttgaaggtcttcaaacagaatgtcatccttctctttgactgtcttcaagtctctgttttcactgtcagaggagtccgcgtcgtcgaattgcccggggaccacccggctcatgagaagccgccggtagtccatgactggagagcgccgccggaggccgccgctctgcgatggaaaggaacggctcagacggatgtacccacggccgatccaaaggccttggcgtggatatccgccttgcaaaccattcagaagccaacagtggccaccaccgtgcgacgggaaaacgggaccaacagatccaccaccccctcgtgccgaattcaccaccccggcctcgtacctagccttatgagtgtcccac

SEQ ID NO: 150128 - DNA, 814 bp, Homo Sapiens
aggaaggaaaaggcagcaatctttgctgttctgcagcctctgctggtgatactcaggcaaacagggtctggagtggaactccaacaaactccagcagacctgaagtgtcatctggggccatggacggagaggggtgggggctaccagtggacccactgactcctggacatcaggatgctctgccatggcaaaggtgttatcatccatgttcttcgtcttcagttcctcctcggcaggcctgcgcctcaccggcttcatgcagctcttcagctgcctggcctcagcctccacgggaccctggcactcgggctgtggctccagctgcggcagctgctgctgctggggcagcccttcggcatcagtgggtgtgggagcgggtgcgatccggagcaggactgtgtagttgcggccgtggttgttggcccagaaagtgccctcaggggtctcatagcgcaccacgaagtcgaggcgcgccccatcgcccgcgccctcagcaaagggcagctggaaggcaaagcggtcggtgcaggccgccgtcgtcgggcgaggaggcggatgcctggccgggacccaggccgagccccggatccaggatgggatctcctgctcctgttgcctcccgctcctgcccacggcgggctgcgcgggacgtagcgcgctgggtggtcgcaaaaggaagcccagccgtcgtgtgaggcccgcacgtgcaccgccttctcgaaggagcggttcagcacgcgtaccaacccgcgcagcaccggcaggcggcccccaggccctcgtgccgaattcaacacccagcctcgtacctagc

SEQ ID NO: 150129 - DNA, 542 bp, Homo Sapiens
ctggggtctggtggatggggcctccccagctaggagaaggttcggagaagtcctaggaggctccagggcgattctgtcctggccaggggcatggcctgagggaagcctcgctggggtcaggaggttgaggtggggggttgagctgagccttcatcctctcctgggtagagccagagctgagcccagaatgtcgggagtgcgcctgggagagcaggtgggaccagagagtgcctccttgcacatgctccaggtgcaggaagatggagtcctcgctcacaaagtacctgagcagcttcgtcatgtaggggactccgtgtgggatgatggtcagccgctccctgctcaccatgtggcacctgggtaggctcttcaccacaaaggtccctccggttgccgggtcctggaccagctgcaccttctcgatgaccccgaccaccctgcagcccctcagctgctccacggcagagctcagcgtgcgaatgggccggagcctcaggctgctgaaacccgcgctggggctggctccactgctcagcggccgc

SEQ ID NO: 150130 - DNA, 1098 bp, Homo Sapiens
  misc_feature (62)..(71): n is a, c, g, or t
  misc_feature (143)..(165): n is a, c, g, or t
  misc_feature (218)..(226): n is a, c, g, or t
ggggggttctggaagggacagtccactgataggggcagaggggcaccaggcaaggccagagnnnnnnnnnnggcccaccgactggtgaccatcatacgagattccggaggggcagcagggccaggcagggcgtctctggaggnnnnnnnnnnnnnnnnnnnnnnngacattcaacgtattcttcaagaacagggaagcaaagtccatcgatgtgttgnnnnnnnnnaaggaaaaactaaaaaactaaacaggaggaagaatcccgcccgcggatttagaagccagaggggctgccccagctgtggagctcgggggctgcgccgggaagggcgggcggtgaccctagccgcgcgcacttctaaagtggaaccctgtattgcatagaacgtccccacccgcggggagggggcagcaggctccgcagcccccgggggttggagcatggagggtggggggactgagcagacccccgcattcctgggtgcccgaagggaggccgaggccgcagccgttttcctgaaggtggcagaccaaaaacactgccctgggggtgaggattcggccagaccccggggtctgggctcagctctaaggacaaggacggagctgacggagcttccaggtcaggcccgaggggcggcgcgaggcaggacgtggctacggtcagactgagccctgagaaggggcactcgggtgccccaagggggtgtcttcaggaccccccacattggctgacagtgcctgtccagcccctctgcctgctgcggtggaaacggcttcgggccaggcggggctcctgctgtctcaggccttggtgtggaggggaggggcagcggcgagcccctggggtcagctgcagtttaaggtcaaggtcggaggccgaatctggccaccaggagtcctggacagacagacgggccttgcaggaagccccgattgtcaactatcatggggacaaggcaggcgcgggtgaagggctgggggatcccatggggtgggtgggtgagctgcctgccacctgcctgcctgacacctccagagacaggcagcccctcccttcccctcgtgccgaattcgccacccaggcctcgctacctt

SEQ ID NO: 150131 - DNA, 1448 bp, Homo Sapiens
gcctaggatcgaggccgggtgttaatcggcacgaggggagtgtataccatttaaaggtgtgcggcgggtctctgttcacatggctcaactggaaacctgtttcatgaacaagcttactcaggaaccatctggtggtattccagcacattgttcttcagggggacgactctaagtcgctttgtggtggcagcagcttagaatcagtatttgtggttgggaaagatggacttacgggagcttggtaatgcaggtggtgaaggagcaggttatgagagcacttacaaccaagcctagctccctggaccagttcaagagcaaactgcagaacctgagctacactgagatcctgaaaatccgccagtccgagaggatgaaccaggaagatttccagtcccgcccgattttggaactaaaggagaagattcagccagaaatcttagagctgatcaaacagcaacgcctgaaccgccttgtggaagggacctgctttaggaaactcaatgcccggcggaggcaagacaagttttggtattgtcggctttcgccaaatcacaaagtcctgcattacggagacttagaagagagtcctcagggagaagtgccccacgattccttgcaggacaaactgccggtggcagatatcaaagccgtggtgacgggaaaggactgccctcatatgaaagagaaaggtgcccttaaacaaaacaaggaggtgcttgaactcgctttctccatcttgtatgactcaaactgccaactgaacttcatcgctcctgacaagcatgagtactgtatctggacggatggactgaatgcgctactcgggaaggacatgatgagcgacctgacgcggaatgacctggacaccctgctcagcatggaaatcaagctccgcctcctggacctggaaaacatccagatccctgacgcacctccgccgattcccaaggagcccagcaactatgacttcgtctatgactgtaactgaagtggccgggcccagacatgccccttccaaaactggaacacctagctaacaggagagaggaatgaaaacacacccacgccttggaaccgtcctttggtaaagggaagctgtgggtccacattcccttcagcatcacctctagccctggcaactttcagcccctagctggcatcttgctcaccgccctgattctgttcctcggctccactgcttcaggtcacttcccatggctgcagtccactggtgggacaagagcaaagcccactgccagtaagaaggccaaagggcccttccatcctagccctctgcaggcatgcccttccttcccttgggcaagaaagccagcagcccccgaacggccccaaaaactttgccccccaaaaacaaagggcgatggaccccacagggccccctggttttggggagaaaaaagggcccccacgcaatatttcttgcgggg

SEQ ID NO: 150132 - DNA, 711 bp, Homo Sapiens
cacggcacctggatctcagacgcatccaacctcctgcgtttacggtaggtgagcacttggaatggctggatcgcttcatgacccggtcccaagccacggcttcggtgtccaggatgaaggatgtgaccgatgggagtttaatcttgtggatgcgtctgatgatgtccgggtacttcccagtgttgtcttcctgattcctgctgaagatcttcacctccccgccttccagggcgtggatctgtgccctctgcccgtcatatttgtagttcgcaggtgtaatgctgcctcgctcatagcgtttcaggacctcgctgatgccccgggtgggatgggccaacattggtttcaggggaatccctgggcatcagcttgcagtgctccgggagacgttccatggccgtgctccagcagcatcggggataattcggtccaggtcgggaacctcgcagaacgtctgcttcaggatcatgccttgctccatccagccacgtctttctggcctctgctgtcttgcccttcccagcatccatccatggctggtgggaattcttggcccgggggcgtgaggctcactgcctgggagagggcagccagcacctgactgctctgccagcccaaggcgcagccgtccgctcagggacctagcgatgatccgggcttctgagtggccctcgtgccgaattcaacacccagcctcgtacctagccagtt

SEQ ID NO: 150133 - DNA, 1432 bp, Homo Sapiens
  misc_feature (192)..(270): n is a, c, g, or t
cgacccggagtgttttgggtgggttgggacaagctcgtttcacccgggtgggggtttcaccggcacccgtgttccgggttcgacaattctggcctccagcctcttgagactgagtaccgggcagggccaacacacccaaggaaggtgtgaattttagtagaacagggtttgctattttgccagcctgttctnnnnnnnnnnnnnnnnnnnnnnnnnnnnnnnnnnnnnnnnnnnnnnnnnnnnnnnnnnnnnnnnnnnnnnnnnnnnnnnaggaagtattgttaaattgaaataaatgccaaatgttcctaccttggtttacccgaaacctggagctaagaacttcatctcacttttgacacccagccccagaatatggaagcccaggagagccaggagaatttatagcagaggcttaaagagaaagttatgatttgtttaaagtagagaataaggtgaaaaatagaaacctggtactctgtctggaagtcctggaagtctccttgcccaacctcaactggcctgtgggctcctgtgtccttgctctgggatgccatggtgaatgtgaaaacaggggaggttgtgtgtgggggtgggaatggcctgtcggttgcaaggcgagtcctttgctgagcccagcctgagacccagcttatgggctttatccaggtgagaaaatgctggggacatgtgtgcgaggtttaaggtctaccaggaaggggagaagggtgtcaggggaccagccccacaacctaggagaggattaggagggtccagccctttgggcagggaccagccctgaggcttaaatgaacttgcataggcacctgtgtatgcatctcctgtgcatgtatgcatacatgagtgagagagaaagataaagagagctaaagaggccccgctccccccgccgcaggctgccacacgtggtgcgatccgattctctctggaaaggaggagattctctcatgcatgggtgaagttgggccctccccagaagcctagtgactcattatgttaacgtgtggttgtgggggctggacatccttgggaagctctgaggggctgctgaagcagggttcctggtctccttcggaggctgggcctcccctcgctgggggctcacagaaagtcaaacagcccgaaattcttggctgctccaggcccagggtaaattgggggaggaaaaaagaaagaaaagaaatgtatcaggcctggaggtgagatgagcctgctggttagtagggttaggggtctgaaggaaccagcacgcagggcaggcatggggcaggggtagagcagagatgctccctggaagccaccagctgctcaggcaactgagggggccctctggcctctgatctaggcacaggcagggatgtcatggatggctattggagtcgactacagctttagttgcaggctgagctaa

SEQ ID NO: 150134 - DNA, 737 bp, Homo Sapiens
  misc_feature (710)..(710): n is a, c, g, or t
gcactttacctacccagcatttctgagatgctaattaaaagatgtttcccagaggggctgagtgccagattaggaacagcacgttcaaccagattaagttggttgatctgcaaagaggccaccgcttctcctcaggggaacagttctgagtttgggccgaatcctctcgtgcagctttttgctagtctcgttctctcagaaggcaaatgctgtttccgccctgggagaggagaagctggctttactttggaaccagcccccgagactgtggataaagctgagatgcaggggttcctgaggaagaggaggaggatcccgacttccttccacttttaggcctggccttggatttcttatttgcagtgctttcaaatgatgatgcatccacctgtatctcatcttcatcctgcagagccgcatccaatgcagcctggaccttgggggcaatggctggaccctcatagtctctggtggtccggctgggcatgtccagctctaacagcacaatgttttctgccctatatcgggcctctggacgaatcatcatggacattcttgcgtgctggctcaatggtctcttatatcccacggctgagactggccgcttcatcatctgctggttctccagtctggttataggatgtagtttccaatgatcttcctcttcatcaaagaaggctctattcatgtttacctcgtgccgattaacngccggcctctacctagccgtaaggtgt

SEQ ID NO: 150135 - DNA, 764 bp, Homo Sapiens
  misc_feature (245)..(245): n is a, c, g, or t
tctacaggctgtgtacatggtgaataactgtctccaagtcttcagtgttagcacacagtaagtccttggcgtcaagagattctcccccgccactcctctgttgttaaaaaccacacatctgtatcctaattcttcactaagatggatcatatgaaggatatatgactccttgcttgttcccgtgaggccaggcaaccataagatagtaggtctggtgctggcatccatataacacgtactgttangtcattagtcaaagccagttcccagtgaaattctgtcctccatctgcagttttaataagttcattcctgtactgcaccgggggcttcgaagtgatgaaaggtctaagcagggtctgtcctcgaccctcccagcaccagaccgtcgggtagtacgtttctgtaaccacgggacagtggtcttgaaggaagcggctgaaactctcacccccggtcactaactggggtttcttggcaatgctgctcaggtagtagaaggcataagcgacgctgaagcccaggataagggataagcccacccccgagccgaagaaccccacccggacttggtgttccaggtagagggagagctcccgggacaacatccgcaggtccatggccaggcgctgcatggcccccgagcgcggcgcgcgggtcctgcggcgggaggagagccggctggcgagcgggcgagagcgggcgagagcggacgcgccacgctgcctactccccctcggccgattaacaccgggcctctactga

SEQ ID NO: 150136 - DNA, 677 bp, Homo Sapiens
  misc_feature (391)..(465): n is a, c, g, or t
tgttgctgctgctgttgctgctgctggatatacggcatcaaggggtttttgttggggttggccactggtggtgtcatcctctgactcaggtctgcattgaagtgggtcaggggtttagtgttgccataagtcagaatattgtgctgtttgtttaaggagtttgtacccaagttatttggctgctgattgatcatattcatgtgattctgagggaggtagttattcattgttgtcttctgcaggttgtttgccattggaggcactatagggttttggttgttaaaggcttgggggtacatcattgggctatttggtttttctgcagtaaaagctgctccatatggactagagggaggtcctaagggagaccaatttgaagtctgatttgagnnnnnnnnnnnnnnnnnnnnnnnnnnnnnnnnnnnnnnnnnnnnnnnnnnnnnnnnnnnnnnnnnnnnnnnnnnnatgagtttggccctttgttgctgctgtgcagccatctgtttgagctgttctgctggagacatgtcagagctgggcacagccacaggccctgacgctgaaccggccactgtcactgctgccggattcaggagataaccatttccaggccgaggtggagcttggcctggagcctcgtgccgaattcacacacccaggcctcgtacctagccgtt

SEQ ID NO: 150137 - DNA, 1266 bp, Homo Sapiens
  misc_feature (186)..(206): n is a, c, g, or t
acaatgggttaacgggcacaaattttatgggcacactaaccctttgggcacatcctgcccgtccgccccggacccacattcccattctgacagatccgattccagtatccagaagggaataaaagactggacctggcatcatgaaaaggaactatcctttgggggctcccttccacactctgtccnnnnnnnnnnnnnnnnnnnnngttttaacccacgggggtgatctggctttgggtcaggaagagtgaggggcacctggcagggacggaccatcgagttaaggctggaaggtaggttgttgtgtctctgggggctgctggcggggaggtctcctggaagccggagagctcaaccttctcccctcactgatctgggacctcggtcccccggaccccttgatcgtggtccttgggccacccgcatctctgccctgtgccggtggtgctgacagtcagaaggcctggcctcacaaagaagctgccaggatctgcgacaaggggatggaccggaaatgagagccctgtgagcggagctgggaggggcctggagggtaggtgagagcaggtgaagtaccgacaggacgctggggtgggcggacacgggaaaggagaggacaacccaggcaaagacaggacacagttctgggaggagacacgtgggggcccggccaaggcggcacctcgccaccgcccagcctccattgcacgctcacccccatccctaaaggctgtggcacccccgcgggtcgggccgggcactgcactaaatacagcactgaaggcggctgtcccaggaagccacgggggcaaggggcagggctgggcagttacggagggctccctctcgcgctctgcttctcaccgggaggtgcgtggctgcaggggcctcaggccgggaccgtcacagttccatttcccgcccgctccccgccccagccccgcagtacggccccgccctccgcgtcggccagtgccggtgcagcccgaggggcgcgcaggcgtcacatgatggcgcagcggttgcggcgcagcgcgccctggaagcgcagggcagcgtgcacgtgcttgcaacgggcgcagccgacgctcttgagcagctcgctgaagagcagcaggatgtgccagttgtacttgccgagcattccacgtagccgcacttccaggtcttgcgtaccaggtgcgacacgttccagcgcgggatcacgcgtccgcgctgcaggtcccgcttgtgcccacgatatgcctcgtccgattaaacacggct

SEQ ID NO: 150138 - DNA, 780 bp, Homo Sapiens
cccgtttccccccggctccacctcccaatcatccacgtcagagacttgtataaggcaggacgtgaacctgttcatcctcaggttttcccgccaattctcgattgtcttctctagtgagagtgcataccaatgtgctgccattctgcatgtttgtgcaagtctctgtgggcatgagcacagaagtccatacatgcaagtgacccctgagaatggacggccttccttcagacccagacggcactctggtgctctgtgttcatattcaatctgattattatatgcatcaggtgcaagtttcttatatgttggtgccataagagtggacaggttttgcaaatgagactccagtttctcttcctcttttgggtcatccccaagcagcttaaacttccttgggatcttgcttctggcaaacttacatccattgtagtacatgctccatgaacaaccaaaagagaaggaggcaccacaggtttctggatccagcccctgacaggcgcaagttctctcttcattcaaggcacaccggcgattggtgagcgtgccgtatttcctcagcgtctcggtaagctccgagtagagtttgtcagccagagacagcgggattccttcccacaccaggatgagaatcacaatcactgcagcctcacaggtgtggccagctcgctcccgcaccaaacacagtagcttctcttcactgctgcttctgcgaaccacccacttagcaataggacatcctgcctcgtgccgaattcgaccacccagcctcgctacctagca

SEQ ID NO: 150139 - DNA, 845 bp, Homo Sapiens
catcaccacacttgcccgccaccagcgtggtcttgtcagccagaagctttctcaatgacttctatcagctgatccttctggtcagagtccaaactgtagagtttagggatggcgtgggcagctgttttcccgcacatagggtgacatgtccgaggcggcttccttgatagctagcatcatgatgggcactatgatgggcacacggatgctagagaggacatcggagggcactggcacgtatcagctgtttgggatcctttaggccacgttggaaggtggagatgtgacagcagggccagtgtcttgctgctcctcagcgtagcgtaccaggtacacatagacaaagcttcttcacctctatgttcttacaaggccacagttcttcaccaccgcgggaaacaggtctgaagcattctttcctcgggcaatcatcgccacaatcctcttcatggcctccagcttgagagaatccttgttggtgtccagcatctccttcaggtcatcatgccgcttgtagtcaggaggagaagatgccagccagcatcagcaggggtcgtggccagtactcgggctcccacggggccagcaggagccagcaccattgtcattcagcatgtaggcagggggcaggccagacatggggcaggcacagggagacttcgccgaggaggaggttgcggggcacggaggccggctggagcggaggaagggaaggcgggccaggtccaggtccagggctggcgaaggcggcggcgcggcaggggttcagcagaggctgcagtgtgcagcggcggagctcctcgtgccagattgagacacccagctctcgctacctagcagtatga

SEQ ID NO: 150140 - DNA, 756 bp, Homo Sapiens
gggggcgttgcggggggatcccacctggatgcagtcagtaaccaccatcggatcaatgtcaaatgtgtcgttggccgggtccacgtggcctcggtggtagtaccgctggcagagagcaagccctgagccattggtccaagggtcacccccaccacggacatacgcataccggcccagtgacacgtcaggcaacgccaggtactggtccacagcatggaagatggcctggtacagctgctcccgcgtgtaggctgcgaaggtgtcatccgctccgtccgagtagcccagcaggaagaggtgtcggaaggcgatggtgttctcttcccggaatgtcacagccagctgattactgagcccaaacaggatgagctgcaccgtgaccaccaggatcttgaccacttgcagcatcagcttgcagggcttgcggcccttggctcgaaacttgtcgcagggactcatgaaaaagtatttgagacgacggcgaaggtcttcctcttctgggggtgtcggaggggccggtgaaggccccgcctgggtcccatacccggggttgggggtcagaagccgctcggtctctgagccgcgcggacccgccggggctgtcatgctggggcgggagcgcgggacgcaggcgggtacggcggggcagcctgggtccgatcgcccgccgctgtcactgcgacctcgctccctcgcggcgcggcttcaaacccccggcctcggccgaattcaacacccagcctcgtacctagccga

SEQ ID NO: 150141 - DNA, 1132 bp, Homo Sapiens
cggtccggaattcccgggatgctgtccatcagcaccaaaggccgcgggcgggctcagggcatggggccgcggttctggggcggcccgagccccggctcctgcgccttccccttcctcaggcccagcccgagttcccggacgccgcgggactggagtgccagccggtgttggacgtggagcggcgccgccaccgcgccgacaccattctctccggcccagcagcccccttcctcgcacgacggactttccctggaccccagtcagttggagcctctggcgccccgcaaccccggcccctcgggcctctgcacagcctctttcactcagaagctcaggtcgcctccagcccagcactatgccggggactgtggcaacactgcggttccagctgctgccccctgagccagatgatgccttctggggtgcaccttgtgaacagcccctggagcgcaggtaccaggcactgccggccctcgtctgcatcatgtgctgtttgtttggagtcgtctactgcttcttcggttaccgctgcttcaaggcagtgctcttcctcactgggttgctgtttggctcggtggtcatcttcctcctctgctaccgagagcgggtgctagagacacagctgagtgctggggcgagcgcgggcatcgctctgggcatcgggctgctctgcgggctggtggccatgctagtgcgcagcgtgggcctcttcctggtggggctgctgctcggcctgctgctcgcagctgctgccctgctgggctccgcaccctactaccagccaggcttccgtgtggggtccactggggctgttgcttggggggcggcctgctctgtgccctgctcactctgcgctggccccgcccactcaccaccctggccaccgccgtgactggtgctgcgctgatcgccactgccgctgactacttcgccgagctgctactgctggggcgctacggtggtggagcgactccgggctgctcctgtgcccccactctgctggcgaaagctgggcctgctgtcactctggcccctgctcagtctgatgggcgtctggtgccgtggagggtgacagctgagggggactcccacacggattggtgctcacggaagccaacgggactgtgcgggt

SEQ ID NO: 150142 - DNA, 791 bp, Homo Sapiens
ctaaagccagcaatcaggccctcaaaccgagcccgggctccagtaaatgggctaaaaaggtcccacgaatcccaaaggcagaacttcaggagaggtgcctggagcacgccttgcatccaaccacataccctacaagatacccacactacattggagaagcaggaatctaagccctccaggcagtaaggcttgtttcagaggcaataacaaatgatgccaggaggccaccgcggcacctctggaagccaagaagcctgccttcttcctgcctggcgcagacctgagctcctcccctatttctatatctgcaagggactctgggccccatgacaggagcccatgtatgcaggcagggttgaccaaactagcaccaggtaggtgagggtcaagaaaaatgtgctcctccctggggccagggcccagagactctatagatcccatcttcccctggtagcacccttggagctcagcatggcagagtgtgccttctgaactcatgggttgcaattccaagtggcacagcttctgctcgtcctcctctgggaaggcctagatcagagaacacagccaagctggcttcagccttctcttggctcctgggtctggcctggagccggcaggtttccataccagatgggtggggggccttgcactgagcagccctggagaggccaccagggcatccactgaggctgctaatcggaagacactttgctcacagtcaacatgtggttccccgatggttttgcctcgtgccgaattcaaccacccaggcctcgtacctagctgat

SEQ ID NO: 150143 - DNA, 558 bp, Homo Sapiens
  misc_feature (466)..(466): n is a, c, g, or t
acccggccactaatatacttttcataatgtcattttatactattattatactaaacacatattttttgtgattaagtaattttcagggatagtaagatcttgaagaagatgaaaatgtgacagaatttttctcacagatctcaaacaaagacttcctgaaatcaccaacagtcaattccattatccccaccaagatactaatgggctttttcttctgagtgttccataggataacagctttacccattatcctgccccatattcaaacattccctactgaatcattaaagaattatagggtaagttggcctaattagtatctaaattgtatttcgttatgttatagaaatttggagctataataaaaaacccagtttagacactgaattcagcttaacatgatttaacatataaaactgtttgttgtattttcatcttttccacccagccacctgactcccccatnttagatcctttgagccctcaagtgctattcataacatggttcctctagcctcgtgccgattcaccacccagcctcgctacctagccgtaggt

SEQ ID NO: 150144 - DNA, 423 bp, Homo Sapiens
ttatcgcttaggtcgaggccgcgcgtgaaatcggcacgaggtcgggctcggggtttcaggaccccagagggcaggtgtggctgccggggtgctcttgtgggcaaggtgtggcgtcaaggcccccagcaaggttgggataaagtttctctccgaggcacagactgccgcctgcgggctcagcatttacctctcccttcctccttcctaacgcaacttcagcggagggctgagggctctactgcgcattacctggaaaacttatttcactccacggccctaagaggtgggccttattattagccacggccagggttagggtgaggccactcctccagggcagaatttcagggggtgcccacccccccgccctaaatcattcagcaatcaacaataaattatagttcaacgcaatatatcttatct

SEQ ID NO: 150145 - DNA, 853 bp, Homo Sapiens
ggcctgccttggaaggaagtgtcggcgggtaggttcagctatgcccgtagtacagggattccccgcaaggccagcctcataagggttgctgtaccgatgtgatgcataagtgactggggccagcttgtggagagtgctgcacacacgttggtctcatctctgaggctcctggcttctgcagccgctcagtgtatgcccaccagtcttcctgattgtctccacatgccccacaccccgtggtagaacaggttctgggcctatgcctacacttgataagcatttactgttgcataggctgtgttctctaagtggctcatgacgaccctctgaggctgcatactatcaccagcctatcttaatgaaagggagtagtaggggtgaggcacaagtcactggccgaagtgcagagctgcaattcaagcccagaatattgcctggtgtgagctgtggacacaggcctctaaagccaccaagcccactgttcctctccaaagtgtccttcagaacacactttggaaatgctgcaccagcttttagagctgcgcatggggtgctactcgccctgcagcaagaagtggggggtgatacggcttttttgccagcaagctgctctgtgaccttggccaagtggcttgccctctcagggtctcagtttgacctgtccataaataatgtaaaggggacaagggaagatggccccatgggcccccttctgccttcatggtctctggctggactctgattctcagtattaaacaacactggttccatttattcctcgtgccgatgtaacacccggcctcgtacctagcgctatgggtgtggtgtgggagggtggtggcgggggggagga

SEQ ID NO: 150146 - DNA, 657 bp, Homo Sapiens
gacgctctctcctgtggggagggggatgaagtcactaaatgacaagagtcaacagccaatatttccattttcaggctgacgcaggtagacacaggacttgtctctgaacacctcgagcaaagaaaagctcattaacatgacaagtgttgatggtgcctccctgttcccatcctgtgggcacaccaggccaaactattggataaaaatcccaccatccatagggttaagccctgttgggccacagtttttcatcttacccagcatctgtgtgctttacagaagtctgggccccacagaaaagaaaccagcaacccggtgaaaggccagggctcacatggccagacacagggctgtagcctcttggaggtgggtaggggcaccccctccccatcatatgcctacaaggagcctcctgagcccagccaggaagggcagcagcctctggcgaggaactgagagcaggaggcaggctgcgcccccacagggaggcacctccagcagaagccaagcagctgatccctggaagacacagatcccaaagggaggcagaaggcagaccgacgcgtggtcgacgatatcccggataccggaccggtacagcgcgtgcggagagttttaaaaccacttggggtctagtgagtgcacctaaggtcgccg

SEQ ID NO: 150147 - DNA, 724 bp, Homo Sapiens
gtgatgaaccaggtttcggccagctctctccctcaccagtgttctggaggctgaacttggggacagtcaactgcaaaggaaagtgcatggggaggatcttgttgttccgcagcacacagcaaaccaccaccgtcttggtctggatgttctacaaacttatagcggtgcccctcacggatgaagtggaggtcgtatgggtttctcggtggagggcttggcacagtcacattcacaggaagcctggttttctccacaatgcttgcggatggtgtgttcgccctcttgcatctgaagttccaggggacttcgggctgctaaatctgcccttgcactggaatggaaggctaatgctttcgttggtccggtgattcatacaaatgaggcacggcattttgccttttcccacgcttgctgactggaattgagcttcccaatctttttgaagattgtgttgagtcgtgacttttaccgttgaatgtctttgcataaaggatttctgcctgccccattagagtgagttcatccccagtacacagggtgatgttgtaaacttcagtgtcttcattgcattcacctgaagcaaccttcacgttgaatgtgatatcctccatgacgtacacgcgttcaggaaatgccttagccacctcctccacactgttgatatattcgcactggctcctttcctcgtgccgagttcaaccacccggacctcgtacctagccta

SEQ ID NO: 150148 - DNA, 686 bp, Homo Sapiens
  misc_feature (13)..(13): n is a, c, g, or t
  misc_feature (109)..(109): n is a, c, g, or t
attggtgcctgtntcctggcctgggcccagcttcttgtcggggctctgctgagcgagaccgactgccgggcccgcagccccttctggaaggggtcctgcaccccggggnctgtggtcgaatgatgttgaagaggtctggagaggccatcattaatggtggtgtgcatcggggctctcccttgtggtggtggagcgggcccaggctgactcactgtaccctttctgggccatccctggtgacgtccatgttatgttggctggtcggctttggggaggggcttcctctgcagcttgggagaaccatacttgggggagcagcatgtgcgttcaaacttggcctgcaccttctcgatggcaggggccacctgtctgctcctaaggctccgggaaggagacgacacgggtgtagcaccgcccccagcctttggagtgagacacttgtgggggctgctggtgacaccgctgccacgcagggcttcagtctgcaagcccacactgatggtctgaacagtctgggtccccatcgtccgggacccattggtctggcaggccatgtccattgacttgcagctcgccagggccggagcagatggcattcctgacagagaaggccacctccttcatgtcatcactcaagttcttgcctcatgccgaattacaccacccaggcctcgtacctagcctat

SEQ ID NO: 150149 - DNA, 735 bp, Homo Sapiens
  misc_feature (28)..(29): n is a, c, g, or t
  misc_feature (38)..(38): n is a, c, g, or t
  misc_feature (128)..(128): n is a, c, g, or t
  misc_feature (150)..(150): n is a, c, g, or t
  misc_feature (159)..(168): n is a, c, g, or t
agtgagttcaagtccctgtctgcacatnntggtgttcntgcacagtgccaataatagtgctattcaactactgggcttgaaatatatattcactaaaatgagggagttctcaggaagtggcaacttgnaagatttgcccctgcaaagtantatgcctcnnnnnnnnnntattagcaacaaagaccccttacatgtatgccacactccctgccttcaaagcttcctcaagaaccaggaagtcccgttgactgatctgtttcacagtggttccctggccattgccctcctgctgtgaagccactggaaacttccctcatttgctattatttgttacaggccccaaagtcagaatcactcattgctaagtgttggttttcaggctcatgcagaagcattttcatttgtgtcctttttcatctgactctttaaactaatccttcttgacttcagatctttgcacaaacctcccgtgtcatcatcggggagctctgggcccagagcaaaggtaggaggcaaaaagccccaaatctgcacgttttatttcattggtacatgtatttaatccatctgcaaactattcattggatagcattgtaggcttccctctctgggaacactaaggtatgtgtattcaacagtggaaaataaacataagattttattacaaagtgccactgccgctcctggcatgagtacctcgtgcggaattcaacacccaggcctcgtactagccta

SEQ ID NO: 150150 - DNA, 703 bp, Homo Sapiens
  misc_feature (396)..(396): n is a, c, g, or t
cctccccatagcgccaagtgcttggggggatagaggtagccggccatcggggccagcgtcagagcgcagagcagtcgctgactgccagctggacagagaagaccaacggcggggtgccatgggcgctgcttccggatgctgaagcggtacagggccaggccattgctgccacggccaccaggaactcaaccaccagtatgggccacaggaagtcccactggaacccactgagtttgtcgtcggcagctgccaagaagttggcagggcaggacttggcacctgtgggcagaaggtgtcaccagctgagccctattcccccataaggcggctcctgctaccccaagagcccacgtctgccatggcgtggatccctggacacgagttctttcccctccntggagggggaccgggctccactcctttatgtggacaggattgaggactcagagccagggttctgcattgggccccaatggaccagcttaggcgggccaggcagtcttggagctcaaggtccactggttacacagacagcggccaccctactcccccaccacacctggccccatctagaggcctcctcccccaagtccagccccagcaagcctgccggctccacttcagatcgacgcgtggtcgacgatatcccgggaatccgaccgtaccagcctgcttttttaccaactgttctatattccacatt

SEQ ID NO: 150151 - DNA, 631 bp, Homo Sapiens
tacatacggctaggtacgaggcctgggtgttgaattcggcacgagggggaaagacattaagttcggagcagcccaaggctgcggatctagcctttctccctccggtctccagacccacgcaggttaaggcagccaagcagagacagcggagccccggtgcgtggttcaggcctggtcaacaggtaggagggccagactgggggccaggcacagaggagggcaggcccgcccgcaccggcgtccagggtcccgggttccgggtcccgggactggaggaggtcgccggcagcccgcccttccagaggcttgagattgggtggacgagacctgaagatcctctcggtctggaccccgactttcgatctgcttagagacctaagccgcgagcctttgcccacacggagaaacgtactatctaatatctaacaaccctgtactgcagtgtctggaggttgcgggaaggagacagtgtctccctttgggaaaactactgaggacttctgtatatcctacttcttctggactccataagttaccaggaccgaatggaaactgcgaaatagagaaaaggtgccgcttgcccctttaactccagaaaagggtggctgcagatggagcagcttggacttta

SEQ ID NO: 150152 - DNA, 952 bp, Homo Sapiens
  misc_feature (189)..(222): n is a, c, g, or t
ctcccgttattttcgcctcttccaccgcaaagggtccaaaacttcatacccacacttcagtcctgaatgaggacttttttctttcatatgcataatacctctgagacttagtgaaataatcttcttccatcctgggactcgggaggaactcgcggccagcgagcttcagttcttctgatacattgaagnnnnnnnnnnnnnnnnnnnnnnnnnnnnnnnnnntgtcctggagatagctagacatccagggctgggagctgggaaaatcaattggcataaggccgctgccggcgggcttcccgcaacgtaaaaaataaagtccaagctgctccatctgcagccacccttttctggagttaaaggggcaagcggcaccttttctctatttctcagtttccttcggtcctgtaacttatggagtccagaagaagtaggatatacagaagtcctcagtagttttcccaaagggagacactgtctccttcccgcaacctccagacactgcagtacagggttgttagatattagatagtacgtttctccgtgtgggcaaaggctcgcggcttaggtctctaagcagatcgaaagtcggggtccagaccgagaggatcttcaggtctcgtccacccaatctcaagcctctggaagggcgggctgccggcgacctcctccagtcccgggacccggaacccgggacctggacgccggtgcgggcgggcctgccctcctctgtgcctggcccccagtctggccctcctacctgttgaccaggcctgaaccacgcaccggggctccgctgtctctgcttggctgccttaacctgcgtgggtctggagaccggagggagaaaggctagatccgcagccttgggctgctccgaacttaatgtctttccccatgtccatccctcgtgccgaattcaacacccaggcctcgtacctagccgtacgtt

SEQ ID NO: 150153 - DNA, 545 bp, Homo Sapiens
  misc_feature (510)..(510): n is a, c, g, or t
gttggcatcggcgctcttcggctggatcgggtgcgctttccttggcttgatcctgtttgcacgcgttctgccggcgttgtgtctcttggtcgggtcggctggcggggcgctacgccccgtgtgcccatctagggtgacctctgtccctcctgtgcgctgtcctgctttccttggcctctgtggtcctctgtgtgttcgtagtcaatattctcaagttgtcggcctctgggggcgcccggtccgccttgaccttggtgcgccttccccgggctgcatctcccacctcccagcaaacaagctcttttggctcagctcccgcctgcgtttgtagaccccgaagtttctgcaaccaagctcttcagacccacatcccttctcccagtgactgaacagtcccagctccggctggagaagggcgtctgcagaccccgctgttgcctcccaggggagtctccaggcccagctctcgccccaccgcgacctccctcgtgccgaattcaacaccgcagncctcgtacctagccgtatgttcgctggtggtgtgt

SEQ ID NO: 150154 - DNA, 696 bp, Homo Sapiens
gaaaagagttcaaccagcccatttcctggggcctgggtaaggctacccgctggtatccaggcacttcggtttaaactcccaccttctcaacccttagacctaggaacttaataattgaccccccctccctaattcttccctggatgtctggtaacaggggtgtctgcactatcctccacacccatccccaactcaaggggggctttacatcattagccccaagtgaaatgtagggaaggggaaggacaggaccatgcaggagtttcctttggccacacctttctcctcagggagtggcgccacctccatggctcaggttccaagatgtaacattcacttggcctaggcacaggcaggtgaccaggcaaaggtcagcaccaatggtcccaaagagccggttgccacccacttacctagtgcccacaccaaacccccgcccgcctactcctgtgctaccaacatagcacacgaatttcaagtaacagcaagttgtagcagtagttgtcactggctcacagcagctcactctcaacctgaggaaggttacagtagatcagtcataaacaggtgagggttatgcaggcactgaggccactgatatcacccacccacaacttaggaatcaacagtgggtccctagatgtaagccttttccaatttgtgacttgaaaatacaaccagaaagaaattatttat

SEQ ID NO: 150155 - DNA, 750 bp, Homo Sapiens
gcttaatacacgtcacactgatagctcttcccaccgacatgcgtcctctggtgcatgatgaggggagacctctggatgaaagctttcccacaatgactgcactcctaaggtttctctccagtatgtgtccgccgatgcactacaagttgagatcgctgccggaaggatttcccacagtcactacattcatagggtttctctccagaatgaattctgtgatgggaaagaaggttagagctccctgaaaaggctttcccacactgactacactcaaaaggtttctcaccagtgtgagttctctgatgcatcacaaggtaggagctccttgcaaaggctttattgcactgattgcatttgtacggcttctccccagtgtgaatttgcagatgcctgatgagctgagtgcttcgattgaaggcttttccacactcgttacattcatagggcttttctccagtgtgagttcttttatgtgcaactaactgatagctttggctgaaggactttccacagtgagtgcaatcgtacggtttctctccagtatgaattctctgatgtatgacgaggttagagttccatctgaaggatttcccacattcaatacactgatacggtttttctccagtgtgaattcgctgatgcgtaataagtttggaactctgggagaaggatttcccacacaggttgcactcatagggcttctctccagtgcctcgtgccgattcaccacccagcctcgctacctagccc

SEQ ID NO: 150156 - DNA, 753 bp, Homo Sapiens
cgtcccgatcggcatccgtctcacttccgctgtccacccgtacgtcctgccgcttgttgcatgtgctccacagaggcccccagaggttctcccgcagccccgatgtggcgctcagggatgccccggatccgagcgacatgaccgcatctcccggcctgtcatgtgttccagcaaggcatcaaactgcggtcagtagccgatccgcttgccgcacctttccgacatcagagctgattctgtgacccccgacataaggcatccccatgaagtgaggctctcctccccggtcagcattttgaaagtcgtggtcttcccggctccattgaagcccatgcaggccgaagcactcccctttctgcaccgcgagggagagcctgtccacggccaggaggggcacccgctgctcgtacaccttggagagctccttgataatcagaggtgtgtggagcagggagtccgggctggggccgcgatcgcgggtcctctcgtccgctacatcttggtcctcaggaagcacaggcatccgggtgtataattctgtcagtgtccgcctcctccggagggcgcagaggatgcaccctgagtctctgaagcaggttggtctcgatgaggaagagcaggatgaggtaggcgcatccctgaggcggccatggaggccacaaaccggccgacccccggggcgctccaggcatagaagttctacctggtactggatgtcctcgtgccgattacaccccggcctccacctagcct

SEQ ID NO: 150157 - DNA, 790 bp, Homo Sapiens
gcgagagagtatgaagtcacggcgcgccgaattcggcacgaggccccctggggcaactaaagacatcttgagaaaatgtgccacctctcagggtgtgaggaactacagtgtccccataggcttggactccagagtcctcgtggatttagttgtggtgggatccgtcgccgtttctgaaaaaggctggagaatcgggaagggagaaggctacgccgatctggaatatgccatgatggtatccatgggcgccgtcagcaaggagacgccggtggtcaccatcgtccacgactgccaggtcgtggacatccctgaagagcttgttgaggagcacgacatcactgtggactacatcctcactccaaccagagtcatcgccacaggctgcaagcgcccaaagccaatgggaatcacctggttcaagatcagcctggagatgatggagaaaatccccatactgaggagcctccgcgcccgagagcagcaggctgggaaggatgtcaccctccagggtgagcaccagcaccttccggaaccaggctgccagcagacagtgcccctgagtgttggcaggaggcccccggacacacccggaccagaaaccaattccatggaggcagcccctggctccccaccaggggagggtgcccgcttgcagccgatgtttacgtagggaactccccgggaccgcccggtgatgactgagagagcctggggaattcggtctgcctgccggtactggggccggggagacttctcatacggttgcgcgcggtgtctgtgtgctgcttgc

SEQ ID NO: 150158 - DNA, 759 bp, Homo Sapiens
ggggattttcgtccaatcatgctccaggctgatcttgaaccaggtgattcccattggctttgggcgcttgcagcctgtggcgatgactctggtttggagtgaggatgtagtccacagtgatgtcgtgctcctcgacaagctcttcagggatgtccacgacctggcagtcgtggacgatggtgaccaccggcgtctccttgctgacggcgcccatggataccatcatggcatagttccagatcggcgtagccttctcccttcccgattctccagccgtgtgtttcagaaacggcgacggatcccaccacaactaaagtccagcgaggactctggagtccaagcctatggggacactgtagttcctcacaccctgagaggtggcacattttctcaagatgtctttagttgccccagggggtggtgtgatcttattaaacaatcccgttctcagtcgtggtgttggaaccaacaatgtttttttgctttcaaggacgaagaagcgagcacttttctggggggcatcaggatttactttaatggtcctggccgttttgaacgcctgcaagcgtgggagttgctcggcagcatgagaagcgcccttaaagcttgggtatcctgtgatgaacaggtcggggaaagtcagctaaattttgtgattccatgtagccccaaatttgttcacgtatgtcctgtttggagacacctactgccctcggctcccctcgtgccgaattcggcgcgccgtcgacttcatactct

SEQ ID NO: 150159 - DNA, 921 bp, Homo Sapiens
gtgcaccttcccctgttggggagccaggggctgcctccatggaattggtttctggtaccgggtgtgttccgggggcctcctgccaacactcaggggcactgtctgctggcagcctggttccggaaggtgctggtgctcaccctggagggtgacatccttcccagcctgctgctctcgggcgcggaggctcctcagtatggggattttctccatcatctccaggctgatcttgaaccaggtgattcccattggctttgggcgcttgcagcctgtggcggtgactctggttggagtgaggatgtagtccacagtgatgtcgtgctcctcaacaagctcttcagggatgtccacgacctggcagtcgtggacgatggtgaccaccggcgtctccttgctgacggcgcccatggataccatcatggcatattccagatcggcgtagccttctcccttcccgattctccagcctttttcagaaacggcgacggatcccaccacaactaaatccacgaggactctggagtccaagcctatggggacactgtagttcctcacaccctgagaggtggcacattttctcaagatgtctttagttgccccagggggtggtgtgatcttattaaacaatcccgttctcagtcgtggtgttggaaccaacaatgtttttttgctctgcagcaccagcagccgaacgccttccagtggtttatcagggtccactttaacttcctgtgttctggcaaaaacgtctaggtctttgatgttttggcaagccagataagaccccttaaagttgggtatcctgtgatgaacaggtcggggaaagtcagctaaattttcgtgattccatgtagccccaaatttgttcacgtatgtcctgtttggagacacctgccctcggctccatggtgatgcagtcgc

SEQ ID NO: 150160 - DNA, 821 bp, Homo Sapiens
  misc_feature (786)..(787): n is a, c, g, or t
tagggctccccgtccccgcccaacccccactggggaccacgggcacgagaatttcggcctccgtaccagaagcccacaggccaggaccttcaaaaaccgacacccctggtcaagtcaccaagtgccccctgccacaggagcccagcacagaaagggtaccatccacgtgcagaatcctcactccccaagagcgggcattggtcaggaggctgctgctgcccccactgcctcctccactgatgctcccctgaaattacgacacagagtcaggtaggagcagagactccccaaggcctgaaacgtgaaggggacagatagaaattgcttctgggacgcgcctgagtcatccatgggagggactgcagggaggcaggtaggagagagagtacagctgcccagagagtccatcccaacccccaggaagacatcctgtcctccacatggccacattgggagaggaaggacccctggtctgcctatacattgtgctctggccacctcgtgaccaggaaggaacagactgccttgctgagacgagctgttcgttgggagggcctctgcgaggaaagctctcacgcacacgtaagtacacaacaaacacggtgaccatcactcctcactagagcactcgaaactatgctagctgcagatcttccccctccactggctcagtccagcagcaccacctcccccatccccgccatgtacccctcctgatgtcaccagcatgactcttctcacaagatcacccttaactcctcctcctgccgctaaacccttcgtgcnncgaattctaaccaccccagcctcgctacctagcc

SEQ ID NO: 150161 - DNA, 967 bp, Homo Sapiens
cttccggctaccctgccgtgagggccttgatttgcccccgaaggagtacccggcacttttgttatcaagctccgaatcgaagcatcagagatatccaagacatttcaccagtccgtcatgcgtcctcgggatgatacatctgtgttggtcttcacgctccaccgcccctcgtcaccttcgcccacttcaccagcatcaccctgaagttagtgccacccaggtccagggagaggaagtccccgacttctgagccttctggggtggagcgcacgtaggtggcagcatcttcacactggcctcttcatgggtctccagcctcaggccgcggtccatctccttctgcatccgtctcatcaccttcttcaggtcctcctcctgcagctggaactctgccaggatctgctctaccttctccttcttggcggcctccatcctggctctgtcgtccagcatctgcacagcagccagcgtggggagctgggacccctcagccttccccagtaggcttctgaagtggaaatatccaaggcttctccgccgcaggggtcacggcccgccctgggtccctgggagaatgtggttctcctcgggctggtttggggtttgaggttcagtcacagtttcctccttttcattgttctccaacgagtcggcaagcattcccttctggacccttcctcactgagcctggatgttctccaggcagggccattgctgggcgcttgggtggcgtcctcagcgctttctctcctggttgtgttgagctgtggggcttagtgtccttcagacagattcagtgggaaatgtcctctcccttctgtgacctggggacagcttttgagtccttaggctgcaggtgactgtgtctctcacatcctagcctgcttacctggggctcaggcgccgctcaggcatttcctgctccctcgtgccgacttctaccacccggcctcgctacctagccgtt

SEQ ID NO: 150162 - DNA, 1417 bp, Homo Sapiens
  misc_feature (1230)..(1277): n is a, c, g, or t
ggcggaggcggcgatttggggctgggggccgccgtccccgtggagctgaggcgggagcgacgcatggtgtgcgtggagtacccgggagtggtgcgtgatgtggctaagatgctgccgactctgggcggcgaggaaggcgtctcccggggatgtctgacttccagtacttggctgtgcatacggaagcaggcggcaagcatacgtccatgtatgaccaggtgctcatgctccggcccgagaaggaggcctttttccaccaggagctgccgctctacatccccccacccatcttctcccggctggacgccccggtggactacttctaccgaccagagacccagcaccgggaaggctaccaccatccccccatctcaggtgagaatctgattggcctgagcagagcccggcgcccccaccatgccatctttgtccactttgaggatgaggaggtgccccagcagccactggaggctgcagcccagacgtggaggagagtctgcactaaccccgtggaccggaaggtggaggaggagctgaggaagctgtttgacatccgtcccatctggtcccgaaatgctgtcaaggccaacatcagcgtccacccagacaagctcaaggtcttgcttcccttcatagcctattacatgataacaggcccctggcgcagcctatggattcgatttgggtatgacccccgaaaaaacccagatgccaagatttatcaagtcctcgatttccgaatccgttgtggaatgaaacacggttacgcccccagtgacttgccggtcaaagcaaagcgcagcacctacaactacatgcctccccatcaccgtcaagaagacatccagccagcttgtcaccatgcatgacctgaaagcagggcctgggcccgtcggggacgagtggtgctcggaaacccagcttccagcaagtaacaacgctcaaggactctgtctacatcttccgggaaggggccttgccaccctatcggcagatgttctaccagttatgcgacttgaatgtggaagagttgcagaagatcattcaccgcaatgacggggcagagaattcctgcacagaacgggatgggtggtgcctccccaagaccagcgacgagctcagggacaccatgtccctcatgatccggcagaccatccgtccaagaggcctgtctcttttccagctcagccaagggctgatggcggaaaagagcagtgacgtacgagtctnnnnnnnnnnnnnnnnnnnnnnnnnnnnnnnnnnnnnnnnnnnnnnnnttcaaggcatccgaggggggaaacgaagggcgaccgagatctcggactacgtgtggagggccaagggggctcctgaaccggcaatgtggtgggcaggggggccgggccctgcacccgaggcggaagccagggcctgggaa

SEQ ID NO: 150163 - DNA, 1271 bp, Homo Sapiens
caccgtatctccgggttttgccctcccaccagggccctttccccgtgggaggagcctaattgcatggttttggggtaaccaaggaacatgcgccccggcctttcatatgcttaaggaccacctggactgtcgggggaccctgagttgccctgacacatttcggacagatggacgagtgtcaacagcttctacagttcctcctccacttccgtccacggggttagtgcagactctcctccacgtctgggctgcagcctccagtggctgcttgggcacctcctcatcctcaaagttgacaaagatggcattgtgggggcgccgggctctgctcaggccaatcagattctcacctgagatggggggattgttgtagccttcccggtgctgggtctctggtcggtagaagtagtccaccggggcgtccagccgggagaagatgggtggggggatgtagagcggcagctcctggtggaaaaaggcctccttctcgggccggagcatgagcaccttgtcatacattgacgtatgcttgccgcctgcttccgtatgcacagccaagtactggaagtcagacatcccctgaaatttgtaaatggtggagatgatgccaaggatctccatgtcaaatgtgacctcggagtgggcctcagtgcccagcacccctttctgccgcctcgttctcttcctgatgcggagcagcaggctgctggtactgaagcggttggcgcacactgggtggcagtatgggtccttgggccggaagtacagctccagcctcttggtggggtctgcgtagatccgggagacgccttcctcgccgcccagagtcggcagcatcttagccacatcacgcaccactcccgggtactccacgcacaccatgcgtcgctcccgcctcagctccacggggacggcggcccccagccccaaatcggccgcctccgccgccatccctgtgcgtctggcagggcccgccagggtccgtcccacaaagtactcccaaaggcctcgcctcaattgttccgcgaaggaatcgttccgggctccctcaccgctcgcgtcatcctaactccccgggctcagcaagacgcgagggcctccagggagcaaatggcccatgggagggcccatgtcttcgggaaaacgaccgccgtgtcctcgactttttatttaaaattaagcgagttagtccaccgggcggggcaagcaccagtctctcctactagccagcgagcctcgtgccgaatacgccacccaggcctcgctacctt

SEQ ID NO: 150164 - DNA, 821 bp, Homo Sapiens
gccagtcaaggctctggtctttgaagtgtatggctccaacacgctgctcacacagagttgcctgcgcacaaggcccagccatcaggccagggctctgcccggaccatcgtcctgtaaaggcttctcgttccacgtggctggtctgctccagaagccacgtgaatgctcggactcactcaactgtcagtctgagggtcacctccctgagagacactgctcgtaggccacactgctcaaagtgaagtttctggaccatccggaatgcttgggttcattgtccttgcccaattttagccctcaaacttggtcagacctagcgtggtcactccgtaagacagcatcgcgagaacggcctcagtgccaaggcccttacccctgcagctgggctctgcaatcatgacctcgatctcccccaaggtgaggtcttctagatctgtgaggaagaggttcacatctcccaccatgcagctctcttcggtggcgcctggctgggcctgccacttctcggcatccagcacaatgaaggtacacttgtctgcatcttcctgccagctgcactgcatggcatactcctgctccagggtcagcggctccgaggctgtcaaacgctgcagctcctctgatttcatccactcgtggtacctgggcacatgctccgaggtgtagggtacaaggaccaccttcttccccagcagcaaggtgttctgattcaacctcatggtagcagcctaccaccgacgaaatcgtcccccgcagaaagggtgatctacctcctccaaccagcccctcgtgccgattctacaccctgcctcgtctagccg

SEQ ID NO: 150165 - DNA, 1279 bp, Homo Sapiens
gggtccggaattcccgggatgaccctcccaccgccgggtccccgccgcctcggcggagtgttgtagagcctcgagcctgcgaggagcgcgccgcccgccagctccctgcgtcccgtcccgcgtccccgcgttcccgcgtcctgcgatccgccgccatggccagtgaggagctggcgtgcaagctggagcgccggctgcggcgcgaggaggccgaggagagtggcccccagctggctcccctcggcgccccagccccggagcccaagcccgagcccgagcctcccgcccgtgcgcccacggccagcgccgacgcggagctgagcgcccagctgagccggcggctggacatcaacgagggcgctgcgcggccccggcgctgcagggtcttcaacccctacacggagttccctgagttcagccgccgcctcatcaaggacctggagagcatgttcaaactgtatgacgctgggcgggatggcttcatcgacctgatggagctgaagctgatgatggagaagctgggggccccccagacccacctgggcctgaagagcatgatcaaggaggtggatgaggacttcgatggcaagctcagcttccgggagttcctgctcattttccacaaggccgcggcaggggagctgcaggaggacagtgggctgatggcgctggcaaagctttctgagatcgatgtggccctggagggtgtcagaggtgccaagaacttctttgaagccaaggtccaagccttgtcatcggccagtaagtttgaagcagagttgaaagctgagcaagatgagcggaagcgggaggaggaggagaggcgggtccgccagggcagccttccagaaactcaaggccaacttcaatacatagtcctgctgaccttgccctctgcccacagctgtgcctcacagatgccccgagaagagatgactaggcatcttcatcactgctgtcggtcccctccctgagccagcatctccatccaccaccccgtgccagctcccgtgccagccttcattcctcccagtgtccaagcccctccaggagggtcctggggtgggccagatgcctgcccacctctgtctcctgcctctgctcctctgcccttcttatagccagaacttgtatcttctcagcaaccttcactttgtccttgtccctttaccattccccatcaaagagtagtctgctatatcaatttgtgtagatatgtctgtcttttgggtcctcagagaaaatgcccattttctcggagaatctctggatcctctcg

SEQ ID NO: 150166 - DNA, 939 bp, Homo Sapiens
  misc_feature (624)..(650): n is a, c, g, or t
gtcttgcgctgattgtgactgttcgcgtgggtggcgttagtctctctgcgttcttgtttattctacttcgggcacatgggtgctgcctcctggtatttgctatcgtggggtcagttgtgggttggtttggtgtcttgttgtatttctgttgttcgtgtgttgggtttctctctattctttgtgggtatgttccttttggcgcttggtgcccagccctgtctccaactcgtccgcgcttggatgtgtcttgatttctttgtttttgtttcccacggtgagttcgtgttagttatgtttctatttctcagcgtcttattcctctatggatatggggccacgtcgtttctgtctatggctcttcgcgctggcctcacctgtgtagggggttcccatgggtccagtggtcagtatggtttccagatgtcaagagggtcagtgtgtaggttggtgtttggggtctggtttagctctaaacacacatctagcaaccacaagagacctccactgcacactatttcacgaggggacacagacacagctactaccgcacgggacagctccacgtgcagcccacagctgagtgccaagagcagaatctgaaaggtgggggctggggtacagacnnnnnnnnnnnnnnnnnnnnnnnnnnnactctggtcctttgtacaaagtagggaaggagaaaagggaagggggaaccctgcttggtaaccacatatgacgatgtggcattgagccaccactgtccacaatggcacccagctctgccacactggtaggcgtggctggttcacatctcattggagtacgtgtaattgggggtggcggaatactgagttctgaggctgattcatggcacctgggctgcccccatggctgcgttctgggctgccctcgtgccgaattcaacacccaggcctcgtacctagtcatattttg

SEQ ID NO: 150167 - DNA, 1057 bp, Homo Sapiens
  misc_feature (1009)..(1009): n is a, c, g, or t
atgggccctccactttctgatggctctagcgccaccggagccccccattcccctccacgtcagacgtaattcttggtagggtactcagagggcccccgagagatggacaggggcagatgttgagtagcgggccatgtaatggctgggccctgggacccccccgaggggcaagtgcagcactagcaaccccccacccagcaacaaaaggcctgaggccgcccagcccaagtagagggaggcccccagctcccgcttttgggcctcagccaccagggggttatagaagtcccggatgacggcatgcgccgtccagcacacggggattagcgtcaggacccctgagatgacaaagacaatcccagaggtgagcaccaggcgggccttggaatccttctcctccacacaggtggtacacttggccccagcaaggtagaccagcaagccgaacagggccacaaggagggcgatgacacagagggcacgtgcggcctgcaggtcctgtggcagcgccagcagtgagtcgtacaccttgcactgcatctggccggtgctctgcaccacgcaggacatccacaggccctcccacaccacctgggccaccacgatgctgttgccgatgaaggcggtcaccttccacatgggcagggcgcaggagaccagggtccccagccagcccagcacagccagggtcatgcccagcagttctaagccggtcgaagccatctggcccctcggttaggtcttctcagccccaggcggcctaggtgactcagagggtgtgtctggtgtgctgggtgggtgtctctgtgtccagcaggagggggaaggcttgttggtgtccccaagccaggccagtcactcagttccatgaaaggcgcctcttgaaaggcgcctcctctccgtgcctcttgcaggtgtttctggtcctcgcggagcacaaagcagactcgtagtcccgctcggctgagtggtgggtgtcacctcgaggggcctccgcccatcaggatgncctgagggtcctcgtgccgattcagacacccagcctcgtacctaccta

SEQ ID NO: 150168 - DNA, 826 bp, Homo Sapiens
ccgtgacagtgaggtccacaactggcacaataaagaaccagggctgatcccaggtgtggcagcaaggcggtactgactgacccgagggatgtcatgggagtctgatttttctgtctagtccacttttcaccatataccatcccaacagaccctggaagcagacgaggccacagagggcaagaacacgtcctttcatgccacggctgagccagccctttctccaaaagtaggcagcaggcaggatgtacacaaggcctacaaggcgaccccacattcggtgtgagtactccatgtaccagatgaacttgaattctgtcagtgtcatatcatgattcaagattttaaattctggaaattgctggtatctttggaattctgcttcccattcctcttggcttgtaggtggcttcatctcctttattaaatgccaatctaccatcgagaggccagactctgtcaacctagttactccaccaagaataactgctccagccactgttccactgcagaccaggagccatcggcccaccacccgctcagcagcctttgagggaagggacactgtaccccttccagattgcaaagctacttcagagatggtgctgtattgcctggcctcaaagggcgcctgatgcaatcacactgtgctctaggcgctgccctaggagccaggagcggcagatactgcctccccttcaaggccctcaacggcggaaagagcaatcgctgcatactgatgacagggaacagccacctcttccacaacccagggctctgtgtctcctcgtgccgaattctccacccaggcctcgctacctagccgtaa

SEQ ID NO: 150169 - DNA, 1036 bp, Homo Sapiens
  misc_feature (191)..(207): n is a, c, g, or t
  misc_feature (782)..(859): n is a, c, g, or t
gcaggcgcttccagcgctttatagttctttccgggacagacggacagacagacagtgcggcccgctctgtcggcccgcatcattggcaccttggacacggccccaggcccaactcagtccctggtaccctaccgggaggattccggtcccgccccagctcagcacctcggacagttcccggcccagcctannnnnnnnnnnnnnnnntccgcaaacaaccaaataaattaaaaggggcagtggggaggagcaacaaaaaagctaaggataaggaagcgggatgtccctcctccaaggtaagaagttttcttttcctcccacctgtccactgaggcgccgtggccggggtggtctcccaggttgattttgcctccaaacctcagcctcctgaaagaagccggcagccccttcccccacaccccccagctcccagcatgcaacacgttggaaaaggtggggagaggcggtgggggtggggcgagggaccatcctggtggctgtctggatacctgggactgcagtttctcctggcacctcagtcgatccaaattaaaaactaatattccctttgatcaggggagaggggtgtggtgactcagtcaggaataaaaaaatgcaagctgacacaagtggaggaagaaggcagacaggagggaagatggtgacacatgacaggagcaacaagaagggcagatggggacacaggtgcaggaggagaaacaggggtctacggggtacagtcaggcaaggggtaagatggagatgcagacacacaaacccannnnnnnnnnnnnnnnnnnnnnnnnnnnnnnnnnnnnnnnnnnnnnnnnnnnnnnnnnnnnnnnnnnnnnnnnnnnnnatgcagacaggaggaaaaatgaagacacaaaaaggaggcaaggaaatggataaaaccgagggggaatgggctgaagggaagggggagaccccggcagaaatggagaaatgggggcgcagacagacgggaagcctcgtgccgaattcaccacccagcctcgctacctagccgtaagtt

SEQ ID NO: 150170 - DNA, 954 bp, Homo Sapiens
aatgcccagagggatgtttgtaacaaagcctgccagaactctaagccttcttggttctaccccttaaggagaaaaaaagatgtgtaagaaattagcccatggaccccagctccacctggacagtcgatataccgtgaggacattcgcagagtccctgcaaaaggtctcgtgagctgcagttcattgagtggctttaggtcacacggagaaaggagggttccagttccctctgagaggtgagggattgtggttacaggttgtaacagctgtcacaggagggtaaaaagtctccagcatcttgctgaggatgcccagtaggcagcagctgagtgaggatggatggaatgcagggcaggaggggagcccaagtgcagaggctggggctcagacagccaaagggccccacacacagggcctcgtctcagagtcctccaggctgctggatgacaagcgccggcgctgggcattccgactgacggcattgtcatcagcctgccaggcaccaggtaagcagacctcagagcacagcttattgtccagtgctttcacgcttgcgatgtcaaagtcattgttattgtcacactccatacctagaaatgcgcacgtcctctggccttcctgcgtgggtgatccatcctcttcctctataacatcatttccctctgcatcctgctctccagctgggaggccagcaaagttgctgtctggagactccgctggcagcccctctccttcttctgagggggccctgctggcaggctggggggaagagagagcctctccctcctcttcagtgccaggggcgatgtaggagccagacatggaggagacggtgtcagtgctgatctgggaggatgccatgaacatgacagactgcctcgtgccgaattcaacacccaggcctcgctacctagccgtaagtgtttgtctctttctgtctttcctttgtgtgta

SEQ ID NO: 150171 - DNA, 1182 bp, Homo Sapiens
tgtgagtgaaggatccacaacactattgaattaattcaccttatgttaagtcatagtaacaggttacttttatagtgaccaccttggcatctctttgattagctagctcagccctttgataggagagctgattaccgccaggttccggaaaggtcactcattataccaacaggcaacgtcgttcaggtggtgtatttcctcttgcacaaaccactccggaagctccccctcatcctcattaaatgtgtaccggttgaaggagttatctatgaggtctctcttggcctttttggaagaggcaataacagcacctagagcaaggccttcggggtccagtatccgatgtttcgctgggtcctcaataggcactatgtcaaacccgtcatcatctgacttaggcccacggcttcgcttcttaccacggaggggttcccagctctcttcttcttcactgctagtactgctatcactgtctgagatgccatccttttgttccctttcaaggccagtggcagtttctgtccccgaagaagcctttgttcccttaggggtttcatcttggtacaggggagacattatctcagtcttcaaacacggaagggggtgtctgtggcagctgctgcttctgctgctgctgccgtcccttccgccggttctcaaataacagctgggcctgactgatctccagggcctcatcggcatcgtcctcgatcccagcaaagctgccctttgagaaccacaggttggcttgttcttcctgcagtactgccttttcctccagtggtaccagcagtggattctcctcctcctcctcctctttatcatcttgcacttcagtaagtcgcatactgtagacccaaaggaaagtagggggctcagagacccagattgcctggagcccttgctgccctactcaggctctggtagtacccaccctaacacttcctcagagtggcagcattccctttggtgcacacgtgccccttaccgcttttggtcccttagaccctgatgtcccctgactcctgccagctcctctggatccaggtcactatccagagatgtgtcatcaccgtcgtcctcaacatctgacacatagatatcatcccttggcagatcggacagaaatgtgtctgctgcactcatatccccttgtgttacttcctctaataactgaagtgt

SEQ ID NO: 150172 - DNA, 1508 bp, Homo Sapiens
  misc_feature (88)..(88): n is a, c, g, or t
gatttttccccgcccaggcgttttccgggtaatgctcccacccttccttctttacccaaccagggcaactgtttcgtatccgggtgcntgctttttccttcttgcaccaaacccactcccggaaggctccccctcatcctccattaaaatgtgtaccggttgaaggagttatctatgaggtctctcttggcctttttggaagaggcaataacagcacctagagcaaggccttcggggtccagtatccgatgtttcgctgggtcctcaataggcactatctcaaacccgtcatcatctgacttaggcccacggcttcgcttcttaccacggaggggttcccagctctcttcttcctcactgctagtactgctatcgctgtctgagatgccatcctgtttcttccccttcaaggccagtggcagcttctgtccccgaagaagcctctgttcccttaggggcttcatcttggtacaggggagacattatctcagtcttcaaacaggaagggggtgtctgtggcagctgctgcttctgctgctgctgccgtcccttccgccggttctcaaataacagctgggcctgactgatctccagggcctcatcggcatcgtcctcgatcccagcaaagctgccctttgagaaccacaggttggcttgttcttcctgcagtactgccttttcctccagtggtaccagcagtggattctcctcctcctcctcctctttatcatcttgcacttcagtaagtcgcatacgcttttggtcccttagaccctgatgtcccctgactcctgccagctcctctggatccaggtcactatccagagatgtgtcatcaccgtcgtcctcaacatctgacacatagatatcatcccttggcagatcggacagaaatgtgtctgctgcactcatatccccttgtgttacttcctctaataactggtgaccccggatggtgcacaaggagaacatgccagtctccccctcgtctgcaatggaaaccccaggcagatccatcttcagctccacacgctcccgctgctttctctgctcacgcaacagcttctttttcttcctcttcaattccgccacctcctgggccttgcatttctgccaaggtctggttcagttgttcctgcctcctcctcttccgcctgcctgccttagagggctgctttgtggttccagctgttgagtcctcctcatcaccttcatcttcctctccagagctgaggctgatgtccagtgcctttgcttgttctttcagcttcttggccacatatcgccgaagttttgttctccagtttagtagcgacctgagctccttgcgccccaacactctgatgtcctgacagcacacccgtatctcctcagtggtagctggatgctgtgccaactcttcatcatctaccatgatttcgctggcccgacgcgtggtcgacgatatcccgggaattccggaccgtaccagcctgcttgttgaaccactgttctatattcacattgtt

SEQ ID NO: 150173 - DNA, 1028 bp, Homo Sapiens
ttctatttataaatatctacttttcctttctccactttttgacctttctggcctttctacacacctatctcccactgcccctattttctcgaatttaagtccgatatccgaccctcccaggtgttgtaagcccttcaccccatatcccccacgtctgtataatttagataacagtattttggctccctatcctgattctgagattcattcacacttcaacccacatgtcttcctatctgacaacagagcatgatgcgattcctccggcttcccccccaccctcatcaatgctgccaaacagagtggagttccagtgatcagatggagctccatgggaaaagctttgaaattaaccgtgtgctcagaaccacgctggttttctcttccccagtgaaatctcacttcgtacagttcaaattcatgcccttgaggcaatggtcctcccgaaagaactgattttgacttcaggataacctgaatggtatgtccatcattggtgacttcacagtctcggcacaccacataatttggggagaggcggacatccaacagcgaggggtcatacctagcctctcttgagtttaggttaataggagactggtattccccattagcatcaggaaacaccagaccccactcaacaccttcctcgtagccccactccacaccctcctcttcttcctcctcatcctcttccttctcggggaaggcgacggtatcttcgatgaagctcaggtccgccatgggaaggccgcggggcccctcggcgctctcggcagcagtgcctgcgccttcgctgggcgcggggctggagccggagcggagcgcgcgtgggggagtgtgagcacgcgtgagcggcagtgtgagtgcgagagcgcctccgggtgtgaaccgcagtgtgagtgcaagcaggcgtgcgttcggaccgagtgttccagagacccgcgtgggaagcgcgtccggaggccccagcagagcgagggagcggcctcgtgccgaattcgccacccaggcctcgctacctagcc

SEQ ID NO: 150174 - DNA, 1203 bp, Homo Sapiens
  misc_feature (163)..(164): n is a, c, g, or t
  misc_feature (824)..(870): n is a, c, g, or t
ctggggtggtgtatcaggcggcatcctcaagaagcctgttcaggggacattcagcaggtctccgccagccctggagtagttattaggcagatgacagcgttgatttccaggtgttgtggggctcattcagcatcagcagtggggctccatgaacagtgcctgnnccagggagacacgcatgcgccagccccctgagaacttctgtgtgggtcgattctgcatttcaggttcaaagcccaggccagccaggatccgccgtgctttggcctctgcagctgccgccccagtggcccgcaattcctcatacaccttctctagcctctcagcagctgtgtcatccccttgttccagctgtccctgaagccgccgctcctctttccagcagcttcaatcgcttggtgtcagctcgaagaacagcctggactgctggtgtctcatctgctaccacctcctgctcacacagcaacacatcaatgttgggagggatgctcagggctcggttggcaatgtgcttgaggagtgtggtcttgcccttgccattgggtcctaccagcccgtagcggcggccggctacaatgtacaggtctgcattgacgaacagctccttgccatgagcggagatgctgaacttctccagcttgatgtcagatgcattttctaacatggcttggcgggaggacatctccgcctgggacacggagaagtcattttcagctgcattggctgcttttaatgaagccacttggcgctcatactccatctgttttttcagctttttcttctcctttttgctaagatgagcatagggatcatctgccttagannnnnnnnnnnnnnnnnnnnnnnnnnnnnnnnnnnnnnnnnnnnnnnaaccctgctctgccttcttggccttctccttcccttgtttgggaggctccttttcctttataatttcttcttctttatcctcctcttcattgtccagagcagcgaatttattttgaggcttagccttcccttttgacttctcttcctttccctttttgcccttgagtgcaggctgctgttcctcagatacggccttattgatccgattcttctccggcttggcaggcttaggaggatgtttttcttcctcctcctcttcctcactctgatcctgaatacagggctgcgaaaaccctcgtgccgattactgcgccggcccttcgatcccttatg

SEQ ID NO: 150175 - DNA, 806 bp, Homo Sapiens
ggctgcgcagtcggtgccatcttctacgcccctgggagcgttgtggctgctgtttccttcggctttcctcctcctgctccaccatgtggagccgacggcagggccgcctcaggcccacggtctgcggggtggaggagctacggcgccgccgcgcgggagcgggaggcagcactgcggaaggcgcggagggagcagcagctggtcagcaagaggctgctgagaaacgacgccccagaggaagctggagagggatgtgtggctgcgatcctcggggaaaccgaggtgcagcagttcctgcggcaagcccagcgggggacagaggaaaaggagagagagggggctctggtcagccttcgtcgaggcttgcagcaccctgaaacacagcaaaccttcatccggctggagggcagcatgcggaccctggtcgggctcctgaccagcaaccaggccctgctgcagcttgaggcggctcggtgcctgcatgagctctctcactccgagcagtccactgttgctgaggcctgcctgccagccacttcttacctcctcacctacctctccagtcacagctcagacttcatagagctgtgtctgtatacactgggtaacctgatcgtggagagtgaggctgtgagaaggcagctcctgccacagggcattttccagccttggctgcctgcatccagtcccccatgtggctgtgctggaaggtctcggattgcttggcccagttctccggctgggagccccggaatcttccccggtctgccgggtctttgggccctccctggctgtctttggcggcg

SEQ ID NO: 150176 - DNA, 1063 bp, Homo Sapiens
  misc_feature (175)..(175): n is a, c, g, or t
agagttcccaagacatagtcgtaagagcaaaggctgattggtgtgatctctcatatccaccaacgatactaagccccacttcccaagtaacttcttcgtaagactatatcgtgcacgctatgaagtgtgctgggaagcccaagccaccatgaccccatgatggggaccaactggncatcatactcattttcgctgaaagtactcggctgctcctccgcgttctgagtcgcctcctcaacgatctggacctcaagtgctttaagggccacagcaggggacgcggcactggctttcagcattgcaactgcctcactgtgacttaaattggtcaaatcaatgccgttgatatttagcaacacatcacctctctttattctgccatctcgtgcaaggcagccatggggtggcacactggtcacaaagatgggcagctcaccactcttacttcccctgcccccagcaacggtcatgccaagggattcatgtggttccttctttacagtaatgtgtttttcttggcatgtaacacactgagtaagatccttatgtgagcttggtctgctataatacggtggtggtgtgtggtgctggctgctgctgctatgatttcctgcttctctaatggtgttaccaggctggggtttccctggtctagcaattgttaaattcactctctctccactggcctgaataatctgggcagcaagctccggagttccatacttcaggtcgtgcccattgatggccagcactcggtcattgctgcttagcctgccgtcctgggcagccaaccccccttccaacaggtcaagaataaaaacccctggctcatctgtccttcgcaccaatttaatgccaagctgttcaccagagtcccgtttatgaagagccacttggaaaatctcttctcgtggagagttactatcagaatggttgtgtgctcggttgccaaagcgcctctctcgaagcacagtaagatgcagtgtgttgcagggctgggaaaggacagctcgggcatagttatgcctcgtgccgattctacatcccagcctcgtacctagcg

SEQ ID NO: 150177 - DNA, 908 bp, Homo Sapiens
tacctttccgcataataaaataatcttaataaaaacataatttaaagaaagtctccaaagccgagtgtaaagtcagagctgtaaactctacccaagtttgaagggtctcttgaagaatcatccgctacaagatcagtcatgatttattgatggaaacttcagttcggtgatttcagagtcaggggagctgcttccactcctgtcactataggtgtccctgggtgagagcctgcagcctttctggaggtaatgtgagagccgccccacagaggccaggaggaggccaaagtatggtggggagggcttgataggcctggacaggaactcagggtggtactgaaccccaacaaaaaagggatgatcttctaactccacaatttccattctctctccttcaacatcttggccaacaaacttcaagccttgttcttccaaacactttttccagactggattcacctcaaatacggtggcggtgcctctcttccaagtagtctgcgtctccatagagtttcctcatgactgagttcttggtctggaacagggttctcctcttgcccagcctcatggttccgcccatctgccctgggttgtgttctggcatgtctacgaccacgggatgactggtcgtagggtcaaactctgtagaattggcatcttgccatcccagcacgtttcttgagaattcaaccactgccaactgcatccctaagcacacgccctaaataaaggctttttctgattccgagcccaggcaattgcttggatttttccttctgttcctcgtactaccgaatcctcctggtaccagcactccatgagcactacagagcttctgccaagcttcgtgtagcgcaccctcgtgccgtattcataaacccgagggctcgtaccgtagacagttagtt

SEQ ID NO: 150178 - DNA, 1015 bp, Homo Sapiens
gggcccaatatgttggaggttaatagccggaaggaacccgggggtcgaaccccccaaaaagggtattttcaacccacagttgcagtgcgcttctctctcaacatcttgcccacaaacttcaagcttgttctcgcaaacacttttccagactggattcacctcaatcggtggcggtgcctctcttccaagtagtctgcgtctccatagagtttcctcatgactgagttcttggtctggaacagggttctcctcttgcccagcctcatggttccgcccatctgccctgggtgtgttctggcatgtctacgaccacgggatgactggtcgtagggtcaaactctgtagaattggcatcttgccatcccagcacgtttcttgagaattcaaccactgccaactgcatccctaagcacacgcccaaaaaaggctttttctgattccgagcccaggcaattgcttggatttttccttctgttcctcgaacaccaaatcctcctggaaccagcactccatgagcactacagagcttctgccaagcttcgtggtagcgcacgggctcttcttgcgaggtgatgggctccaagtccgcagaatctatgtacttgatttccaatttgtggttgatggccagtgcagaatgctccagagccttaatgacagaggcataggagtctgagaacttcgtgtatttgcccacaagggcaatagagcaggtctccagcaagcgatcatatctgtcagccatctctttccatttcatcagcatttttcttggctgcctctcaataggaaggtcaagtcttcgaagaaaataatctacaaccccttgctcctctaacaacaaggggactcggtagatggatgagacatcgtggacacagatcacttgttcaggctcaacatggcagaacattgatattttctccttcactgatgtgtcaagtggatttgagcacctgcatacacctcgtgccgaattcggcgcgccgtcgacttcatactctctatagataag

SEQ ID NO: 150179 - DNA, 880 bp, Homo Sapiens
aaaacaagcggctggtccggtccggttcccgggatatgtcgacccacgcgtcggggcgtgggcgtggccggcgtggctgctcgggaccacccgaacccgcgtgcatggccccggccgccgccagccccccggaggtgatccgcgcggcgcagaaggacgagtactaccgcggtgggctgcggagcgcggcgggcggcgccctgcacagcctggcgggtgcgaggaagtggctggagtggaggaaggaggttgagctgctctcagatgtggcctactttggcctcaccacacttgcaggctaccagaccctgggggaggagtacgtcagcatcatccaggtggacccatcgcggatacatgtgccctcctcgctgcgccgtggcgtgctggtgacactgcatgccgtcctgccctacctgctggacaaggccctgctccccctggagcaggagctgcaggctgaccccgacagtgggcgacccttgcaggggagcctggggccaggtgggcgtggctgctcaggggcgcggcgctggatgcgtcaccacacggccaccctgactgagcagcagaggagggcgctgctgcgggcggtcttcgtcctcagacagggcctcgcctgcctccagcggctacatgttgcctggttttacatccacggtgtcttctaccacctggccaagaggctcacggggatcacgtacctccgtgtccgcagcctgcccggagaggacctgagggcccgtgttagctacagtctgctgggggtcatctcactgctgcacctggtgctgtccatggggctgcagctgtacggtttcaggcagcggcgcgagcagaaggagtggaggctgcccgggctgttcacgggggctcctgg

SEQ ID NO: 150180 - DNA, 984 bp, Homo Sapiens
catttggcccgttgttgcctgttctggccgctctttctctctactttgccgttcctgtctcctcaagcgtccctttcggtgtctccttcttgtccctcactctggtccggcctggacttttcgtgaccaccgagggccaccggtggcactcgaggctgcccttggttagcggtacctctggcgcgcatccgcctctctggctcgttagcgaagtgctctggaaaggccttggacagcgccatgtggcgcgcagacatatagtaccggcctaggtatttccagtccagaaggtcggagaggcgctccgtgcggttccgctggatgatacgctgccgccggctctgctgacagaaactgtagaggaaggaggtgagctgcgagcaggaatcatccaggctgcggaaccgccggtcaagaatgtagataccgtaagctgaggggtctgcgatgtgttcctccatgaagcagccgaagccggagagattggtggagatactggggattcccataaccgtgcactcagccggtgtgtagccccaaggctcatagtaggaggggaagactccaaggtgacagccacggacaaactcctcatagtccacagggagcagggggcttgtggaggagaggaactccgggtggaaaatcaccttcaccctgtcggcactgctattgaagaggccgattcggcggatggtggtcaggatggggtctgaggagtcatccagcatattgtgggtgcacacaggggggaaagactgccgctgcgttgcaaagatggctctcttcatcatagtgaagtcttccttatccagcatcttgttcatgtcgggaaggctcccaaccagtaaggattcactaaagcttcctcccgaacttttccttcaccgtgttggccgtgtcccaaagctgtttgcgcacagcttggcctttgagcctcgtgccgaattcaacacccaggcctcgtacctagccgtaagtttt

SEQ ID NO: 150181 - DNA, 1168 bp, Homo Sapiens
  misc_feature (134)..(134): n is a, c, g, or t
  misc_feature (913)..(913): n is a, c, g, or t
gaagcgcgatattactcacagcgagaactgtccctcctgggtgtcactcggcgcactgctgtgtctcaccgcgtgttcccctctatcttgggttcccctctccgctctcattggtggacacacccttttcctcngtagagcctcggtgcgcccactcactgggacccatctcggcacacagttgtgattgccccgtatccccttttcatgccctggagcctgcgagttgcagaaccccagggcttctaaatgtcgactcgctttaaagcttgcttcagggctccacgcttgctccatgagtcgggtgtggaattgccgccctaacccggcaactccctggtgcgtctggaaatgaaacttagaggaattcttcttggagaaaccgtagagcctcttggtgtcctgaaatcaccctgcaatctggaaagaggtagttggaacacttcacatacggggttctctatgcctaaagacttgcagtgttcccgggcttccaaacaggcgaagttggaacttggactgaggctggccgaggacagacagcatcccactggggacagcttctgaagcttcctgcatggcctcagctcggattttcactgcataccaaccttcagcaaattccatggctccggcaaacactagggctgcaaactctcccacactgaatccagcagcagcaacacagttctcaatcaccgagggctgcaggtgatgtagtttctcgacagcggccagcgatgccacgaagatcgcgggctgacagtgcacggtgcggtccagggtctcctgcggcccgtgcaggctcagttccagcaggtcgtagcccagcacgcggcgggcggcggcgtagagttcgcggacgcgcgggtagttgagcagaccgcggcccatgcccaccacctggctgccntggcccgggaagagcagcacggagcactggcccggcattcgccgctccgtcgccgcccagggcgcctcctcctccgccccggtcgcatctcgcagcagctccgctacaccctgggcgcccggcggaggcaccgggaagctcgaggcgccgcggcggtagctggcgcccaagccctgacccacgctacccgtgcgacccgacgctcatggtcggcctcgtgccgaattaacacccaggcctcgctacctagcataa

SEQ ID NO: 150182 - DNA, 556 bp, Homo Sapiens
tgtactttcagcaaattccatggctccggcaaacactagggctgcaaactctcccacactgaatccagcagcagcaacacagttctcaatcaccgagggctgcaggtgatgtagtttctcgacagcggccagcgatgccacgaagatcgcgggctgacagtgcacggtgcggtccagggtctcctgcggcccgtgcaggctcagttccagcaggtcgtagcccagcacgcggcgggcggcggcgtagagttcgcggacgcgcgggtagttgagcagaccgcggcccatgcccaccacctggctgccctggcccgggaagagcagcacggagcactggcccggcattcgccgctccgtcgccgcccagggcgcctcctcctccgccccggtcgcatctcgcagcagctccgctacaccctgggcgcccggcggaggcaccgggaagctcgaggcgccgcggcggtagctggcgcccaagcccctgacccacgctacccgtgcgacccggacgctcatggtcggacacctgcccgcgcgcgttaccgtggcggccgca

SEQ ID NO: 150183 - DNA, 1276 bp, Homo Sapiens
acggcaggttgtactccggcgggacatgcagcaggttgagcatgcagctctcctttgcaaccgggtctgaaagagcgatgccctctgcgaggttggggtagaactcgtcagtgagaagaggggctcgggcagctcacggaagtacagcttcagcgtgcctgcgatggcgttcacgtccatctcggttcatcatcaccgaccacgtccttgttattgacgtcgaaggctgccttcagtgcctggatgtccgtggccacaccggacacgcggtagatgcccacctcctccatgcctcggcgctcgatctcctccacgcactggcgcacgatgtagggcaccttggacctctctctcttggtgaccacagcaatcttgactccgaagacccctgtctgttttcgggacggcatcctcttcaagctgaactccctgctgttgaacttgaccgagagctttacttcgatcccattcatggcgatgacggtgcgctgccagtctctgtcctgcagggcctgcgggtccagctggacctggcccttccccatgagtctgtccgtgctctcgccgtcctccttggggatcttcgtcttgttgtaacacttttcatagcacagtatcctcagggtctgggagccctccagctctatctcaaattcctcgttccagtttggctcagctgtgtccctgtagacgcgcgtctttgctttattcacaaaatacccaaaggaatccacctccagggtgcagtacagatttgaactctgcttaaatccagtggctgagtggacgatgacattcagaaacccatagagccccggagactcatcatcttccttattgatggtcagcggaatgctgtggacagtctggagtttcacacacgagttggtcagcatctgcagctccacggatgtcagggagaagcttctgaaacacttcttctgctgctcccggatgttctccctccactctgcacgctcatagtcagaggagatcaggaacgtgtaactcttgccgttgcggctgtgcaccctgaaggccatgctgggagacataagcagcagcagtgactcctgctccgacagcttcttcttcagcctctccgtagccttgctgcccttgttcgccctcttctctctctggatgtcactcttgatctgggagatcttgatcttcaaagcgtccagctcctcatcgggcaccagggggatgttgggcactgcctccagttccctcgtgccgaattcaccacccagcctcgtacctagccgtaatt

SEQ ID NO: 150184 - DNA, 1250 bp, Homo Sapiens
  misc_feature (920)..(956): n is a, c, g, or t
gggacccgggaaactgaaccaggaaggatttcgttggggttcccccacgccccccgaaagaagttggtccttgttaatagggaatggcggagacggccattgcctgttgaccttggacaggggccacggggcctttcttaattaccagttggatctgggatgttaatacccgggtctttctacatggcgggacctctcggatgggcgtgaggtaaggagtggatcgagaggtctccgagtcctgagctgagcgcgtgtgggccgtgcaggaggtcctcgtgccgcctgtagtccctgcgaggatccaggcccgacagctggtgaggcagcccccggtgcgtgtgcaggagcccagactcctggctctgcctctggccgggccagcctgggtgctgcggctgcggctgggcgtgcagggggttcaggctgtaggggtcgttgacgtgggagtaaggatcttgcgactgggggtagataggctggtagggtggggggaagtatgggggctggaagtcggcattgggggtgtgggacagcggcggggcgctcgtgtagggagattgacctacagtgcccagctggggcaaccgtgccgtcccgttgctggtgccgtcgtgacggtccatggctgaaaaactgtgaactaacatctgcgaagagtctggggtaacgagtcagggtggaaaaaaacaagcaagcctggagcgcccggctgccccgccgcccgagcgcgccccacacaaaaggcgccgagagccccgcgccacccaggactccagtcacggcgccgacgctccccggagcgcgggagcccggctcggatccatccgaacttgaaccaccgattcgcgcggcgccttcagctggtcgaacccacggtctctatcctgccgcgactggttatgattcaaagttctttnnnnnnnnnnnnnnnnnnnnnnnnnnnnnnnnnnnnntatgtgtgagtgtgtgggtgcgtgcgtgttccttaatccgtgtctccccctcttttcttagcggcggcttcgcttgagcttctaataaccgcgctgggcagcgttcctggagcctcctaatagcagatattcatgactattaatattacacgaatacttaataagggaagaatgcctggaaatcgagcgtgaagcggagaggcaactcgcgccggagccggctctcaatgcagtccattagacgggagtctcagcctcgtgccgattcaacacccagcctcgtacctagcctat

SEQ ID NO: 150185 - DNA, 748 bp, Homo Sapiens
cttgatgaaattctccatccaaaagggtcacaagataccgcgttttggtgaacgagtcacagtggccatggtcggaacagttcagctgacatgtgacagtgttagacttccaaggctctgaatatcaaaaagtctgccttcttgctgtccgcagctcactccttgagcatcgctgccacctcatggcctttgaagatctggtcggggaggctcgtgtttgaacaccagaataccatctattaggctgctctgctccgctgtacggctgaatctctttgcacaatgactgtcggaactccacgcacccccaggaggaccccaatctggcggatgaacatcccctctcagcctctcacgttagctgactgacgttgatagtccaagactgactcatccaaccaggcttgtctttctacctgggagtcagcgtgttcacctccacagtggtcccggtctgtgctcactctcaaccctttgcatcggtcacatttcagcgtgaaaagatgtacggcttcccatcaaccaggtctctgaaagaaaaacggatagggtgatggtcagagtgatttaacacctcccctgctgctgggctcccctcatctcgagtccagaggtagctgactattcccttgtcatctgaggacattagagccatccagctctgctgtgctcgtgggtagggtaatcaccacattcccagttatacctcgtgccgattcacccccagcctcgctacctagcctatttt

SEQ ID NO: 150186 - DNA, 990 bp, Homo Sapiens
atacagtcatcgtgcttctctcagtgcctgagatctcatcaaaggtacgatcaggttgtgacggtccagtgcatgtcgacagtcagtgcatgtgacaggtgactccaggcttgattcaaaagtcgcctttgctccgcagtcactctgagcatcgctgcacctcatgcccttgaagatctgtggggaggctcgtttgaacaaaaaataccattttggtgcaggtttcacctccacagtggtccggtctgtgtcactctcaccctttgcatcggtcactttcaggtgaaaagtgtaggttccctcaaccaggtttgaaagaaaaaggatagggtgatggtcagagtgatttaacacctcccctgctgctgggctcccctcatctcgagtccagaggtagctgactattcccttgtcatctgaggacttagagccatccagctctgctgtgctcgtgggtagggtaatcaccacattcccagttatcttggctataggtggtttgtttatttcttctttgacaatgacattcacagagctctggctttgcaggttcctctcatctttgacagtcaaggtgaacacataggtccccacttgcagcccagtcacagtagcaacactgctgttagcattctcgagctgcaccccatcaggtccctgtgttttttcccagagatatgagataattttctgatcatctgagctcttgctgccatccagggttgtgctatccacaggaagggtcagctctttatctgggcctgcatctgcctgaggaggcttattgttttcaggttgcacataacagtcacttgagcagtggcctgctgtcctattgtgtcagtcactgtgagctggtaagtgtagtctccttcttgcatcgcagagagctgtaaggttggtgttctaacaccctgcatctccaccactttccctttgctgcttgggctgagtgaccactcatagctggtgatgccatgatcatcagtg

SEQ ID NO: 150187 - DNA, 775 bp, Homo Sapiens
gaaaaaaatggctaggtgcgaggccgggtgtttaatcggcacgaggggaataatgcctaggggaaagggagaagtgagagggacaattgggttcatttatgccctatacaaagggcattccagcagctgaaactcttcaatgttgaatggctgcctgtgaaggtagtgagtgccccatcactggaggtattccagcagagtctaggcagtcgtctgccaggcatgctgtggaagggatttctgtacagggtcattctaggtgagcttacacattccttccaaccccaaggttctgatgtcctggttgtgattgctggacccagaggcaagatctgcagagatgcctgtgagatatttgctttcctagaggggagtgtgggcatgggaggggtctgaaaatcaggacccaacccagccactgaagagagagtctctgcagagacagggctacctgggtggttgaggggactgacatttgaggacagggagatggagcagtgtcattgtcagtggcagggcatggggggcagtggtgagctaaggctgaggagtggagatgaccagaatataagggtgcaattcccagaccatccctgcgcatctgactgactccggtggaggcactgtgtgtgttttctgaaactagaggaccagactctggggctttaagggagtaggccacacaggtgccctcctgatgtgtccaaggcaatatgaatcaggcgggaggtaatccggctgaaggtcacggcagggggacggtgtggcaacggtt

SEQ ID NO: 150188 - DNA, 1144 bp, Homo Sapiens
tgcgctaggtagcgaggctgggtggttaatcggcacgaggcaggcagccatgatgtgcttgggcccaccagggccttccgggctgctctcttccctgagcccggaaccggcgacgcacgtgtgtctttggtcggtgtgtttgtttttttccagggaggtctagttccgaagcagtattccaggttttctctttgttttatcagtgccaagatgacctgttgtgtcatataatttaagcagagcttagcatttattttattctttagaaaacttaagtatttacttttttaaagctatttttcaaggaacctttttttgcagtattattgaatttattttctaaatcaggattgaaacaggaacttttccaggtggtgttaataagccattcaagtgccttacacagctttgaagaaactaggactgcagtgggctcggataggcccattgaggtttttagaaaagcaggatttgtttgttagggaggcatgattttggtgagatctttctggaagagttttccgcctctttgtgatgctgaacacccccaaggttctcccctccccccgctgcccaggtgactggcaggagctgcgactgccacgtagtggtgcctgggcccgacagcggggctctgggcatcccgggtgaccttggcccatctgcctgcattcccacccccttgggcctggctggatcccaggcagagggaccttgctgctgtgtgattggaacattcccaaatatcttgtgaatttgtaatcaaattggtctcattgggaaagactcttaattaagaggctcaggcaagcacagaggcagccgtggtctctgtctcagtctggaggcagcagggatgctgctgggagtccatggcacaggccacagcccctcaccttgccgcgggtggctggcagcacgcctgcttgttctgcccatgccctgaacaggcatgagagctccacgtccccctagtgcacctgaagaggggctcacaaagtgaccgatccggggcctcaggagctcactgaggggcgtgccaattgaaagtgcagctgggggaggtgcggtcaaggaaagcgcagggggctaggaagaccaaggcacttggggcaacacagaaggtgatgaatggcaggggccg

SEQ ID NO: 150189 - DNA, 624 bp, Homo Sapiens
aaggtttgttttttaatttccacattgagctctggtttgagcctgagctttccaaggctgatctgggctccctgcttgtcccgccggcgtcgggcccctcctgtgcaggaagccgtcagggagccccagttaggaagggatctcccagagcagggccacctctgtcctcgcctccactgcgccacagagccccagcaaatctgcagagctatcatgactgatctgtaaatagggccataacccacgaatacagtctacccccagtctgggctcccctctttcacctgtgctcctgccgcagttgaaggagatagaagacgttttcatatcaggattgcaacatacggcccgtgggagagcatggtgatcctaacctatgcctggaaacgacgctgcgagtgacttttctggtaagggtcgggactcacagtgattgtccaacgcgcagtctctcacccgtattcagaatgtcctgggaaacaggcggggctctggctacgaggccacatatgtcccacctcccctgaccccccgcatgtcacagggctcaggtgccttttcctttatctctaattccagctgtaagctcatgcccctgcacacagactatgcgtgttcatcttc

SEQ ID NO: 150190 - DNA, 894 bp, Homo Sapiens
ggtaccggtccggaattcccgggattgcgcccgctccttccgggccccggagatggcgcctccaccgggatgagctagccagcctgggcaataccagaggcggccctcggcgcgcgcaggggaccgagctggtcgccccaaccgggtttgatttctgatgactctggcctgagttccaggatggttttttcttgggaccagacatgaacaaaagttgacctcatgagcacttcaacctctccagctgccatgctcctccggaggctgcggcgactctcctggggcagcactgctgtccagctcttcatcctaacagtggtgacgtttggcctgctggcccccctggcctgtcaccgacttctacactcttacttctatctgcgccattggcatctgaaccaaatgagccaagagttcctgcagcaaagcttgaaagagggtgaggctgccctccactattttgaggagcttccctctgccaatggctcagtgcccattgtctggcaggccaccccccggccctggctggtgatcaccatcatcactgtggacaggcagcctggcttccactacgtcctgcaggttgtgtcccagttccaccggcttcttcagcaatgtggcccccagtgcgaggggcaccaactcttcctgtgcaacgtggagcgtagtgtgagccattttgatgccaagttgctctccaagtatgtccctgtggccaatcgctatgagggcactgaggatgattatggtgatgacccttcgaccaactcgttttgagaaagagaagcaggactatgtcctattgcctgggagtcatcccctgcagacctacaacccagaactacgtcctgatggtagaagacgatgctgtaccagaagagcagatcttcccag

SEQ ID NO: 150191 - DNA, 584 bp, Homo Sapiens
  misc_feature (564)..(564): n is a, c, g, or t
ccacaccagtgttaggacagggtcccctgaggccccgctgatggtggagggtcctcagaagggtctctccagcttttggaagtgcccacctgaccgtcctctcgttactcctggctactctcctttgtggaggctccaggaaagcttgggagcacaaccaagaaatggttaatggaaccaaaaggagaattaatgaatcatgaaaacatgtgcttattattattattttttagagattcacactttcctgagtaaagtacacgaaaatctcacatgaagtcttttgaaagcaccaggcctctagctcttagactagctgtgctccatggcagatctgagccaagctcgatgttgctctggtaaaaacattaacgatgtattcatgaacactgcttttctaatatttcaccacttgagagtgttatgcttgtaagatggaaaatggtttcttttctggtgatggagaagaataaaggtggatgtgtgggcttctttggtctgtcttgcaacaatcagagctgagcggatcccaccaagataacatgcctcgtgccgatttcaccnccctgcctcgatccaagccc

SEQ ID NO: 150192 - DNA, 720 bp, Homo Sapiens
agaccttttttcctgcaaagtaggaagatactggaccacagttccattctgttttcccactgccagctgctttcctttggggctccagcaacacagaggttactgctaccgtggaaggaagagttgcacatactttcactgttttccgtgacttgcaggacagcaaatactaccatcagccagacaaactgccaccatggaggggacagtggggttccacttcatatcaatcaccatgcctcctgcatctttcaaaagcttatgataggcaaatgggcgtttttgctgtttagcctcatttgagaatgtgcgaacatcaaaaaaagcaataatggaaccatattcactggacatcatgcacgcagagagtgtgaggttatcacagctcaaggccaggtgatggattgggaatttcataggaactagcaagccttggactttatcaactattttgttgggatcatctccgggtttattttgaataagaagatttttagtaggaaaaatctgcaagccactggctccaccagcgaagaccagaccatatttgttggacacagcaagcagactcgagcgttccttgggcaattcctcaggggagtcaaagattctcaccttctttagcgctctaaactgaaaatccttcatctcccgctcgggaatcatggcatccatccctcgtgccgattcacacacccagcctcgtaccttagcctaatt

SEQ ID NO: 150193 - DNA, 839 bp, Homo Sapiens
cctgcgaaaccggccatctggcaggtcccccggtcagtgagtgcatacaagccacatacttgtgcagatctttaagttctgctggtagttgtttcaaggcacttgtcccactgcgcctgctccacatacagctccaaagcagctgatcacatccacaaccccaccagcgagtccactttgccctgattctttgaggaactcctttatgatgcttggttccacatagtcttcatacctgggatctgaactcctttagctacacgtcttcgccttgttccacgtcctcaccctcgatgaaagcatcgattgcattccttgacaaggtccagattcagatagagctctgcagctgcacatgtgctttccaaattccaaatcagctggggtcctacagccagaacgacattccatattacgttggggaggcagaaacttgatggagagttcagctgccttcatccaagcacattctcacgccaggccagctgtttcacagagtctcgcacatttgaggtagcaagtccacaggcacaggcatgtacatcatccagcacgtgctcgcgcagtgtgcgagcattgtgtccacgaatccctccaacacgcccatggcccccgttcttagtagcttcccagctcatattcttcctgcagagcctccagctggctgggcacatagtccttgcagatgcgcagagcagtcactccataatccagcctccttataataattgagggccaggcctggtctctgggccacggagcagcagcccttctgctttctgaaagcctcggccagattcaacacccaggcctcgtacctagccgtatgctgtggaata

SEQ ID NO: 150194 - DNA, 942 bp, Homo Sapiens
aggtagtcctccgaaatctcccgggttttccagccaccaaaatactggctcctaaagccatctgcatactccaccacctctctgcccaagtgaaacatccaccagattagaccccagattggtctccttcttttgcataaagcttgagaaggttcggatgcaactgggttggatccttgggcagctctgccaacgtgcaccgaaagctgagttttttggggtgcttcccttttatagaaaaggggagaagcattatgattcgctgccacaaagacattctcctgaataaacctcttcactctcccaactgtctcagcatcaactttttttctgctgctcgagaatctccagcattttggacaatgtacacactgagtggaggcggatcccgtgcgcctgcaacttgtccttgcctccctgctctctgtccaacagcactatggcatcagtgaccttcaagccctccttctgaagaacctcaacagtttccaaaacactagatccactggtgacaacatcttcaatgattaaacaggtttctcctggattaatagttccttctacaagacgcttagttccataatcctttgtttctttccttctaataagcattggaatttgattggttgaacagataactgtagccaatggcaaagctgtataaggcactccacacacggtgtcaaaactgatgcctgcattttgggcagtttggaataaaatatctgcaacctgactcagaagacgcggtcgagacacgatgccccgcagatcgatgtagatgggggaggaaagcccgctcttcagcacgaagtccccaaacttgaaagcctgcacgtcgtacagacccgtcaccaatggccccaaagctgcacgagcgaccgccattgtcgccctcgtgccgaattctccacccaggcctcgctacctagccgtatgatt

SEQ ID NO: 150195 - DNA, 1071 bp, Homo Sapiens
cagaggttttcctgggaaaatcctgttgtccgggttcagcccgcttcgctatggctgccgtttacccgtttaacccccagtttccgttccaatccaatcgtccaaaacaaacagcttgccagtaccaccctcaccaccggtaacccctcaaaattcacggtctcagcagcaagtattagtcctaaacatctgctactgcacagctctcggccagtgaacatcagcagatagacacagatgtctccttcttttgcataagcctgagaagctttcgatgcaacttgggtggatcttgggcagctctgcacgtgcaccgaagctgagttctttgggtgcttcctttatagaaaggggagaagcattatgattcgctgccacaaagacattctcctgaataaacctcttcactctcccaactgtctcagcatcaacttttttctgctgctcgagaatctccagcattttggacaatgtacacactgagtggaggcggatcccgtgcgcctgcaacttgtccttgcctccctgctctctgtccaacagcactatggcatcagtgaccttcaagccctccttctgaagaacctcaacagtttccaaaacactagatccactggtgacaacatcttcaatgattaaacaggtttctcctggattaatagttccttctacaagacgcttagttccataatcctttgtttctttccttctaataagcattggaatttgattggttgaacagataactgtagccaatggcaaagctgtataaggcactccacacacggtgtcaaaactgatgcctgcattttgggcagtttggaataaaatatctgcaacctgactcagaagacgcggtcgagacacgatgccccgcagatcgatgtagatgggggaggaaagcccgctcttcagcacgaagtccccaaacttgaaagcctgcacgtcgtacagacccgtcaccaatggccccaaagctgcacgagcgaccgccattgtcgcgcgctgcctgtttgcttcccccggccgtaatggccgaattcccgggcatatgtccggtaccgtcgactg

SEQ ID NO: 150196 - DNA, 822 bp, Homo Sapiens
gtctccttctttgcatagcctgagaacttcgatgcactggtgatcctgggcagctctgcacgtgcacccgaactgagttctttggtgcttcctttatagaaaggggagaagcaattatgatttcgctgccaacaaagacattctcctgaataaacctctgtcactctcccaactgtctcagcatcaactgttttctgctgctcgagaatctccagcagtttgtggacaatgtacacactgattggagcggagtcccgtgcgcctgcaacttgtccttgcctccgtgctctgctgtccaacagcactatggcatcagtgaccttcaagccctccttctgaagaacctcaacagtttccggaacactagatccactggtgacaacatctgtcaatgattaaacaggtttctcctggattaatagttccttcgtacaagacgcttagttccataatcctttgtttctttccttctaataagcattggaatttgattggttgaacagataactgtagccaatggcaaagctgtataaggcactccacacacggtgtcaaaactgatgcctgcattttgggcagtttggaataaaatatctgcaacctgactcagaagacgcggtcgagacacgatgccccgcagatcgatgtagatgggggaggaaagcccgctcttcagcacgaagtccccaaacttgaaagcctgcacgtcgtacagacccgtcaccaatggccccaaagctgcacgagcgaccgccattgtcgccctcgtgccgaattcgccacccaggcctcgctaccttaggaccgttgtagttactgccc

SEQ ID NO: 150197 - DNA, 808 bp, Homo Sapiens
  misc_feature (321)..(321): n is a, c, g, or t
cctcgcagccctgcccgctttcttaccccgcagtctcctcccagccgcctgtcagagctttctccccctcccctccacgatccccctggtttcggatacattctgcagcagctccttccctctgcttagaggcaccgatcaacgggtttccgtgaaggcctggggtggctgccttttggatcaaccatggccgatgtttccactctgacctcactggggctagggctagggcagcctctatggcttttccccctgctctctgcctttacttctctgcggctggacacgatgtaacttacttctttgctcaggaaaccctcnattaccccacccagttgctgaatggcccccgtcaaaaactggagattcttgccagcaggcagatccaagtaaaaggactttccggaaaagggatgcttcctggcacctggtgagttcttctggcattttcctagacacctggaaactcctaggtccggggcccggagcctactctcagccatggaactctccagctcgaggcactcgtctccctttcccggttcgctcatcaaatgccggctccttctcggcctccgtactccttcctcagaggcctccgtattacattcgcgagctccatgagctcttcccgattccacagtcctggttatctcagggcagctacagcatcaatctcttggcgttttcggccgcggcttcagtttaaatttcctgccggctccacccctaaaagaacgccgtagctgcgagatccgccctaccctcggccgattaacacccggcctcgctacctagcctgactggc

SEQ ID NO: 150198 - DNA, 1418 bp, Homo Sapiens
  misc_feature (250)..(250): n is a, c, g, or t
ctctgctgtggttcctccttggggccccctgtgtcttttgggtcccggtcaagaacccctgattgtcccgcatatctgttgcgcccctcattttcgccttgctgttgcccaccggctccgtggtactcgtgagagggtcccaaggttctccccggtacccttctacccccttgcctgtccagtgatgaatgtctgtgccaatgccattccagaagttcccgttcttgggagacgactaggatgtggaggnccacgtctgcagtaattctccagccacaggatgcccctgacatccagcatgtttgtaggttcatctaacagcagaagatctggcctagcaaagagggcccgggccagggccagcctcatcctccagccacctgagaactcccgggtgggctgctgctgcattttaggggtaaagccaagcccagcgagaatgactgatgccctggcaggtgccttgtcagcctcaaatctccttccagtttggcatagatttctgccagctctgcagcttcagagccctccgccctgccagcagcaatctgggcagtgagctcccgctccctccgtagcaaatcctctcgcacactgtcactctccagcacactctgcagggcaggagtgtcatctccagcaacctcttgctcaacgtgcagcagggaaatgtgggctggaacccgcagactccgggtggccagcatcttcagtaacgttgtcttccccaacccattccgccccaccagcccgtaacggcggccccatgccaggttcacatccgctccagccagcagtactctatcgccaaaagacacatcaaagttctcaattcgcacatcataggatttgttcttgccagatgattccaaccgactctcctttctgctgcctgcctggctggctgatgcctcttctaagactagagggttgctggtcttgagcgtgtccttctctgagcgcttctcctgctttgccttaagtcgagcctcggccttctctaacttctttgcattcactgtcgaggactgttccctctttagcagtcctggaagtttggttccacagtcgtagttctccgttatctttgacaactggataggggcgtccagtagcacctggctatttccctggctttgtggctcagccagacgcagagtgttgtacatgcgctggcacacggccctgatgcccgcgtcatccttgctgtccccggacacctcttgcaatagttcccctacagcttccaccaggtcatccacagactcgaagtccgcgctgccgctgtgcaagacgccggtcacgtagtcgaagacttgtccgtcaatttcggggaactcgctccgcaggatttcggcgcaagtcgccatgtccaccctcgtgccgattcgacacccagcctcgttacctagccgtag

SEQ ID NO: 150199 - DNA, 1023 bp, Homo Sapiens
tcgactttgagcgatcttggcagcgttaaccctggcctcctttgtctgcgccatgtcctgagatgaccccatcaggtaatgactagcagcaccgagtactaggagccatcctgcacggccgctgcattcctggccacgtgggtgaccacgggggcaaagttggtggggccgtacagctgcacagtgcgcaggctgcggtggtaggcctccaggatgccgtcgatgccgcagcatgaggggttctcctggttgccattctgcgtcttgtcaggaacaaggaagccagggccagctgtgggcaggcagcttcagacattgaggggcagcatcagtgggaactcgtgggacactctgccatccgggggcagcttggcccccgaagcccagggcagggaacatcttgtcactgtcgtagtgctggatgatctctccgacgcagtcagcgccagcgcgtaggcgttcagctggtaggggctcatgtagtgcagggatgtggactgtgaggggttcccattggaggcagtgaaatcaatggccacagtgaagttgatctgggtctgtgccagaattcacgtatttctttttcttcattttctttttcgggtttaccacctcatagatgttgaattggctctgcccacgggccagctcccggtaactggtggtgaactccccaatgaagtcatggctgccgtcccgatcccagtcgtacacctccaccttgatggtccttcttcttggccactgcagaaggggcataagctcagcatggagctgcactgtggatttaccaggggtggaggagcggggaggtgggagtgtggtgctccctggatctcaggccccggcagggtggaggggagggaagaagactgcttgttgagggtctgagggctttgggtgtgggagccagccctgcacgtcagggaggagcccagggcctggctcggggatggcccgctgagcttttccatccccacgaccctcgtgccgattaaccacccggcctcgtacctagcgcta

SEQ ID NO: 150200 - DNA, 807 bp, Homo Sapiens
gtgttgtatgttttttcgatcttgttggagcctctctcttgtccttcttgtgtcttctgtccggccttggcgaatcaaaggcctattacccggcaccaggcaaggactgctgcgacgagtccccgactggggctcgggtcacgctaggactggtccggacaaggcaccgcgtcctgcccgccgtgtaaagtgtagcatactgcctagggtgctgcccactggcccttcgcctccccctcagcatccccctctgtgggccaggcggcttaggctgtggacccggcgcttaggtcgaggcagggtctgggggagtgggcagggggcccggccaagtaggagaaggcccagggtgcgccaggaggtggccctggggccgggctagagggtgagcctgggggtacataaaaacatagggtgggggtccttggcacaggaagtgaagaacaaagcttaggggcacgctctgtgccctctgggaggttcctctcctggggggggctgggatctccaccgctgggctgtggggcaggctgttcctgtgacgtggccagacccccgtgagcgtgccccgatgctctcctggctgggagagcgggcaggtgggagggggagtggttcagggccaccccctgccatggccgcctgtagctctgggcttagttcgctgccctggaaggtgaggagccgtgggccagctgtagttgggccttgtccgttctccagtccctcgatggccatcagctccggacccttggccagccggcgccttcgtgccgaattcagacacccagcctcgtacctagccta

SEQ ID NO: 150201 - DNA, 1684 bp, Homo Sapiens
acacgaggtctttatgaatcgccacccagccctgccaggcatctgagcaagggtacccgccacccagcagccactgatcagccttccacaaagctgcagaagagggctttccccagcatccttcctcagctgcctccaaaaggggcctgggccagggctgaggggcaggcaggatgtggagcgggcatccctgtgtgcacggccccatcccacctctctgcacagggtgaagtgcagggcaccctgcacttgctgggacagggctggagagaagcaaggggggctggggagagtggcccggtccagcggttagcccgccgggggcacgcatctccagcagcggcacctcagtgtggcttgggggtcgtgtctaggcctgggggtgggaagctgagggtgaggctggggccccagggccccgggagaagcctttgttcctgcccaggcggctgctgggcggggcctttgggcttcggggcccaggactgggagaggtggtagatgctggcccaaggccctggcggacagaggtctttcccaagagctccttaaacacagagtccatgttctgtgccacagccttatccacctccacgtgttgctctggggaggctgggaccaagcagcgtcgtctgtgtccagagggtcccatggcctcaggtgaggtgcatggctctggccggtggaccagctccgatgccaggaggccctcgggactgctcccagactcccctgcagtctgcagccctgcgcccaccacctgcttctccgtcccggcgggcagcgtgatatacttgtgggggatgaggccccgcatgccgttgtggctccccccgccaccagtcgctcgaggccctctcgtgcagccgcagtacgtccccccgccggaagctcagctcctgggctgtgcggcccgtgtaggcaaagcaggccacagcctccacgaccccctccaggtcatcctcctgtgcgggcatctcggcttccagctccggctcattgtccgcccccaggctctccagctgggcgtcccccaggcagctggcggaaggcggtgccatgcacttctcgtagacggggccaggcagcgaggtcaggggcgggaagacccgatcgggctgcactatgagcgtctgcaccagctggttcacccggccctgcagcgccaccgggtcctgcccagcgggcaccggtagcagcgtgggcccgaagcacacggccaggttgtaggggtccatcatgttctcatcgctgtactgggccaggtggttgaggaaggtgaagaggtagcgcagaaccaccagcaccggcgcgggcagccgccacagcaggcggctcacgtgctccaccctctccgctgtggcctccagctccgaagaagccagcagctcgccgaacaggtctggggggaagagtgggggctccaggctccggaagtagagcttcagcaccccggccaccgagtccaggtcgtgggcagtgcagccctccaccagtgggtcctcccctctctcgaaggcatcacggatctctgagacccggagctgggcacccgatacccggaagatgccttcatgctgcaggccattgaggttgatgaagcgaatgcagctctccaccaccaaggggcacaggctgcctcgtccgatttaaaacaccccgcgggggcccctggtctctatgc

SEQ ID NO: 150202 - DNA, 653 bp, Homo Sapiens
cctgggcagtataccttctctctccgcttaccagtgccacctctgccctcgccacggcccccttctgcctctttctgttcctcttccagaaggccctccactcttggtgccatccaatccagttttcctgacctcgtaaactctcgtccacggctggcacctctcccccgtcttggtggcccaccacgtcgccgactatagtctctgtcccggtctcgattttctttgccttcctcattggattccgtctggccaccatccttctggcctgagactcccttcttcttcccgaccatctcccagaagtgcgcctgggtgcagaagtgcgcctgggtggcacccaggcgcacttcttgactcacactaagtgatagcacgtggtaaacaaaagagatcgattgagagactgaggcgatacgaaaagatggggatctatgggaattgtggccaaggaaataaaatacccgagcaacctaatacgcagaatgcatgtcataccaggatcaagtcactaatgacagccaagttccaggctgatcaatggctgcctaatgagactggccacactaggataggggactggggagggcacacacatgagtgcccaagcttcagtaacacctccccccttcagccagaagtgcgcctgggtg

SEQ ID NO: 150203 - DNA, 1636 bp, Homo Sapiens
  misc_feature (404)..(459): n is a, c, g, or t
  misc_feature (909)..(977): n is a, c, g, or t
ggctgttgcagcggtggtcggcactccatacgcaccggcacacaacacgactagagccaggcagtgatctcaatcgtacttcccctcgccgccgcgcggctgtctgccacggatcatcggccgtatcacagacactgttcgctcactgcgcgccacaggcggctcgatcctctttcgtcatcgtgcttcgcgcgtcctacctgcgtcccgcggccctgtacgtcgtcaagggcgcggcggggccctctccgtctagtcggcgcgcgcacccgccccgcctttacgacgggcgttgctgtcgcgactccctctcaggcgcccccgcggcggtcgcagcgcggataccgcgagacacccacgaaagaacgcgcgcagacctcaccatacacagtccactactcagnnnnnnnnnnnnnnnnnnnnnnnnnnnnnnnnnnnnnnnnnnnnnnnnnnnnnnnntaaaactctcgttctccccaagcacagttcttcccccctacgtgccaccattcttttctttcacagcccccgaccatcagaattatctcccccagtgttgtaacaccacctctttattatcccccctctgcacgtttctctacttggctccctccgggcgctttaaatttccgccctcgggtgcgttgttggcccacttgtgttggctcccccctccgcggatgaggtgtcgtctctcccacaggtgtccctcgtggtgcctcggtttgccccgctgccccgcggctgttgttatacgcgcgcccccgctctctggctctcattatatactgcgctcctctttggtgggcgccccctctctgtgactcacaaaaacgtggggcgctgcgcgcatcatctggggctcccccctgcggagagatctctttcttgggcgcgccgccccccgcnnnnnnnnnnnnnnnnnnnnnnnnnnnnnnnnnnnnnnnnnnnnnnnnnnnnnnnnnnnnnnnnnnnnnccatgccagagccacattttattccaggatgcgacacggggcggcggatgcctggcctcggaaaccccctccctgcctatgagggcttgtccagggctcctctggaacacagctcagccaggcaaggctgggagagggctgggccccccaggtgacctgcagacgcctcccccacctacatgccccacgcaaggggagccctggagcccggcctgccttgacaggaaggagataggtgaaaaataaatacacggctgggccgcctgcagcaagcgcgacagtgcccgggacccccagggccactcctgcctctggtggcctcaccgcggcccaggccctcgtccccaagggttcagacaccactgtcggcgagcaccgtgctgggcgcagaggccacgtgtggtgggacggcagcctgctggcccctccaggtgaggaccaggagcacaggctgtggcaactccagcccgggcaggggccgggacctgtgtggataatccacccaaacaccccacggccctcatagccccgtgacacacaacaggcgctcaataaatagtcgtggaggtggggggagggcggggcggcatgcgagcagggcccccacgtgcgcacgaggcctcgtgccgaattcgcaacccatgcctcgctacctagca

SEQ ID NO: 150204 - DNA, 201 bp, Homo Sapiens
tgatttgtcagcatctccctcaggattctgctggtctcttgcagagtgaatgagtggcccctgcctctcctatgggtcctttgggatctgagctctgggccacagtctggccgcagccctgaagctcctggcccctctactctcagctcttcgggacagtcctcgtgccgattcacacacccagcctcgctacctagccga

SEQ ID NO: 150205 - DNA, 1407 bp, Homo Sapiens
  misc_feature (1391)..(1391): n is a, c, g, or t
ctcctgcccacctcatgtgcggggtttgaggacatgttgggacccagacctttgcttgtctcctggctgctgctctcctctgccgcactatctgtctgcccatccttgtcacaggctgccgggtggggtgtcagactacccccggcttggaggggccatgccgctcagggccatcacgtcccgtctctcgctgatgggcaagcttccgccgcagtgccgtcatctctttcttgatcatctttgcacgccgtgagcggcccacactctgcttgctggcattcacttcgtccagccgctccagaagcagctttagctgttcttccactggcaggtgcttctggttctccagcaagaccagccgctcttcctcggcatcttcagtgtggtgtgtggcctcatctccagccaggctgtgggggatatgcatgcccgtctcaaagtcaatgcccattttttctgcctggcgccgggcctggcggagcacagcaccaccctgctcacgaagccgcactgctgcccggtagaagatggtgtccttggcgttatacttgaggcagttgctgacgatgaggttgaagtcctcctcaaaatcatcaaaattcaggtagcggtaagcctccaagttctgcttcatggtgaaaaagtccatgggctttttgatgtggtctaggtagtcaggtacttcgtccaattcggttacctcagacagagggaccggctcgctgaagatgttgcctgtgtccttctcttggagctgctccaaggttttgcgaaggaggatgaggaaaggagtcagctgcatctccatggcaatctgctgaaccttgatcgtctcccttttgagtttttcccgcttgcggatcaattccacgagcagccgagctcgctccaagtcatgccggagccgctgccaggacttgagctgttctttaagggcccagttcttatcctcagaatctctcccaacttggtcacagttcctctgagattgcaggtgtgtctgcaggcgacgtagcaatgggaccccattccgtgactgccgcttcagtgtccagtagctgtgcagcctctgcatgaactggctcttcctttggatggtcaggcggttggtgattttactaagcctgtgtggtgggatgcagggcactgacaccacaggtgctgctgcccgcttctctgccaggatcttccgtgccttcttcattttgatccgggacttggccttggccttcttgactttctctgagctccagcccttaccctcatcctcctcctcatcttcatcctcctcaccctcgctgtgggacagggcaggcagtcggcgtgctgaacctggaggcgtgtggatgtcgcagtaggctgtcttgccctcgtgccgattcaccacccancctcgctacctagccc

SEQ ID NO: 150206 - DNA, 891 bp, Homo Sapiens
aaattgttcccagaagcaaacacatggcctgaacaatccctggattgtaaaataaacaacactacaaaggaagacaataccaaatgaggctccgtagtcaccatacccagcagcaaccgaaaaaggtttggtttcttgtctgggaacagcactcaccccacaccccaaaggaactgcttggtccaaaagatggagaatatgagcaacagagtgacactgaggatgacggccatcaggtaggcaaagatgcggaactgagggttgcggaaacactccctcaaagagtggtggctggggatgaggatgggcgtagacacggtggcagaggccgtgtctgggggcggcccagtctggcccccaggctgggggccaaggtccagcgtgtagacttgaggctggcgcaggaagtagcggctcttgggctggtccttgaggcacagctgatggccttccaggatgacatggtggggctccaggcggagcagggtgagcatggcagtgtccgtgggcaagtcagtgacaggctgccctgaggccagcactgtgggctggcgacagagtgggcacagcaggcggcgccgggctggagtcacaaggctgaggtgggccagacattccacgcagaaggagtggcagcaatccagcattttgggggtatggaacgtgttgttgaaggggttccagcagacggggcactcagcctcaagctcccggccctgctgctcagccatcctcagccacacacggggaggcctcgcgggagacgtcctggaagccttgcagaagcttcctgccccagtccccagatcagcccttccagagcctcttccccttccagagcctcttccccttccagcctcgtgccgattttccaccccagcctcgttctag

SEQ ID NO: 150207 - DNA, 976 bp, Homo Sapiens
ggggaacccttgagaggcctcctttccaagagtaaggcccgctcccttggaccagattcctcaagaagttcggggaggatcctttgttaccccgatccaaaaagatttccagtgttcaaatagtaaaagagttgatccaactgaaggcgcttttcgaaatcctggggcctggggattttgccgtggtagtcggagtaaaaggagctgctaaagcccgccaaacatgccagctattgccagctcatattccgagtggccgtagaaagaagctgggtcaaaaatcaccggcccagaggaatccctctgctaacgtttccaccccagaggtccccgtggagtaaggctgggatgatctccaggtcacggaacaggtcagggatctttaactgcagagcagaccaaagctggagggcctccctgtccccagactccttctccaccatgtccatctggggctgaatgcgctgccgggcatagaacacgacccagtcctcctgccagtcattcacctgggggaggtatccacagcacgtcaccacgtcaaatccaaaccgggccacaaagggccgttcctcctgcccacctcctctccccactgtgcccgcctccttcaggcgcatctctccaagcttcttgttatcaaggtgtaaatcggccagctgggctccaagctttgcagcatgactgctcagatgcctcatgtccatgtgctccatcaccagcacgctcccgccgcctggggcatccagaaccttgatgggcttgggcactttcaccgtgtttgttttcaggatggcagttaaacttgccatctcaccttcaaacattcttctggcctccgccttggggttcactttcacgaacactcgtccttgatccgtgtcgtagctccggccctggctgatgcacccgccccccgagtggcccgtggccctgacagagctgcagcccagctcgcgcctcagcagctcctcca

SEQ ID NO: 150208 - DNA, 961 bp, Homo Sapiens
  misc_feature (261)..(278): n is a, c, g, or t
ttcccgggaaagggacccgcgcccggcggttcattggagggatgaaaccccggcttggtttggaggggaacccggggccgggggtctctgagggagaggtgggcgaatatggggaccacgaacttgggaagagaatccttgctgagtggggaggccccacgcgggggggcaggggcgggcactgtaatcctgggtacggcacggcctgtcccgaactcatggccgcagtaaacggggtggctaagcgtcccgcaggcaccnnnnnnnnnnnnnnnnnnatgcgccgaggtgcaacggcaggaggcccactggcctctggggcagggtagggaaggggggcggtaggtgccagttcgtgcagcctggggggcagcggggccagggcctgtgggagtctctgcccctttaggaccatctcctggagcttctcgattttcacccgtcgcatgtgggccagtttccgtttgctctgatagacatcaatgaaggaatccagaggaagttctccatccagaaacttctctgccatgttctcagtgtcttcctcaatcttggccccttctgcctgaagaagtgctaacagggtctccaaggaagcactgctagactgtctgtctaatttggtcttctttatctgataggcttcaaagagaacctggagttcctggtatttctgggtcaagcgtgctttcaacgtgtccagctggggctggtacaaaaggtttccttctgccaggctccggttgctggcaagtgtcatttctttgttaagctgaacattctgtgtctcctccatcttctgcaccatctccgtcagctggccctcgtcctccagcagctcgttgagctgcaccagcgacagcccggcgaaccgggcttcgctcccggcgcccgccatccccacgtctcggccgtcgtcgccaccgccgctgcggccaccaggctccgccgaccggaggcg

SEQ ID NO: 150209 - DNA, 838 bp, Homo Sapiens
cgggcaccagggcccgcagtcgcgaaggcgccgcagccacgtgcggatggtgttccgcgacaggctcagatgcagcaggcctgtcatgttggccagtcgcggcggcgcacggaggcgatgaagttgtctgccagccgcagctcggctgcccggcggtccagcgagggtggcacgaacaggaggccatgcccctgggcacagcacgcttaggggcagcgactgtgtctggcagcaggcagcggcggggacatgggctgggtgtgtctgactggggtggggatgaggcaggggccagcggcagcaggcacaggagcaacgggaggatggccatcgcgggcaggggtgtcactgagctagaagcagccccagggagcagagtcctagctccaggggagtcagaggtcagggctctggagggagcatctggtcatgcttttcctgtccccaaggcttctgtagagggactgtgtcctgactcggctcaaatctgtggcaacggagtctccagaccttaatactcggggttccagacccctaaatattgggcctctagggtccagttttacgggtccagtttgggttgttcagggtcagggtctcccaggtccagtcttgggatgctaagcagccaaacggtggggtttagagtctgagatccgatcccggggttctgcattcagatattggggtgctgagtcaagattgggaggtctcaagccccagatttaagcactcaggtctgcagcaaggacttcaggcccaaactcgggttcaggccccttggcctcgtgccgaattaaccacggggcctgctacctagcctatgttgatctttttg

SEQ ID NO: 150210 - DNA, 796 bp, Homo Sapiens
gcggcgaaggagcctggccgcaggcacgtccgccgacgaagagcgaagacgcgtcctccgcgcagctttcggctatcggactcaagatgcaccccgcttcaggacgatcaccaggtctgcactcaggatggtggcactccgagctggcagggcaggaggggcgggtcaggaatggtgggaaatacccacccgcggtgggggccacagctgagggtggccctcctgtggcgcgatggtgaccacagtgcggtctgcgaaggctgtcatcaccaccttttggaggatgttttccgtggccatgtcaatggaagccgtggcctcgtccatgatgaagatgctggtcttcctcacgaaggcccgggccaggcagaacagctgcctctgtccctggctgaaattctccccgccttctgtgatgatggcatcggatggtgccgctgaagaggacggggtcctgcaggatgatggagaggcgtgagcgcagggtgtgcagcggcagtttggcgatgtcaatgccatcaatgatgatgtgccctgcatgggtcccagtgagggtgcaggggaaggcggtgactgctgggcctcctgtcatgtctgaccacgtgccagggctgaggcctcatctggtggctgtgggtacacgtggggtgcccgccttacaactcaccttcgaacgtgtccaccatgcggaagaaggcaagagagaaggaggacttcccactgccggtgcggccgcagatcccgatctggcctcgtgccggattcgccacccaggcctcgtacctagccgatcgtt

SEQ ID NO: 150211 - DNA, 1114 bp, Homo Sapiens
tccaggggcgatgagggcattgacgtgcttcagcaccggcttcagggagctgtcgtagcgcacgctcaggttctggatctggatcttcccttggtctggccagttctttgggatcagcgatggtgctgggggccgggctgggctcagccaccaggcatgggccacagctagtatccgaaagtgccaccccatccccaggctcccttgtggcccccaacccagacacactcctccttggactcttccccacccctctccctgagcctctcacccaggagcccctcgtagctctctgcctcggttttcaggagcccatggatgcgcttcacagcccccagctggagctccatgtctgccaggttcctcaccatccagttgaggtagttggagacctgtggggtgcaagccagtggcgcacactccatggtcgcttagttctgtcctcagccaccagaatggctcttcttaaggctggagaggggccagggccccagattccttgttgctgccatccactgcctgctcagagcagccctccctggaggcacagggagggtcagtcatgtggctccccgacctccacctgtctggggcctgggccctggggcctgctggtcagccttcctgcccgcactgtccctctggcatcagatgccaatgaaattggggtaaggcctgggagtgtctcatgtctccagtgacgaaggtgctccgggagtgctggtgtctgacccctcctctgccctagcccactgccgctcaccattagggcgtaggtaaggcccaggcccaccaggccagcagagagctccctgtgcagggagttggagatggaggtcaccgctgcgatgagcaccacacatgcaccgatgtactccattcggacttccagccatctgttggcagctgtgaggaagagggaagcaatgttgttggagtctgtgtattcgagaagcttctgctggaaccgggcctcatacctgaaggcccggatggtggtgagtccttctacggtttcggccaagtgtgagagaagtggaagctgggtggtgtcatccagctgctgcaggtcctggacgccacccggaagtacttctggatgaagtagcacacg

SEQ ID NO: 150212 - DNA, 473 bp, Homo Sapiens
aggaaataatcaaatctatttatttacaagtgatttacagttagaaaacccaggcaggggtatgggcagggtccgaatgtgggatggcacttgggctctggcaggtcacttgtctgcacggacgaaggaggcgaagacgctgtccttccggctgagcagcttctctggcttatcgaactcaaggatggcaccccgcttcaggacgatcaccaggtctgcactcaggatggtgtgcactcgatgcgcgatggtgaccacagtgcggtctgcgaaggctgtcatcaccaccttttggaggatgttttccgtggccatgtcaatggaagccgtggcctcgtccatgatgaagatgctggtcttcctcacgaaggcccgggccaggcagaacagctgcctctgtccctggctgaaattctccccgccttctgtgatgatgtgcccttcgaacgtgtccaccatgcggaagaaggcaa

SEQ ID NO: 150213 - DNA, 530 bp, Homo Sapiens
  misc_feature (76)..(88): n is a, c, g, or t
tttgacatgaatggattcattaccactatcatgaccaaagagcagttacaaggcatcctcctggggtaccagtacnnnnnnnnnnnnngttggcggccgcagatcccgatcttctgtccattggcgatgagggcattgacgtgcttcagcaccggcttcagggagctgtcgtagcgcacgctcaggttctggatctggatcttcccttggtctggccagttctttgggatcagcgatggtgctgggggccgggctgggctcagccaccaggcatgggccacagctagtatccgaaagtgccaccccatccccaggctcccttgtggcccccaacccagacacactcctccttggactcttccccacccctctccctgagcctgcaggatgatggagaggcgtgagcgcagggtgtgcagcggcagtttggcgatgtcaatgccatcaatgatgatgtgcccttcgaacgtgtccaccatgcggaagaaggcaagagagaaggaggacttcccactgccggtgcggccgca

SEQ ID NO: 150214 - DNA, 632 bp, Homo Sapiens
tgggctctggcaggtcacttgtctgcacggacgaaggaggcgaagacgctgtccttccggctgagcagcttctctggcttatcgaactcaaggatggcaccccgcttcaggacgatcaccaggtctgcactcaggatggtgtgcactcgatgcgcgatggtgaccacagtgcggtctgcgaaggctgtcatcaccaccttttggaggatgttttccgtggccatgtcaatggaagccgtggcctcgtccatgatgaagatgctggtcttcctcacgaaggcccgggccaggcagaacagctgcctctgtccctggctgaaattctccccgccttctgtgatgatggcatcgaggcctcctggcagtgccttcaccaccagcttcagctgggcgatttccagggcctcccacagtgtgctatctgagcacttcctctcagggtccaggttaaatcggatggtgccgctgaagaggacggggtcctgcaggatgatggagaggcgtgagcgcagggtgtgcagcggcagtttggcgatgtcaatgccatcaatgatgatgtgcccttcgaacgtgtccaccatgcggaagaaggcaagagagaaggaggacttcccactgccggtgcggccgca

SEQ ID NO: 150215 - DNA, 973 bp, Homo Sapiens
gctctatcagggaattcctttagcctagacctaacccttgctgaggtttcccaagcccccacctgagcataagatgagccctcttggtaatggttaggtggggacccttggagttggttggggggtgtcttgagacctttagtggagccctcaggtgggccctgaaagctcggctgctgcgtttggtgttgactcgcttgcggcgtctgcggaggacaatgtagatcttgatgtagaccagcagggtgacaatgaagggcacgtagaaggagacgatggaggagtagaccacgaaggccgggttggcaatgatgcactcgttctggtctgcgttattgagtccgaagaggagtgggcaggagatggtgaaggacaggacccagacgatggagatcatgacggtgacccggcgcttggagctgtagcgcgtattgtatagcatgggcatggccacagctgtgtacctgtcgatgctgatggcacacaagttcaggatgctcgccgtgcacatcatgacgtccagagtgacgaagatgtcacagtgaatcctgctgaatttccactcacctaccacctccaggtagacaacccagggcatgaccagtgtggcgacgaggaggtcggccactgcgaggctgacgatcaggtagttggtggtggtctgcagcgccttctcgcgggacacagccatgcacaccagcacgttgccgaagacgatgacagcgatgagcagggtgagcagtgtggcatagtagttgtagtggggtctgtccgccttcccgtctgacccgttgaagggccggctccagttctgcctctccagatcatcatcataccaggacagattcagtggatccatcagggcggtggagccactgggtggccaggctcttcaagccatagggcgccccggggcagagacggcgccggctgcttgaggcttccagctcccgccgcatccacgcgcggccgc

SEQ ID NO: 150216 - DNA, 1142 bp, Homo Sapiens
  misc_feature (65)..(65): n is a, c, g, or t
cctgaaaggccaggagggcccccttggggttggggaaagtcagcttgggagtggggggctggggncaggtttctttcaccttcccaaccttcccccccaggacccaattccggcccttgagtgccaggagggcccctgtcagggccgtgggggcggtggcagcgcagcccccggtcctgctggatgaactgctgcaggttgcactgacggagctctcggttcagctcctccagcttcctgagcctgagcctgcaaggctcgctctgctgcctccaggggccggctccccagagccaggctgcccctgcccctcggcatttttccgttcctgaacagccaggtcctggtgcaggcgctcagtggcagatgccataggtgaggggggcccaggggcctccgctgccagctgcagctcagcctccagggcacgggcctgagcgtccagggcctgcagccgggcggcatgctcagcagtggccgcacttagtgcctgcaggcgtgcctgtccctctcgctcccgggcctgctcccggcgcagctcttgctcccagaaggcctcatggcccagctcctcagcattcctctgcaccctgagctccaggccccgcaggtctgtgcagcagcctggtgtgggtgtcacaggggccgcaggcccagggcgtgagaggctgggggctggctcgggggtcagtgttttgcggggctcacagcccagcgcagcccgtggctttacagggaggctggcacgaattaggcagcgttccgggggtggacagctgtctgaggagggcctcccagctaggctgggccctgtgcgcctcaggacaaactggacatcgctggcaaactgtccgcaggtggcctgggcgcccactggacactcttgtggcagcaactgccgctccttctcccgaagccgctgcacaagcacaaagcggccagtctggcctattgcttgggctagtgcgatgaccacttcctggcaggtggtctgctctgagaccccacagaccacacgctggatgccatccacccacaccttcagctccatggccgccagtcccaacaacatgcctgtcctgggcgctcgccagcctggagacccgctccggcgccgccgcaacctgccgcccccagcgccg

SEQ ID NO: 150217 - DNA, 1195 bp, Homo Sapiens
ggctaggtacgaggctgggtgttgaattcggcacgagggaagttcccgaacgcgcgggcataaaagggcagccggcgcccgcgcgccacagctctgcagctcgtggcagcggcgcagcgctccagccatgtcgcgcggcctccagcttctgctcctgagctgcgcctacagcctggctcccgcgacgccggaggtgaaggtggcttgctccgaagatgtggacttgccctgcaccgccccctgggatccgcaggttccctacacggtctcctgggtcaagttattggagggtggtgaagagaggatggagacaccccaggaagaccacctcaggggacagcactatcatcagaaggggcaaaatggttctttcgacgcccccaatgaaaggccctattccctgaagatccgaaacactaccagctgcaactcggggacatacaggtgcactctgcaggacccggatgggcagagaaacctaagtggcaaggtgatcttgagagtgacaggatgccctgcacagcgtaaagaagagacttttaagaaatacagagcggagattgtcctgctgctggctctggttattttctacttaacactcatcattttcacttgtaagtttgcacggctacagagtatcttcccagatttttctaaagctggcatggaacgagcttttctcccagttacctccccaaataagcatttagggctagtgactcctcacaagacagaactggtatgagcaggatttctgcaggttcttcttcctgaagctgaggctcaggggtgtgcctgtctgttacactggaggagagaagaatgagcctacgctgaagatggcatcctgtgaagtccttcacctcactgaaaacatctggaaggggatcccaccccattttctgtgggcaggcctcgaaaaccattcacatgaccacaatagcatgaggccactgctgcttctccatggccaccttttcagcgatgtatgcagctatctggtcaacctcctggacattttttcagtcatataaaagctatggtgagatgcagctggaaaagggtcttgggaaatatgaatgcccccagctggcccgtgacagactcctgaggacagctgtcctcttctgcatcttggggacatctctttgaattttctgtgttttgctgtacagcccaatgttttacgtctggg

SEQ ID NO: 150218 - DNA, 1085 bp, Homo Sapiens
acgtgcgtggtgtgcattacttcataccctatgcctccatggtgtaaaccaggtgttaaactattcgcctgccccgtggcacttgcccttcccgccctctatacgcccccacacagtgtttccgactgaatgccatgccttaatttgctgaaaccataggatcatacttcaccagatgcacaatcactgctgagaagcaaggatcgtcggagtgaactcagttacggagaagacttatgctgtcgtcgtgacacatccgtagctttcttgcctctctttcagcccctattccagacagcatcttcgaaacattgaaagccacacgcttcttctgtatactgtatactcgcagcaccctgtcacagctcagagttagcaacatattgacccaaagggtcccaggttactccttggacataacttttatgttcattaaaaattgatatcttttgtcctttgctgacatcccatatgatggctgtgttatccacagaggcagaagccattaaattcccatcagttgcccagcaaatatcatacacatcttctaagtggccccgcagagtcttcacaaccgtccagttctccttgttcagctgggcctcgtcctcatcctgaaaagcgatctgctccggctccttgttatcattcaccttccacaataggatgacagcatcatctcctcccgatgctaaaatttccccagttggagaaaaacgcacaacattgacggctttggtatgacgagcaagattggacaaaaattccacgatggcttttccatctggtcccttttctaccttccagatcctgacattggtgtccacgccggcagacgccagtctgtggatcctcccagccgtcccatgctggaagtccaggctgtacacgggctccttgttgtgccaggctatttcacaagtgatgactttcatcctcctgagtctcgaaggggaaaaacgtttctcgggcaccgttctacttcttcaagacaggagaaagctgcaaaatgctggagggacccggacagtcagaggcaccgtcacctccctcgtgccgattaacccccagcctcgtacctagcc

SEQ ID NO: 150219 - DNA, 1116 bp, Homo Sapiens
aaacagcagcccgagccgagggcctctctcttgatgcctccatgcattctcagctcagaatcctggatgaggagcatcccaagggaaagtaccatcatggcttgagtgctctgaagcccatccggactacttccaaacaccagcacccagtggacaatgctgggcttttttcctgtatgactttttcgtggctttcttctctggcccgtgtggcccacaagaagggggagctctcaatggaagacgtgtggtctctgtccaagcacgagtcttctgacgtgaactgcagaagactagagagactgtggcaagaagagctgaatgaagttgggccagacgctgcttccctgcgaagggttgtgtggatcttctgccgcaccaggctcatcctgtccatcgtgtgcctgatgatcacgcagctggctggcttcagtggaccagtaagttctaaccatcctttccgacagtctccaggggcccggccacggccagctctaacactcttattctgttgcagaggttgtgctcagctttgggctaggtagcagtcttagagatgccttcaggtctgttgaaaggggtcgatggattttggcaacagctggaaggatgacagggcagtgttgccagagaacgaaatggaactggcttgatttctgggtgggggtgaaatggaactgactccagttctgcacaggactgtgcttctcggttgtgtgttaacatgaactgacagtcggtgcaggcagatgtgtcttgcagtgctatgagtgggtgagagcacgttgtgtggcccgggctggtgagccagcaccgggaacataccaagtgcctggaggcagttatcacatgtttggcaggtctgtggcaaataagccctgagaaaactagaggactgtcgaggattttagagtctgacctggagtccgtttaagtttggcttatagtgtgactgtgtggcaagtgtcggggtggcagccgtggttttccccagtctgtactgatgcagagtagacaagagagcctttgacgttcactctgtttccttgggcaccgtgtatcttacacctgctgtgctgccttacacttgagaccttgatttaatctattctctac

SEQ ID NO: 150220 - DNA, 881 bp, Homo Sapiens
ggagtaagctacgctgaattccagaacccagactctctctgggttaatttctggtttttcctgagattaaattaataccagatgtccactaggtcctaggagatccccaccaatcagatttttgccaagtcccaggaaataacctgatcaaataggagacttcagatttccaagaactactgtattccacctctcccctccctcagatttttaggtttatatccattgcttgggtcaccactgtatacagccgggttgctggtttactagcaagaagattggcttcttttccagtatgcaatccaaaatgtggaactgagtcacagggccaaagcccccttttcctcacgtgaagcaactcagtaagatggcggtgcagtgaagcctgttcccacacacctcggcactgatggagcagtctccaaaggaaggctgaaaggacagcaggtggttgccttgggctccttccttcccatacctttagagtgccatttttcagcactgggtaatagcatcagcgcctcccagatgggaggagcagggaaggtaaaagacatagtgaatgtttacactatgcgaaactttcaaagggggggaaaaagaggaaacagcagattaaagaagttccaacacatcgggtttttaaataacaatgacatttcaaaccattttttaggggataaagaaaaaagaggttttcatgaaaaatccaaccaaaatttagtttttaaaaagttacaaatgtatcatttaaatctaaacaaactggaagaaaacttgagactgttagcatagctgtctggctgtggaaagcattcccagtgaataaacattaccttacctgaactcttggcgagagattctgcccagcttgactctct

SEQ ID NO: 150221 - DNA, 757 bp, Homo Sapiens
  misc_feature (98)..(98): n is a, c, g, or t
  misc_feature (140)..(140): n is a, c, g, or t
agggggtgatcccatcctcagggtagtccatcatctcaaaggcttaatgccactcgcttggattgacgacaggcagctcggaaagagggttcttcggnagttggtgcagctgtgaccttggttcccccggcaagacaaanagctccttgagggcaggggctgggtcttccggttctctggtctccccaagacagggctctggccacagtgggcgatcgaagctgctgattgctgcaggatagacatggccaatctgagcagttctccctatatggagctcatcttcgtcttcttcttctgttgttttcctgtagactgggttgtcaaaattcatgcttttggtgttcttccgcttccagtttctccagatcaggtatccactcatgcacaggagggctatcaccactatgggcacgatgatcccgataacagcggcagtgactgttgagcccatcttactgtcttcatttgcatagtgctgggagtggttgctggttgcagggcttagggtagacgggctgatgctgggagccctggggacactaactgagcttgggactgcagctgtcaggcttggtgtctctgtgctgtggttctggtaggtggatctgtggacggtggtcccgggggctcttgtggtggcaggtactgtcctcgtcatggtagaagctaacgtcgtagttgaggtagattgaggtgctccggtagcacctcttcatgtctggacccagccacattggtcaggacaggccctcgt

SEQ ID NO: 150222 - DNA, 956 bp, Homo Sapiens
  misc_feature (873)..(873): n is a, c, g, or t
gcccacatccagtccctcttcagcttcatcacaggttggagcccagtaggcaccaaattggacagctccggtgtggcctttgctgtggttggggcctgccaggccctgggtctccgggatgtccacctcgccctgtctgaggatcatgcctgggttgtgtttgggcccaatggggagcagacagctgaggtcacctggcacggcaagggcaacgaggaccgagaggggccagacagtcaatgccggtgtggctgagcggagctggctgtacctgaaaggatcatacatgcgctgtgaccgcaagatggaggtggcgttcatggtgtgtgccatcaacccttccattgacctgcacaccgactcgctggagcttctgcagctgcagcagaagctagctctggctgctctatgacctgggacatcgtggaaaggtaccccatggccttagggaacctggcagatctagaggagctggagcccacccctggccggccagacccactcaccctctaccacaagggcattgcctcagccaagacctactatcgggatgaacacatctacccctacatgtacctggctggctaccactgtcgcaaccgcaatgtgcgggaagccctgcaggcctgggcggacacggccactgtcatccaggactacacctactagccgggaagacgaggagatctacaaggagttctttgaagtagccaatgatgtcatccccaacctgctgaaggaggcagccagcttgctggaggcgggcgaggagcggccgggggagcaaagccagggcacccagagccaaggttccgccctccaggaccctgagtgcttcgcccacctgctgcgattctacgacggcatctgcanatgggaggagggcagtcccacgcctgtgctgcacgtgggctgggccacctttcttgtgcagtccctacgccgttttgagggac

SEQ ID NO: 150223 - DNA, 1498 bp, Homo Sapiens
  misc_feature (1390)..(1390): n is a, c, g, or t
ttagctcttgctcctctttattctggtgattactatcttctagatttagtcgccatcttttttggccatgcttaaggaataccgagccattcaaggattgttctacatcttctgtggcatcatgaccaagtcttctggacactgtatatccttcccccaaataaactttggctaagaactttgagcttaaatcttctgccctgctctctgacataaaagccaacgatgtatcaataacatatggatgtatcattttcagtgctctgagatccaaatctaaggagtggcccactaacacagcatcaggaggaagcagtgcttttaactgcctctgtacatctttgagtttggtcgtcactgggttaagaatcttcttcgtgattcctgaaaagctggtgaggtagtccagaatcttgttttcaggtttgaccagttcatccataacacagcagcctccttcagcaaccagtgagatgcgtgttagctctctccccttggatgtgaggcacatttcacagtcaagtccaagagaggactattgtctgctatagaaccattacatttggtaagtaaaaagttttcacaatcaggaaaaccttgtaatggaaaagtgaaacgttctcagtttcctcctttgtcagaaggcatctggtcaagcccactttccttagagccatacttttgaatgatgggatcatcctgaaggttgatggcggcttttgcattagaaggtaaaggcccttccattgtcttgggcagatctccagctctttgttcagtttgtagcccacaacatcagctagaaaatcagatgatggtggaggcaagcggaatttatgtctgaatgcttttcgaagacatccaaacgtccaaatagaaccttgttaaaagtgtagctgactcattccctgcagaaccttaaccactacgttgtttaggtggttttgatgaaaaagctggcaccagctgggttttggaacattggatttgcccagaactgcatacttcagcaattcacacagctggtcatgggttacttcacagttgtcaagtaaataaaatggtagataagcgggctttcttggcctcagggcatgactctcctcgagatcccaaccggctttcatcgcctcagctgccccgaccagcttatttggggcactgcactgcatttccctgaccattcctggggtgtctctcaggtccacttccctctctggctccatggcgtccgcatcggttaccggattctcaacggttcacaccaacaggctacaacagggcagtcatgcacatggcaaagaaggaaggtgctgccgagcggcttcgccgcactaaaaccactccccacgccccctagcccgggaaacgcagaagagaagacgggcgngggagcagaggttctcccctcacttagccacagcatgccaacaacaaccagcccctcagcctcgcgggcttgtcctcggccgattcaaaacccagcctcgtacctaga

SEQ ID NO: 150224 - DNA, 1420 bp, Homo Sapiens
tctctctgtccgcctggtgtgtgttgccccgctcctgtcctgttggtcgtcgtgtcgtacgttgttctgcgcgacgtgtccgggggcgccaacagcgtgatgtgtgtgccaagagacgtgtcggggctccgaggagcatgcggtgttggtgccgctgttccagctggccgcggggcccacattagcccgttggaccacgtgactggcactgctgccctttgctttccgccggggccgggccacgtatgtaaggttcttgcctccgtggtcacgccgccaggctgccgggcgtatatcccggcccacattgtgtggggagaccccatagcccggcccgcgaatgtatccagttgtgacctcgctgccaccaggtctccgccagaacacagtggccttctggcgtagtgggtcgtggttgagcccgtcgcagaacggagacgactccgtcgggggaagttgtgcctgcgacagccactgccaccacgcggtgcttctgcatatccggccggcctgctgacatacacgatcaggtagccggagtcctgcccagtgcctgaccacgtccacggcgccagctcgcacctttggggtcgcttgcccatgatggagacgctggcggttgaaggagccgtcgactgctgaagaccacagcctgccgtgaccgcgggccaccacagtccaggcagcattcggcatagggtgtggtcgcccctgaccaccatgcgccacggggtagacaccaatgcccagcgcgcgttctgggggaactgggaaggtgaggcggcccgagctattggtgacttcggtgccaaagtggatccacttgcccgacagcggctgcgtcatgatgtagacatccaccttctctccagtgagcgtgacgacgtccaggggcccgtacatgaagcgcccgcttagcacctgggggcggccctcgcacaccaccgtgtcgctcgcccggtggttggaagtgacgttccggatcttgacctgcgtgcgttttcgctgccacttctccctggggaaggccgggctgtagatggacggctcctcgcattccgccagctgtggccgctccttctcgatcacctggcgcaggatgaacgccaccacgtcggcggactcccagtagctggcgtggaagaggtggggcagcgtgacggtgggaaaggcggtgagcgcctcggggcagtacagcgagtagtcgatccgcttggtcccccaccagcgctccaggatcttaaccacctcactggtggtgctgggggcggctggctgggccggggggtcagtggccaactcactgcccttccagaaggcaccgctagtagaggtgggtgttgagggcaccagcatctccagctcctccagaaagaggctggagtgcgtctgcagagtgtaggccagcagcagggatgag

SEQ ID NO: 150225 - DNA, 816 bp, Homo Sapiens
tgtccccatcgcacaagtccagagacacactccccagcctggccttgcggcgcagctggctgcacagccaggcatactgctgtcgctcttgcaccgcctcggccagccgctcggcactctccagccgcacaggcttgcgctgctcctgagcacacagctcaaagatctgaagggcagagccagggactggcctgaacttggtcatgatgaaggcaaagacaggcaaggagaactgaggctctgcttccaacacctggtcctggctgttggccacttggtgcacccttcaccatgcaccccctcccgggagaagtggcccactgctttcttcaggatgtgagctctgagccagggagatgcagatgatagctgaccggccctacctgctaggacacgtcctacctcagctcagcatctctgtccacctgttgtaaggtcttctcttctctcatctgtcaggatcagcattccagggtgcccttgtccaacaccacctggtacgaggcatcaggaaactccatctgcgtcatgtccatcttcaagaagctcatctggggtccgtcgggtggcattacattccttcatttgcttgatgacaacctcactgatgtcgatgttcactatatcccgatagcccacatcatacagttgctcactcagttctgagttgccacacccaatcaccagcacacgacaaacgcacgcatggaccactgaatctcacacacgcttgccccctcctccgcgcctgctgttccttcctcccacgtgaagagcccctcacacttttaaacgaacagatttccctcgtgccga

SEQ ID NO: 150226 - DNA, 1087 bp, Homo Sapiens
  misc_feature (11)..(11): n is a, c, g, or t
  misc_feature (106)..(106): n is a, c, g, or t
gctgtcgctcntgcaccgcatcggccagccgctcggcactctccagccgcacaggcttgcgctgctcctgagcacacagctcaaagatctgaagggcagagccagngactggcctgaacttggtcatgatgaaggcaaagacaggcaaggagaactgaggcttctgcttccaacacctggtcctggctgttggcccacttggtgcaccctcaccatccacccctcccggggagaagtggcccactgctttcttcaggatgtgagcctgagccagggagatgcagagatagcgaccgcccacctgcaggacacggccaacctcagccagcatcctgtccacctgttgtaaggtcttctcttcctcatctgtcaggacagcatccagggtgcccttgtccaacaccacctggaacgaggcatcaggaaactccatctgcgtcatgtccatcttcaagaagctcatctggggccgtcgggtggcattacattccttcatttgcttgatgacaacctcactgatgtcgatgttcactatatcccgatagcccacatcatacagttgctcactcagttctgagttgccacacccaatcaccagcaccttttccctgggcttgatatatttatgtagcaccccgcacagttccaggtaggttccataccactcgaaagctttctttcctcgctgctggaagaacttctcccaatagtcaacggagccaaactccctggaacttttaggtaagaggttcatgttcctactgccgaagctgcgttttcaagactcccctattccctgtgagataccatttgaggagcttgcccaccacacgcaggctccgggacactgcagtgggaattctttccacggaaaaacagccacattgatttgttcccccactccaaaccccaggaatgacccttacacgacaaacgcacgcatggaccactgaatctcacacacgcttgccccctcctccgcgcctgctgttccttccccacgtgaagagcccctcacacttttcccgaaccctcgtgccgaattcgccacccaggcctcgctaccttaaagaccgttatagttact

SEQ ID NO: 150227 - DNA, 845 bp, Homo Sapiens
tttacacagacgatgactcgattcaatgcaggtctttttgaaatggagagtacctgtcgagagcctgcggcagtggtcttttcagggtatccgtccaatgtgaatccagtctcaagagcttttcagtctcagggcttgcctcctgtcctctcatcggatgctgttccaaggcaccagttctcctgcagctgatccactgccttctgctccttctgcagcagtgcccgctctgcctccctctctccctgcagcagtgcccgctccatttcggcctctcgggctgactcctgcagctgctgctctagctccttcacacggaccttgagctgctccacgtgccccagcacctgagcccgctcttcttccagggctagcacctctccctggagcttggtgctaggtgcatcttcgtgctcctgctgggtgctctcagtgctgctgcactcctccttgagattttcctcatctgagcgctccatactctcccataggcgttgggtggcagcgccaggctcctcgctgctccgcccagaggcccctgcaaggcctcgtgagggcctccggcctgccagtgccaatgctgcggtggcctcccctatgctgggaagctcctcatcctcaggtcccccatcagcccggctgtattcggcacacaggttcaggatggtctccaggcgctggcgttccagcctctccatctcctgctcccggagccgctcttggcgctgtcgccggtggtactccaggaggtcgtcctcattgtcactgatctctgtgatgctatttttccgctcccttgtgacaggcctcgtgccgaattcggcgcgccgtcgacttcatactct

SEQ ID NO: 150228 - DNA, 1674 bp, Homo Sapiens
  misc_feature (500)..(508): n is a, c, g, or t
  misc_feature (607)..(616): n is a, c, g, or t
  misc_feature (641)..(698): n is a, c, g, or t
cgggcccgagaaccctgtatccaagcccggctgtcacggggggagaattaccgcccggggcagggtctcggtctctgccaggggaaccggatggcgccgccgggccttggcgacggaagtgttaagttgggcgcggaaatgggtgcgcgctcctggcccccccaagggcaccgcgcccgtcctcgtaggggcgaccataaacacaaaggtctctcttcccgccctgtttttttctgcctttcgccaccgcgcgccctttccaaaagggatgtcttttccccgcgggggcgccggcgtcgcgtgtgggtttccccagggccccaggggttaaggcgcgggaacaccccagccaatcccctttttgcgcactgccccccagggttgggatttgaatccttgtccgggttgggtttcgcccaaggtgaaaggctccgtttaccgcaaacttttcttaagctctggcgtttttcgcgggtggtgccaacggaaagggtttcagnnnnnnnnnaagcttgcggggttgccaggctttcccttgggaactcttcccagaaaagttcgtttctttttggggcagcccttcaattcaagctgttcccccttgaannnnnnnnnncaggcatcccccttgccagtgaccnnnnnnnnnnnnnnnnnnnnnnnnnnnnnnnnnnnnnnnnnnnnnnnnnnnnnnnnnnaggccgggccgatgccccccagcagctcaggggtccaggatataaatctcatcctgtgcgatctcagtcacatagttgagggtgctcactgggctcaggtcgatcactgtagaagcggctggcagtggtggcgtccaggaagcaccacttgggggacagtttctggcatgtcggggacattggctccagcaccatcgggctcctgctggagtctctcaatgtgggcacggcagagctctaggtcactgtctcctgggaccaccacagtgcccagcggcacagaggcctccttgagctgctccttgtcgtagtgcagggcctcatagtcgtgcatgctgacgcgactcacctggatgcgcaactgctctggcaccggctgctggtcgcactgtgcaggggggcggcagcatccagccagcattggccattctgcaccatggtggccatggttgcagcagggcagatgcaggatgcgtgaggctgcaaggcttgcagggctcgccatccacctgcaccgggatggccttggatgtggtgagcaccacctcgcgacactgcgtcagccgctcgccgtgtccgcccacctgcagcgcggccaacgacgtcatggtgaagccaatgacctcgaggtagccgtcgtcatgccgctggggctcaaagtcgtggtgctccccaggatggccccagggcatggtgcccgcacagtacctggggatgttcaggaaaacaacacactggggtttcaggtcctggatcttgggagtcaagtccattccatcacacaccactcggatgtgcttggccaggtccttggagctgcccatcaggaagtcagagaaagctgtcccggcgtagaacatcttattccgaaagcggctgttgaatttctctgggttggcctctcgagactcgtggaactccagggtgacgtgggcgtcaaagcccaggctgaaatagttgttgaagactcccaggg

SEQ ID NO: 150229 - DNA, 884 bp, Homo Sapiens
  misc_feature (260)..(260): n is a, c, g, or t
gcgtcaggtccctccccaggagcaggtgcgaggacggagggcagcacggggtgaataggtggggccgaccaaggcctgtggtgcccccgcaagtggcaatgctccggctgcctgtgcggaagctgtacaatcaggacccggccattcggcgcttgcccgtcacccagcaagtcacccgcctggggaccactcgcagcccactgagtaccctcccaccttgtgccctttcatagcgccgccgtcttgctcatccggtaggnccacacagtggagaaaagggccaggtagttgccattggtctgtgccaggaacacgggctctctcgggtgcaaggcgagggctggggcaggtgaacctctcgtgggaaaatctgtttggagattttggcagaggtccggaaatcccaggcaataatggtgcggtcagctgagtcccgggtggaagcgtctgtgctgctcaggaactcggagccttcccggaggaacaggatgtccaaggtctgctggatggtcgccttgtagcttctcatcaccttgccagtccttatatcccaagctttcatttcagagctggagcctccacataaaaagatgttgtggtcttttggatggaatttcaaggtagtgattctaaagtcacttcgaccactaaatagctgggttcctgtttcaaggtctgttaggtgcagcgcgaagtcaaagccaccactgaggatgcgccggccacagggagcccaccgggcggcccgcactgcctctgtgtgcagggagtaggtctgcaggcagtgcccggagtccacggcgttccataccttgaaagttttatccctcgtgccgaattcgccacccaggcctcgctaccttagaaaccgttatattactgcc

SEQ ID NO: 150230 - DNA, 951 bp, Homo Sapiens
tgggcaagagggggccccaaagccggaggggacaagcccacaaaggcgccccgggtcccccccaagctcgggccacacacacccaggaacaccggcaccacattcagatggcgaaaaggtcctgggggtcccggcccacagcgtctccctccggcagttcagggcttcaaggtgatgagcccctctagcttgggggggtgaaagcaccgtaaggcacgtatctccagctggggagctgcctctgctcctggaggggaagagccgaagcctgggccaggcgggaccccacgcacacgcggccactcatggcacaaagagagcccccggagttgctgggccccactgaggttgttcttgttcgaaggaacatgtgggtacaagtgggggctgccgcactgtgtggaggagaccctatatccattggtcgttctgtatttaaactgtctgtgctgccctgatgtcgacatataggagtctttccttgttgatctgataacttcccggtactgacagatctgcctaacactgccttgctctgctgctcggcccgctgcctctcacttccttgcactaagaggcaatgggcacattcccgtggctcattcccatctttcgactgttcttcagcaggcccatgacgagtaaccaaggctaacaggttggaagatgcttgagttttagggattttgaaaggagctgtggtcttagtaggagagccaatgattgttggcaaaggagttttaaagaaccagtcagaactccgtggagaggaccccaagtgcttggtgggagaagttccaaggctgccaggccgactgggctgaggcgagtagctgtacccagccccagtatgggatgggcacacggggtcagagtgctgttttctggagcttctgcttgttgctgatagcctcgtgccgaagtaacccctcggcctcttatctagcctta

SEQ ID NO: 150231 - DNA, 1079 bp, Homo Sapiens
ttctggaaatttccagtgcccggctggcacagagggctttggccccccttgtacctggccccttttcccatagaggcccaggccaaattgttgagtggggcagcccccagcaggatggtccaggtccccaaggtgctctccccgattgctaagggcttcattcagcaggtggggcagctcctttatacttattctgggtcacgatacaccaaaggcaaggatgttgagcatggtggcgacatcagggtggccacggcttgatgtgcgctccaggtcctctagtgcctgcttacagagtggcacgcccacctcatagcgaccttgggctgcgtactggatcaccaggttgtgcaacgtccgcaaccttgctgggatctcatatccaccctgctgagctgctgtagcaccttgaccacgggacaagccattgctggggtcctcttcctcctcattaggaaagaggtcatccagggaatccttggtggcatcgccttctttctcctccgaggtatgtccatcctcatcatactgccgcagctgccccaggaactccaggtgcttcttttcctcctccagctgagccacagcctgttcactgcgctgtagccgctgctgggtgccagccagctcatcccgcagccactggttctcctggcatagccgccgcacctgagcccgcagcttctgtttctccgactccactgtgctcaggtggctggctagagccagcatcacctgggcctcactcagcccgagctcaatgttttccatagaacggcgaagctgccgggccttctcatgcaccagcccttcctcatggcctccctgctgcagacactcaatggtctgggacaggctttgcagcacggcctggtgttcactgcgtagggcctctagcccttggctgaccagccgtgtgctccccaggatctcctcttggctgagccggtggcctgcaggctcatcccgctgccccaacaccaggcctgacatcctggcctgggggaccttgcccggtctgcaatctgccggtgtggctgccgccctcgtgccgaattaacacccagcctctacctagc

SEQ ID NO: 150232 - DNA, 722 bp, Homo Sapiens
  misc_feature (19)..(19): n is a, c, g, or t
  misc_feature (297)..(327): n is a, c, g, or t
  misc_feature (660)..(660): n is a, c, g, or t
taataggctagtacgaggnctgggggtcgaattcggccgaggaatatttttaagtgcatcttccccttcaggcttgtttggagtcccagtgctacaaacattgtatttttcacagcagatgtgttcctgaaaagtgtatagaaacctgttctgggaacctgaatgctttggaatgcacggggagagtctgccagctaaaggactcctggcaacattctgtgaaatatgaaactggaaaactggatttgtcgaaaactaattgtgcccattttctcacatttttgatcccattggggnnnnnnnnnnnnnnnnnnnnnnnnnnnnnnnggagtcagggtctcactctgtcacccgggctgggagtgcattgggcactatctgggctcactggcagccttgacctccgggactcaagcagtcctcctacctccagcctccctatatagccaggggctacgggcttataccacctgtgcccaactatttttttaaatttttggtagagatgagtgtcactagttttgcccaggtttgccgggaactcctagcctcaagcagtcttctggcctcagcctcccaaagtggcgtgggattacgggcgtgagccattccacccagcccagattaaagtgtttttatttctaccgtgccatcatgggntcttaactaagtgaaggtgacttctttctttaccaattaaattagaactgggtatactaggc

SEQ ID NO: 150233 - DNA, 925 bp, Homo Sapiens
  misc_feature (50)..(275): n is a, c, g, or t
gagcagatctccccgtcgccagttgaggcaaggggacctggctcactccnnnnnnnnnnnnnnnnnnnnnnnnnnnnnnnnnnnnnnnnnnnnnnnnnnnnnnnnnnnnnnnnnnnnnnnnnnnnnnnnnnnnnnnnnnnnnnnnnnnnnnnnnnnnnnnnnnnnnnnnnnnnnnnnnnnnnnnnnnnnnnnnnnnnnnnnnnnnnnnnnnnnnnnnnnnnnnnnnnnnnnnnnnnnnnnnnnnnnnnnnnnnnnnnnnnnnnnnnnnnnnnnnnggaggtaaaaattttaaagcaagacttagctgaactggaatggaaccagagatgagagtactaagccaagcctcccaggcagtgatctaacagcttgttcttggtgtcccagctcttttgctctgaagacagatggggaacgtgaaggctatcttctggctggatgaagcatctaggtgatagaaaagaaatccagagacagggtgaggaagggaggcaggagttgctttttattgacttggaagtgggctcttcagtgaagcccctttgggtttaagagcattttcctgcttcctttgttcttcctgcaacttctgctgcctgagctgccatgcttgtaatccagcgtccatttcctgtgacagcagtacaactcgtcttgcaaacgtctccctttcagcttttcttcgaagctggcctttcattgggggagcagggcggccatccgcatatgaccagtctgggagctcggtaaggggcccgtagccggaggggttggcagccagtccctgctgtagtcgccactggccgcccgcccaagcggctgcgctgcagtgcagcctccggacacctgtgaagagaacagtcactaaagcagccatgctgagcaggagtagccgcctcgtgccgaattcaccaccaggcctgta

SEQ ID NO: 150234 - DNA, 223 bp, Homo Sapiens
ggggaagggaggcaggagttgctttttattgacttggaagtgggctcttcagtgaagcccctttgggtttaagagcattttcctgcttcctttgttcttcctgcaacttctgctgcctgagctgccatgcttgtaatccagcgtccatttcctgtgacagcagtacaactcgtcttgcaaacgtctcccttctgtcgtcttctcgcagccgtatagtagtagt

SEQ ID NO: 150235 - DNA, 977 bp, Homo Sapiens
  misc_feature (861)..(911): n is a, c, g, or t
gtcatcccgccgcgccggggctagtctagtgcggagcgggggctcaggcggtggcggcctcgacgcgagtgagtgtcgtggttgggtgtgctggacccagagtgcctaccctcgcctgcctgggcctcagtttccatatctgcacaagtgggggtgaccatccctgccctgctggctgccaggagcggctgtgagtcttcaggcgtggatgcatgcctgggggaagccatagggcgctttcacaggcctggccttcaccatggcgggagggagaccgcatctgaagaggagtttctccatcatcccctgctttgtcttcgtggagtcggtgctgctgggcattgtgatcctgcttgcttaccgcctggagttcacggacaccttccctgtgcacacccagggattcttctgctatgacagtacctacgccaatgccctacccagggcctgaggctgccagccgagtgcctcctgctcttgtctacgcactggtcactgccgggcccaccctcacgatcctgctgggagagctggcgcgtgcctttttccctgcaccaccttcagccgtcccagtcatcggggagagcaccatcgtgtctggggcctgctgccgcttcagccccccagtgcggaggctggtccgcttcctgggggtctactccttcggccttcttcaccacgaccatcttcgccaacgcggggcaggtggtgaccggcaatcccacgccacacttcctgtccgtgtgccgccccaactacacggccctggggctgcctgccaccttctccgggatcggccaggtccggaccgctttgtcactgaccagggtgcctgcgcctggcagtcccagcctcgtggcnnnnnnnnnnnnnnnnnnnnnnnnnnnnnnnnnnnnnnnnnnnnnnnnnnnggtcacctacacagcgatgtacgtgactctcgtgttctgcgtgaagggctcccgccttggtcaaac

SEQ ID NO: 150236 - DNA, 1104 bp, Homo Sapiens
  misc_feature (495)..(503): n is a, c, g, or t
ggtggcgcgatctgtaggggcgatacgtcgttagtacgtgctaagtgctctgagttaggtccgtagtgatctaggatcggcaagactcgtgatggaggcggatcgtgtgagtgtttcggcccgggtggccggcggcggtggggtaaattccgaagtgcctagcagcttgtgaatcgcgcacatactagttgcaggatatgtcgacgtcttgcgcgtacgctgggtcggatctcttatgtacggcggtcgggagatcgggtttatagggcgggagaggcgtggctcgggggcgcggatgttgtttggtggtatgagagagtttatttggcggggggtattagtatcgccaggggcgcggctaaatggggggtagcggggaaggggatgggtgccgcctgtacgttgggggcggcaggaaagcgtagggggagacgcctgagctggtagtgtctgccgagggcgtgttgggcgtgttcgggtgtggtctttcggatnnnnnnnnntctggagtacatgcgagtaccgcgcggatgcgaggaatgtgctagcggaagcgtgcgggccagtgggggctccgggaggggtggctaagggggtggccgtgtgtgggggagcgtccgtgggcgcgcggggtggcacccaaggggagtgagaattcgtgggggagcggccgcctcctccactcccaccctgctgggaggcacagggacacagaaggctccgctggactttcagtcatactgatggggctctggtccatgcaagcctctcccaacagtcagaataatcagtccctctgccccctgaggggctggatccctgaatgagtttttcaataaaatacaggacacacacccctagacccgcctcagtcccatcggcaggccctggttacctgaatcccggacaggtgcagagcctgcccctgccaaccccacccaaggcccagaacccagcccacaacgccttccaagcctaaaagtgcatcttcgattacaagcatctgtaaacaaatcgtcccccaaacgtgtactacaagttacatgaatcctttgctactcatacactctttgaccacctcggccatcacacgctcctcctagc

SEQ ID NO: 150237 - DNA, 974 bp, Homo Sapiens
caaccaggtttcctccgtgaccctcgcgccctggacggggacttcgagagcagaggggacaacccacccaacctcaagctccttcaacctctttgtggtcacccgcttaaaggatcttttcctagtgttaataaaagttctgcagacctggaaatattcgaggcataatctttgaggaaagtttttccttaggatccccatggagatgtccggaagctcttaaggcctctgtatttctgaaatcgaattcgagcagccacatcacggggcgtgtccacttcatctggaaacatctcttccagtctttcttgtttatatttctccaacatttttgcctcagcttcttcatctactttcttatcatacagatcatcatgcacagactccccaatagtcatagtttcatattcttcctcttcttcactactctcatcctgagattcctcctccataaaatcctcatgttccatatcatcatattcatattcatctccttccccaccactttggctgccaccatccaaaatccattcagcttggtaactggatgttcctttggggaccttctttaccaccttagaactttccttcaagaaatcctttgcctcgctcagctcctcctcagtgggccaggtttgctctccctccattggatctgggataacctctgcttgcaaggattcctgtctaccagggtctgccttcattaggactttaagaccttcttccatatcatctacagcatccgtagcacaaatctccattgccatgtctgggtccttttggggtttaattcctctaggatttaaagggaaagggtctccgggggcatctatctgtttcatctggaaatcaccatatccaacgatatgcagcaacctattgacattcagagtctgccctcgaacatagcctgaattttcaacggcacgagcctcgtgccgaattcacaacccagcctcgtactagccttt

SEQ ID NO: 150238 - DNA, 1059 bp, Homo Sapiens
aaaaatacggctaggtacgaggcttgggttaatcggcacgaggtcaagcttctcccctccccctcctcccttatcccttcgctttcgctcttttccgtcgaggcgacccctgagttgtgagtctggggtctggttggtgaaaaagagcccttgaagctggaagacgggagaggacaaaagcatgtcttcccttcctgggtgcattggtttggatgcagcaacagctacagtggagtctgaagagattgcagagctgcaacaggcagtggttgaggaactgggtatctctatggaggaacttcggcatttcatcgatgaggaactggagaagatggattgtgtacagcaacgcaagaagcagctagcagagttagagacatgggtaatacagaaagaatctgaggtggctcacgttgaccaactctttgatgatgcatccagggcagtgactaattgtgagtctttggtgaaggacttctactccaagctgggactacaataccgggacagtagctctgaggacgaatcttcccggcctacagaaataattgagattcctgatgaagatgatgatgtcctcagtattgattcaggtgatgctgggagcagaactccaaaagaccagaagctccgtgaagctatggctgccttaagaaagtcagctcaagatgttcagaagttcatggatgctgtcaacaagaagagcagttcccaggatctgcataaaaggaaccttgagtcagatgtctggagaactaagcaaagatggtgacctgatagtcagcatgcgaaattctgggcaagaagagaactaaagactggcaccaaaggcaaccttatggcatccagacagttgggccagggaagaatccaggtgacatttgaccaccaaggaagagtctactggcggggaaccatattggctatgaattacaacctcctgttgaacagtgtatggggcaggcgggggcgcccattcaagatgggaaccggctgggcctgcggttgggtcggaaccacagtaacacccggggctcctctgggaggggggccttgacg

SEQ ID NO: 150239 - DNA, 962 bp, Homo Sapiens
ttttgagcctgcaacaggctgggcggggaagggcgtggcagccaagcacacgcgttcaataccagcaggagagtccaacctgtccagacccgtattggaaagagtgacggtagccacattcagtatacccatcagtccaagagccactcccattctcttcaaacgcccgtattggcatggctcacaatccgtgcctggtataagctgtgcagaatcatccaggccaacacctctttctcacggtgctgcacagcaacgctcagcatatcggtcaggttcaccaaggggaatcgtccttgagagactaagtacagtttgacaaaggcagctttttctatgttgctcttagtaacctgggcgatccgattggcatcatcatctgtcatttctaagaggcattttgctatgctgatatacagctctagatcctttctccgaatcttatttggcaggaggtcaaaaattttcccagtagcttcagagagcagactccagaggtggtgggcagggctgggcagtttcatggcctggctcagaccgtgtaaagcacttgggcatagctcaggacttccaagtggggaagctgctttaaaaactgccaccattaaattttcaacaaaacccaggatctgttcatcagagatgtgttttatccacagaggtgcagatatcaggagatatctcttggtattcagactcagactgtggatcagtggtggtgtcacccacaagcccaatagtgcagctgcattctgggatgactgtgcctgggtcaccataatttcaaggcacagttgctggatctcttcaccaaaatttagcctcataagtggagagagaagtgcagcccagttcacaggaggatattggtagctttctccaacagttgctatgggtttcatcactactttaagaaggcctcgtgccgattaaacacccaggcctcgtacctagctatgtgt

SEQ ID NO: 150240 - DNA, 1141 bp, Homo Sapiens
  misc_feature (69)..(135): n is a, c, g, or t
ggctaggtacgaggctgggttgggaattcggcacgatggcatggcctcgcctggtctacaagcccgggnnnnnnnnnnnnnnnnnnnnnnnnnnnnnnnnnnnnnnnnnnnnnnnnnnnnnnnnnnnnnnnnnnnctacctggggcctgttgcttgcttgtgcctgtgatgcgactgtgccagccattgtcccctgcctgctcctgtcagcctgcgccctggcctgctgctgctgcacctggaaggcgcattgtgcgtcttgctgggctccgtggcctgggtgggcaggatggcctccacagagcctgcatggctgcgcatggtggagcctccgttgatgcctgcgctgccgccctccgatggcttgcatcctgctggaatgccctggctcccctgatgctgctccgggccctggccctggtgccccggacctgagtgcgtccccatgaatgtgctgccctgggcttggcccagtgctggcctgtggctagagggagaccccggactgggctgccctgagctctgccccagctccgaggcgcggtcgccggagccgcctgccaaccgccttcaagacttcgacacgctggtcaccgtgggaaagcaactagaagccatttgtgtcaacggtaacgtctggagaaacaaaatggtcacggaatgaccaacgtccctactggccacagtccagccccaatctgcaagacagagccagccgccccgggggaattccctgcctggttgggacctccacgtcaccagagcccagctggtcaggggtacagcccctcgtgagaactgagccacagtcatgtttcctacattcggctcctgctcaggggttgtacagagacaatgccagcctcctagggtggtgccctgcaaagagagtcccagcccccaaggttccaatctgggccgggtcaccacatggttgaccccctttcggtcggcctcacaattcgccgactggtacactggtttcaatcaaggtcacggacggtaattattacaacctgggctaagaaaacttgggaaattaaccctcgtgtaattggataacctctgagcacgggtctcgacctgcaaagtaaaacgaagagaggctaacagagaatattagcgcggcattccaacacga

SEQ ID NO: 150241 - DNA, 1264 bp, Homo Sapiens
cttctcgctttctctttgggcgttcctgttcggcctgtcctttcctggtttctttctagtgtgtgggcccgtcgtttccccctctctcttgtttggttcgtcctggtgttcgctccttggggctgctgctggttgcctgtgcgcggtcgctgtgcgacgtggcgccgtgttttggtgctggcttgttgttcgtgctcgccctgtgtccttcgaagtcttttgtgttcttttccggtcgctgtactcctgctgcccgtgggccctgttttttcctagcgctactgccctctggccatggcctgtctgctctgtgcttctctcagcgttctagtgtgtgacttcgcttcttgcgttccttctcttttggcttttgcgttctttttgggcgtgaggaagatgtcagcaaagctctccagcttggagcggacggtacggaagatcggggccaagccccagggactgaggcgggggcgtaaaaggctggacggtggtggggtggatgggagctccagagcaggatctggggctgttggtgggctctccagagggtctgcaggcagagcagatggctggaatgggggttctaggtccccaggtggaggcgttggctggcgaactatcctcatgggctcagctctttgtgctgggatgatgaagttgggggtctcatcaatgaagccctcagcggggggtctaggactggcgatgtcttccagcatcaccaccagggtgggctggggggcccggtccaccttttgtgaagggccctcctctgggccaggggttgtccttgatcgccgcctcagggtggaagaggtccggtggatgcggctcaagggctcgcgacacaaacacagagggtcgggaggcctggcctgcgaggaccacccggcctgccggggtggcgaggcaggcggctgcctgtggacaggatcctgatggtagctgtggtgctgtggtatggaggtctgctttgagggcaccacggggaccatgtgaacagccatgacatcttctagcaccacggccaggacccgccgagaggccttttccaggggagaaggggcccccgggagctgcagcctcggccgtttcgggctcctggctccccataatgctcgagtcagaggctggcggcacagacgcggctggccaggcgggctggagtccccgggcaagtccatgggagacgcggcggctccgggggggtccctggggaatcccaggctgcggccgccctcgtgccgaattcgccacccaggcc

SEQ ID NO: 150242 - DNA, 863 bp, Homo Sapiens
ggagcagagtccggctgcctggggcgggcggcgcgtgtctgcagctgctccgggtagcccgctaggcgcgccgtccccagccccgccgccggccctcggtgcgcccggccgcctgcacccccaggagcagctgctgtgaataaacacagaagtggagctgggggactgattagaagcctcattcagtgcacctgggccccagcaggcccagccaggcgtggaggaagaggcattgaggactttccttacctgtttttccagctcacccactgccagcagagaatgctgtccagtttcaacgagtggttttggcaggacaggttctggttaccacccaatgtcacgtggacagagctagaagaccgggatggccgtgtctacccccacccccaggacttgttggcagccctgcccctggcgctggtcctcctggccatgcgccttgcctttgagagattcattggcctgcccctgagccggtggctgggtgtgagggatcagaccaggaggcaagtgaagcccaacgccacgctggagaaacacttcctcacggaagggcacaggcccaaggagccccagctgtctctcctggccgcccagtgtggcctcacgctgcagcagacccagcgatggttccggagacgccggaaccaggatcgaccccagctgaccaagaagttctgtgaggccagctggaggtttctcttctacctgtcctccttcgtgggcggcctctcggtcctggtaccacgagtcatggctgtgggcaccagtaaatgttgctggggacaggtaaccaaaacagactctgaaagccatccctgtactggttggtactcttggagctgggtatctacctttca

SEQ ID NO: 150243 - DNA, 1289 bp, Homo Sapiens
  misc_feature (1089)..(1089): n is a, c, g, or t
  misc_feature (1150)..(1150): n is a, c, g, or t
  misc_feature (1210)..(1210): n is a, c, g, or t
  misc_feature (1223)..(1223): n is a, c, g, or t
gccgagctgtatgccccacatgtgctggggttggctgccctggcgtgcacctgggtgagtccaggtctgcgctcccagaggtggatgtgggtcctcctgcacctggtgctggccttcctgtccctgcgctctttgacagcctcctgacctgtaggacgagggattccttgttcttctgcctgaaattttgtacagcagcaatttcttactctctctgcaagttttcttcccagtcacgagatactttgtgcagctgcttatctccaggccttattaaaaagtttcagttcctcatgttcagattgttctcagaggcccgacagcctctttctgaggaggacgtagccagcctttcctggagacccttgcaccttccttctgcagactggcagagagctgccctctctctctggacacacagaaccttccgagaggtgttgaaagaggaagatgttcacttaacttaccaagactggttacacctggagctggaaattcaacctgaagctgatgctctttcagatactgaacggcaggacttccaccagtgggcgatccatgagcactttctccctgagtcttcggcttcagggggctgtgacggagacctgcaggctgcgtgtaccattcttgtcaacgcactgatggatttccaccaaagctcaaggagttatgaccactcagaaaattctgatttggtctttggtggccgcacaggaaatgaggatattatttccagattgcaggagatggtagctgacctggagctgcagcaagacctcatagtgcctctcggccacaccccttcccaggagcacttcctctttgagattttccgcagacggctccaggctctgacaagcgggtggagcgtggctgccagccttcagagacagagggagctgctaatgtacaaacggatcctcctccgcctgccttcgtctgtcctctgcggcagcagcttccaggcagaacagcccatcactgccagatgcgagcagttcttccacttggtcaactctgagatgagaaacttctgctcccacggaggtgccctgacacaggacatcactgcccacttcttcaggngcctcctgaacgcctgtctgcggagcagagacccctccctgatggtcgacttcatactggncaagtgccagacgaaatgccccttaattttgacctctggctcctggtggggtggccgaanccgtggagcctgnttgctgctcctgccgggtggagggagacactggccagaagccccgctggcccccgggaaactgcaa

SEQ ID NO: 150244 - DNA, 269 bp, Homo Sapiens
  misc_feature (196)..(196): n is a, c, g, or t
  misc_feature (226)..(226): n is a, c, g, or t
  misc_feature (241)..(241): n is a, c, g, or t
agacttccccgatgacttcagcagaccagatgacttccaccctgacaagcgctttggccaccggttacgtgaatttaaggggcgaggaggacctttaccgcaagaagagaagtggaggcgagggggccctgggcctccttttccccctgatcacagggaattcagcgagggggatggccggggtgcagcccgaggncctccgggggcatgggaaggccgcacccgngaggatgaacgtttnccccgggatcccgaggacccacgttttt

SEQ ID NO: 150245 - DNA, 972 bp, Homo Sapiens
caatgtttctcccagcctttgctttatacatctcaagccaatccctcagtgagcccccaacctcccctatggtctctcaggcccaattagaggcaaataaacacttcctggcaggagtggaagacaagcaaactattaaatgctaaacaccccttcttccttctcaagcaggtcaaaaaggctgggcctggatcttgtaagaattggtttcctgcagtcaccttcccaacagcagtgttggggtgagctcacccatgtctgctggggactgaatgccacttctgttgcaggtctgcctcagtagatgctggggaccaatatagggccttcctacctagtctatgacttagaagggcagagggtgaggggaaaagggtcccatcagcagaggagagagagagatagagcccctcaaccctgcttcagttgcccatgtgctgtgtgcaactctactcaagagggcaaaagaggcaggtggaatatagcctggacaatctgatgagaaaaaaaggccagctcagaaaaaatatggtgacaccccccacctgcattccccaatatactagatcgagctagtggggagggggtggggctgaagaaaagatcattagctgaagtcacagcacttaaaacaccctgctgtgccccaaaatgaaatcctttgcagagtcggtgatgctatggattacaagcctggttccagagctatttagaaaaaaggaaaacttggtgccctcctcttgactccttgagcaaacccaacatcctgtaaaaaactcaagatcctgggggtatcatgatactctgctgttaaggagcaattgccttccttccctaaggctacgcaaacacacctttccacaagtacactcccatgcacgcacacactctcacgcagtttctctgaggaggctgactcaaccccccaccctgcctcgtgccgaattcgccacccaggcctcgctaccttgg

SEQ ID NO: 150246 - DNA, 956 bp, Homo Sapiens
ctatcgcggtgggaccccttttccgggccaggggtcggattggcacagagccatggggggtttatggttgggaagttgaactaccgaagtcctcactgccagggggagggtgagtgcggttgatgcagtcaaaggcagggggacccggtaggcccaaggccgcatgcggacattatgcgagcatgtacgtcacaggtgggcgcccacagagcccaccaagcagcggcccgtgaagttgagagcaaagccctggtcgtcctggcactgcccgccattgcggcatggggagcctgcctgttcacagggtccagccttgggctcgcagtcacgcccatggaagcctggtaagcacacacaatggtactcaccgcccccgtcatacatgcactggcctccattctggcagggggactgcgtggtacagatatgttcatctttgtcacagaacttgcctgcccagccactgtggcagatgcactgccatggctggtggcaggtaccgtgctggcagccaggcatcctcacacagcgctcacagtgcagcccctcccagcccgggtcacacctgcaggagccgtcaggtgcacagcagccgtgggccaggtcacagtgggagctgcagtcatcggctcggacaggctgaccgggagcccccagaatgcacaacaggcacacgagatgcaggcagcggcagccgctgggcatggtcagcgccggccccaggagggacggacggatggacggccggacgcgtggacacctccggcggggaggtggcgcgccccggggcgcagagagaggccggatccgacgggcgccgccgaggggccgtgagggagcgcggggccgcccctagctggccgcggggccgggcgccgaagcggctgccatgcgagccgagcgctcggcctcgtgccgaattcaaacacccaggcctcgtacctagcctaagttta

SEQ ID NO: 150247 - DNA, 1022 bp, Homo Sapiens
  misc_feature (533)..(533): n is a, c, g, or t
  misc_feature (545)..(546): n is a, c, g, or t
attttcacctctagtccctgtgctcggaggtgtgtgccgtcccctgtcatatgatagctccacaattaacttggtcctggctttctcaatcaaacgtcgctgctgggactgaaacaggagatgctttacaacgcccggccccctagagctcgatttagcactgttgagttgtgaaacagcccagaaagtaggaagtctcccaggatcatcttgcagataaacgttagactaagtcacacgtttgataggaaatgtctcttggttttattggggtcctcgtaaacaggtacatctgtcactggttgggtcattcctctcccttgactgctgacaattctttcctgaatcctggcctcagctcctggacgatcccaagttccgggtgatcaccaagatcaaaaccatttggcagcacgtatatggcggcttcaggagtcacccccgatgtcaacaccaatggctttgccagctccaacaaggtagctaaccccagtagccagagagatgaggctctgcccccaaggcaagagatntggcagcccagnnacctagcatgggggaaataagaactgctgtgcaaagtggtcccagacacacaccaccagcaccacgtaaatataaataagaaatagggtttattgagaaagttcggcaagcagagaaacagaacagacacacaaccccctgctgttcacagctcaggcctaagatggttgtgttctgtggccaggccccctaaggctctgtgctttcataggaactggagagcaattgtcaacaagggaaactgaaagcatggccttcagaactctggctgacggcagcctgttcttttgttaagctaatttagacctttgttcagctaccaggagagaaaattaggtgtaggagccctggtcccaagctctggtcttaaaacaccatcatcctgctttacctctacaaccatcccacggccctattatataggatgaggttaaagcctcgtgccgattcaaaccagcctcgtacctagccgtaag

SEQ ID NO: 150248 - DNA, 999 bp, Homo Sapiens
tttgagatcgtgctgggggaggaacatggccactaccccttatcccatcggccatgtgggaggtatgaccctggtgcctggcaggttctccctctgccctccactgggcccagtggctcagggacctggggaaaggagatggagcagctcttgggatcctttggggaaaaggaggccattctgggccccttggcaaacctcaccactcacagaggctcctggccttgatccctgcccctccaggtgtccagggtaaagtgtaactcagactgacctgtggggcacagggggcaccagctggccttgccctctctggtctgggctgtctaccttcctcactgtatctttgcccagacccacctgggccagtaggcccctgtccccagccacacaccttagatgctggcatgccttactccaggtgcctgtgtttggccgaggcctgtgtgattcccggtctgcaccacatggcggggttgggggccgctggaggccacctgccaaggcgtgggatgggatggtcctgctggtttaggccgtgattctggaaaaccttggatgggccttcgtcctatgtcagccttccctctgatcctcaggccctacctgtagagacctccactcctagagccagtctcagggtctgggatttccctgcaggagctcagccaccactgtgccatggtgacacaggccaaggcagacattggccctcccttctcccagcccccagaggcctggccttgggttcgtcagcatgggccgaggacgttgcctgtagaatcctcctctgctgggagtggtctgtgtggaccagtccctcactggccattctttttttgacgcagcaatctgtgaccacgattcctcccaagatgcctctgcttggttctgggtggcgagatcctgaagctgccttcagggtggtcctggggcgggaagggtgggttcccccggtgccgttgggccccccgggtctggggcctcccaggctggcct

SEQ ID NO: 150249 - DNA, 1627 bp, Homo Sapiens
gggggcaatctgaggcgactggtgacgcgcttatccacttccctcctcccgcctccccctggggtggcgctcgctggtgacgtagtgagtgtgatggccgccgcgaggccgggaaggtgaagtcaggactggtggagtcaagcacagtcaatcaatagccaacctcaacctgagacaggacagaagagaactcagaatctttttgtcttttggacttcagccatgtccatgatgcctaccctgtgaagatctctcaccatccaaaaaacgcaatgtccctgctcttctctcgatgcaactctatcgtcacagtcaagaaaaataagagacacatggctgaggtgaatgcatccccacttaagcactttgtcactgccaagaagaagatcaatggcatttttgagcagctgggggcctacatccaggagagcgccaccttccttgaagacacgtacaggaatgcagaactggaccccgttaccacagaagaacaggttctggacgtcaaaggttacctatcctaagtgagaggcatcagtgaggtgctggctcggaggcacatgaaagtggctttttttggccggacgagcaatgggaagagcaccgtgatcaatgccatgctctgggacaaagttctgccctctgggattggccacaccaccaattgcttcctgcgggtagagggcacagatggccatgaggcctttctccttaccgagggctcagaggaaaagaggagtgccaagactgtgaaccagctggcccatgccctccactaggacaagcagctccatgccggcagcctagtgagtgtgatgtggccccaacctctaagtgacccacttctgaaggatgacctcgttttgatggacagccctggttttggatgtcaccacagagctggacagttggattgacacgtttggtctggatgctgatgtgtttgtgctggtggccaactcagagtccaccctgatgcagacggaaaagcacttcttccacaaggtgagtgagcgtctctcccggacaaacatcttcatcctgaacaaccgctgggatgcatctgcctcagagcccgagtacatggaggaggtgcggcggcagcacatggagcgtagtaccagcttcctggtggatgagctgggcgtggtggatcgatccaggccggggacgcatcttctttgtgtctgctaaggaggtgctcaacgccaggattcagaaagcccaggggcattgcctgacggagggggcgctctcggcaaaggcttcacagtgaggatgtagagttcagaatttggaaaggagattgaggatgcatatcccagtctgcagtgacgaccacgtttggagcagcaacggggccggagcaagcacgatgcgaaagagcggcagaacaacacagggacgcccgtgcacaggagcgcccgcgaaaacaacagatacctggagcgcaaaacacggacaagcggagacaacaccacaggacaatatgaggaagagcgaagaacgggagcacgcaacaaggcgagagaggatggagaacagagaagcgctcatagagagagagacacgcagaaaaaacagacaaacaacgaccaccacacagcagaaaacaccagcacaaaga

SEQ ID NO: 150250 - DNA, 821 bp, Homo Sapiens
  misc_feature (791)..(791): n is a, c, g, or t
cgggtaatcttcttctggatctttactgcctggatctgggtgttcctttaccaagaatacatctctttctttactcattgttttaacaatgttattttgccaagtcatttttcccaggtctctgtctggttgtcatgcactcccagtatttatcaataaatggtataatatccttatctttggagaacattgtcttcggatgttcatcctgtgttcgggactgccatgtcaggttggccaaagcactaaggcacatttccttcaagtttgcttgcttccggaggaaataggtattcccactgtgatggcagacgttgcaatgaaaactgtagttggtcatgaaaggtagacaggatgaggtatctatgccaaatgtgtcagccgtgaaccattttgtacaaatcccacattgcagctctacctcacccaactgtcggccattctcttcatccacggagcccgcctgagtatccatcacctctgatgtatccccagcaccttctagtgtatcttttccattagatgattctgtctccaagccaccgcttacatcgacacaagtttgcctccaccagccttcagcctcacccggaactgggctcaactgtcggagcagcagagatcccctctccaggaggagcggctgctacccgctgccaccggcttcatctccccctctctctgctcctgattgcatttgcgaccgctcactgggccaggcccggcacccgcttcctggccaggtcctgctcctgccgccgcaatcacgcgcacccccctcgtgccgattnaaccggcggcctctacctagcataattgtt

SEQ ID NO: 150251 - DNA, 1014 bp, Homo Sapiens
cagtacggctaggtagaggacccggtttttaatcggcacgaggcacatccacagcagttcatgatgggcttgggcggcgacgaggacaagatggagaatggcagtgggggcggcggcttcttggagtctttcaagcgggtcatccggagccgcagccagtccatggatgccatggggctgagcaacaagaagcccaacaccgtgtccaccagccacagcgggagcttcgcgcccaacaaccccgacctggccaaggcggctggaatatcactgattgtccctgggaagagccccacgaggaagaagtcgggcccgttcggctcccgccgcagcagcgccattggcatcgagaacatacaggaggtgcaggagaagagggagagccctccggctggtcagaagaccccagacagcgggcacgtctcacaggagcccaagtcggagaactcatccactcagagctccccagagatgcccacgaccaagaacagagcggagaccgcagcgcagagagcagaggcgctcaaggacttctcccgctcctcgtccagtgccagcagcttcgccagcgtggtggaggagacggagggtgtggacggagaggacacaggcctggagagcgtgtcatcctcaggaacaccccacaagcgggactccttcatctatagcacgtggctggaggacagtgtcagcaccactagtgggggcagctccccagtgaggtggctccctcctgcccccctccaggcccctctcgatcaccccaggccagacgccggacaagtcgggaggaccctgacgatgtccgcgagatctaagatccagcgtggaagcatcgtgagcaagcgacgatgccccagactgggcgtgttagccgggccagcacccgtctgaaggtgaaagtgagcagatgaggccacagaagcacaaggggaaggtgccggtcaagcccaggcagacgagagctctgccctgaaggaccaacaccagacccgtgggctgtcccctggcgca

SEQ ID NO: 150252 - DNA, 1070 bp, Homo Sapiens
aggggaggaggggaccggcaaagggcgcatccctaggagcagcgaggaagttgggtaaggtgcgcatgcaatcgtaaccagcaggtgccttcgagcccgaaaggacctgttcttgggaaaaccgcgcagccagagtaggaagaaccggacctcctgggtccccgaaaccccgacacccgttcggcagcccagccacagccaccccgtgaaacacatgcccgaggacgcccactggcccgactcagcacaactctggaatatggacacaataagcagagttcctcccttcgagtgagtcttttgactttgcctcaccatcgccgacacctgtcatcgtccacctcatagaatgatcttccctctctttcttaaaatgtcccctctttgtttctcatttccctggttctggagtaccctagatctcctgtcccccagaagttctacttccattttagctaccttcttagtcctgaccaaacttggtctgtacgccctacagaacacatcctagccagctgatctaaacctacactttctccctaaaataattcatccaggatcctcactttctaagtcgcctctgattcgggtctggcatgtcacacatctgcagggcctgttgtagcccactcctttactcccctgtcccactcctcttgcctgtgtggccttccctcacggacagctctcagcttttcttgctctggatgaacccaatgtaacatttcttagctgctgtactccctgcctccgcttctcgttgcctgcttctaccttggtctttcctattcactgccacatggttacgtgtccttgaggacagattaggtgtgtgtccactgcacaatgaatatactctagacccacagccattgccccacatccagtccctacatctccaaccaatcttctacaactattacgatctataacatttatttgctattcagtgttcacatttattccaaaaattatttattgaacacctgtctgtgtgcaacatggatctttgccgatatatgtgtgcgttggtcctcgtgccgattcaccaccaggctcgtactagccgt

SEQ ID NO: 150253 - DNA, 1248 bp, Homo Sapiens
gttgatttactctttataaatgataactgaacgctgactgctgtcagctctgtgtcgtgctgttcacttactggggctcgggagccgctaatactcgctcttgtttcgagcggttggctctgcgactgttgaagatatgctgatcgcttcgagcgttacattgctcccgcggggtgaagatgttccctagttggttagtctagttcgatagtgcgaccttcctttgctgaacgagtcatggtcatagaaccgttttcttcttttgcctggatgctggtctgtcacattgcgctgtaccgattcaggcatatttgtcagattcctccgagagatgtgcacatggaccaagcatttgtgagtggcttgtgtagcggatcagcttctccagctgaggcttctgactgattgatggcctgctccagagcctgaccctgcaggttccatgtctgcttcacatagttccctgatgaggttttccttcaaatccctcaaagtgcccagtcttgggctgcaaccccttggggccggttgaagggcttcttgaggaggcagaccaggccatcagactcctgggagtggtagtggcagaggtcggcggggctggcatgggtcctgccaccggcgatggcgtaggtgccattcagctcccgctcgatggtgtagtggtgtgccttcctcccgtgggccacggacagggccgaagccacccaggtagttgcggctctggcgcagcaaataaagcccatcactcatgccacgcctggaccaggtaatcttctgcctcctcccgggtgatgttgccgaaaaagaagggcaggtggttggcgctgtcagccatgccgctgctggccatgcttcaggggccggagggcacacacctgcgcaggtgtccacctgcagccaggtgaggcagagggcgggcagcagcgcgggccaccacgctcctcctcgcatctccagcacgcacgccggggtggcctcagccgccagggcaccgcggctcttcctcattttgggcaacattccttaacgcagcaccgggcaggcaggccacagcacttcactcccagtgtcagcgcccacagccagcactggcccagccactgctgaccgcgcaccatgagccacggagctgggcagggaatcggctgaagcagccagggcgaggcccgcaggaatcaggcccaggcaacggcaggtgtagacctcgtgccgattaaacccgcggcatctactagcgtaagctcg

SEQ ID NO: 150254 - DNA, 965 bp, Homo Sapiens
aagctagtacgaggcctgggtggtgaattcggcacgaggcttggacaagcactggcacttgggctgttttaagtgcaagagctgtgggaagctcctgaatgccgagtacatcagcaaggatgggctgccctactgcgaagctgactatcacgccaagttcggcatccgctgtgacagctgtgagaaatacatcacggggcgcgtgctggaggccggagagaagcactaccacccttcctgcgcgctatgtgtcaggtgcggccagatgtttgcagaaggcgaagagatgtatcttcaaggttcctccatctggcatccggcgtgtcgacaagcagccagaactgaagacagaaacaaggaaaccagaacttcctcagagagcatcatttctgtccctgcttccagcacctcagggtctccgagccgtgtgatttatgccaagcttggtggtgagatcctggactacagggacttggcagcccttcctaaaagtaaggccatctatgacatcgaccgccccgacatgatctcctactcaccctacatcagccactctgcaggggacaggcagagctacggcgagtcccctcagttgctctcgccaacgccgaccgagggggatcaggatgaccggtcctacaagcagtgccggacctccagcccaaagctccacgtgggtcggttagcctcggggcgctacactccgacctccagcggtcaaacacaggaactacagaccggtccagctgacaaggcgatcggatgcgggacggaatggcacgcttgggaccaaggattaaacacggacgcacgaagagcagctgggtgatgctccaggggggatgcccgacaacgaggaccaattctccacgaactgggacccacgtcactggtcccacaagcgggggccggaaaaaacccctcaaggatggacgggacagttacaccccaatgcagtcggcccg

SEQ ID NO: 150255 - DNA, 1282 bp, Homo Sapiens
acagtaactactaacggtctaaggtagcgaggcctgggtggcgaattcggcacgaggcgagcatgtgactatgctccgagacaaattccgagagttctcccgggacacaagcaccatcggctcgaggagcgcgtagatagcgccaatgcgctggccaatgggctcattgctgggggccatgctgcacgggccaccgtggccgagtggaaggacagtctcaacgaggcctgggctgacctgcttgagctgctggacacacggggtcaggtgctggccgcggcgtacgagctgcagcgcttcctgcacggggcacgccaagccctggcgcgggtgcagcacaagcagcagcagcttccggacgggactggccgcgacctcaacgctgccgaggccctgcagcgccgacactgtgcctacgagcatgacattcaggccctcagcccccaggtccagcaggtgcaggacgacggccaccggctccagaaggcctacgctggagacaaggctgaggagatcggccgccacatgcaggccgtggccgaggcctgggcccagcttcagggaagctctgccgcccgccggcagctgctgctggacaccacagacaagttccgcttcttcaaggctgtccgggaactgatgctctggatggatgaggtcaacctgcagatggatgcccaggagcgtccccgggatgtgtcctccgcggatctagtcatcaagaaccagcaaggcatcaaggcagagatagaggcccgggcagaccgcttctcctcctgcatcgacatggggaaggagctgctggccaggagccactatgcggccgaggagatctcagagaagctgtctcagctgccggcacggggccaggagacagctgagaagtgtcaggagacgatgggctggctacagcggtttggaggtcgctgtgtaggaagaattcagggcatgcaaacgcatggctctgcacgcaggagcgcgggtggccaggcgaacctggttgcaggcagaaagtgggaagcccacccacgggagagcgggctccagagatccacggggcaggggagagaagcaaatgtcacgcggaagcaatggcgtaggacggcacaaggcaacgacacggacggaccgcagcgacacacggacgaccgacaacgaggccacgggcactgccgagacgtgcagctgaggacgatgcacggaccaccaagacgaaagaccgcggcagtgacagcgagagacagaacggcaacgcacgcgcactcaagatgccgccgcgacg

SEQ ID NO: 150256 - DNA, 1288 bp, Homo Sapiens
  misc_feature (1174)..(1208): n is a, c, g, or t
cgtctctcatagttgagaataaggaagaaatataaaatataaacacatgtacacactatacactcacttttctatccttgctctatatctttgttatacccgtcatgctcgtgctcacttctcccgttaggactatccgcggttctattgtacacctcctatatggtcccatttgccccctctaatttcccctgtagttgattccgaactttgtccaaagccttatttgccattcactttatctttacataccttccctgatcggtacctggttcctcacagtgttcttgaactgccattcttcgctcaaaaaaccattttccgccaaaccccatgcccattacacttaaatcggaatttcacccttcactgtactttgtatccttttttctatgacaggccttactgcactgatccaatcatcttgattgcatgcacctaaatcaatcggtccttctcttaatccatctaattcatacagtctcccattaacaggaacataactgacaaagtgaaaagcatcttcttcttttgctgatgtcttcgtatcaaattcaaacatttgctgtctggcgaaactgttgtgtacttgtcgaatcacatctgaattgctcagtgccaagcctttcatagctgcatcaaaactttgtgaaaattctttaaactctgataatgtctcgcctaaatggacatcctggtgggtacagttcagtaacacactcactatggcttgagtagcacaagcattattaattacctgcttagcaaaaaatatcgtgtcaagtcgggagtcctgaaccacagagcctgctggttcttctcctggctgccacttgaaaagaaaaattaacccatgaactggctttaatttttcaaaattctcaggctctaaactccatatttcttctacttgggctcctcggcaaccgaatcctttaatgagctcggtgaagaccccggggtcgctttccatgaggcaccactccccggcattgcccgtcatggccctggccacacaccgccccgatccacctctcgctctcagctgccccccgcaccagctgccgccggccacagatctcagcaaacccgccgccgagctcgtcaaccacacgtcaccccccccggccgtaatggccgaattcccgggcatatgtccggtaccgtcgactgnnnnnnnnnnnnnnnnnnnnnnnnnnnnnnnnnnncgccgcttcctcgctaactactctctgcgctcggtcgttcggaataaagaggatgcgccatatgtggtcagtatagtcgt

SEQ ID NO: 150257 - DNA, 1035 bp, Homo Sapiens
cgttcattagaggaggagatgcgcgcggttgacggggcctgaaaccgggccctggtccggccccccggtcctagggttcccgggtcgccgaccctggggggtgtccctcaccaaagggttagtcacccggtgtctgggtatccgcatggtgccggcttttctcctctggtgcagttccatccagagagcctggtccaagacattagtaggacacatcatctgttccaggtcatcctgatgagtcaggatctctgtgccaggaagcgccccagtcttgttgggaacactcaaagagccggggggtgatgaccaggtttttcttcctgtagtctcttggtgttggcatagggggccttcccacccagggccatccagaagttgctggctcctgcccttccaccaccacttgcttctccgtccgggagatggtgtcagcaaccatcttggccatctcccgctcgtccccgctacaacccttcccacaccatagatagcagcaagactgggtcttgaggacaaagacatcattggaattgaggaaattggcccgcgctgggacctcaaaggcccttggtgttgttggcgccagttccctggacctggaacagccgtgtggagggcccggtctccaagttgttagttcgggaggtgcctccctggtagaccaccatgcgtcccttgaagatggacataagatgaggtggctccttgcccattgggacccggatctggactggttcaccattgtacttctggtccaggatgacggcttgataagctgatgctgtaatttcatcttggctggcctggctgccctgccaaacgtagagcaggtaatgctgcttctcgccgatgaggtaggtgtagagcagcaggtagcagtcgcccccatagaagtggcctagccacttggaatccaccaggtaccagctctaggttctcaatgcgccacacctgcacttccccactcccatccatcttaccatcttcctcgtgccgaattcaacaccaggcccgtaccctgacgtatagtgt

SEQ ID NO: 150258 - DNA, 1138 bp, Homo Sapiens
tcctttcttctttatgtgtggtggttcctcgttctctctccctgttcgtctctcgccctttgttgtctgcctctccttctctcgtcgtctcgttcttctgtccctgccccgtatgtgctctttctcaccgttctgtcttccgcgtctttccgccttcccgtttcttctgtcccatgtctcactcagctccttcctcggttccgctgctcctccagcgcggcccttcgcgaacttcttcatccccggcgtatggcccagatttcatgtgcaggttcggttcctcttctggccattgcccatgttccagatttatgccatattcgctggcttggcccagaggcagcctctcctgtaccctgggcgtctcatcctctgaagtcccggctggttctgcagcttggttctggatgattccagctgcttcttcctccttcctaggggttccaggaggtccaggaaccgcttctcgatgctcaagtctgcatctcctccctcctctcccattgaaggcacctgggctctacagctcccccagctcctctttccgcacattcacttggtcctccactcgcttcagcttagcctacatccgattgacactggtcaggtccttgcgcgggtcgtctgaccgcagctggtcctccatggcgctgatccacttgttgaggtcagcatgggtctgcaagcgcaggtcggagctcctggcagccgagaggtgctgggtcttctcctttgtggtggcctgcagctcgtcccagagccggtgcagggcttccagcttttgggacaccagggctgtaaactggggcttctcatccatcagctgctttccttccgcatcgatgttctctagccacccttcatgggaagccagctctgccacaaacgcctggtgctttagccatttattgtgaaggtttcgtgcttcatcataggagacatcctgagatgtcagcagcttgtcgttgatccagagagtgagctcctggcagttctggaggaagttctgtagctcccggttgtctctcagtaggacagaggcctcctgggccttctcgttgttcttcctgtgcctgtcctctatcagctcaccttctcctcgtgccgatttacaccccggcctcttacctagtcctta

SEQ ID NO: 150259 - DNA, 1250 bp, Homo Sapiens
gaccgttatacggctaggtagcgagggctgggtgttgaattcggcacgagggaggtcaaggcgagtagcatgtgcgggagactcacgttgccggcgaagtgggagagataaaagtgggccaacaggcagtggaaagacgacattcatcagtgagtatgccctggatttgtgttcccagggggtgaacacactgtggggtagcttcgagatcagcaatgtgagactagcccgggtcatgctgacacagtttgccgaggggcggctggaagatcaactggacaaatatgatcactgggctgaccgctttgaggacctgcccctctatttcatgactttccatggacagcaaagcatcaggactgtaatagatacaatgcaacatgcagtctacgtctatgacatttgtcatgtgatcatcgacaacctgcagttcatgatgggtcacgagcagctgtccacagacaggatcgcagctcaagactacatcatcggggtctttcggaagtttgcaacagacaataactgccatgtgacactggtcattcagccccggaaagaggatgatgacaaggaactgcagacagcgtccatttttggctcagccaaagcaagccaggaagcagacaatgttctgatcctgcaggacaggaagctggtaaccgggccagggaaacggtatctgcaggtgtccaagaaccgctttgatggcagatgtaggtgtcttcccgcttgagttcaacaagaaactgccctcacgttctccattccagcaaagaagcagggcccggctcaggacgatcacggatgacactgggaccagtggccaagaggcctctccgggcaaaaggggggctaggaacagaatctgagcatggtcaggccagggccccatccgacagcagaaagctcaagcgttcaagctgaaggcggccaaggcgggcaatggaagaggcgaaggaaaaggcgtggagggataaaccaccggaagggcacgcgtataaccgtgcggcctagtaaggtgagcccacctcaaagagagagggcccaaccaaacaggccacaacgggagacaagcgggcgccgatggacacaagcgtccgcgccgtgcagacagcaactagagcaaccaacagacagcactcgcatacggcgaaagacgaccaacacagcgtcaccgacacgatcaggcggagatagccagccacgtgccgcagacaccgagcgggatgcagtagcagacgagcagcgga

SEQ ID NO: 150260 - DNA, 944 bp, Homo Sapiens
ctccagggagagattgttttctttggaggggggatttttgttttcggtgtcctccctttcctggccttcgcggcccggtctctttgcctccggttcttaaaccagttgctgacctgggtggtggtgaggctggtggcctcggccagctcccgcttctcacgcggcgatgggtagggattgtgcgcgtaccactcccgcaggacacccctcgacttctccttgaagcagtagctggtctcctcgccgtcccagatggtgcgcggcagtggaaattttcggcgcacccgatatttgcccacggcgcccaggggtcggccgcgcagcttctcggcctccacgtaatgcgccttcagccacagttgctgcagtttggggtggttgtgaggcgagaactggtggctctccaggatcttgtagagctcacggaagttgccgcggtggaaggcgaccaccgccttggccttgagtacgctctcgttcttgtgcaggtggtcgcaggcgggcagtgaccacaggaacctgcccaggcgctccaggtttccgccttgctgcagaacctcgcacacgcacgccacttgctcctgcgtaaagccaaacgacggcagcatcgacatggctggggcctgccggggcgcacggcccaggcgcacgcggcagggagcagagccgagaggcagggggcggcggccgcagggaggggggcgcggctgttcctaacctcctccttaggctttgcaaaggcgaaaaccggagtcggaacttggcggtgggcggccaaggaagagaaggcggaggagtaggggaggttctggacacggaacggccggcgcactcagtagcctttaaggccttgctgcctccgacctcccgacccggtggatgctgcctcgtgccgattaaccccggctctactacgctagttttttttcgttgtggtttgtcgt

SEQ ID NO: 150261 - DNA, 922 bp, Homo Sapiens
cacatagctagtacgagcctggtttaatcggacgaggctgagacacaattcctggagcatcctggagcatctcccctaccacccccggggggctgcttggggctggactcagacacctacgccagtccctgaggacaaagggcaacctggagaagacctgaggcatcccggcaccagcctccctgctgcctccccggtgacatgagctgtgccctgccatcccactggcacgtttacactctgtgtactgccccgtgactcccagctcagaggacacacatagcagggcaggcgcaagcacagacttcattttaaatcattcgccttcttctcgtttggggctgtgatgctctttaccccacaaagcggggtgggaggaagacaaagatcagggaaagccctaatcggagatacctcagcaagctgcccccggcgggactgaccctctcagggcccctgttggtctcccctgccaagaccagggtcaactattgctccctcctcacagaccctgggcctgggcaggtctgaatcccggctggtctgtagctggaagctgtcagggctgcctgccttcccggaactgtgaggacccctgtggaggccctgcatatttggcccctctccccagaaaggcaaagcagggccagggtaggtgggggactgttcacagccaggccgagaggaggggggcctgggaatgtggcatgaggcttcccagctgcagggctggaggggggtggaacaccacgatgatccgcaggcccagctccggaagccaaggagctccatgcagttcaccagctgaggccagcagagaggccagtttgtctttgctggcagaagatggtgctctggcatatctggcttcgaatttcataagtacctctgtgagtccgatacagatgggccccaatttaca

SEQ ID NO: 150262 - DNA, 1232 bp, Homo Sapiens
  misc_feature (53)..(64): n is a, c, g, or t
  misc_feature (111)..(119): n is a, c, g, or t
  misc_feature (147)..(147): n is a, c, g, or t
ctagggatttccccttagtggacagaaggccagggccctttctgttctaaagnnnnnnnnnnnnttttccccgtgtgaggagtcccataggtcaggcccccttctgggttnnnnnnnnnaagactcctggaaaggtttctagtacgntttttccccaaactatttggagaggaagaaaagtctggtattctgagttctccttttttccatttccagtagtaagtaagtgctgctccaccaagctgagaagaaatgccccttggctttcctcggggccagtgctaggaactctggaccagccgtctgtagtggggcatgacttcgtgctcgggcaagtggagggcgaattccaaggccactaacaccgggaattcaaaggcaatcagttctcgcctgttcagccggaacttctcttccagtttgtcaattaaatgcttgacttcgtgttttttgaggtcacttccaattttggctgctaacagcacacatgccccagcacacagcttccggttctgtttgttgagtttccccttgagggcgagcttttcaaagtagacgaaggccatggccaccgtgggctcctcaaggccacagtcctcctgcgcaagcttccgcatctctcgtttcagactcctaattttgctgagtgtcagcttaatgtgaggaaacttctccttgaaggtctcgttcatgtccttcttgagatccgagggcttcacgtagtcaatcactgttgtcatgtaggaagggaagatcagaacgcgtttgtgtttgccacaaggccactgggggtcatccaagagatttgggtcatagtccataaagtctcccaggtcactacctgtgtcgaggctcccctgggtgccgcttgcccggcctatggagaggctgcggtggctcaggttacggaactgggagaaagaggaggtggagtctatggtatttctccgggctccaaaggcatttgtgggtaacagaaattgggtataggaaacagtcttcccatcagcacccagctccacaccttccagaccaatgatctctttcaaactcactgcaccagttgattgtcttcctccgtccaacttcaagtccccgacttgggtactgtcgcgatacggcagcactgaaaatatactacagaaggatcttctgccactgataaggactattctgccgttcctggtatcgcctcgtgccgaattaacacccagcctcgctacctaccgtat

SEQ ID NO: 150263 - DNA, 528 bp, Homo Sapiens
atttgcagtatcaaagcaaggcaacttcttgaaaatggaaaggatggccacattatgtacattggtgtgagatcttttcacccagagaactacaaagcatgcatgcatatacatacccgacttgggtactgtcgcgatacggcagcactgaaaatatactacagaaggatcttctgccactgataaggactattctgccattcctggtatcgtgttgccgcatgttcttgataaaatgaatcttcttaaaattctttggtctgggtgaacctgagagagttcgacatctccggagaggggcgttctcctcaatatcttccagggtctccaaggaagatctctgggagatgaggcgccgtcgggacctctgcagctgctcgaaggcgctggtgctgccgccctggcctggctgctccagggagcagtagttctgcgaagtcggcctggagaaggcgatgggcaggattccctgagtgaacgagttgaggcgtccccgactgccgctcccactcccggggtcccggagcc

SEQ ID NO: 150264 - DNA, 1201 bp, Homo Sapiens
  misc_feature (228)..(260): n is a, c, g, or t
cctctccgcctccgctgcggttggtcggtatctctggcgtgctttgtctcgtgcggtcgtctgcactctttcttgctcggctactgtgcctcttgtgccggcctcggctgttgtatctccgtcgctcgctcacttgtagttgttgggcgtcgcctcttgtttcctgctggcggccccctcaatacgctagccttggggttgtggccctccttgtgtaggcccgccggnnnnnnnnnnnnnnnnnnnnnnnnnnnnnnnnntgcgcgtgtttcgcccggccaatttcggccgctgtcccacacggctcctggaacacccccggttttgcgcccccagtccgcggtccacaagcttggccttcccaggtactccatgcctcggccaacgtgcagagaaacttcaggagctgaccggtgttcacggagggctcgaccccgggtcccgcagaaagttcaccaggttgccccttgctcacgtgctccatgacaatgtacagcccctggtgcagatcacgcccaggagacgcaccaggttctcgtgttgcatcttcgtcatgacggccgtctcgtccaggaaggcctgggctgtcacatcacacttgatattcttcacggccaccttttgccccaggtactcaccctgcaggacagctccaaactctccctctccgatctgtgctcccaatgtcaaatgctgcaggttcagtaaccagcccgccctggccagctcctcctcggccgacttggtcccgtgtttccgctttggtctcaccagcttggtgcagatagcgcccttgtccttgctgtaatgctgcaggatggtgggacagccatgagcccagccccagggaggggaaccccagcatcctgttccgttcccgggtggcctctccaccatgtccatgaggttgcagaagaacacggcctcatcgattgtgaggtggccgtcgcggtgcagcacgcggtagtggatgacgtcgcggccaaagctcacgcacaggacgtagtcgccggggtggcgcgcggactcccgcaccaggaacagcccatcctcgggaggctgcagctgctggacagcctcctggcccgagatcttcccgtggaaccacggcatgaggctgagcttggggtctgcggagaggcctcccgctcccgcacctcgtgccgaattcaaacccagcctcgtacctagccgtaagttt

SEQ ID NO: 150265 - DNA, 993 bp, Homo Sapiens
  misc_feature (18)..(18): n is a, c, g, or t
  misc_feature (155)..(185): n is a, c, g, or t
gaggcaatgtgggacggntttttctcgcggcgagggctgccccaccgatgatggataaggtgcgggattttcgggatggaaacggagcaactcgctccaagttgtgcagccgggaccgcctccgggtgtgcagccggctcgcggaggccctcctnnnnnnnnnnnnnnnnnnnnnnnnnnnnnnnccccctgagcagaaaacaggaagaaccaggctcggtccagtggcacccagctccctacctcctgtgccagccgcctggcctgtggcaggccattccctagcgtccccgactgtgaccacttgctcagtgtgcctctcacctgcctcagtttccctctgggggcgatggcggggcgaggctctctggtttcctggcgggcatttcacggctgtgattctgctgaggaacttccccgggtgagcccccgcttcctccgagcctggcacccccctcccgtctcagccaggatgccaacgaggcgctgggccccgggcacccagtgtatcaccaaatgcgagcacacccgccccaagccaggggagctggccttccgcaagggcgacgtggtcaccatcctggaggcctgcgagaacaagagctggtaccgcgtcaagcaccacaccagtggacaggaggggctgctggcagctggggcgctgcgggagcgggaggccctctccgcagaccccaagctcagcctcatgccgtggttccacgggaagatctcgggccaggaggctgtccagcagctgcagcctcccgaggatgggctgttcctggtgcgggagtccgcgcgccaacccggcgactacgtcctgtgcgtgagctttggccgcgacgttcatccactaccgcgtgctgcaccgcgaacggcacctcacaatcgatgaggccgtgttcttctgcaacctcatggaccttgttggagcattacaggcagggaccggggcgcaatctgccccaagctggttgagaccaagcggaaacc

SEQ ID NO: 150266 - DNA, 923 bp, Homo Sapiens
  misc_feature (732)..(732): n is a, c, g, or t
tgagccggggtgaatcggcacgaggctgcagtcggcatgccaggacccggcagcccgctcccacctagtgccccagactgagctctccaggccaggtgggaacgggtgatgtggactgtctttttcatttttttctctctggagcccctcctcccccggctgggcctccttcttccacttctccaagaatggaagcctgaactgaggccttgtgtgtcaggccctctgcctgcactccctggccttgcccgtcgtgtgctgaagacatgtttcaagaaccgcatttcgggaagggcatgcacgggcatgcacacggctggtcactctgccctctgctgctgcccggggtggggtgcactcgccatttcctcacgtgcaggacagctcttgatttgggtggaaaacagggtgctaaagccaaccagcctttgggtcctgggcaggtgggagctgaaaaggatcgaggcatggggcatgtcctttccatctgtccacatccccagagcccagctcttgctctcttgtgacgtgcactgtgaatcctggcaagaaagcttgagtctcaagggtggcaggtcactgtcactgccgacatccctcccccagcagaatggaggcaggggacaagggaggcagtggctagtggggtgaacagctggtgccaaatagccccagactggggcccaaggcaggtctgccaagggcccagagtgaaaccgtcctctttcacancatctgggtgccctgaaagggccccttcccctcccccacttctcttagacaaagtagattcttacagggcctttcctttggaacagacagcctcactttctagtctgagatcaagctgcctggagcgcctgaaaaaagtgcctggactgcccaggagagctgctctgcaggctacggaagctcgtggccgg

SEQ ID NO: 150267 - DNA, 1064 bp, Homo Sapiens
cgtcgtgtgcgcgagccgccgctccagaagtgtggacaccacacccacgagtggcgcgccctgcaggtcacccaaggctcctcctgagacccggggataaggctccggatcaggggtcacctcaagaagaacgttttcggaggatccgagtaaggcacattctgtccgttctgaagaagtctacagtgcagaccccggaatggctcactttcttgaaagggcccgccgcaaggatctgttgaattgtctgctgttcgacaagggtcattctggaacggtcgcctttgaagggttcagctcctttaaatgggtcagatttgaaggggtcttctgtctggaaaggatccggatgcaactcttgcgtgttgttgctaaataacaaggctttatttttgaaaggatcatccatggctccaaaactgcccctctctgccagggagacgccttcgctcaggttggccaggtcggtcaggctggcaccatgggctccatcgagcacctggtcatactgctccaggctcctgtgggcctcctggcggctttcatgcagctgggaaagtttgctccttgcctggttgatttcgtcttgcgttgacttcagggacttgatgatggtttccagctggactcgcccagcctgaatgctctgctccagctgggtttcctcctgctgcaatcggttcagctccgacttggctcggttcagatcgtcttcctgggactttaagtcagattcctgagattggatttgcgttttcagtgatgagatcatctgagtctcatcctggcacttctgccggacgtcgctcagcatgtctcggagcttggccttctgctggtccatctcgtccaggcggtcttgagcatcctgtttctgagcctcgagctcctgcaaactgcttgtttcccggtctaggtcattttgtaattcctgcacctcgctggttttctgtctgattgcctcttccttttctcgaatgtcttgttccagtgaatatttctctctttgtaactgggcctcgtgccgaattcaacacccggcctcgtacctagcctaatcgttt

SEQ ID NO: 150268 - DNA, 981 bp, Homo Sapiens
aatatggcttagtctgaggctgggtggttaattcggcacgagggaagttggacctccttggtcctgcaggaagtgctggtgctcgtggcgctccgggtgaacgtggagagactgggccccccgggccagcgggatttgctgggcctcctggtgctgatggccagcctggggccaagggtgagcaaggagaggccggccagaaaggcgatgctggtgcccctggtcctcagggcccctctggagcacctgggcctcagggtcctactggagtgactggtcctaaaggagcccgaggtgcccaaggccccccgggagccactggattccctggagctgctggccgcgttggacccccaggctccaatggcaaccctggaccccctggtccccctggtccttctggaaaagatggtcccaaaggtgctcgaggagacagcggcccccctggccgagctggtgaacccggcctccaaggtcctgctggaccccctggcgagaagggagagcctggagatgacggtccctctggtgccgaaggtccaccaggtccccagggtctggctggtcagagaggcatcgtcggtctgcctgggcaacgtggtgagagaggattccctggcttgcctggcccgtcgggtgagcccggcaagcaggtgctcctggagcatctggagacgaggtcctcctggcccgggggtctcctgtgcctgacggggtcctgctggtgaaccttggacgagagggaagcccggtgctgatggcccctggcaaagatagggctgtggagtcaagggtgatcgtgggagatggtgctggggagctcctggagccctgggccctggtccctgtcccgagtggccagcggaagcaagggaagagggacgggtcacaggccatggactcagagcgtgccgggacaggccaaggcaagggccggcgtggacgggcacgaagacggacgatgggcgcatttagaggagc

SEQ ID NO: 150269 - DNA, 1698 bp, Homo Sapiens
gttggggtgtttgttgtggtgatctctcgttgtgttttcattgtctgtttgttcctctttgtctgttcgcgttggctattcggtggtgcctcctggcaggtcgttgtgtgccgctctctcggtcgtgcttctgggttcttctgcgtgtgtcgatgtctctagtctgggtgttggggtggtgctgtgtggtgtagtagtttccttgtggtttgtgcgtctctgttcttcgggaggtgtcttctgtactgcgtctcttggttcttctccgtgccgccctgggtgttgtgtcgcggtgttcgttttcgcatggtagcgcctctattgtgtatgtacggtccttgtggtgtctgattatggctggtgttcctatttagctgcatcattggtagttgcgtgtaggctccagacgctatgctggatgctctgtatggtccaatgtgtgtggtagctttccttcgccccggtcgtggatgcctggttctttcgtggcgaatcctatcagtggcatctagtggagtcttcctttgtggtagcagtctccgtgtcattacgggtcgtgcccctaggagtggatccgttcgtgtgtcatcatgtggtcaagatcctgtgcattctttcaggtgatccccttcgccgttggacgttcgtttggtcgaccgttcgtaagacatagttcagcctcacttacctgcactgatggcactttgccactagttcgagtgagcgttgcaggagagcccagacatgatgcggtactgcggccttctctgaggccagaatgttcggcgagatcccgcacctcgccccgctcagcgggctgcacggcgccaggcggcaggtgctgtggtcatacaggatttggcagaaactcctgtcacctgccgagtggacggagacggcgcaggccaccagggagtagctggtgttgagcagcaccacctggtccttcttgagctggaaggcgggctggaaggtggggaaggggtagaccacctggtacttggtgtgcagcatgaagccatgccgtaggcactgtgcattcgggtctcctgggtgggctcggctggcatcctggcaagcagcacagcggcctggcggtggcacggccacggtgctgacgtagatgtcacggtggttctcgtcactcatcatcatcatgttcatgagcatcccgttggccgagcgggtgttgaagccgaagacgatgaccttggaggcgtcgctgggccactcgcatacggtcaggtacaggtcgctgtagatctcctcgtcctggaatagccgaacctgccggaccagcttgagcttgctgtgaacgttgaactcccaccagtacagatggtagatgtagaaggagaagtcgtcatccccactgctgctggtgtaggagaggacgtagcggccgcatttggaaaagcccaggaagatatgtcctgcatagaggaagtcctcatccacaatgttcttgagggacacgcacacccggggaggcagcttccggaagaggcgaggggagagctgtccgctgatcttgacccgctccagctgcttgaggacgtgctcccgccgccgccctgctgcccgcttccctccggctcccccggggccgccgccgccgctcccagccccgctgttccgctccgatttcgagctgggcgcctcgtgccgaattcaacacccagcctcgtacctagccta

SEQ ID NO: 150270 - DNA, 262 bp, Homo Sapiens
gcggccgctacgtcctctcctacaccagcagcagtggggatgacgacttctccttctacatctaccatctgtactggtgggagttcaacgttcacagcaagctcaagctggtagggaggcttcagcaccaggctggcccttcagatggtgtggttcagcaggtcacagcaccctctgagcctcaggttccttgggtgtaaaatgatcatcatgtactcctggggtcatcatcaagattccatgtgttagatccaaccatatg

SEQ ID NO: 150271 - DNA, 1073 bp, Homo Sapiens
cccttagttatatctgcgtaggtttttttgtgccttgtgctctcttttcggttgcttgttctttctccgtgtgcttattctctcccctcgtggtatactcccgtttatttgagggcataatcctttctcagccttcggaaatgtacccgggccattatcctctcctttccacctgggtcctttggtgcttggcctaccattctcacctggccaggcctcgctcatttccattggcctccagcttggagctcgttgactctcgtgctgtttccagaggcaaaggcctcctccaataagcactttctgtttcccgcccatggtttgtgacctggtgtctcagtctcccaagctctctctgcatatcctccaccagggtcaccgcttcttcgccgctctccggatgcagctcctgcaccctgctctggatctcctggggcaggatggtcaggaactgctctaacaccagcagctccaagatctgctccttcgtgcgcatctcaggccgaagccacccatggcaaagctcttggagccggctgagggcttccacggggaccagctgcctcttggaagcggaaccgtctgaagcgcaagtgggaggcctcggggctcggtcctgggtcaggtgggggcagctcctggctccaggcgcagtcctcctccagcttcactatcaggagcccttcccgttcctgggagcccgggcccgacgccatcgtcaggtctccagagcgccttagcccgaaaccagccgtgcccgcctacgaaggcgccctgaacccatgtaaggttggacggcgccagcaggagcccggggccgggggctcccagtccaggcccgaggagccccgctccagcccaggcgcggccggctccggcgcctaggcctcagtcggtcccaggcgccgccacgccggccccgtggcccatctgcgccaggacttccccgaggcaggaaccgagcgccacgcttctcaccctatagaggacccacgcaagactcagacctctgctcccacgccggaaatctcagcgcgcaagtagccctcgtgccgatacacaggcctcacctg

SEQ ID NO: 150272 - DNA, 1012 bp, Homo Sapiens
  misc_feature (81)..(81): n is a, c, g, or t
  misc_feature (988)..(988): n is a, c, g, or t
gagtccagttccgactgttagtgacccttcaggacaacctttgggccccagaatgggagctgaaacgggccatctggtggnccgcagctgcccaaaggaggtgcaaagattgtataaccggcagcgctgaagccaagagcgtccggcatgccgctgggcagctgggggggcggctcgtggccccagaggtgggggcccgtccgtgagttcctggggcctgaacttccctggcggtccctccccctgcatctcctcctatgtcccttggtcttgtcataattttaggaccttccactgctggttcactgcctgccagcgcttgaagatgcggtagacagaggagccttcatggatgatgaggcctatgcagacgacatccatgaagccatacatgccgtagcagatctgaaagagcagatcctgtcgttgccacttggctgaagggctgagtgaggaccagatgagccaggagatgctggcagccaggaagagcgagcccagaactatggcagcaatctggaccttctcgatgaccgtcagggagatggcctgccactgtgtgggagaaagggctccaaagagtcccagaaagggatggagggccaggtgatgggtggccctgaagagcagggtgctccaggaaccttccctaaaaccttcaggcaggatcaacatctgtcttctctgtgccttgattaaatctagaatgtggcacttgtctgacaccatttgtcttactttagaaaggcaggattgggcaagtgctctgaaaccaaaacatctagatttgaatcctaaatcttgactccatcacttactggctaagtaacgttgggtaagttttcaaatctttgtgcatcagtgtcctcgtttgtaaaaggggataataatagtatctaataagattattgtgaagattaagagttaatacacaccaaaacttgacacagaaacactacatattgctatcatcatccctcgtgccganttaacacccggcctcgatcctgcc

SEQ ID NO: 150273 - DNA, 1382 bp, Homo Sapiens
tcggccaaggtctgatctagcatttgagtcttagccgaagcaaccattgttgtcgcagctggcgaattatccacgccgtgccaggtaccgttgggcaaacaacagccttttcacgaccactcgcattaccagccacgatgtagggtgaccagaggatcagaagagcagtgtgaatcgcgtagaaacatgcggcccaactgcttgtcaccctggacctcgtcccatgcccaagtagccgccggctggctgcaatgccccattgctgccggatacccatcagggttgttggtatgggcccacggccaaaagccggcgatccaggttggcagtagcctggccggtggcccccgggaaccatggaatgtccagttctggctgatggctggcaccatctgcactggcttcatcttggcggtgacgatactcgaagaggagcagcttgccgtagacagcatgggtagctgccatgagcacagccaacataagcatgaagcccagcgtgtcattggccttgaagtagcgatgctcaaagatgcactggtcctcctcccgattaacttttgtaggtgcccacgtcaaaagacaggttgggaaggccatggccacagacaagggtccaggccatggcagatgacaagccgcgcatgtgccagagtgtcatgcgcttggcgtagaatcggtggtgggcgatggccatgtagcgggtgacgctgatgcagaacagcatgaaggccgcatggaagcaaaagagcacgggccataaaggccacaatcttgcagctgagtgcactgaaggtccatgaagagccgtggcgcacagaagccagcacaaaggggaagcagacggcagagcgtatgccatcggccaggcacaggtccagcaggaagtagtaaggagccttgtgcagggcacgctccttgagcaccagcagggacaagatggcgttacccgccaggctcacgcacataatcagtcctagcagtaccagcttcacataagctgatgcggacggtggggacagagcgccgctcacctcctcaggctctccggtagtgttggccatactgagggtcaggggctactgccaaccctagggggtcagccagtccggtactcgatgggcccgggggggctccatgagttgtcctgctacattagcaccttggctctctcagcagggatgtcttggaatccacgatggggctcaagctgtctcacccaggtaaatcacagcccgggccacattgtgggaccctctagtgatactggcggcgcagtgacactcctgcttctgttgccgtggatacagccgggctggtctgaatcctcgtgccgaattcgccacccaggcctcgctaccttaaaccgtagtagttactgc

SEQ ID NO: 150274 - DNA, 1472 bp, Homo Sapiens
tctctttgtgtctccggtgctgtcccttcccgcttctggtcgtgtctgcctgcttggtgttacccttttcggtcctcttggctccctgtggattcagtgcgccggcactctccggacccttcacggccctccctctcggggttcatcgtatgcgtcgcccactttcccttccttgatgggggcccgggcagtcgcgtgctgcgccgccgcgttccgttactgtttctcgcgcttcaggtgccctgaccgctgccggctcagtggcccatttgttcacctttctggttcccccccgttgctgtcccggtagcgcccccgtggcttcgactatgggtcgttaactgtccactctgcccagggtaatgcatgaatggtaggcactttcatcccatgggggaccccaggccccgcttgtcacgaggcgaggtctcctgttttttttctgcccctggtgccgtcaccgtctattcccacagacttcaaattcaactcatgggccttctgtccgagttggggtacccctagtggcccgacgcgcaccctgggcgccaacgacggatgccagggtccctggggaccagcgcaagggctgatgggaagacattttcgtcagtagatgacccagaaacctcttggcaatgcatttttttctctgccccaggtgcctcaacttccccccatcagcctcctgtctctctgcacctgcgccggcgccgtgctcttctctgcgccgccaccgttgctcggggatgggtccctgagacttggcgaagtaggagcactggactcgtgcacaggccctgtctcgcaggttttcaggtgagcttggcgtttcctccgctttgaggggcaggtctccagtggcccccgggcgcaggcctggacatcactgtccgtctcgtcgtcgcccactacggcctcagagacacaggctcactgcatgtgctcttgggggacgtcagtgccacgtgtggtcacactggctccggctcggactagcctctgtctctctttgcccgtgtctccagaagccgcgtcgagatgccggagcccccgggccttggagatgaaggcaggcccctgctccacccaggaaggagggaggcagtgggctcgtgggtcagtgcctttgcaggcgacagcacgccttgcggccctggggatctttctgtgccccggcgagagcctttccgcctcactgcattgtaaccccattcccgatcaccgggtgggatccatcatcggatcccaagaggagtccgcgcagcccagccaacacccgaagctcctccttcaccgagaacccaagcagaagaccgatcaaggaggtcctgacgacaggactcctatgggtccgacctgggtctcccgcaggcccctctggtagtcctcttcccacccgccgcccggggctgcgccgcagccgccgccgcaacctccagcaccgcctcgtgccgactttcaagcccagt

SEQ ID NO: 150275 - DNA, 848 bp, Homo Sapiens
  misc_feature (181)..(391): n is a, c, g, or t
  misc_feature (405)..(421): n is a, c, g, or t
cgcggggcctctacaggtcccggcgtttctgaattttatcgcctccccattaggggacccgccggttgtccccgtgggtccacgaaaaccgggggccaggaaccgctattgccccatgggccccagttcgcatgaccggctggtgttctcgcgacccggcattatgagtgccctcgggggnnnnnnnnnnnnnnnnnnnnnnnnnnnnnnnnnnnnnnnnnnnnnnnnnnnnnnnnnnnnnnnnnnnnnnnnnnnnnnnnnnnnnnnnnnnnnnnnnnnnnnnnnnnnnnnnnnnnnnnnnnnnnnnnnnnnnnnnnnnnnnnnnnnnnnnnnnnnnnnnnnnnnnnnnnnnnnnnnnnnnnnnnnnnnnnnnnnnnnnnnnnnnnnnnnncacaccccattaannnnnnnnnnnnnnnnngtagagacagatattcgggcgcccccagtctagccacacgtatgccccccagtggtggttctgggaatgaccaaggttggctgctgaagtcagttgtctgggtgagtcagagtgagacacacagacacactcacaggcacgcctgagggttggggggcgttgggggtggtttttgggtacttctcagctcctgggctccccagacctcccttcccagccctcaggccagaaagcaggggtgacagagcgcacagagacgtgggagatttggcagcgggaggggagctgacccgcctgcctgcaggcaccaggacaggtgcagggagccatcggggccatcttgcccctttcagggacaggttttatgtttgctgtctcctgcccccacctcgtgccgaattccaacccagcctcgtaccagcctagt

SEQ ID NO: 150276 - DNA, 897 bp, Homo Sapiens
agtcctctgaaaggacttcagcttctgctcgttttgcaggccgtcctcttcgtctttgcttctgctgaccgtcctctgttcccagaaccaggggtccggagtaagccagggtgtctcagaaggtgccggatctccccagctccaaggccttgctggggctcgcgagctcgcctggtagcagcagagggtccatgtgcctctcgtacactccatcgctaagaattgaggatgagcccgcaggggagcccagcagcatccctggctcttccaggacatcagcgaggccctccaccagggaggctgccttcttgcagctctcagggtactgtgccaccacccagggccggaccttatcaggcaggatgcccaggaactgctccagcaccagcagctccagcatctgctccttggagcgcgcctcaggcatcagccactggcggcacagctcatgcagccgggccagggtctggtggggcccggcagcctcctggtagacaaattcccggaaacgcaggcgggagaactccaggtcagcaggggtcctctcagggatggtctcgggttcttcctgctggactccggctgctgaccccggcgtgggcagatccggcggggctggggagctcctgggggaggcaaacgccttctccaaaggcaacatctttccaaaacggcactggaaaatgtgactgtctagccagggacaaggtggctccaaaggagaggtgccagggatgaccagatgcccagtgggctcaggtggtgccagaacccacagaccgtctaccctgttggggtcgctctctgacccccgcgctgcatgcacccgggagcgacccacctgctgcgcagctaccccaggccggtcccagccgcccggagccccaggcgatcagg

SEQ ID NO: 150277 - DNA, 1174 bp, Homo Sapiens
tggttgtgtgtggtgcgcgtggttcgccttgttgtagtcctcgcgaatgctgtcttgtcgctgtttctcttcgctgttctactgtttgtgtctccccctttggtgggctttcgtcgtattatgggagttcgtgctgtctttgacttgggttcgaactcatgctctctttggtttctgcgtcctgagttcctggttacccgtggttttcgcgccccgtttttccatgctttctaaagctccgggttgctctgatgaaagttggtaatcttcgacccgtggtgaatccggcccttcgtgacccgagtcgcttccagtctgcaatttggcttataccgttagcaccctctgcttgagctggttcgtgagccttgcgtctcgttcagcgtcgatgatgcctcccgtctgctcctgtaggaggtcatatgctctgttggagggcctgatattcttttgttaattgtcgaaatcttagttcagattcttcagctgctaaactcttaattggcttggaacttcttctatgctttcttctacggatgagcttttctcggtcccttgtgagctcatcaataatgttctgttgctcaatgacctgaacgttttagaaactctgctttcttgttcttcattagcttggtcgaggtcattcagagattcttaatttcttcaggggtggatgggatgttattttttctctcatttctgaattttccttggtaacggcttttagtttttctgtccatgcgctgcaaggacaccatcagttcatcgtttctcttggtcgaggcacttgttcctttccaggagaggtttacattgcttttcggtttcccgcacacagttttaacagttcatttcgttcatctccaagcaaggtattcctgtcattctaattttcttatacgtggcattcaattcagctattctcttttgatttcttcgcaaatcaggactgctgcagtgttcggaaccatcacctgcccttcctggaatttctcgttttgggctgctcatgttgcactcagcctccttgaccagaaagagcttgttctgtccaaagcctccttctgaagttggagtttctgtacatagcctgtctgggtctccagttccttttccagggtaaagacctcgtgccgaattcaccaccaggcctcgtacctagcctattttt

SEQ ID NO: 150278 - DNA, 1199 bp, Homo Sapiens
accggagtctaattatatgattgtaatctaaattagaacttggcacgagactcgctatgtgatgtcccctcatcatcactcagctactgacgcagccaccactctgcgcggtgtggtgtcttctccacatagtagtcggtctcctcactatgaggcgcacttttccctcttcttatcaagtgaacagctcttgttcctccgcgatgtaattgttttataagccgcccctcgttccccgattttgaaccaaaacgcgacacctcattggcccgtcttttatagggccgaccgcggggcaccctttcgcggcacccggtctccggcgtgacttgccacggaatggggtttaactccgttttgtcggcggggacttcggggccagcttcagttccctcgtctcccggaggcgccccaaccttactgtttcccccattcttcccgcgaacagagtcaaagagctagcgggattcggcactagctgctgccgcggtgctgtgggtgctgcgtaccagctgttcactgctgtctcgccttccctcttgccagttctgcgtgggaggcgcgggagttttgcggaatgatacgtggtgtggcgtcggggttgtgatacccgcccccttggagatgggccgcggggtcatcagtgatcttgatcactttcttcaggcttttgccacttgttggctgagggtcgatttactcccttagctgcgtcactctactttctccactttctccaccttggaagaatagtatctcataaaataagtaagaagaatgtggtaaattagtgtcgtatctttttttgattgtagtaatcagtaagtgaacattcttgagcactttctctatcccaggtgctctgctgcttggttagggatgctccagattcctgggccttgcccacaccatttcagcctcattttccttttgtgtgaaatgttaatgatatcatggtgtcttcattacattgttgcaggagatgaagcaaaaggaaactgtacacagatctgaaactattgtattccctgtgcattgtcttcacatcctttttctgagtacaaaattaagacgattgtaaatgtgtgttgtcctccttctcattgtttttcacatccaaaaatgtcctcttggaagcctcattatctgagtagcttcctcgtgccgattctcacacccagtctcgtacctagccgtaa

SEQ ID NO: 150279 - DNA, 768 bp, Homo Sapiens
  misc_feature (121)..(121): n is a, c, g, or t
  misc_feature (704)..(704): n is a, c, g, or t
cctgtttagcaccccatccctaagaaagccccatttatagcagttttgaacaccatggcttcgtgtatatcaaagcagggccttggagtatttgttaccagctgggttagcccagtgcagnccgttagcctagtgcaggccgtgagacagatgggatgtgggggcccaagtcactgcaggagcctccccagctgagctggcaccacatgtggcttttgggggtggtttctccactcatgttctctttgttcatgatgtccaaacccgatctgtccctggtatccaaatctcctctcatcactgtccatgggtcaggggtcctgcaggtccccccaagagttcctgattcctctgcccaagccacacactgcctggtgcccttacctccaacctgagccactcccctctcctgtgagccccatgccagagtctatatactcctccttcctgctcctccctggtgccaagggagcacagctcctggagcacctctctgaggacagggctccaggaggactgctggccacatcttcatgcccagacgatggtcctgctgagccggcggttgatcacatctagacttgtagagtccaagatgctttccctccacgttgaaggtcagaggcttcccaccccaaccctgtgctggtccacagagccaggggctggccaggtacctactctgggatggtgggcaccacggnccccgcaggctgaaaacttgccttatccgtctatccgtccttctgtcctgtgtgtggtagtgga

SEQ ID NO: 150280 - DNA, 1403 bp, Homo Sapiens
  misc_feature (104)..(187): n is a, c, g, or t
  misc_feature (393)..(456): n is a, c, g, or t
  misc_feature (574)..(634): n is a, c, g, or t
  misc_feature (860)..(918): n is a, c, g, or t
cccttctctctgtgtgtttgttccctccttcgtccctgtcttctgttctcctgtcttccgctcggttgctgttgttctctctgttttgtcgcgcctgccttgcnnnnnnnnnnnnnnnnnnnnnnnnnnnnnnnnnnnnnnnnnnnnnnnnnnnnnnnnnnnnnnnnnnnnnnnnnnnnnnnnnnnncctcctcctgcgttcccccgctcctctggtctccgtcctccccctgtccccctctgtttgttggcctttctgtcgttctctcctggttttcttgtgttttcgctcctcttttgcccctcgttcctcctctagtgtgttccgcactctttctctctgtgccctccttgtttgttctttttactctgctctcctcttggtattgccgnnnnnnnnnnnnnnnnnnnnnnnnnnnnnnnnnnnnnnnnnnnnnnnnnnnnnnnnnnnnnnnncattgtgttcgcagttttgtgcctcccgtcttctctgcccttcacgttttcgtttttctcttgtttcttattgtcctatccttttttgcattctgtgtcataattcattctgcttcannnnnnnnnnnnnnnnnnnnnnnnnnnnnnnnnnnnnnnnnnnnnnnnnnnnnnnnnnnnnatactttgctctctgttattcttctgggactcccttatagttttcacaatgttctgcgtgctgcttggttgccttttgtcctccgtccctcctgggtgtcccgttcttgttttcttcctgctttccccccgctgctgtcctcggtgtctactcttctttcgtcctggggcttcttgtgtgtttctttgctccgtcgtctatttgcagtcctgtgcactccgtgccnnnnnnnnnnnnnnnnnnnnnnnnnnnnnnnnnnnnnnnnnnnnnnnnnnnnnnnnnnngtgcctgttctatcattgtttcctgttccacgttttctctcatctgtttcatgttttctccatctcggtgcatgattggtcttctttccgcctgttccgttcctgctcctctttctctccctcgcttacttcatctccttctgtccatgtcactgctgttgctccgtctcctcgttgttctcgactcgtcgtggtccgcggcggggctgaacctgtctgggcccgccttcccgccatgatccccggccttcgggccgcccatcgagccacctctgtcctctcacccagtccagtcgagttggcctcccgagatgcactgcgttgtagtccagctacgcctctgcggctccgcgcgctctagggcggctaacggcccccatcgagcgccaagttcagcttcgcgcgctccccttagtgtttttaacgtgtaacccgggccctcgtgccgaattcaaacccagcctcgctacctagccctattgttg

SEQ ID NO: 150281 - DNA, 1136 bp, Homo Sapiens
cacttacgagaagaatgtcgggcaccctctttttttctccctccgtaactgtttgccccgtgaactttttgaaacagcatcttgatgaggttttgtcggggcctcgtttgcgccctggtgattcccgcaatatcggacatacgggaacttcgtttcggtttcgagatatttttccctaggtgacccggttcaatatggccagatgaccttgttgccaagttatagcctcctcctcccaaaatgagtgttcccacctccattgaaggatgaacttaagacacttgccattccccactggaggtcatgttaaaggagcaccatgggatccccagctattgtgtcagctcccagctgtaagacccctgctttgggattaaaggcttggtatacttcctttagtacactttcacagatctggtaatatttttcatcttgtatgccatcctgaatgggcacatttacactgtagtaccgtcccttccctaggccaacatcagacacgtcacctgttccatctccatggtgcagatccaaatccacgtagagaatacgctcaaatttccgtcgcaatcgtaatattcccaggacagcatcattgagataacaaaaaccagatgcttcatctttctttgcatgatgccaccctccagaccagttaattgctactttgcacattccgtcaatcaggcattgggcagctgtgatcgtagcccctcctatagctgctgcatagtcaaatatcccttcagtggctgggcagtcataacctagcccatattctatggagtccggatgatcatcatcgccctcttggctgaccttctggagatgctgcagataagcatcagtgtggaaggtggccatctcctccatggaggccactttaggcttaactatcctcatctgcttatgcagtgcatatgcttcaatcaaaggaatgcaccatactggcccgtttggggatcttggccagggagtcacacatactgacatactcgggactatagatataaaccgggaccagcgactgcccactgtccgccggttcctccggctcctccatcttccgcttaaaaccgttccgcagccaccttccacctcgtgccgaattcaccacccagcctcgtcctagcccc

SEQ ID NO: 150282 - DNA, 1051 bp, Homo Sapiens
  misc_feature (145)..(145): n is a, c, g, or t
gggataggttttttccctaggatgacccccggtcaagtagttccagcatcgagccgtgttgggcaagttaatagcctcctcctcccaaaaatgagtgttgcaactgccatgaagggatgtactaaagacacttgccatttcccantggagtcatgtaaaggagcacatgggatccccagctattgtgtcagctcccagctgtaagaccactgctttgggataaagggcttggtatactccctttagtacactttcacagatctggtaatattttttcatcttgtatgccatgcctgaatgggcaccatttacaactgtagtaccgtccccttccctaggccaacatcagacacgtcacctgttcctgggagaaatcctggggagaatttgtgcagggacacggtcatgactttgggaggtgaaactgaatgcgtcttctacaccatctccatggtgcagatccaaatccacgtagagaatacgctcaaatttccgtcgcaatcgtaatattcccaggacagcatcattgagataacaaaaaccagatgcttcatctttctttgcatgatgccaccctccagaccagttaattgctactttgcacattccgtcaatcaggcattgggcagctgtgatcgtagcccctcctatagctgctgcatagtcaaatatcccttcagtggctgggcagtcataacctagcccatattctatggagtccggatgatcatcatcgccctcttggctgaccttctggagatgctgcagataagcatcagtgtggaaggtggccatctcctccatggaggccactttaggcttaactatcctcatttgcttatgcagtgcatatgcttcaatcaaagaatgcaccatactggcccgtttggggatcttggccagggagtcacacatactgacatactcgggactatagatataaaccgggaccagcgactgcccactgtccgccggttcctccggctcctccatcttccgcttaaaaccgttccgcagccaccttccagatctggcttttttcggacctcgg

SEQ ID NO: 150283 - DNA, 1037 bp, Homo Sapiens
ataattgagggaaatagtgcttgtgggtttcctgtgtcgtgtgttttccccctttctttttggtgactcccttgtgttatttttttggctttgttgagttttcgtccagccgtacacaatatggagagtccccaatgccccttgttaagtgccggctaccctcttcgttaccttaacgtccgacagcctacggtcgtttattcataattacggtaattgtgacatcacctccgcagcccacccgaggactccttcccaggacacttatgaggctgttttccgagggctgaattctgagacttaaaggaaggttacttgaggcatcctggtatatttccgggcttccaactccctcccctgcttggctggtaattttctgctgctcctcctcctcccccacttgacctcctccgaggtaccttcgcctcccctcccccgctcgtccccagtaaatctccagcgggtgggggaaatcaatcctttggcgctaaagctaaactcagagctgcccgttggacaggattgcagtggggtaaatggtgtccgtcctttcagaaagaatgatcaactacatggaggtaacttgctctgggtttcctgagatctcgggcggacccgtccgtgttttgccagattcagtgcaaatgtagatttcagctgaaccggtcaggacttgagagatagctgtttcactctccggactgcaaccacttccgcgagaatctgatacatttaatgaaagctttgccaaatgtacgggtcagcgcgtccttgggccaccaccacttgggtcagcacactgcactcactagcgccaacctgggctccacgcagcagaactcggttaaaaatcgtctgttcctggtcacttaggagttcagccactcgccaccggcggcagaaagtgagccccgcgcgcaacgcgggaggggacagaaggaagaggaagaggaggagagggaggccagagccagaacagcccgcagcccgagttcggcctcgtgccgaattaacaccagcctcgtactagcctattt

SEQ ID NO: 150284 - DNA, 991 bp, Homo Sapiens
  misc_feature (127)..(127): n is a, c, g, or t
  misc_feature (825)..(847): n is a, c, g, or t
cccttctgataaaaggggactcggctggttctattacacattagaacaatatcaaaatctgtaaggaaacaggggcatgggtgtggggtggggggcaaggacagggagggcaacaagaggcaggatnacaactggggaggccttggcacaattcataccaagtttatttcatttccagcaaagcagaagctcagctcatgctgtgggcatgaaggagaagcaaaatgtcctcatctctctgctgggctagacctcccttttgccagctggctgtgtctgtgggcccagcagtagtgcccaccttgccacaaacttggggcacagaaaacctcacatccctaggtccaagtgctgactcctgcctcatgcccaccctcagcccaggctggcagctgctcggtgggtatgctgaggctgggcccctggcaagtcaggagcctcctacgtggcccatgctacatggaccccaaaatttgtgctttgcttgtgtgggagggtgctggaggtgtcttaagggggaactcagtgctttggctgggcttggggccttcaaagtccaacacagaatggggaatagagggtggcagtgcaggataaaggagatgcaggaggagacagggacaggaaatgcctctatcagcaggcctgagatcctagggtggaggcaccggggacccagtctcagctgtctctggaagcttctataggcagaccccattctcagcttaaagggggaatgaggtggaaatagacgggtgggccttgggcagtgtctggatggggcagggcatgggactccaggggaaagcaggcagagaggagcannnnnnnnnnnnnnnnnnnnnnncacgtgtcagcagaggcagagagcaagtgtgggctggagcccacctggagcccctaatggagggggcacattggggataccagaggggacgcgtcaagagctaggccaactccactctctgtgggccaatgaggaaaagaggta

SEQ ID NO: 150285 - DNA, 908 bp, Homo Sapiens
  misc_feature (503)..(503): n is a, c, g, or t
gtctcgctgtaaggtgcaatccggcccaacactgggctaccggtcccactaatttctactagtgtcctaagccacgtgatgtcgacccttgggcacaactttaccagctgtacagcatgaacagctctatggatcttgtttcgtttccctgacatattgtcgcttgcatcgcagtcaactcttcattaatacagatatgtttcgaatctgatgctcttacagcgtcaatactgttagttgagatggtggaccatctatcagtttgtaattaagactaaagtctggcacgtgactgaaactgaggaagaagtagaaaaggcaaaaggtcaaaggtctgcatgggaaggaaggagggtagagacagtgagttttattggtccttttatggttcagacttccttctgtcatcgactctccctaattctcttcacgtgttcatccccagcaacgttttcttcccaagcatttcctgcgggcttttattaccccaggagtgccaatcnaaggcgtggaacagataaagtctgtgtagcaactaacgcgtgaccatcttgtgagtgtggagggcaaacgaagctcccgtgaaacctccgctctgctctcctgccttacgccgcgcggcccctgttctgaggtttaatacttgcttcacagataagcgctgcggccacgttccggtgcccaccttctccttggctagggcacgacgccagcccagggggcgcggccctgagctgctgcgagagacagctgaaatgcgccggcccgacggccttggctccctcggtgcgctgggcgcagagccctcggaccctgggcgcccactgctcgagtacctgcgcggctcctagccaggcttagcccaggcgcgggctgagagtcagcctcgtgccgatcacaccgtccta

SEQ ID NO: 150286 - DNA, 1453 bp, Homo Sapiens
atgagagtgagagaagaaaggtcaccgacggcacgcgcagcccaacgcaccacaccgcaccgaccccgcgaggttccgagatgcgccctggcgaactgactctcagcccgcgcctgggctaagcctggctaggagccgcgcaggtactcgagcagtgggcgcccagggtccgagtgctctgcgcccagcgcaccgagggagccaaggccgtcgggccggcgctttcagctgtctctcgcagcagctcagggccgcgccccctgggctggcgtcgtgccctagccaaggagaagtttcagtcacgtgccagactttttcttaattacaaactgatagatggtccacatctcaactaacagtattgacgctgcaagagcatcagatttgacacatatctgtattaatgaagagtgactgcatgcaaacgacaatatgtcaggaaagaaacaaagatcccatagaaatgtttcattctggacgagctggtaaaagtctgtgccccaatggttcgatattcaaagttggcttttatgacactaagtaagaaaatatagttcgtgatctgtgttacacaccgatgattgctgccgctgaatttgctcaatctatagaagccccagacagcgaatctaccatcaaatcaaggtgcattgcccattggattgttacatgtatgctgctaacggatgcaaagacttcttatctggatgctggctcagtataagcctgaccccttatggggaactgggaatagaccatataaactggtgggtttgccccctccccacgttggcccctatgggcaaccaacggctaacgggggcttttgccgttacatagaccctacccccaggagacctttgttcacaccacatatgcgtgcaataccaaggtcaaacaaatttctcagttggcaacacccccttgaaaacttgtcaaggttatctctttaaccacctgagggtatcgacactgcacggagcacattaaaaagtaactctgtttcaaatcttttgtgtaaacacaacgcgtgctaactcccacatcgtgaggcatctccatgagaaatctcacaggagtccattgtggacgcgacacctctggtgtcgaatcgatagacacactctcacccgcccggtggccattctaaatcgggatctccccctttacaaagatctcacattctctctgcgcacaaaacactgtacgctctatcattctattgagaaatgtgggctttatatgggggtatacactatgacaaaaaaatacctcttcaatatgggcgtgaatctgtcataaaaaatacccgcgtcctgggccacggcgtcctctacctcgaggtaagatacagcaatgggcgggcccaacgagaaaaataggcgaccttcccgtgggcccgcaatccaccatcctcccataacaaccgcgggcgagagcaggcgaaaagcaa

SEQ ID NO: 150287 - DNA, 872 bp, Homo Sapiens
catgttttcactgggaatttggagaaaatcaacccataagcctactggttattgacttggagttgggtaggaacctagcctcgggtttatcctgcttgcagtggtcatggtgaatggagaccatcggattgggatctttgccaagagggcaattcaagctggcgaagagctcttctttgattacaggtacagccaagctgatgctctcaagtacgtggggatcgagagggagaccgacgtcctttagccctcccaggccccacggcagcacttatggtagcggcactgtcttggctttcgtgctcacaccactgctgctcgagtctcctgcactgtgtctcccacactgagaaaccccccaacccactccctctgtagtgaggcctctgccatgtccagagggcacaaaactgtctcaatgagaggggagacagaggcagctagggcttggtctcccaggacagagagttacagaaatgggagactgtttctctggcctcagaagaagcgagcacaggctggggtggatgacttatgcgtgatttcgtgtcggctccccaggctgtggcctcaggaatcaacttaggcagttcccaacaagcgctagcctgtaattgtagctttccacatcaagagtccttatgttattggcgatgcaggcaaacctctgtggtcctaagacctggagaggacaggctaagtgaagtgtggtccctggagcctacaagtggtctgggtacgaggcgagcctggccaggcggcaccagactgaactcagcggtagacagggtccaccttactacctcttccttcgtggcgggctcaactgaaagatgtggggttctaaggacaggcttcccgctggggaagga

SEQ ID NO: 150288 - DNA, 1140 bp, Homo Sapiens
tttattataaggcggagctcggcgggagaggtgcgggccgaatccgagccgagcggagaggaatccggcagtagagagcggactccagccggcggaccctgcagccctcgcctgggacagcggcgcgctgggcaggcgcccaagagagcatcgagcagcggaacccgcgaagccggcccgcagccgcgacccgcgcagcctgccgctctcccgccgccggtccgggcagcatgaggcgcgcggcgctctggctctggctgtgcgcgctggcgctgagcctgcagccggccctgccgcaaattgtggctactaatttgccccctgaagatcaagatggctctggggatgactctgacaacttctccggctcaggtgcaggtgctttgcaagatatcaccttgtcacagcagaccccctccacttggaaggacacgcagctcctgacggctattcccacgtctccagaacccaccggcctggaggctacagctgcctccacctccaccctgccggctggagaggggcccaaggagggagaggctgtagtcctgccagaagtggagcctggcctcaccgcccgggagcaggaggccaccccccgacccagggagaccacacagctcccgaccactcatcaggcctcaacgaccacagccaccacggcccaggagcccgccacctcccacccccacagggacatgcagcctggccaccatgagacctcaacccctgcaggacccagccaagctgaccttcacactccccacacagaggatggaggtccttctgccaccgagagggctgctgaggatggagcctccagtcagctcccagcagcagagggctctggggagcaggacttcacctttgaaacctcgggggagaatacggctgtagtggccgtggagcctgaccgccggaaccagtccccagtggatcagggggccacgggggcctcacagggcctcctggacaggaaagaggtgctgggaggggtccttgccggaggcttgtgtggtcatctttctgtgtgctaggtggttcatgctgtaccatgatgataagacgaagcactactcttggtgagcgaacattcattgcgggcatcatagctaccaacggagatcttgctgacttgac

SEQ ID NO: 150289 - DNA, 972 bp, Homo Sapiens
tgcagtaacccatacggttctaaggtagcgaggcctgggtggcgaattcggcacgagggtgctgggaagggatcaccactgactcctcctgcgtgtgcgtgcagctctctgcaggtggaggttgagagattgcagggtctggtgttaaagtgtctggctgaacaacagaagctacagcaagaaaacctccagatttttacccaactgcagaagttgaacaagaaattagaaggagggcagcaggtggggatgcattccaaaggaactcagacagcaaaggaagagatggaaatggatccaaagcctgacttagattcagattcctggtgcctcctgggaacagactcctgtagacccagcctctagtctcctgagcctatagagcccccaggagactgggacccaaagaacttcacagcacacttaccgaatgcagagagcagctttcctggctttgttcacttgcagaaaaggagcgcaaggcagaggctctgaagcactttccttgtacatttggagagtggcattgccttttagataggatctaggagtgattttattgtttggagaatggcacagggcccccatggccctggctttgtcatcagtgacatgccatagcaacagcagctctgtacctcatctgttgatcccacctttgaagaggagacacagtgctcaccttaattgcgctggtagacagcttatatcccatgtatcatttctcacgcatttgattggaagctggccttgggaacttcaagtaaccaggcatttaacccctctgggtgggagaggggaagaaagtgtaaacgctggagtgggcgtggaatcaggttgtgggcccggcccagtgtgcctccggcagaagtggtgaagtaatctgggccctctgggagcccctgagttccgggaaatttgttggtgcgtcaaccaagggctggtcgcaaagtccctatcgtgccgaaagtt

SEQ ID NO: 150290 - DNA, 1610 bp, Homo Sapiens
gatgattgcaatttattttctctggcatgaagaaacaatcactcttgtaacacattgatactacaaactacattatgcacaggtagccaaagaaatctatcacaattcaaatgcaacagtctgtcccagtagcatacagttggtatcctctattttccattgtatcctctattttccattcaggatagcacaattgtccagtcgctctcttctcttccatactggatatcagttaatttgctcaagatgcggcttgccagcttaggaccattctccatagttggaatgtgtattgtctcgcctttgtacagtatatcagaaactgggcaaacaacacaggctgtaccagagccaaacatctctctcactctgttcccctccagggctgttgtcaagtcatccatggtgaggtatctctctgacaccttaaattcaccccactgatgtgccaggtccagaatgcaccgccttgtcactcctggaagaatgatgccatctagtggaggagttgccagttcttcttctccatcttcatttatccagtaaagaaaaagattcatagttcccacttcagtgatctgatggtcctctccatagagccacaggacctgctgacaacccattatctactgcttcacattgggcaaaaagagatgagccgtaattcccttccatcttgcagttcccagttccacctttccaggctcttacatactttggattggcccacagggacactggatgtaaaggttccacttgaaaaataaggtcccactgggctcaagagtacaaagagcagggctttggtaggcttcttgactccaagagaaggctcagttcccaatgaatgtaggacgaatatccagactagccagatgttgaatatgggacccattcttgatccaaatttcacaaagctgttgaatacactctaagagctcttctttgtccaaataccggcagagttgccctcacagcagagcgatacattctatccatgttgagggtttggctgaaacagtcgaattttattatctacttctcgaaatgccttcaatccttcaaataattccactgcatagtgcaaagctgatgagccagggtgcaatgacaggttctgaagaggcttgatatgaggtttctcccatccaaactctgaggaccactccaccgtcagcatatgatccgtgaacacagttccaaaaaccagattattggggtctggtttttcctttaaaatggtagctggtgtgactattaggtctttagccttaaaagtccccaccacctcttttgatcctccttctccggtacactctgcggagcatccgttactgcaatccttcattgttccgtcggccacgagggaagctcgagctgagcggagggcaaatcccaagggtcgtagcccctggccgtgtggaccgggtctgcggctgcagagcgcggtcccggctgcagcaagacctggggcagtgcccgaggcggcggcgagtacacgtggcgggctggattgcagaccggccctctcgcggcggagactcgcgacctagcggattgcatcagcaggaagacactaaggctgctcccccaggccgcccccagatccc

SEQ ID NO: 150291 - DNA, 815 bp, Homo Sapiens
gaaagttttcacgtgtttgtatgtaaccaaaaatctgtacaaaaagagtctgtctctggggtaaggtgcaacaggcctggaccgacatttaaggcctggtctgttgggcaaggggccagggtttgccacagcctcatgaggtttccagggtcttcacaggctccaggcttccccaaagcctgtgccagccttgaggattggttatggcttatgtgcaaaaataaaatctgtggggctggcagggtgtgggctgaagacttgtcagagtggtctgcagggctggtcccccagtggacaaggcagaacgatgaaccctgagccagcacctgcttaggctgcagacgctagtggcccaccagcaccagggttctggtgtcggggcagggcagaatgcctggaagcgccccaggagccatggcttctgggatgtccttcctgcagctgagctcagggctgctgggcaggggtaggagctgtggccccagccttggggctcatgaaagcctctggcagagaggatggcctggcagcgggcggggtttccctgctgggagggaggcagggcccgactcctgctgcagtggctctggggacgggcagctggcggccagcggggcgggcttagtggcaggcctggtcctcgcgctggcgctcagggctaagctggggctcctgccctctgctgcagccgactcctctctgtagcccccctctgggctgtcctgggacttcgcctcccacgcaggcagcctgccctcgtgccgaattcgccacccaggcctcgctaccttaggaccgttatagttactggccca

SEQ ID NO: 150292 - DNA, 814 bp, Homo Sapiens
  misc_feature (45)..(45): n is a, c, g, or t
tcagcactattcatctgctctccctttttgcctttcaacaaccgngttgaggtcctgataaatgtcttttgtggaaaagtcagctttttttctttctgtgatcagaattcctcctctttgaattatctgtctcagtttccccatgtctccagcagtctctcctccgggtaaaacacattcctttggtccaatctggatgaggagagcctcaagattggagaactgatcattatcagggaattcacacagtcctagtttcctctgtatggaatccacatacccaactccaacctgtctctggccatcaactgcggacattttaacacccacaacaccaatggaagctgacatatcattgttaccaaagagaatgtcttcaaactgagagagattgccaggagaagccttatatgccaaataccaatcattctccttggatgccttatttccagctctattcttataaacttcaactctatactgacgaaccagaagaagatcttttacaaaagattcaaaattcattttactaagcacaacactctgcagattctttgctcctgccggccccatgtacttgatcacccctgggtcttgaacacctcccgggcggccagcagcgcgtcctcgccgtgcgccgtatagaagtcgccccggtcgaaaaggcgcactgtggtggtcggcttctccggcatggcctgaaagaagcgcacgaagccgacctcggccgcgctctccaactgcagcgtctccttcggctgcaccgccatgtcgacctcgtgccgaattcaacacgccagcctcgtacctagcc

SEQ ID NO: 150293 - DNA, 973 bp, Homo Sapiens
tagccttcgggtcctatctattaaggtttaaagcttgaacccttcacattgagggaaaggacgacagctcttccagggcatgtccctcacgccgaacagctcaatttcacgctctggccctctgcatcatggcttcctgttgttcttcaacttcattcgtttcctcatcatcctcgttccctcatcctcttgggcttgaaagtcccccatcttcatcatccaggcgagaagcagggggtggaggactggacggcagactgatggaagacgccgaggcaaaggggaagagcctgctttgctggaggttaatggcttgttgaggctctgagacagaaggtccgagtacttttcagtttgccccacaatgaagtccaaatgcaggtccagggcttttttgcgcttttcctcaagccgggactgttgcttgaattgcaccaccttctccacattgctccagaactgcctgacatccttggccatggtggaagcaattcgacgcagcttggcctgctcctccctccgggcccgttcctctttctgccgctgctcctcgtggtgccggatcaccatgcgcaccaccttccgggccacaccccgtttccaacggcgctcctgagcaaagtcagcagagagccactgcatctcttcgcacaaatagtctccagtgacctttggggcgagggggctctggcaccttaggcagcctcttcagtgaccagaaaccctccttccgcagctcagcaatccgagtctcgatctcggcctcatgcttggcctgttctgcaatttcggcatggctcttctcccacttcgggcccttgtttagccaggtcagcagcctggtataagctgaacccctccaggggcactgtggcaccatctggggggcctggaggtccatccatgtgaggaaatcttgagctatgtgctgcggtacctcgtgccgatttcaaccccagcctcgtactagctt

SEQ ID NO: 150294 - DNA, 1058 bp, Homo Sapiens
ctgcgttgcggtctgaagggacttcaggaagcgttcccaagcgataacgttcagccgcgatggcatgccgctgttaatatggtaaggtccgaaccgaaccttgcactgtttgtggtgaatcacggatgacctgacgttggtgcctgctcccaagagcccgaacaggtgccacagcacgttttcgtctggcctccggtgacagttgtacaccgagatgcaccagccggcgccccccgcgcccccgacaggccacgcccgacagccgctcataccatcgatggcgattcggcgagaacctggcgatgagcgacaggggactcttgacgccgtaggccatgttgagcaaatttgtccagccggaaacgctgggtctgatggtgtagggggcctgcgtagcgccgggcggatgactggtaagaggtgggtgagcagcgcctgccccgtcttctgacttgggttgttcgcgaacttgactgtgatgggctcagctgcgcccagcggcttctgcccattcagtcctttgatagcctcttcggcctcaatcctcttgtcaaagcggatgaatcccacaccccgagagacacctgtgacctggtccaccaggatgcgggacgtgatgatgcggccgtactgggagaagagctgctccatctctttctggctcatggtcttggggagcccgctgacgtacaggttagcatcccggatggatgctgaactgggtctggcataggacaccttgatggtcttcgtctgtaatttgaggccgttgagggtgttgatggctttgtctgcatcattggggtcagaatagttcacaaacccgtagccaaggctctgccctgtgatcttgtcccgaaccaacttgcaggactcgatgtcgccaatgctgccgaagagactcttgaactcatcctgggtcatgttctggggcaggtagttgacgatgaggttggtcttgctgtcgtcagtggctccatttgtaccaggagtggcccgttgggcagggccggtccgtgcctcgtgccgaattcaacagcccaggcctcgtactagcc

SEQ ID NO: 150295 - DNA, 1437 bp, Homo Sapiens
  misc_feature (858)..(899): n is a, c, g, or t
caaaaaaacacaaaccacaaagcaatgagaaaaaaccatggtaaacagcaggctggtacgctacggattaccgggatatagtagaccacgcgtcggaaccatgtgactctcggccgcgctcgccctcggcccgcccggcgccgcagccccatggccccgtccaggctgcagctcggcctccgcgccgcctactccggcatcagctccgtggcgggcttctccatcttcctcgtctggacggtggtctaccgacagccggggaccgcggccatgggagggctcgcaggggtgctggcactgtgggtcctggtgacgcacgtgatgtacatgcaagattattggaggacctggctcaaggggctgcgcggcttcttcttcgtgggcgtcctcttctcggccgtctccatcgctgccttctgcaccttcctcgtgctggccatcacccggcatcagagcctcacagaccccaccagctactacctctccagcgtctggagcttcatttccttcaagtgggccttcctgctcagcctctatgcccaccgctaccgggctgactttgctgacatcagcatcctcagcgatttctgacccagggggtgaggtctctgcaccctgggggggccttaggacctggactcagcctctgagatgttgggagaggctactcccaccccctggtgaccccagaactgtggcagaacaatacacagcaggacgagtgtggtctcccaggaagctgtcctgcccgtcccctttcgaggaaacctgagtgtggtagagaggggatcctgccatgttgctcctccatccagcctgggccagagggcagctttagaccttttcaaatgaatctgnnnnnnnnnnnnnnnnnnnnnnnnnnnnnnnnnnnnnnnnnnggagaagttggggctctttactctcgtgttcccccgaggccgtggagtgtgcagtagtgtgcgactcctcgagcctcaccgtgcaaccctcgcgccctcccgaggttttcagagcaatttcctccgtggcctgggccctctcaaggttagcgtgggatttccgggcattctgtgccaccatgtgcccgggcaaattttgtgggtgttcttaacgataagagacggggctttggccatgtgttgggcccagcgtgtggctcctcgaacttcctgtgattcctcggggtgatttcacccgccttcagcctttccaaaggtgcggggcattatggggtgtgagcccacgggtgcccggccgtggatcggggttcttctttagccacgccaggtgggaggaactcttgggtcacctatagaggccgaggggcccacccaagagctccaaggaggctcagagggtgttcaggcgccatgaggccggggaccctatgcgtgccaggcaagggtttcccattcccccggtttgcccttaggcccc

SEQ ID NO: 150296 - DNA, 941 bp, Homo Sapiens
cttaccctgccgcctttaccgtcattaacaagcccaaactctcccaatacacagtcccggagacttacaatcccccacgtcaggaacaggtcctcctctgggctccaagaagggatctcgaaagtgtagcgctcctcaaaccgggcttctgggtcttgcgtttgacccgtctgctttgagttcttctggtctggcaggagacagatctctgacgtagcgttggatgcgccatgtcctggcgcgaccatcgtgggagatgggagtggcaggtccctggcctcgatcacacgcacggtgaggtgtttgtcagcagttcgtactgagtgctgaagtgcagcatgcccagctggtacttggacaggatctcctcgtctgtcagagagtccacatcgtcgctgttggagtcgagggagtacaggtggggttcgaacttcctgaaatagtcgtcggggttataggtccgtctgagcaccgaaggttggatgggctccttcttggcgctgagaacgccaaactcgatgggtttaatatcgatgagtggagagctgggacgtcttgactcaagactcgaaatcctccgcgtcaggctgtatgtagacttggatgtgtctgaggacgagcgtcttccatccggggaattggtccgtggggtcagcgggacttcgctggccgtgtggacagagtcaccatccttgtcactgctccggctggccatcagccagggaggggtctgagcagggaaaggtcccagaatttcaacttcatcctcacttgactggcacagctggactcgtagcacttctgacagcagtgccggcaggtccatctgcacagcagcagaccagagattctagaaagaaaaccctcgtttaatggttccaactggatgtacgccattttcgcccgccctcgtccgatataacacgccaggcctcgcctag

SEQ ID NO: 150297 - DNA, 916 bp, Homo Sapiens
ccccttgattgctttttcttgcccaggacccttcaagccagttctgatcagtcttcatggactcttcagtcctcataacaagttaagacaaaggaaaactcctggacaccgaaagtagaaatggcgagctggccatctggtcttgtgagccggcctcggggctgtctgtggtgcgggatcccagcatgtgagccttggagtgggaaagaaaggggtcaggatgcctgctgtgagggtgcagagcccactcagagacaaccagcctcactccagcagcggcggggaccagcgtgcattggataaaaaaagaccagaaatccccgcaaaatcagtacaagatgcagtcagtcgactccagccttcaaggaggaggcgtcctcaggtgtctcaggcactgactcccggcacctgcagcaggtgtgtgcttaggaggtgcagaggctgacgtggaggaaacaccttcagttcccggggcctgggcctggcggatgctgcccagccccacacacccttgaagaccctgtagcaccggacatgtggccagagggacagccagctcaggcacacgccagccgcaatcgggctgctctgtggtgatagcagcacctcctgagagtcttggggcaatctgtgcagcttcttgaggcatttattttcccatcttgtccatgagtgtgcccatttgtgtataatttccagagtgcagacttccaacgtgtctcagatgcctcagaaatggttacctcctttggatctgcaattctgctttatcattcttccctctttcgcaatgtctggccagcttcggggcagcagatgctgtttttgtatgagattttggtaggaggtggactcgactctgtaggcaggactcagacacccctcgtgccgattcacccccgacctctcctagcca

SEQ ID NO: 150298 - DNA, 1275 bp, Homo Sapiens
tcgtggcatgggcgactggtgtatgtacaactcgtgtggtgtgttgctaattgttttgctcttcgtgtggtgtactcccgtatgcttcttgcttgtgtgtcctacttatacctcgtgtgtggtgctggcctccttgtgagtagctcgctctgctcctcttgtttgttcgcccggcttgttgtgcgggatatgtcctgtccgtgttggcgctgttttgcgctcctttcacatgtctcgccgcaccgtaagttttccagtgtaagggaaatgtgccttctgtcccgaagaaggatgggttccagccccgcctacatgtaagctcccaggttacccttagcggccccccatgtgtctcctagggtagccaaccagtcaacctttctgtccgtctcttcaggacaacgtcaatatatacccactttggttatttggaatataattgcatacttcagccttgaggcccattacactgttttatcccttactaaaatgctctctgctcaggcatgcgtggctcacgcctataatcctggcactttgggaggcccaaggcaggaggatcgcttgagctcagacacttcaagatcatgcctggggaacatagggagattccatctctggcaggttcttgagccggaggaataatacaagaccagaaggaaacaatgtgaatcgcctcttctctgtagcttgaattcacctgactgcggcaacgctcaaatgtgtagcatcaattcatatggcgaccagttcatttgaaggagttccctggaaccagtaaccagtaaactcatggatcctcacaggcaaatggatgcagcttcttagagctgtaacatacctttgcaaccgattggtagctctcccctgagcagacaaatccacttgtgaactttgaaggtcccagatattttctgcagaatgaagccttgtttcactgctgacaatgcaagactagactcaatgtgggtttccgagggtttcttttcagacataagacctcatgcaagagccttctaggacaccaccattgtctagcagagccttggttcagcccggggcttcagatagttttggatgttcccctcaagcagactgcaagctgttgggcatggtaatgacagttcatgactggcattctctgcctttcaattttcttcccctccgattccatacacatttctgccatggctttgcttctagaacatacaccagagaatttcagttctcccctcgtgccgaattcgccacccaggcctcgctacctagccgtaa

SEQ ID NO: 150299 - DNA, 1016 bp, Homo Sapiens
cccaaggcgtggctgaaccttacgtgactgtattttatagccggattccgctgccaattctctatgggagaacctgcagaggattagattgctcgcgtgcaatttcagcagagaacaggattcccctgtcctcagtcagagccttcaaagaggcgcaggacaggaagccagcaccggtcaaggaggaccacatccacctctgggagcgcagacctggactcacccaggtgcacggccaggcaccaaccccagcacatgtggggcactcaggctcgggcctggtgacggagcagctggcagagccgggtgagcactgcagggagcacacgtccacacatggtcctcacgaagagggcagcccagggaccctgcctctccgggggagcgacactggaggcagccatcaggttctgacagaaagacgtcagcaggaggtccacagccatgtgttcccgtggctccagtctcggcgtgttgatgctgagctgaatctttgatatctcaacgctgctgtcatcctcattgtggcccaggacagccctcagtctttcagaaatcactgccacctgtgccgatataacatcacgctggctggggtctgtcatggaggctctcagctctcccagtgcagctgtgagctgtcccaggggctcctcagcagagttgggttctgccctcactcccagggctgcatcttctggcttctcttcagcagcagagcaggcctggcagtaggtggagtacagagatggggggattttatctgctctcttcagagactctataaacgccacacgggagtcagggactttggggagcactcgaggtgtgagcagggcggggaggaagtgggacacgtagtaaggcctcctgaatatgctggcctccatgacggtgactgggatgttccccgtatgctcaaacaccatgatggccttttcaacatcctgaagagcttggctgtggggctcagcctcgtgccgaattcaccacccagcctcgtacctagcccgtat

SEQ ID NO: 150300 - DNA, 783 bp, Homo Sapiens
ggttaaatggtcaagatcgtggtggaagagttttggccttcaggagtgaccggtgtcccactcaggggacgggaagtcataggcaccagccttgatcgctggtacaagcttggcgctgggtcatcgtccccagaaagggtgggtagcccacgagcaggatggacagggatcaccccacagtgcccagatgtccacaggcttgccatacgcctctttgcgaaggacctcaggggacaggtagcctggtgtgccagcgaaaccaaaccatgcctgctggtcccccgtgcacctcgatagctaggccgaagtctgccagcttcactgcagcccctttgcactctgctggccagaacgcaggttctccggcttgaggtctctgtggacgacccgccatttggtgacaatggagaacggcctccaggatctgctggatacagtgactggcatcagcctcgctgtagtactctctcgccacaatgtcttcaaagagctccccacgcagtgaccagatcgaagaccaggtagtggaagccctcctcggagatgctgtcgtggagacgcacgatgttggaatgcttcagaaggcggcagatccgagcctctctctccagcttctggtgatctctggctgacagcttcttggtgttgatgatcttggctgcatactcatggccggtgcagagcttgacacagcgtcggaccacagagaaagcccccttgccaatatcctcgtagagctggtactcgtcggtgaagcgggtgcaggtcaccgtggtggccatg

SEQ ID NO: 150301 - DNA, 1006 bp, Homo Sapiens
aaggggttcaacctactggctaggtacgaggcctggtgttgaatcggcacgagggtgtttttgtcggtacaggagagtcgctatggcggcggtggattcggatgtcgaatcgctgccgcgtggggggttccgctgctgcctctgccacgttactacagccaaccgacccagccttgatgcccacttgggaggcagaaagcaccggcacctggtagaactacgagctgcgagaaaggcccagggacttcgaagtgtgtttgtcagtggctttcccagggatgtggattctgctcagctctctgagtacttcctagcatttggacctgtggccagtgttgtcatggacaaggacaagggagtgtttgccattgtggagatgggggacgtgggtgctcgagaggctgtcttgtcacagtcccagcacagcctgggaggacatcgcctgcgtgtccgcccacgggagcagaaggagttccagagcccggcctccaaatcccccaaaggagcggcccccgacagtcaccagctggccaaagcgctagctgaggctgcagacgtgggggcacaaatgataaagcttgtggggctgagggagttgtccgaggccgagcggcagcttcgcagcctagtggtggccctgatgcaggaggtcttcacagagttcttccctggctgtgtggtccacccttttggctcttccataaatagcttcgatgtccatggctgtgatcttgacctcttcttggatctgggtgacttgtgaaagagccccagccagtccccaaggctccagaatctccatcgctggactcggcctggttcccccatggacctcaagcctggctgacccagttccctcagattcaaactctgttctccccgggtctgaagccggattgaaccttctctcctgggccaatcgatctgctggtcgagactgtttcccttggccgtcccgtaggggaggggcggggcgccccggaggggcgggggcccgggcgggcac

SEQ ID NO: 150302 - DNA, 1101 bp, Homo Sapiens
cttttccgtcccgtgtcgcgtttagtcctccccggtctcggccgacttcttgtgatcaactgggatcgtcctcccacgggcccgtgagtggtcctgccctgcttccccacccgcatggttggaagggtccctccccagaccatcaccccgtttcctccaggtgagtctcaagtacatacaaggtctcgcctccatccgcctggctctgggcagagcccaggggattggcaccctctccggcctgccccggcccctcttggtgctcagcttcggcatcggccccaccctgcccgacagaggtggctctaccatgttctccggcaccgagtggctcctgttgacggtggccgcgggccgccgccccctgctcggcgtgcctcatcgcgggaggcatacttggagcagagctcacggacgtcgggccagctgaaggtctctgtggggctgagggggctccgggcggagggccggcccccaggcgaggtggtcctctggctgacagcagacgggttgaagaagaaacgctgtggtgacatctccccagccgaggagggcttgggagggctgtgctcctgggccatcagctgctcatagtcaaatagagacagcaccggcttcctcttacctttgccacctaatggctctccagcctcttcctgtagacagggcacagtggggctcttcccatccctctcaggggccaccttttcccactgcagtggtggcctggccatcactggcttgttgctcttgatccggaggctgtactggcgggccagctggtagaccttgttcttgacgcgctcgctcacgtggctgtccattacgtgggagagctgcacgatgcgggggtgcagtggggccaccagctccccctgggtactgctgctcagctccttcaccagctctttcagctcccgggccaggtgggccgggctgcgcccctcagtgggagaggagctttccggggaggcagtggccgactcctctgtgatggctcccagctcatgctcctccaggatgaagagtggctcatgcaggtcaaagccattgcctggcctgcctcgtgccgaattcaccacccagcctcgtactgaccta

SEQ ID NO: 150303 - DNA, 1477 bp, Homo Sapiens
ctggtggccctcgcgcccttggttgttgggctctgtcctgccttgcgtgccccctggggggccttagccttttcgcccacgggttttgtggcttgggcaccccttcgcctaccgttttggctttccctaccagtttcgccctggcctcagctctgctatcttcggccacttctccacctgagacctcaggaccagaagtgaggctggctccccccacctgtagcacaagagctgcccaggagaggctgaagatgtgttttctagttctgcatgctgctttgttgtgtgacctcggacatgtcacctccaaccttcttcacccacctcacctatcaactagggctagtaatgcctgtgtgggtggctggggggcttcctgatgccaaatgcaggtagaagacacactgtgagaggcaaacgtcttcactcatcctgcagggaaaggccaagtgagcatctgggacccattcgagctgaatgacccccaccccttcatctgtgtctatggagggcagtgcgtgtcctcatcctggcgagaagaggaatctgatccaagccctcatggcagagaggcaggagctgatggcttgaaagggcaagggttttgcccaaggtcatgcagaggaaggattggggacgggttgaaggagattttttctgcccctgagggccttgggaagagggtgtgggtaggaagttttgggaggacttgaggaatgctggtatcttggaagagttggggccccactcctggggagggagcactgggatttgagctccagatttgacctggagttgggctctaaagggaccctgctaaaagggagaagttggggaaacactgagagggggttatggtgagaaggggggaaggatccaggacccacatcttaggccatgtgggcagctcaggagtccctcttgggctggatagtctgcacagaagattgcccaaaggggctggcgggtggcgagaaccatgactggccactggcattgcggaaaatgggtgacaactgctgctctggctcatccccgaagacctccacgtggctgtcggcttcggggtccaagggctctgccttggtgtcctggctcagccagcctatcatggcccagaagaggcagatggcgagcagaactccagctgccacacagagcgctgtgcctgccaggcgacaggtgcccagggcctggttgtagtcggctgcccgctgatccaacaccaggaactcaccctcaccgatgcccatccagcttggggggcactgcatagccagtggtcagagccgccacacccagcagcagaagcagggtccccgaggacaggctgatctgggactgtgggctctggagcctgaccacttggactggagtcgtggacacactgcttcctggaggcgtgaccttagacaagtgcttccacctttctgggtctcagtttcccctcgtgccgaattcaacacccaggcctgtc

SEQ ID NO: 150304 - DNA, 897 bp, Homo Sapiens
  misc_feature (89)..(89): n is a, c, g, or t
agaagtgggaaacactgagaggggtatggtgagaaggggaagatccaggacccacatcttaggccatgtggcagctcaggagtccctcntgggctggatagtctgcacagaagattgccccaaaggggctggcgggtggcgagaaccatgacttgccactggcattgcggaaaatgggtgacaactgctgctctggctcatccccgaagacctccaccgtggctgtcggcttcggggtccaagggctctgccttggtgtcctggctcagccagcctatcatggcccagaagaggcagatggcgagcagaactccagctgccacacagagcgctgtgcctgccaggcgacaggtgcccagggcctggttgtagtcggctgcccgctgatccaacaccaggaactcaccctcaccgatgccctccagcttggggggcactgcatagccagtggtcagagccgccacacccagcagcagaagcagggtccccgaggacaggctgatcttccaacacagtgagggccagggccggcgggggcacaggaccggaggtccctcagggtcgtcgctgagagcagtgcctgcacagtcctcatagaagaggtgcaggtaggagcggaccccataccacttgccatcctccacgctggggccgcggctgcagctgcaggaacgattgcagctcggcatcatggacccctgggactgtgggctctggagcctgaccacttggactggagtcgtggacacactgcttcctggaggcgtgaccttagacaagtgcttccacctttctgggtctcagtttcctcatctctctgcctgctgcctcgtgccgaattcgccacccaggcctcgctaccttaggaccgttatagttactggcccggttttcccc

SEQ ID NO: 150305 - DNA, 985 bp, Homo Sapiens
cagatcgaggccggggtgaattcggcacgaggacccaggagaaaactttctggtgacagaagggcattgtgacccacgttgcccaggccaggacagggcagctgctcatggtccttcctcacgagttttcctggagcagagggatacccccaaacccagggagcccacaggagcttcagaagggctcggctggagggcggggcccctgttgcacttgctcactggggactggggaggctctgatcgcagaccgggggtgctgctacctctgtctgctgccggcagaaagccacaagccatgaaaactgattgagatgagaagaattcatctgggactggctttgctttaggatggtgttggaagttgctcgttgtcgctaggagcctgctccactgtaagggtgtcgggatctgaagagctatggtgaaacaccactgaagcattgccaaggttacaccgcacgaaaagttggcaatcctctctctcggtggctgctgtgggagcagctaacctcacagcacccgaagggatgtccttcggggaccccagcctcggtttccagctatcagctgatgccagcaagaagccagccaggcctggggcttggcagcccaggactttaccatccaccatccacagggctgttgccctggacaggtcattgatatctgactcacaggcaattcatggatgacgtgaatccaaaaatcagaggcccacgtggatttagacatgggaaatggctcagcaggttccatgagccagtctctgtgcgggagacttgaactgccggggctgataggaagcaggtgggggctggatggtaatgggccctgccagtgttcagtcccccagtcgggtcgggggggttaactgggggtgtctgcgggttgtgggaacggggcctttaggtatacaagaaccgaaaatggcctcaagggggctggcgctggaaagggttgtggggtcccgcggggagatacc

SEQ ID NO: 150306 - DNA, 908 bp, Homo Sapiens
  misc_feature (831)..(831): n is a, c, g, or t
  misc_feature (853)..(853): n is a, c, g, or t
aggtagcgaggcctgggtggcgaattcggcacgagggcgtgaggcccccccgagagcacgcccccctcgaggcctagtcgagcagggatggctcggctgggcggataatggtgggccggctgggcgcagcagggggtcttctgctgggcactcctgggggaatccctggggggatccgaactggccgagatgggatctgaggcggggctgggaagaggtcactgttggcaaacacgctctggggtccaggccgggatgggattgggggcgccgagaaggaggctgctgcccccacgggaacaggaatcagggggggccctggagtggggcccctcactgctgggggccggccaggggggtgtatgctggacaccggtcggcgctgtggagtggggctgtggctgctggcgctctggagccaggtgtcatcgacaggcgggggtacaggcgtggacacagtgctggtgctgatgtcaccgatgatgttgagcgcctccttgagggcatggtacatgcgcagcatgtcgtcccgccgctgtgcctggtcagccgactcctccatgaggctgctctggtctgccgaggagtataggtaggccagcagctcgtggtggatgaaggccttcgtattgttgatcatgaggtgcatgatggtctttggcatgaggtcgcggatggacttgttgatgatggccacgtatgagtccaccaggttgcgaatggtctccacctgccgctccagttgggggtccaatgggagaaaggtgttcttcctggggcccccatcctcgttttcctgcttgggacctttctcgccttctgtccctccgntttagtctccctccctcggcgngggagcccctccgcgaacgcgccccgggccccggagcccccccagccgcaacggg

SEQ ID NO: 150307 - DNA, 1461 bp, Homo Sapiens
  misc_feature (1093)..(1143): n is a, c, g, or t
  misc_feature (1269)..(1269): n is a, c, g, or t
  misc_feature (1351)..(1351): n is a, c, g, or t
  misc_feature (1379)..(1379): n is a, c, g, or t
  misc_feature (1414)..(1414): n is a, c, g, or t
gctggtacggctcggagtacgggatcaagagccgagtttgaagtgtgtagatctcggtggtctcagagctggcacggtcataaaaaagtgtgccgagaagctcagttcctacccccggttgcgagaggagacagagcgaatcgtcaccacttacatccgggaacgggaggggagaacgaaggaccagattcttctgctgatcgacatgagcagtcctacatcaacacgaaccatgaggacttcatcgggttgccaatgcccagcagaggagcacgcagctgaacaagaagagagccatccccaatcagggggagatcctggtgatccgcaggggctggctgaccatcaacaacatcagcctgatgaaaggcggctccaaggagtactggttgtgctgactgccgagtcactgtcctggtacaaggatgaggaggagaaagagaagaagtacatgctgcctctggacaacctcaagatccgtgatgtggagaagggcttcatgtccaacaagcacgtcttcgccatcttcaacacggagcagagaaacgtctacaaggacctgcggcagatcgagctggcctgtgactcccaggaagacgtggacagctggaaggcctcgttcctccgagctggcgtctaccccgagaaggaccaggcagaaaacgaggatggggcccaggagaacaccttctccatggacccccaactggagcggcaggtggagaccattcgcaacctggtggactcatacgtggccatcatcaacaagtccatccgcgacctcatgccaaagaccatcatgcaccctcatgatcaaccaatacgaagggccttcatccaccacgagctgctggcctacctatactcctcggcagaccagagcagcctcatggaggagtcggctgaccaggcacagcggcgggacgacatgctgcgcatgtaccatgccctcaaggaggcgctcaacatcatcggtgacatcagcaccagcactgtgtccacgcctgtacccccgcctgtcgatgacacctggctccagagcgccagcagccacagccccactccacagcgccgaccggtgtccagcatacannnnnnnnnnnnnnnnnnnnnnnnnnnnnnnnnnnnnnnnnnnnnnnnnnntgattcctgttcccgtgggggcagcagcctccttctcggcgcccccaatcccatcccggcctggaccccagagcgtgtttgccaacagtgacctcttcccagccccgcctcagatcccatctcggncagttcggatccccccagggattcccccaggagtgcccagcagaagaccccctgctgcgcccagccgggccaccattatccngccagccgagccatccctgctcgactangacttcaagggggggcgttgctctcggaggggggnctcacgcaacccacgggggcaggaagcttccaatgggtctgggggca

SEQ ID NO: 150308 - DNA, 974 bp, Homo Sapiens
  misc_feature (201)..(295): n is a, c, g, or t
cccctttttccccctccgttctcttccggctatacccgtgttaaactagtgtctggagtcacctggcacaggttgagccttttctcaggcgccccttctgtggactccgggatcccagctccactgattttttctgccggtctcttcggtttcctcatctgctctgctgagaggcccctggttccctgggggaccgaggcnnnnnnnnnnnnnnnnnnnnnnnnnnnnnnnnnnnnnnnnnnnnnnnnnnnnnnnnnnnnnnnnnnnnnnnnnnnnnnnnnnnnnnnnnnnnnnnggacatggataatgtgggcggcctgtcgccatggtgatgcaccgcgttgctctcctgttcataaatggcatcacgttctggctgaggaagactgaggaaccttcggatcatggagaggttctcccacagggttctgttttctggagaaggatcttctttccagcgtaacagctcgcacaaccatccctggcttttggttgctgcaacctttgcaaacagtgcttgagacactttagcacgcttcatttcctgctgaatctcatcataaatggaagcattaatgttcatggtattgttctctggtttcccattcctttcagtggcaatagtagctgttttcacctggggaggacggctgggtggtgtgctgatgaggggggcaggacccatggccgaggcagcattcaagctcctttccctttcgtcctggtatattcggtctctttcagcttccggtaactgcaagaaattctgcatagcccgaaggtttaccagcaaagactgggatgcagtcttggggtcctcttcctttcggaggatttctgaaagcaagccctgagttctgttaaaagccacacgtgcaaataccgcctgggagattcctgctcgtttcagttcatcgcgtacccactggtagatttcgggaagacacctctgtgttggataacacgttcgcgag

SEQ ID NO: 150309 - DNA, 899 bp, Homo Sapiens
ccctaccctccctaagtctctatcccaccaccaagagttctgctaaaaggatgaagcccaatgaaggaatacttgagaagtgatgtgatacaaggacatttatacaggttttggcatgccatcccaaatactaagtgcttttgtttacagctgtaacttgttctgaaactaaccatccccactttcttttccaaagattttggtttttgagcagtaaagaaattgttatccattaactgaaaaaataatcacagccaaacatcccttcccacatgactgtatcacagaatagtttcaaatgaacaaagtgtcttttcagacagttatctgccaactctccgatgtcttttctactctgtgaagaatggcttggttcatcgcttcacttgtcattcctcttctggtcctaaagctcatggtgaggttgtttgttttatttctagggttaaaaatcactatacccactataaggagggtgtaccaggggtgagaagagtgccatgcaggcacagctctaaaggaaggggctgcttcatcttccacatgtctaatgaagagagcccttttacccctttaacataggcaaatgtatagagacagacccgtgaaacttctgaatctgccatcctatagctttagcttgagagcccatttcccaaaaaagggaaaagaaatcccaatcaccctccataactcacaattagccgaatgaaagagtttttgtgaaatcagagtaatgaaaacaaagtcaaggaagtatgaaagggtattatcagcgagtgataacatatgtgaggacaaaggtcacatatacaggtctctgccactctcgggaatggcatgctacaactatctgaagacagggttcttgccagcacagctatttcctacacgtcccc

SEQ ID NO: 150310 - DNA, 1035 bp, Homo Sapiens
  misc_feature (368)..(368): n is a, c, g, or t
  misc_feature (398)..(398): n is a, c, g, or t
tctaatttcctgttcccgtgaacgtttcttacgaacacaccgtttgccccggcgtctagtgactcgcgtatccacgccctgataaccggagcgctccttggcgaggtcgcacgggactccacggtatttatgtgattggtttacccctaggatcggttaatccccccgacatcgggataatctacgtcaagaactactggcgtccaaggtagtgttcacccttcaagccctttaacatgccttaatgctcagtggttactgaaagcctttctgttcaatggaaaccaccacaacgggaaatatactcttcacccaatttgccattattttctgggaagttctcccagttttcctattgtctagcattncgaatttcataagactgtccttgattgagnatacgttagggtttcatcctggagtttcactgctggagaggtagcagcacaaagcacatattgaaaaggcaggatttttttctcattatcaggaggcaaactcgactcttcttgcgttaaaaatgggcaatgcaaggacatcactcatgctataggcaccagcacccagttcctggccgatcccggacaggctagcatcaaagtcctgcaccaacccggattcaatcacttcgtcggccagaggcagcttcagagcccaggccatcctggctccttccttgccccaggagacaccgtgtcttgtacaaaggcgcggagggtaattctacccaacaggagtaacgcaaaccaagaaaactacaaaccaaggtttcccacgcagtgcccaccagccacccccaagcccgaccagcactgctctgtgcacaactaatctcccgtacccttggctgctcgttcttggctgccccaggttccaaaatcccgcctgcccagctctcaggaacgtgaggacccctttgctcaactactgcagacttcccagagtcagctctggactcccgcactcccactcctcttgagagttcgtagtggtggcttactgcttcccagtcagaccagcagcagccgcaggccc

SEQ ID NO: 150311 - DNA, 955 bp, Homo Sapiens
ttacggctagtacgaggctgggttgtttgaatcggcacgaggcacccggcccaatccgctcgaccgcaggaccccagccccgacgcctactgcaacctggtcatcctggctgtagccaacagggacgctgcagaggagtcctgcgcactcatctgtcaggtcttccagatcatctacggggaccagagtattgagtgtgtggaccgggctggctaccactacacatccacacctgaacggccatggctctgcagccgcagtgagagctgccacacagatgggacgtatgcctatgatgccgacttcagctgctgcagctcctttaatggctcccaggacacctttgaagcatgttacagcggcacgtccacaccttctttccatggctcccactgcagcggcagcgatcacagcagtctgggcttggagcagttacaggattacatggtcacgttgcggagtaagctggggcccctcgagatccagcagtttgcgatgctgctgcgggagtaccggctggggctgcccatccaggactattgcacaggcctgctgaagctctacggagaccggcgcaagttcctcctccttgggatgcggcccttcatcccggaccaggacatcggctacttcgagggcttcctggagggcgtgggcatccgcgaggcggatctcactgacagcttcggccgcatcaagcgcagcatgagctcccacgtcggctccgcagtgcgcagctacgatgggcgcggcgcagcggccgaaggcacaggcctccaccggctgtggtgacatcacgcacgaaaatcgaggcgctggcccgatgacgacgagaagacgaggatgaaccccgggtccagggcgggaaggagccgaaaaaaataaccggagcacgcctggggggtgtcaagccactctgagttcgttgttgggcccttccggcccaaaccgtggc

SEQ ID NO: 150312 - DNA, 1009 bp, Homo Sapiens
tttccccggtgttccaggaagttttcaatccgcgggccccctttgatccccgtatttctaaacccatctcatatgtctggcggcgcaaattggtcggaccaagttccaacggaacgtccagttccaagaatctagctactggccgctaattttcgagtacgaaattagctcgtcttctggactctcatgattgaagagaatccgttcactgccaaagagattatacgcctcacggaagttcaccacaatccataggcatagagttcttgctgcccccatagggtgaccggggatagaaaggggtggtctccttctggggtatttcctgcactttcccataaagttcacttgttgaggcttggtagaacttcacagagttgattaaggccaccagtcttaactgcgtctagaattcgtagaagtgccaactccgtcaacgtccgcagtgtactcagcgagggtcaaaggaaattttgacgtggctctgggctccaaggttgtagatctctgtgggctttacttcattaatgatcttcacaaggcaggtactgtcagtgagatcgccatagtgcaacttcatgtttccttcaatgtgagcctggggattcttatacagatgctcaattcgacccgtattaaatgaactggaccgccgtacaattccatggacgtcatagcctttctccagcaggaactcagccaggtaggaaccatcctggcctgtgataccggtgatgagcgccacgttcctgggcttgcccatctcgccgtccccggagccccgggcgctggggcagcgatgccggtgcgtgtgccatgtcccgcggcgggcgtgcggtcggacggcagggcggagcgcggcagagggcaggcgcggtgccggcaggaacgcgggggtgtgcagcacgaagcgcctctccaggctgcgggcagggagggagagcgcaccgcgcgaccggccgccacagtataagggcgaccctcgtgccaataaacccagcctcaccta

SEQ ID NO: 150313 - DNA, 832 bp, Homo Sapiens
  misc_feature (23)..(23): n is a, c, g, or t
ggggaggaagattgggacagggnttaattttacatggcctggccaggaccagaactgggagagaagggaggagagtcccccaagtttgcatatacactggccttgtctctggaatggtgatgcccagccccagccaccccctgcccaccagcccatccatctatctgcctcaggtgtctgggaatgctggttagaggctaccagggagggaagactccaggggccggcccccaggagctgaggtctgaacaataccttggagtcagaatacaaaagtcaagggactcaggggtgggcggatcttgcaaatgcccgatttctctgcgatgggcctgattttcgcgatgtagccaagagggtctcggaactcggcccagctaggctcgaacaccgggcactccggtggcggtaggaaatcgtcggaccccggctccatggtgggcccgaggtctgggccagggatcgggaggcttggaccgcccttaaggactcatggcgccgccgctgtttgaagccgaggcaatgctcggaggctaggccctaagcggggcagccgccgcccgccgagggcctaagggggcgtgtggccgtcgtgctctgagagtctcaggctgactctactgctaccgcctcttcgtcccgctccgtttcttccaaactgtgtggttgcctccccactaccgcagccttcgccaccacagttacctcccaaacgccgcggccttcagcgccgccgccgccatcattggtttgtcagcgcctcgtgccgaattaacacccaggcctcgcacctagccgtaatggtggttttttctgctccgccccccctcct

SEQ ID NO: 150314 - DNA, 913 bp, Homo Sapiens
gcctcaacgccttttccggtccgtggcctttatgccactgggaccaagccctggtccattcgtgtgttttaaaactacacagcgcatcgagtccgaggttaggacttaaagtgtccatccgagagttttctgcgagcgcgaagaatgagctagaacgtgtgccgcggtggatggctgccaccaccaggactcttctgcaggatgccgaagggaacacgtctggatgtgtgcgcctatgtgtgcacgttcttcctgatacatggttcttcttgaagacacggtgggagcggagttttgtgtctcctggccggcggctcctggttctcccaggccacacgactgacagctccccttcttgtgctgcatgttggttagtttcttctcctcctctctatggcaagagtaggggaaaagttaggatgacttcactcgtttaagggaaatcaagatgtaaggggtcgatccaaatccacagtgaaagtgagggagggatcatatgaaaatatccgcccagcctgacgcagcaaaaggcgggtcagcttttgctcatccacgaagggctctttaagttttctggggcgggtttccctgatggtttggaggttgcagctgggtccctcggggttccctggggctcatgcaagaaggaagattcactcaaagtggtgtcctgggagtcagcgacggtggacgggtcagcctcactggacaggtcttccgttgagaaggtgagactccccagcttggcaagagagtgtgagcgcttcagtggggaagagacggtgaggcccgccagccggagccgggtctcaatctcctgtgtccgctgcttcaccagcccgggcttcccacggacactgtggatgctatcgctgctgcctcgtgccgacttaacacccggcctcctcttaga

SEQ ID NO: 150315 - DNA, 1262 bp, Homo Sapiens
agtgccgcgttgcaggcgtcgtcggtcacttctatatcctcggtcttgcggctgctggttcttctttcgctcttgttgattgctccgctcgtgctcctccagttggctcttttactaactcggtcggtggctgtgttgtctaccgcctgtgttggccttgcctctccgtggtgctcccggttgtggcgcccctctccttgtttttctctcgcccactagtgtctcctgctctgactgtgctgccgcctttttctcctcgacccgtttgccaccgccaggggtttccctgtcccttttctcccaggggtggcttttcctatggaaacttggcgcagccccttctgctccatgttgtaagtgttcttcctgacttgggcatcctgtaggtcacctgggaaaagtccttgggaacctatgaaatatccggccattccgacccatgtccaccttggctccacttggccacaggtgcccgcactatctccaggtaggcctgcattctaaggctcccttcaggccaacagggagaaggtgtcagacagaagcaagtacagagaaggggcaggagctgctggaatggacagtttgggcaggagtccaaactggacacacaaagaagtccaagggtccctcctggagaagtgtggccagctgggggccagagagcacagggttggtgtggctggccactcagctgggcagcaacacgtgctccaggaggtaggtgagggagtcccagtgcttccagaggaggaacaggacgaggaccaggagggtggtgctggtgatgcgcaggcgtgtcttcatgaggggcgtgatgaagttggcgatggtggacacgaacaccagcagcacggccatgagcgccaggatcacgttgatgaacttgcccagcagcgcccgcgcgttggcattctccacgccctccagctgtaccacctgctgctgttgctgctgcagctccagcttggtgacccgggtcaggcaggactccacggcctcctggatgtcccgtgccctctcataggactggtaggccaccttctcctccatgctggccagctcctgcttcaggttcgtcatctcgttctgatgaagctcagtcaggtcgttgagctgctcctccagccgctcgtacctgtagcgctcctcctgcaggcactgggtcatgtaggtgtagtccctctgcagctgagtcttcaggtcttccatggagtcctcgtgccgaattatacaccacgggcctcgtaccttagcctaaa

SEQ ID NO: 150316 - DNA, 882 bp, Homo Sapiens
tggctgcagcagcggctggcccaggatgaggagccccaccccgatctccccgaggctcccctgctgcttacaggggccccactggacttataccgggacttgcaggaagacgaggggtctggaggacgccagcctgtatggggagccgtcaccaggccctgactcgcccccggcggagctggcctagaggccaccactctgggagcagagtgccaaactgtggggcactgggggccaggcctgggagcccccagctgaggagctgccgcaggccagcagcccaccatatggggccttggaggaggggctggaacctgaaccttccgccttctccttcctctctctgcgccgtgagctgagtaggcctggggacctggccacccctgaaagctctgcagcggccagcccgaggcgtattcgggcagagggggtaccagcctcagcctataggtctgtctcggagccccccaggctaccaggcacacagctgcctgtcccctggcgccctgcccaccctctgctgcgacacctgtcgccagctgcatgctgcccactgtgcagccctgcccgcctgaccgtccaggccactcgctgcgtgtgctgcttggcgacgcccagcggcgcttgtggctacagcgtgcacagatggacactctgctctacaacagccccggggcccggccctaggccagctgggccccaggtcaagggctcttgggagacagctcccgtggtgcttctctttgctggggaggggtctgggcctctggttgccttgtccctgggggagtcctgggcacagcaggggttggagagtccaggcaacccttgctggaggtgggactctctgtatatggaaggtccaaggcagcaggccttagc

SEQ ID NO: 150317 - DNA, 1010 bp, Homo Sapiens
  misc_feature (462)..(470): n is a, c, g, or t
ctctttgctccttcttgctgtcttcgttctgtccctgggctgccggtcgtcgccgcctctgtctgggcgttcgcctggcttgtactgcgccgccctcatccctgccgtctctgccagcccgttgcctcgcctccttccgtccatctagtcatccagcattcggccgccgtcaggagccactccctcgttctcgcgtctcgtctcatgcactgcgtgcgacgatgctcttgtggtggtttttatgaggatattgttgcacccgctttatttgcgccctggacgacccactcctacctgtgggctcgtcatatctttcccccgttcacactgtttaacggacccccgctgtaagcacaagaaggaaaaattccagcttcccttgcccagaaatccaagcctttgctccttaatcagacactaatgggcatatctatcttcattgttatttgagagatgctggtnnnnnnnnngctgattgaagaaaccacaggagaccaagatggggcaaccccgaggaagtcactgtaatctgcaatgcagagtggtcgaggcctccaatgcctggaccatctactgctctgacactgaaaagggagagaggcttgaaaactgaatttaaccgacatttatgttagggctggaggctgaggggcctccatagggaaaactgcagccagaagcacccggtgcctgggatgctggagtcctcttcagggctagaagccatcctttttcctcctgccttctcctcccttcaccgcagcaaacacagaaccctgtctcccgactgccatctccatgggccatttggaggccagggagctgcctcctgtatctttacaggggtcaggccctcctagggatgtggggccagagggaagatttgagcatgtggggcagagtgactccatgaggacgtcaagcaaccccgccatggctctgggcttctcgccttggttttctcatggagacattcacctcgtgccgatttacacacgcggcctctaacc

SEQ ID NO: 150318 - DNA, 586 bp, Homo Sapiens
  misc_feature (398)..(520): n is a, c, g, or t
gcagtaaggctcgggtaaatcggcacgaggcaggaactggtgggtatttagtgctgaggggcagtgatacagaaagatttgccctgtgggacaggtcctgcgcgagtcccatccccaaaagccagcagctcctgccatgaggaagacggggtttctgagcaggcttatgcctgcaggttcctgtggagccaccggctgtgacgggacacctctgggtctcagcattgccctggggaggctgggacatttagggacatggtagggttttaacatttgtttcccaaatgtcaaatcccgggcacaggggcaagaccctgtcccgaattcccaccccagtgaatggtgtcgctgccaaagccaacacaagatgacaaaagtggctgggtacggtggctcannnnnnnnnnnnnnnnnnnnnnnnnnnnnnnnnnnnnnnnnnnnnnnnnnnnnnnnnnnnnnnnnnnnnnnnnnnnnnnnnnnnnnnnnnnnnnnnnnnnnnnnnnnnnnnnnnnnnnnnnnntgtggtggcgcgcacctgtagtcccagctactcaggaggctgaggtagaagaatagctggaaccca

SEQ ID NO: 150319 - DNA, 1424 bp, Homo Sapiens
  misc_feature (153)..(153): n is a, c, g, or t
  misc_feature (210)..(231): n is a, c, g, or t
  misc_feature (276)..(316): n is a, c, g, or t
tggtgtgggggaattgactctcggaggggggcgcaaatcgggggcagccaattagagggtatgcggtacgtgtctcggcggccgggcgcggtatatcggtatcggggtaagggaggcgccaaaaccggtggggctctattagggggggatttncgggtgggaaaggcgcgggtattggggaggttctcgggtgggaatgggcgggacgcnnnnnnnnnnnnnnnnnnnnnnttcttgggcgggcttggtgggaaggagccaaagccggccgacacnnnnnnnnnnnnnnnnnnnnnnnnnnnnnnnnnnnnnnnnngagcaatgatgagccgtggataggggggtttctacgaagagaatggggttgggacaaacgtcgggatatggattacccgtttatggcggacttgcggccaggaaagtttccgcccagccacccctccaagattgaactccaaagcctctggggcagagactgggcaccaccgagcaaatacaaaaatccacgctctgactccaggtgcggatggaggagacgcgtcaggcctcccgagcgtagatggaaggagcagatatgacataaatcccttgagggtctacatcttcagggcgattccaatctacggacgagctcggaccatccccggaaccctcctgcgtccttaggttgttgagtgcatccgggagtgcgtggactgacggctccggggtcccagccagcaagcgagacccagcatcctgggagtggccacggcggcgcacgtggaccagcaagagcgcagcgccggccacgcccgcggccacgagcagtcccagagccggaggcaaaaggtagcgctgagggtccccgggcctgaggcccggcggggccgcgggcaaggcgcttgcgccgtcggggtgcactgggaactcacaccgcgctcccatgtagccgggagcgcaagcgcagacgaggccggagaagtgggcgtagcagcggccgccgtgagcacaggggcgcgcggcgcacgggtccgcgcgctcgcggcagtcgcggccgccgaagcccagcgcgcaggagcagcggtgcgcgccgccgccctccaacacacgtgccgccgttagcgcaggcgcggcccgcgcagtcgtccaggtcgtgctcgcagcgaggacccgcgaagccggcgcggcagcggcagcgcagggcgtggcccaggtccaggcagagtccgccattgcggcatggctgcaggctgcaccggtccaccctcttctcacagttggagcccttggaaaccaggtgggcagtggcagatgtaggcagcgctcagggtctgcacccccgacacacaagccgccgttgaagcagggtccatctgcacatgtcaccccgctcacctcacacccctcgtgccgaattcacaacccaggcctcgtacctagcc

SEQ ID NO: 150320 - DNA, 1355 bp, Homo Sapiens
cgtgctcgagttcccgttgtcttcctctgcgctctgtgctgcttcagctgactatttgtttcggattcaatcgaatatcggtgcgggtcttacgctcctgtatgcggtagtctgctgctctcagggcgacgaaattactatccccctgtggctgtgcgagtgcgcggccctggttgactacatacgatatatcgttggtgcaatccaggaggtgatgtcatacttcctctttattccctgttcccgggtaacattccaggtttctacaggcgaaagacctgcggttactcaacctgtctgtggaccaatcaagacttgttctgcgttgtcgcactatattccacaagcgttccgaggtcccaacccagggccaccgcgcaaagggggccaagccccactacttgtcagtccgtgcccttgttgaggtccccaattaggtgactgggagacaattctgtccgtggataccgcgccaagatgtctgtcagcaaccacgtctcgggcagctggggtctccctactaccatccgtgggcccttcagagttcaggaggggacccagtgtcctttttccaggtactcagtagaattgcatacgcacatccttggctgagacaccatcagttcaggaagacccagtggccccagagtcactgagaggctgtccacctgaccctccagcatccatttcttgagggacaccagctgccctgtcagatgttcaggaccctcacctagctcctcccagcggaaagctcgcaccacacggtctgtgtagcccaccaccagctcacgacacccatctccatcgatgtcgctgatcagcatgaccttggtgttggcagggatgtgctgcttgaagactggacgctgctcctctccgattagtgtctcgtggtgcccagaagcatccaacaccttggcaggtgtcaggtcaaacaaatgaaaccagccttcagcactcactgccaccaacaggttctttcctttattacacacgtctccaaccccaacgcaagtcagcattccctggcaggaacaggtgagccatggccgactgtcatcatttttatacacagacaccttcccgctggtgtctcccaccaccagttcatttaacgtatcgttatcaacgtctccgaggcagattgcgtgcgggaagaggctcccgctgaactccagcgccacgcgctgcacgtagctaactgacctcatggcacctccaagagcagagggagcggagaggcccagtaaatattccgtgaacccccgtcgcgacagccgccagagcggaaggccacctaagcagcagttacgcctcgtgccgattaacccagcctcgtacctagcctagtt

SEQ ID NO: 150321 - DNA, 1122 bp, Homo Sapiens
  misc_feature (1008)..(1022): n is a, c, g, or t
ctttgccagggcgtaccagggcctgcaacagaaaggccacgggatattttccatccacttggaaagcggacgaccggtgcgggttgtgatcaatgatatatgtctgtccatcccagggcgcatgcaactacctcctcatgcccgttgccggtgacatccagtttctccagggcaaagagctggtgatccacctgcactgaccacagcagcttgtctgcttcttccatttcttccatgagcttcagtgtcccatccagggtgcacagggcaaagaggccagagccactactctcagtgccgtggccttgtttgatgttgccaattaggtgagtggagacattcttgttgtggatacggccagatgtctggtgcagcaccacgtctcgggcagctggggtctccctactaccatcccgtgggcccttcagaggcaggaggggacccagtgtcctttttccaggtacacagtagaattgcatacgcacaacctggctgagacaccatcagttcaggaagacccagtggccccagagtcactgagaggctgtccacctgaccctccagcatccatttcttgagggacaccagctgccctgtcagatgttcaggaccctcacctagctcctcccagcggaaagctcgcaccacacggtctgtgtagcccaccaccagctcacgacacccatctccatctgtgggcatgaaagacaagatgggctctggagtcccacgagcagcccccgctcctctgctaacagtggcaccttccagccagtgcggcttcacacccgatctgcggtgctactcacttcaccctcagtctgcccccgcccctgcctgtgtttgcggcatcttgcccgtccatttggtccatctgttccgcagctcctatccgctctctgccttcatattacttctcaaacatgcaactcaaagtgtcccaattcatcccacgtatctcccaccacctacaagccccctatctggatggttcccttgcttgccacnnnnnnnnnnnnnnncaccaaatgttaccttctcagtgaggatttccctaacatctccatttaaaattgctacctctacctcgacactctagctctttctgtgaattattttctc

SEQ ID NO: 150322 - DNA, 1002 bp, Homo Sapiens
ccgagtcatgctgtagaaagacgggccgttgatccattaaggagtttccaagctcaaatctgttcctttgaactgacccactggacatctgcacagaggcatccgggtatgtcagaacgaagctctaataacaggaccccttgcacctggccctctgctggcttcttgatcttcctgtggaaggctgaacaaggagaggtgtgccccgtcttcctagcctgctcctccctccattcttcaccccacaagggcctagactgtgcgctggctaggaaagtccagggagttcacccaggccctgatctgggggggccaagcagcttccagagccaaatgggtagggagagccgagtgacagtcagagctagaggttcctctgcccagtcagcccaggcatcccttgtctacccgccaccatggagccaaggctgtggtggccaccctcagtggatcttgtaccctccaaggcagcctaggagtggggtgggagtgggcggcatctgcagtctgaaatgggctgaggaccactctggctctgaggcgtgggggcctgtgcatcagatcccgtccaggcactctagggctggaggaggggcaggccacgccggagtccctccttcaggaactgcatgtaggtggccgtggacgggtcttcaaaggtggatgagaagctgaagagattgctctcgatttcctcgggcttcacggaggtgatgtccaagaagtagttggcattgatgtgatggaccacggtgccattgggcaggcagatcatcatctccacggggaagctgtacttctccaggtgcaggccagccagcttctggtgggacgagttctcctgtttgttctgcagttcctccagctccttcaccagggaccaggtgctgatgaagctctcgttgagcagggtgaggatgggcgaactttccaggacagtctcccggagagtccgccctcgtgccgaattcggcgcgccgtcgacttcatactctatccccc

SEQ ID NO: 150323 - DNA, 648 bp, Homo Sapiens
  misc_feature (164)..(165): n is a, c, g, or t
  misc_feature (176)..(176): n is a, c, g, or t
ctttcttgggcaaacgaaggttggtggtgccactgtccacaatgctcttgtcatagttgtactccttgcagtccattttcagatcctgtccattgatctccacccgcacaatgatgacctcataataccactcgccgccggatgggtgtataccagagactgcnnctgtgtacagncgagtggtcgatacctccaatgatcatgctccctccgacagaggccagcacttcagactggttgagggggaagccagcaccacaaagcctggcaatctcagcataggccagccccaggatgccttcccagttggagccgttgatgaagaacttgtctgattcagtgatggcagcaatgttggcacgcacagtgacgttggggccatgggggatgcttaccaggtcggtgcccagctccccttcccacttgccctgggtgtagggcacatacacacccttccggaggtcccggtatgtgctggacagctgcctctggtagtagcgatgcaggaaggggtggggggcagcacccactgcaaagttactgctgcctgtatccaccaggatgttgagcgtctgcgtggagatgatcgtggcagcccccccctcggtgccgaattccacacccaggcctcgctacctagaccgtatt

SEQ ID NO: 150324 - DNA, 729 bp, Homo Sapiens
atggtcagaaggcagagatataagaagtttgtctatttattaattaattagaacaatggtgaatggttctccaataagcagagaaaataaaacttataatataaacaaataaccattcattcaacatttattgtggcagtttagatttaaataactttatatcaagggctgtatgattctgaaacaaataattaaaaatcccggaaagtcttttctcctgaacacatttaagaaactagaaatcactttgggtatgatttgtttagaagcaggaagatgaaaagggtagcctgtagaagaccttgccaccccaagaaatcactgatcttattgcttggtccttgggggactcactctccttctgtgccaggacacgggtacctgcctctttttttccctagatcattggaggtatcgaccactcgctgtacacaggcagtctctggtatacacccatccggcgggagtggtattatgaggtcatcattgtgcgggtggagatcaatggacaggatctgaaaatggactgcaaggaggtaataaaaccaagggagagcctgggaacataagggggtaggcagtacaatgtgaaggaagactctggttatcatgttgggaggatgaggcagaggtaataggacctgcagaaagggttggaagttgagcctagaacagtcaggggcttaatggtcacacagcaggatctgcggtttggggcctagggactgg

SEQ ID NO: 150325 - DNA, 2001 bp, Homo Sapiens
  misc_feature (27)..(27): n is a, c, g, or t
  misc_feature (1968)..(1968): n is a, c, g, or t
  misc_feature (1983)..(1983): n is a, c, g, or t
gaggtggtcgggttggccacggtcccncctccagccaagcccccttggttttggcaagcaggccactggagtggcttttgggggcagccagcgctttatttgggccggaccaggggcttccgggtgcggctgacgttctctgtttgcccgtgctgtcttgggggggcagcatttcggggtcctccatgcagatgctggatggttcaggcagtggtggggggaccttgagggggtcaggcaaagggtcgtggcgagggactccaaagccctctgtgtcttcgtctgagtctgccgcaccgggggccaggggcacgggatccgagtcagacagggtgggcagggactcgctgaccgatgtgggtggcgtctcctcggcccccagcccacctgcccgttcctgtgaccgggcactgctgtcattcgagctgccgggggacgcaggtgccggtgccattggcaccgccttgcgatgctcaaattcacagggtgacaccaggcacaggtccacatcgtgtggggaagccgagcgccgcgcccgggggccacgcagcgggaggctcagcccagcctcactggtgggggcggatggcggcagcacctgctcaaaggacaccgacagggactcgtccacctcggtcgagtgcggggagcccacctctgcgggtagtgagggcgtggtcaccgtgggtgtggtcactgtgggtgaggcgtctggcccggcctccccgccccgcagtgggctcagcgacagccgctcgctgccctctgcggggctccggtgggactcaggggagggtgtgcgtggccttgggattgagctggcggccaaaggcagctccagtgccttctcctccccggctgggatcggccccagctccaggctgggcgtggccaccagctgggaggccggagagccgcaggctgcactgggggggctggcttctccacatcggaggctgggcgggctgcggggtccatttgccaccggcgggaagccagagtgggacgtgctgggcgctttgcggggcttgggtgccgcctgggcattcgtcttcttgaggttgggcacagaagaggctgcccggcgcacctcccgcggctgggtccgggagacactcggtttggggtctttcttgaactcccggggggtcttggcttctttctcagtcttgcgtggggcctcagcccgtgctggctccttgcgggccaccccagggcgctcctggccaggtctagggttggtggccaggaggccctctctcttcgagctgtcccgggagcccacgctctctttgctctcggctcgccccggcccctccaggtcctggggcgtcaccacgggctctcgcaggaacctcaagtgctgcaggcggaccaggccgtccaggaggcaggcgggcggggtgcaaccggggaacagcacgcgcaccaccttctcgccggggccggcggggtgccacaccagcagggcgcacacagaggctagcgtgcgctctgcgctggcggagtgcgggtgcagcacatacatgtccagccggcccacgcccatcttctcgaagagcacggtgggtttggctggcacggggccgcggctgagtggcagaggcgtgatgcccagctgcgccaggaggctcagcgccagctccgcctcatcctcgccgcgcgccagccgcgacgcggcctcgcaggcgttgaagaacacgacccccaggttgggggagatgagcctgcgcagcctgtcgtcccaggagcccccaccagcagccacctcggagcgctccgccagtttgcgccgcagcaggctgttgaggccggggaggctgtcggcgccagggtgggtcaccagcacggcatccacgcggtccaggtgccgcaccagcttccagaaactggacttggggtttgagccaccgttgaccagcacagtgaagcccatgacggcgaagaaggcggcatcccctcggccgnaatcggcgcgccgtngattcttcatctctccgc

SEQ ID NO: 150326 - DNA, 1042 bp, Homo Sapiens
  misc_feature (98)..(98): n is a, c, g, or t
gagcagggacaggcaggtagcatgtatctggggcagcgaggctgaggtagacagcccagtgggaagactggagcttgtccagagcccacagagcactngaggtcgccattgcgcgcagcagctgtgagccaggagcgtcgcgcaggtggtcacagcacgcatcacgcgtccagtgcccaccagctccagaactggattggggttgagcccccgtgaccagcacagtgaagccattgacggggaagaaggcggcatccccgaggctccagggaagatgtagcagcagggccggcccagcctgaggaagcccccggaggtcgggggctccagcagctcgaagggggacggtggctccagagactcagccacgtactccaggaattcgcacaggccctcagagttgggcagctgcgccggggggttcagccgcagctggagccggagcgccccctgaaggccaggcacagcgggtgccagctgagcccagtcaccgaaggtggggcaggtgatggtgagtatgggcggctgcacaggtgggggcgtggtggccaggatgtcccggatctctctgtccttcaggacctggaggaagtggtgaggcgagaagccccctgtctgtagcagcagctcccccgtctcctccaggcagggcccagccaacaccagtagcttgtgagaggcagggtccaacagaaggttccggagctcatcatacagggacttgtctgatgggttcaggaggaccagggtctccaggttgtctccacggtggtgcaggctccgctggcctttcacaatgctggagaaggtggcagagtgtcgggacacaaagaccttgagctgttcatcaaggttgcagacgccaggatcgacatcccaagaccggatgcctctttcgagctcctccaggacgtaggtgaggagccccgggctcccgaactcgctgcccaccacgaggagcagtgagctcggagccgcggcagccccagatccagccaccctcggccgaattggcgcgcctcgacttcatactctttcacat

SEQ ID NO: 150327 - DNA, 1088 bp, Homo Sapiens
agccaagggacgggggattagatcgttggcccccgaggagcccgccaggagtcaacgttgtccagagatggcgcgtgtatagcccccacaggtgtaggcccatagaagggggtttcaggggagcccaagacttcgcggcccctagcattcgtctggaccacaggggcctgccaagccccggggagaggcggggctcttcggccagggggctttgggaagggaaacaagggggtccccccccaggaatggggggtgaagaatggaagccccttgggggccaaggccttggttcggttcccccaagggaagcccccccacatccaaggcatgggcccagccttcgtgaagggcggcttccgcgccccaagttattggcgccccgcccagcccagggcctgttttgaaggccccgtggggaggggcttgttcgggcccccccaggggtggggttcaaccaggcaaggggcattccaccgcgggtcgccggggggccggcaccaagcttcacagaaacgtgggacttggggtttggagcccccggttgaccagcacagtgaagccattggcggcgaagaaggcggcatccccgaggcctccagggaagatgtagcagcagggccggcccatcctgaggaagcccccggaggtcgggggctccagcagctcgaagggggacggtggctccagagactcagccacgtactccaggaattcgcacaggccctcagagttgggcagctgcgccggggggttcagccgcagctggagccggagcgccccctgaaggccaggcacagcgggtgccagctgagcccagtcaccgaaggtggggcaggtgatggtgagtatgggcggctgcacaggtgggggcgtggtggccaggatgtcccggatctctctgtccttcaggacctggaggaagtggtgaggcgagaagccccctgtctgtagcagcagctcccccgtctcctccaggcagggcccagccaacaccagtagcttgtgagaggcagggtccaacagaaggttccggagctcatcatacagggacttgtctgataagttcaggaggaccaggctcctctgcg

SEQ ID NO: 150328 - DNA, 1123 bp, Homo Sapiens
  misc_feature (1000)..(1048): n is a, c, g, or t
cagggggccgtccttgttctgctgcctctgaagctccaatggccaaatccatttcctcatcacagacattggaccagaattctatcccttgtaaagccacctcatcaatgtcacttttcatgctttcgattgtgattgcaaaaagagcaggacccatatatgtctccatgtactgataatataaggacattatcttcaccagattctgtaaagcagccactcgtaccctcgtatctggacactgtgtggcttcacagaccacctgcataataaagtgcctttcagactctttatcaaagtttgctttggtgaactccaatgagttcaggagtgcattcgtagcagctagcttcacattattactaggctcttctttcctcatcccctggattatggcagtcagaatctcattggatttatcttgtagctgctctgggtctatatcttggcaaatataaccgatggcttccaatgtcgactccttcatgtgctctgtgctgttggggtttgtgacattggccaccagctgaggaatgagttctggccactggtttactgggatctctgcacaagcaataccagccacacactgtgaggcagaactaggcccggtaagtttctgtaccccaatgtctgcaaaacatagttcttgacttctcgtcgagcattagcatcaatagcaagccacctctggtgatattgtgccttgatatctggatctttagatgtcaaagagttcttgatttgtaggccagctgcaactctggcaacctgactgtttcctggatttgccagcactctggacagttccacaaggaaagtgggcaggttctcctcgtccgcacgctccaggaacttatgctccgcttccagctccagccgatcgggagacacggtcttctcgagaatggtgatcagctccatggcggaggtggcggcgccggcgactcctcctaagacgacggcccggcctttcgggcggcggctcgaactggggatnnnnnnnnnnnnnnnnnnnnnnnnnnnnnnnnnnnnnnnnnnnnnnnnncaccacaaacccattcaccggctctgtctgggtagtcggtccggctccccttcctctcctcttcccttacttcct

SEQ ID NO: 150329 - DNA, 902 bp, Homo Sapiens
  misc_feature (763)..(818): n is a, c, g, or t
gtccgggatccttcctgtattatacaaaagatttttgaccttttgggggggaaccttccccaattgaagttttcagggaggtgccattttggtagccaagcttaggcttccacctttatttattagggctctttttttccttcatccccctgggatttatggcagtccgaattctcattgggatttatcttgtagctgctctgggtctatatcttggcaaatataaccgatgggcttccaatgtcgactccttcatggtgctctgtgctgttgggggtttgtgacattggccaccagctgaggaatgagttctggccactggtttactgggatctctgcacaagcaataccagccacacactgtgaggcagaactaggccggtaagtttctgtacccaatgtctgcaaaacatagttcttgacttctcgtcgagcattagcatcaatagcaagccacctctgctgatattgtgccttgatatctggatctttagatgtcaaagagttcttgatttgtagaccagctgcaactctggcaacctgactgtttcctggatttgccagcactctggacagttccacaaggaaagtgggcaggttctccacggccgcacgctccaggaacttctgcgccgcttccagctccagccgatcgggagacacggtcttctcgagaatggtgatcagctccatggcggaggtggcggcggcggcgactcctcctaagacgacggcccggcctttcgggcggcggctcgaactnnnnnnnnnnnnnnnnnnnnnnnnnnnnnnnnnnnnnnnnnnnnnnnnnnnnnnnnaccacaaacccattcaccggctctgtctgggtagtcggtccggctccccttcctctcctcttcccttacttcctccctccaaat

SEQ ID NO: 150330 - DNA, 1001 bp, Homo Sapiens
ttttggttccccagcccttaaaagggaaggcgcggactcatgggccagtgactcacagctggggctggaagaggccctgttacttaccgaccatgggggctctcctgtgccagagacagctccgggctccatggatgaccatctttaaatgaccaggaatactatatccttaaatcatcctaaatgactaagaaagtcacatcatttttttcggcaaacaattctgagtcaaagattcagtctttccatccagaatctgaaaggatggtggaattaattttcaaaataattcattacgatgggcggtgaggagggaggcacagtgtgcgaccagctctgagtcactgctgtgtctccctgggggcgggacggagatcgcggaggtcggtcgggttcttcggggagaacagcagcgtcagggctccaagtgcaagttcacagcagggcaagcctagttcagcaccaggtgcttcctctggccaatcctccctagccttgagctcccggaggtggcgcaggcctgtgccagctgagcagggttgtagaagggcatggccccgctgggagggccccctgcagcagggaggtcgccaggagcctctcctccctgggaaccctcaggcctggaggaggggagttcagagccagggagtgacgctgcagagcttaaaaccttgggctctggggcaggctctggattggccaggcccctagctgctgcaggcccttccctgccagtcccgtctggaagctgtggttcttctgcatctggggatgagagagcgaggaggccatcattccgtcccgaacgtccctggggtctcactgaagacactggggttggcacgaacaagttagaaggaattgggagtggcgcgagtggagcgacaaagtccgcaggagcgagagccggctcgctccgctgggtcccgcttgggttcaggacgtcaacgtagcgagctctggttcccctcgtgccgaattcgccacccaggcctcgc

SEQ ID NO: 150331 - DNA, 1310 bp, Homo Sapiens
tgggccagtttgggctcttcagggaagatgcctcctccctccttccctctctgcccgcccctgggtctgtccccggtggacacccctcagggctctgacaggcactgctccaaggcagccatgcggtagtggctggccgtctcctcgcccgcctgcagcctcatggcctcccggcacagccggttggcccgcgccagctccaccaggacaccctgataggcggccaccatctcgggcttgacagagttggggctgacactgcctagcagctggagcagctcctgcggccagcgggagcgcagggcagcgggggccagccagggcagcagaggcacacagccggtgaaggcctgcatgcccaggaaccagagctcctgcaggtcggcccagatgccgctcatacttcaggggacaggggctagcactgcctggtctgagcccggggtggcccgcggccacgtgggactgtgataggaagaggatggcagctgcgaagaaccctcgggatgctggtgttccctgaagagctggagaggtgctaaggagccgggccatgaggagccccagggtggccacattagcagccagaagcaggccttgccctggttgctgcagctagtgctggtagcgagcggtcatgagggtgttcagttagagatgtgaagcaggcgtcacgcgttgatcagcgcccggtgcggtgaccagcgaggttgaggaagagtgtggcagcaggtctgcaggccaatctccacgctgtcaggctagcactcgaggtgtcgtggccaggggatgtgagttcccactgctgcaggaaatacttgcacagaagcgagggggccccttccttgatcaggatctcccggggcccatcttcaacggtcaggtggcaccagccaggcaggaggagccggagagcgtctcctggccaggtgggccctggggtggtgggggagatggccaggttggccacctgctgggaaaggtcattggcctcctcggcctcctcgtagagggtcttggcatagcggacgaggaagggcagcagctggcacacctccttacgcaaggatgaggtctcctcggccagccaggcacccaggatccgcaccgaggcaaacacaaagggctccttctgcttctctgaccccacctgcagcaggtagtggataacagcccctatggcctccttcatgacgctcacgagctgcaccttctgtggctccttaagcagtgactgctcacagcgagtgcattcctcctcgtgccgaattcacccacccaggcctcgctaccttagacccgtatatttt

SEQ ID NO: 150332 - DNA, 1069 bp, Homo Sapiens
cagagaaagttcatcaagttgatccccaatgccctcggacaagcagcttttctgattagagctggaagacacaggctgggtgcagtggcgaccccgtagtcccagctactggggaagctgagggtggaaggatcaacttgagcccaggagtttccgaacagtctgggcaacatacccagaccctgtctctttttttaaaacttggaagacataaagtctatacattctacactgaatcatgaatatactacggagagtttgtagaaagtaaactttaaaatcccacactccgacatcatatatgtccataagcaggattttgcaattcacttcatactggaggtaagcaccccagctggggtcctcttgccgcagtggtcaggccgtcagagctgaggcctttcactgcaacaagggaagtagtcttcggtccgaaacaggacgggggcttcgtagccggcttgctgtggcctcgagggagcagacttgctaaagagcgagggcacgttcatcgtgtgcaggagcttcttgaacgccctggggaaggtgcccagctcggcctcggccttggtgacctgctcctccatcctggccacgcggccccccaccatcctcacgaaggcctccagccggtcgatcctgctgtagatgcgccgcatctcggcggccttcgcgtggatgcgcggcacgcccatcgctgacgacgtgggacgagtcgccagcgaagcatgtccagcatgcccacgaactcgtccactctggtaagcaggtcctctaggctcgcgtccagggcctcgacctcgggccgcgccccggccccgggcagcaggcaggcggcgtagcccgcagcggcgcggcgaagcagcggcaggtcgcggcccggcgcgccgtcctccgcgccctcgtcctcccacggccccgaggcgctgctgtggctctgggaaacagtgccactgtccccgctccagcggcgccctgcggctcggcctcttccgcgagcccctccggcagcgctccgcaatccgaaaagctaccctcgtgccgattaaaccagcctcgactagcctag

SEQ ID NO: 150333 - DNA, 1001 bp, Homo Sapiens
taccgaagctcccccagcgccaatggttgttggtcacccagcagggacgcgaactgcgtagaccccttcccagtcaacttgccagaaagcggaaaccagcgcacaaggttcgcgaacgaagagactggtgtactctttgagctgaccttcatgagtgcgggagagcttcccgtatcggcgccagaacttgttgaaggtcaggtgcgcgctggcgttgtgcacgtgctcgcgcgggatgcgcagcggtcgcggtagggcgcaccgcggtgcagcaggcttccgctcagcacgatcatcacgcgcttccagttggtgcaggccaccttgggcacgtagcagtagatggccccgtgccggtcgtccacgatcaggtggctcagctccgagttggggatgtcgtcgaatgcgcgctccttggtggggaaggccaggctggagttggcgcagaagccccgcagcacgctcctccgctccgcctgctgccggccctggtctgggctgcgccgggcgtcgcgcggggaccagtcgtagcctctcacgctctcctccatgctccccggcgcaggcggctgctccgtctcctttctgggaaggtcgctctgcttcacgccagcactgagaaacttgtccagaaactcgtcgacatcggagtcggccgtgagctccctgtccctgtccggcccgggcgtgggcagcggcggccccgtgtgcggcctagagaaggacgtgtgcaagtagaagtgcgcggcgcctgcgctgtcccagtacacgatgatcagcaggatcatgaacaccgaccccagcaccagccacagccggaacagccgggccttggtcatcctgccccgggcgggctgggccctctccgggcctctcacttcagcttcctgcagagccggggcatcctgctgggaacctcgcgcccgcagccgccgtccgccgccccgcgaccctcgtgccgaattcaccacccaggcctcgctaccttagaccgtatagtt

SEQ ID NO: 150334 - DNA, 808 bp, Homo Sapiens
tagagagaccgggcccggtgtggaggcccggctcgctgagaaagtttggacatagtggtattcccgggtctggctccgagggttgacatacttgagcgcctggaagtcgttgtgcagcgcgtgccccaccaccactttgcctttcaggagcttaaggatctctttctgggccacctggaaggggacagccttgcgcatgtgctgccgagtgatgccactccagcgggtacggtagtcagcgatgggcatctcaggcctgatgtacttgtcatagaggacatcgccatggtagctcacaatggaacagcgggccagctcgcttacccgccctcggggtcccgtgcccaccatctcacagtcgatagccacacacttgctgggcaagggccctgaggctttcccgggagcaggccttctgctgcatggggcactgccagatccagccctcagacactgcttcccactgctggcagcttcagttgctgtcgctgccccgaaaggggtgggcagtggggaggaccctggttctggaggcatgctcagcagcccctgctcctgcagcaaggccttccgggccatgaaccgctggtgctgtcggctccttctcttgtgcctcttccgaagcacatccttggcatttgggatggtgagggaagggcacaggcactgagcagactcaggggcctcccggggtaccattccagtcagctcactgcttggggcaagggaagcctggggagtaatcttccaatggggcagcagcctgcctcgtgccgaattcggcgcgccgtcgacttcatactctctc

SEQ ID NO: 150335 - DNA, 851 bp, Homo Sapiens
tcgggtgttggaggccgggctcgctgaggaagttagggacataggtggtatcccgggtctggctccgatgggtggacatacatgaggcgcactggaagtcgttgtgcagcgagtgccccaccaccaccttgcccttcaggagcttaaggacctctttctgggccacctggaaggggacagccttgcgcatgtgctagccgagtgatgccactccggcgggtacggtagtcagcgatgggcatctcaggcttgatgtacttgtcatagaggacatcgccatggtagctcacaatggaacagcggggcagctcgcttacccgccctcggggtcccgtgcccaccatctcacagtcgatagccacacacttgctgggcaagggccctgaggctttcccgggagcaggccttctgctgcatggggcactgccagatccagccctcagacactgcttcccactgctggcagcattcagttgctgtcgctgccccgaaaggggtgggcagtggggaggacccatggttctggaggcatgctcagcagcccctgctcctgcagcaaggccttccgggccatgaaccgctggtgctgtcggctccttctcttgtgcctcttccgaagcacatccttggcatttgggatggtgagggaagggcacaggcactgagcagactcaggggcctcccggggtaccattccagtcagctcactgcttggggcaagggaagcctggggagtaatcttccaatggggcagcagcctgaagccccgcgtgtctcttccggtctgcacgtggcgtccggaaagccggcagccctcgtgccgaattcggcgcgccgtcacttcatactct

SEQ ID NO: 150336 - DNA, 1096 bp, Homo Sapiens
ttaaggtcgtgttcccccgtgatccttcccttgcctgtctcggggggccctactcgggcgtgtgccctcggcgacgcgggctacgccacttagggtctgccccccgccgggggtatctcgtccgagcgccaaattgccgccccgtgggccgcgcctttggcatggcagctgctgtgcgtcctaccacatacctgcgtgccatccgttccatgcccacccagccccaactccactcctgccacgcattctctgtctgtcctgctctctgcccccagcacacttagccccaccctggccgtggactgtcacttgctagcaaaaaggcccctacagttacccaggccccccagtgccacggctcccgtcagcaactgtcctcactgagtgcccagttcccctccccgcagacgccgcgcctcctccagggccccgtcccccgtatagagctgtgaactccgcccagcccccactgctgtggatccagtcagccagccgcgtctcccaggtaggccaccatccactcctgcacttgtcccaccagtggttccatctccttgttgacactctcagcaacacagtgcagccccaaagacaaagaaggctacaaggcggccccagttggggcccccttgaaaaagttcatcggagacctgggtgaagcgttgttgggctgagcctggggtcacatgcagctgagccgccagatcagagaaggtgcgccggaagcgggtctcgaactcatctccagctgcccgcatggcttggtgcagtgggtcagctgctgggccctccccggggccagctccacagacataacccttctgcctcagcttataacctacaaagtctgccaccagagcccgtgtgtctggggccgaggctggggtcgccatccgggcggccagccgggatggcagctcttaagacacagcactggtggcaaggagcccaccagcgtggggcctttcatcctcccggcctgacccggctccacgctgccaggaggatgaaagccagcgtggagccgggtcaggcgggatgaaagcccccagctgggcccctcgccgattcaccaccagcctcgtacctagcctat

SEQ ID NO: 150337 - DNA, 1220 bp, Homo Sapiens
  misc_feature (279)..(279): n is a, c, g, or t
tgttccttatggagagttgggcgggccgggtcccttttaaggataaaaagaggacctcgggggctttgccttttttcccttaaaaaccaaattcccgggcttgggttttggaagaggtgaagaggcttctgaagtcaatgccaaggggaaagaaggtgccattaaagaggaaagcagcccttcttgctgttgttcatcccctccacccaagtgaattcaagggagaattgcacagccaggacagaggctgttttgagcttgggaggcacagcatcctcntagaagtctctgcagaacaaacttcaaaaagatagaacttaatcacatgttccccaggggtttctctatagtataccagcactagggaaaagcaaaatcatctttgcagagagctgatggaaagaaaggcaggaaatatgaatgagcatccattaaggctctctctcttaaagcctaaggaattaaagatattcgaggctatgagacaggtgcagagagggagagcctggcaggaacgccaagaaaagacctgtgactgctggttacacagtgctctgcttccttgcttgaggccaacagcatgtgtctgcctgtcaccaggctaacccgggacccatgaggggacagggagaagactggttttcagttcctgcatgatcaacttgtagggtgtgtgggttcctcctaaagatccaggaggaggactctgggatcctctaccgctgccttgattttgcggaggaaagtcacagcctctctgccatcaatcagccggtgatcataggtcagtgccacgtacatcatgggccgcacctctaccttgcctcctatagccactggcctgtcaaagatgccatgcatccccaggatggcagactgaggggggttgataatgggtgttccaaagagcgagccaaaacgcctccattgctaatggtgaaggtaccgccatccatatcttcaatggcaagttcattctttcgggccttctctcccagttcagtgatggtccgttcaatatctgcaaaattcatagcttccacattcctgatgactggaaccaccagaccccgtggggtggccactgcaacactgatgtcaatataatccctatacaccacctctttggttgtgtcgtcaatcactgcatttacaacaggctgttcctgcaaggcaaaggctgaggccttcacaaatgccgacatgaagcctagtttgag

SEQ ID NO: 150338 - DNA, 1231 bp, Homo Sapiens
  misc_feature (109)..(118): n is a, c, g, or t
gatggggactctccatgccacaatcacaacacacgacgcccgcgttcggaccgggccggctgggatggggggcgggggacatgcacagcctggctcctggttttggttnnnnnnnnnnggttctcgaggttaatgggagtcgggcggggtgctctggggctgcccgggggccgcttggagagccactgtcggggatcggggaggagccgtcgctcggatcttcgtttaaaaacacatagaacatgctacatccgcgcagacgctggatgggaggaggcaacactggaggggcgaggctcccagccgcgaccgcaaccctggccctgtccatgccccggggttggacgcgggcgggtaggacagacagatggacagacactaacacaggctccgagggggttgcctcagagcggaaggaagatctcgtgattggggagaaggagtctaaggacagccctggctctggggggcgggacagggacagggacagaacttgtgctgctggtgggggctctcctgggcccctacgcctctggctcatactcctgatattcctcctggggtgggtcctcataactctccccttctggctccatcaggggctcaatcagtggttcttcagcagcttcctgggccacttcctctggcttcagatcagtagggaattcctccctcttcaccagtcctgtggctgctgcgatgttccctgccccagagaacacagctcctcccagaatgtgaggcctgttcccgttggttttttcagccaacttgaaagccacaccttggtaccacactcttcgtcgggtctttgcttccgacgtagaggacgccctccttggtcttctccgccgcctcggtgaccccctgcttggttttctccgcggctgccacgacgccctccttggccatggacaggcccttcatgtacacgtccatcctggcggcctgtgatagcgggtccggggctgcgggatggacgcggctgtctgcggcgggcggacgcggggtgctccgctaggccaggccggggtggaccaggggccggaggggggatagggccgggatcaggcgctcgggtcgcgggtcctgagcaggagcgcagcagtgcccgggtctcgggtgcgtagccagccaccgctcgttcctcgcgccctgcgagctcgcgcgctccggctccggctccggctccggcgctgcggcagctctgagctcagcgcccccgctggcg

SEQ ID NO: 150339 - DNA, 1049 bp, Homo Sapiens
aagttaggctaggtacgaggctgggtgtgtaaattcggcacgagggagtgcctcacggcagtatgcccattacttcctagaggtcaccctgcaagatcacatattctacaaattccagccttctgtggtcgctgcggcctgtgttggggcctccaggatttgcctgcagctttctccctactggaccagagacctgcagaggatctcaagctattccctggagcacctcagcacgtgtattgaaatcctgctggtagtgtatgacaacgtcctcaaggatgccgtagccgtcaagagccaggccttggcaatggtgcccggcacaccccccacccccactcaagtgctgttccagccaccagcctacccggccctcggccagccagcgaccaccctggcacagttccagacccccgtgcaggacctatgcttggcctatcgggactccttgcaggcccaccgttcagggagcctgctctcggggagtacaggctcatccctccacaccccgtaccaaccgctgcagcccttggatatgtgtcccgtgcccgtccctgcatcccttagacatgcatatggccattgcagctgagcccaggcactgcctcgccgacacctatggaagcagctacttcagtgggagccacatgttccccacggctgctttgacagataggcactccagatctcacgaggaagcttggagatgtgggcagaggaagaggacactgaagaggagagctcagccaagtgaggcagcaggaggcatcctgaaagagctggaacgtggagggtctgtgctcctttaaataaagtgaccagagcaaacattcaataagatactcaccgaagagatgctctgagaacgtctgccgggtgctagggacacaggatgctggtggcggccccaacaggccggatgcgagatggaagccccggcaggcaggccgaccggccgcggcggtactaaactgtaagcggaggcgcacggagagacacggtccacggacaggtacggcaaggaggccgggcgggggaggcacccaggg

SEQ ID NO: 150340 - DNA, 1228 bp, Homo Sapiens
  misc_feature (201)..(213): n is a, c, g, or t
caccacccccccgaggggtttcaaggggtttttaagacccccgcccgggcggagaaattttatgccccttaagaaaaatgttttcggcggggttggtccccaagggaaaaggggggaaacccgcccacattttccacccaagaaagggtttaaggcccaaaaccaaaaagcggtttttacaattcccttccaaaggttaannnnnnnnnnnnncaatccactgaaaggggccctttccggcaaaccacgggccaaaaagggttttttccaaaggaaaagcccccccgcgcttgggttccaagcccggtgggtcggcttgtccagaaaacacccagggctgggtccccaaccagcgccagggcccgtcgccagcttgcgtttgttccctcccgctgtaggtgcctgcaggccggtctgcgtaccatgagagtcccagacgcgccaggcccgagccagcggtctgggccaacctgggcctccgggacaccgcgcaggcgcgcaaagcagctccaggtgctcgcggcccgtcagcagctcaaagatggcatcggattgagggcagtatcccatgctgaggtgcgcagcactgggttcccgggccacgctgtggcctgccagcacagcctcgcccctgctggccaatgtgtcccccgtcaccatgcgaaacgtggacgtcttccctgctccattcacacccagcagcccaaaacactcaccagggggaatccccaggcacaagcggtcaacagctggcatcctctgcccacggtataccttggtcaagttcctcagcaccaacacatccccctgggtggctccttggaccacccgctcccgttcacgggctacatcctcgtcctcctctcccaggagtggcagagacctcacctgggctgtggcaggagttggcttcggtgctgcagcagtagtgtgaagagaaggaagaggggcccctgtatcaccatggccaagaggttcttgccgaccacctcccagcgcaggggtgactggaactgcctgtctcccaagcgctcaaaggcatcagccatggcctggttccgcaccatgtcaatgagcccccggcccaagcagaagtgggggaagataaggaagacctgtttcaagatccggctcacctcctgcagcttctgatcagagaagagctcaagcacaaaggtggccatgccctcgtgccgaattcaccacccagcctcgtacctagccgtta

SEQ ID NO: 150341 - DNA, 1059 bp, Homo Sapiens
  misc_feature (719)..(769): n is a, c, g, or t
gaggcccaccccgcagtacgacccgaagacatgtgagcaggagccaccggcaggtgggctcttgcccctgagagtgcataacggggagggtgggtccaggaagccagcctagggctggtgtccgcgcccccatcacagaagtctcagccctttcttgttctctccgtgggcgccgggcagcagcgactgcctgggggatgggcgaagggaaggcgctggccgaccccacccatggagagaacacagccacaggccgggacgatacatcaagctcgcacccacggccctcacatgtccacgaagaccatgaagcaccagcccaggcccccgaccagcatcattgtgacgtggatgccatagacgatcagctcgttcaccaggcggaagtccacgcgccggcggcccagcagcagcagcagcaccgacagcttgcgctggaagcgcagcaggacgcgaacgcccaggtactgtaggcagaagagggcggccagcgcaccccagagcgccgcagtgaacaggctgcagctaaagtagagtaggaagcggatgaagccgtacagccagcgcgtcttgatgtacacgtcgaagttgttgtacttggtgcgggccaggtgggaggcgcgcacgggcccgcaggccgcatgcaggcaggtggtgtgcgggccgtggaaggagcgcacccgccgcggaatgggcatgaccggcattgggccccggcnnnnnnnnnnnnnnnnnnnnnnnnnnnnnnnnnnnnnnnnnnnnnnnnnnncgtaggggtcatgggcgcctaggcctgggagcccgcagctgaccctggggggaggcgtcggcccggtgccctctccgcggcggcgccggcgtcccggacctcggggccggccggcggtgctaggggccgggcctgcgggtgcccctgtccctcggggctccgtgcgcagggcggccgcatggtgctggggcgcgcggctgggggcgctggcaaggcggctgagggcgtggttcacgcgtcgccggctggggtcgcccctcgtgccgaattcgccacccaggcctcgctcc

SEQ ID NO: 150342 - DNA, 1446 bp, Homo Sapiens
ttcgcgcggcccttgaggcggacctttatacagccggtccggcaaccggtttccgcgccccttgcttttcccttctcctcccggcccttcgccccggtcggagaccagcgtttccacaggcatttcccgtcacggtgagtccgtttcctcgcgttcgagggagcacagtcaacggttgtctctaccggttgcgtggtcctccctaggcgtgcagcgtcccccctgttgctgccaccatccagaaaggtggttgttattgttcaactcgcagtggtagggttggtccctcagcgctgggaaagggaaacaggaatggggacaggggaggaagagggcagggttggctggtttggctcccgcccaggggtaccaggctggtcccaggaagctgtccgggggcttaggccttcgctctgccagttgcccggcctctgggagcagtccccgagaggtggagggctggggtgaggaggtgtgggcggcaccaggttcagtgcccgtctgagagctgcggtgaatgcggtggctgacgatgatgttgttgccgaagccgcccatggaggccatggtggtgctctgctcccgctgcaccacggctgtcatgccgccctccgccatcagcctctggatcctgctgagcgcatcttctccactggcaccatactctgaaccctcaccttcaccaggacctgaggcggctgtccttggctccggcacctccctctcagtctgtgtttcggcattctgcagctgaagggccagagtctgggtgccctgagatgtcactgaggtggcagggttccggggctgaagcccaatggcattcatcagccccatgtctctgtctgtcctccatgtggctctgctggttccaggccgctcgctgctcctgctgttggaatggacagtgaagaccgtctcgttcagctggtcccagtagtactcaacaccagagtttaaggcctctggtcggcagatcaccaggtctcctttgttagtaccataggccaagccaagccctggctcaggcagccaacgggcagagttgatactgacatgtctccgctggtcggcaggcatgggataaaggacgttgaaaactctcctcatggaggtctctccaccatgggcctgttgcagcctgaagacctgggccaccatgtgctctgtggaggggtgcagcaggatccttcgtgaggccaagcccaccattacatatctgcccattggggacaggctcaccgaaatggcattgggaccaaatcgcttggtgtagagcatttcgcccaggttatggggggccagggagtacactgccaggatgccttcatcaggaaagcccctctggctgctggggatgaaagctgccaggagctggccatctgcagaaatgtcacagctggcatcattgtagatcttgcagttctgcaccagcacattcacgga

SEQ ID NO: 150343 - DNA, 346 bp, Homo Sapiens
  misc_feature (223)..(223): n is a, c, g, or t
acggcagcttccgcccggagagcagagatgtggcgtggggctgagtgtggcccaccggtaatccaactgcatgcccccttccctgcctgcacctgggcgccgcctctgcacgatgaaggcgggcatttggtgtggtccttacagccgtgtgccccatcccactgatccttgcctgcctgcagaaagctacaggattggctttgcctttaagtgtcctgactgnccctggcctcccttacctaccatgacacgccgagagctgagctgtcccactcgtgactaactcgccgttgcctgcaacgctccgttgcctgcctcacacccgcacatccgtatgacccggtac

SEQ ID NO: 150344 - DNA, 1300 bp, Homo Sapiens
  misc_feature (67)..(226): n is a, c, g, or t
  misc_feature (410)..(410): n is a, c, g, or t
  misc_feature (414)..(414): n is a, c, g, or t
ccgttccaaagtgatgctcctggtttcagccctaattgagggaggtggggattccaggccatgcccnnnnnnnnnnnnnnnnnnnnnnnnnnnnnnnnnnnnnnnnnnnnnnnnnnnnnnnnnnnnnnnnnnnnnnnnnnnnnnnnnnnnnnnnnnnnnnnnnnnnnnnnnnnnnnnnnnnnnnnnnnnnnnnnnnnnnnnnnnnnnnnnnnnnnnnnnnnnnnnncgccctccaatttcccatttgtaggaaagcacataagggctataccaatcagggcactgtggctggtctaatgctcacaccagggggccagcccactgccccagacttagcctccaggtaggctgctttgctatttaaaggcaacagtcttaggatccttattataaaagtttaaacaaaatcncaanagccgtcaagtcttcctggagatggcaatgtactatcagtttggaatgtataccagtttggaagctgaaatcactctgctgtagccttttgagcactggcagcagttttcccaaattgtttcttttccccattcttcataatcctgtgtcagatcttcatctttctgtggtttatgtggcatctcctctctccttctccatttcctttgctggggcttcaaccactatcttctttctcttccgtggtggagtagctacatctccaggttctctgtcgacctgctgtccaatcttctctagttgtttacacagtcgatcaaatatagctttttttacaccggatgtggctaccattttgtttttatccactttcagctttagaatcttgcatgctgaaagcagtgcagcagaagtgaaaagtggcctggataagtcaagatccacttgctgtgtctggggaagactggactcatagctttttagtatctttgaagccatgttcactgcttctatacagctaaactgtacagctaggtctcttattccaatatttgaattcaggcccagtaaacactcaaaagatttaagacagctctgatatgtctccttgttcaaaccagaaagtttaattaaataagccctgtccaaggggcacttcatccaggaagctgcaaggtccaggcacatgactgcactgctggtctccgtggtgcgtgcggagaggccgacacacttcacccgggacaggcgcaagtactcctctgctttcctcagcatgtcgggctcggcgaggcccaggcgcggggctaggcgcccgatcagctccgcctcgtgccgaattcgccacccaggcctcgctaccttagaacccgttagagttactgcc

SEQ ID NO: 150345 - DNA, 1001 bp, Homo Sapiens
ctgcgtacgcgcacttccggtctttgtggcttgcagctcggggtgggtggctcatttcctggccgctcctgggcttcgcggatagaagagattactcacactccttctcaagcacagaaccagttgtactgagctttttgctaagctgtttcagccaagaatggctgtggaatctggagtgatttcaaccctgatacctcaggatcctccggaacaagaactaatactagtgaaagtagaagataacttttcctgggatgagaaatttaagcagaatgggagtactcaatcctgccaagaattgtttcgtcagcaattcagaaaattttgctaccaggagacacctgggccccgggaggctctgagccgactccaggaactttgctatcagtggctaatgccagagttgcacacaaaggagcagatcttagaactgctggtactggagcagttcctgagcattctgcctgaggagctgcagatctgggttcagcaacataaatccagaaagcggcgaggaagctgtgaccctgttggaggatttagagagggagtttgatgacccaggcagcaggtcccagctagtccacagggaccagcagtgccatggaaggatttaacatgtctcagagcatcccaagagtcaacagacatccacctccagcccttaaagacacagctgaaatcctggaaaccatgcctttcccctaaaagtgatttttcctgaagaacacatcgtcaattaaatcacctgcaacccaaaatcttccatctccaggcgctactttctggcaaggcatatcatgaggtagtgaagcacctacaagaaacttataactcaaggttgtaaaatgggattggtgctcttaacatccaatcacagtggggcctctccaaaatttaactcatgactagtgaaagtgtgaaggtcccttatcctcgaggcggtaaccttacgacggaagaactcgtagggctacggccgcagcatcggcaggaca

SEQ ID NO: 150346 - DNA, 875 bp, Homo Sapiens
ccaaccccggtcgcggcttccatctgtgccattcactttcggtgctgcaaccactgcaatggagatgacactcattgttgcgttaatttctgccaccgtttcttcatcagtgggaaactgatatatctggaccccattgctgaccagttcactcatgatcttactcttgaatttgtgcagttcattcttggcaatggtgtcagcttttgcaattattggaatgatgttcaccttactgtccagctttttcatggtgaccagatccagggactttagtgaatgtccagtaggggcaataaagtagaggcaggcatggatcctcgtgtcatggtagttgaagagagaacgtttaatcttcaattcctcttgcaggtaggcctcgaactgggcatcaatatattctactatcggcttatagctgtcatctttatttatctggtctccaaatcccacggtgtcaacaatggttaacttcagccgtacattgctttcctgaagctcataacttctggcttttaaccgaacacctggttcattgtgagtagctgggtcactttcaaatttggtgttgaacaaagtgtccattaacgtggatttgccaatgcctgtctcaccaacacaaaggatgttgaaacagaatccttgagaagtagacttgttgaccagctggtcagggaggctgtcaaatcccacatggccagacaaagacaagtttcgaagctcttcattagacggtctccccacggccacggccatcgcagctgcggcaccggctccggctgcgcccgggtgctttacgccgactccggctgctgctagtactcgggctccggccctcgtgccgattacacacccagcctcgtactagctatgtt

SEQ ID NO: 150347 - DNA, 471 bp, Homo Sapiens
gaagaatattctcagaaatattctcagaggacaagaatatcacaccttttaggcaatagaggaccaagccccacaactaaaaaatccccaaaacatttggcctttaaatttacctgggatggatcctgctatctcctcatccattcatgtccccccaaaatcccaagatgtacctgtcatctttatttatctggtctccaaatcccacggtgtcaacaatggttaacttcagccgtacattgctttcctgaagctcataacttctggcttttaaccgaacacctggttcattgtgagtagctgggtcactttcaaatttggtgttgaacaaagtgtccattaacgtggatttgccaatgcctgtctcacctacataaccacaaaagaaaaatcagagaatgtgtcaatgtctctcagacatcagttcaattcatcagtattttttattagtcatgattatgagagtttaaa

SEQ ID NO: 150348 - DNA, 912 bp, Homo Sapiens
cgaaccccttcatggcacaccagccctcccgcacttccaccgaattctcctccgcactgctccactgggattccagcaccacagcttctttgcagtgagacctgggtaccttcgccttcagccgggcccatccgctcccgcagccctgcattctcttgcgccaggctctgcttctcctctgacaggagcatcagctgccgctccagatccagacagcgctgctgtaattcgtccccctcctcagcctcctcacttaggaaatagtacctgcgggactggctgtcaaagttgccatacgtctctggtgacagggagtcaggagtgtctttggtcatgagctcttggatggcttccatcaccacatgctgaaccgattcttccagcgtcatgattctctggatgtggtcctgctttttctcgcaactgatggcacagcccagcaccagctgaagcagcttgccgagctctgccgggtctgagaactctccaatgaggctcacatctgggagatgctcttctgacacaggatgcgccaggacatcctgggagtactctactaggctccgtaagaccatcttcagattgctgaccttcagcttccagttgggacctggatcttccgagatgccctggagccatgcctcgttgaaccaggaggggtctatctggttcagcacataggctacggcaaggccgctgctcaggtcctgagggctggcacagggagacggaacgtggaacgtctgtaaccaggtgagcagagacccgcatagctcagctttgtccacgctcatggctcccgatcggattcaatccaggccacggagccccggcgccgcagcagcctccgggtccgccaccagcgagcgcccgcagccccctcgtgccgattaacaccagctcgtactgcta

SEQ ID NO: 150349 - DNA, 1051 bp, Homo Sapiens
  misc_feature (157)..(157): n is a, c, g, or t
ccaggtaaaggaaaagaaagaagggccagggcgcgttggctccatgcccgtaatccttccagggccttgtccctcctgggcccaggttagtcagcgcctggtcccggtgtggcagttccgcaaacttcccttttccagttgggcacagcgcaggcgntcatctcccctgccactttccagcctgaagttctcttcctgcaactgctccagctgggatgccagcagcagcagcttcttggcagtgagacctggggtaccctcgccttcaggccggcccatccgttcccgcagccctgcattctcttgcgccaggctctgcttctcctctgacaggagcatcagctgccgctccagatccagacagcgctgctgtaattcgtccccctcctcagcctcctcacttaggaaatagtacctgcgggactggctgtcaaagttgccatacgtctctggtgacagggagtcaggagtgtctttggtcatgagctcttggatggcttccatcaccacatgctgaaccgattcttccagcgtcatgattctctggatgtggtcctgctttttctcgcaactgatggcacagcccagcaccagctgaagcagcttgccgagctctgccgggtctgagaactctccaatgaggctcacatctgggagatgctcttctgacacaggatgcgccaggacatcctgggagtactctactaggctccgtaagaccatcttcagattgctgaccagtctgtcctctaatcaggagtccacttgtcaccttcagcttccagttgggacctggatcttccgagatgccctggagccatgcctcgttgaaccaggaggggtctatctggttcagcacataggctacggcaaggccgctgctcaggtcctgagggctggcacagggagacggaacgtggaacgtctgtaaccccagacacccgattacagcccactcatgcgcagccgtacgcacccgggggcctcggatgctcgtccatatccccacaacctcctcccgcgtggttttccagactccagccctgggagc

SEQ ID NO: 150350 - DNA, 867 bp, Homo Sapiens
tacatggccacagagccctctctgcctgcccttcatgcctgggggctgtgtgccctggtcccaccggctccacagctgtcagagccacaacccttccgcacccttagcaggtatgccccggaacagcccctgctgtccacttcttcccatcccacagctcccaagctggttcagccaccatcttcccttgctagcttcttctactctcaagcactccatccagcagccagggatctttctagaatacaaatctcttcaatagcagacaggtaaaagaaaagaaagaaggccaggcgcggtggctcatgcctgtaagttaatttttatggttgtgtatgtgttgcttgtcactagaatgatggctgtgtggggcaggtttttgtctgtgttattccttgctgaatgcccaggcctggcacagggtgagtactccatagatgaatggatgaacaaatggttgatcaccagacatctgtccctcttcctgcccatcacccaggacatgtgcctagctggcccgtccctggtcatctcttcaccagtctgtcctctaatcaggagtccacttgtcaccttcagcttccagttgggacctggatcttccgagatgccctggagccatgcctcgttgaaccaggaggggtctatctggttcagcacataggctacggcaaggccgctgctcaggtcctgagggctggcacagggagacggaacgtggaacgtctgtaaccaggtgagcagagacccgcatagctcagctttgtccacgctcatggctcccgatcggattcaatccaggccacggagccccggcgccgcagcagcctccgggtccgatcccgggaatccggaccggtccagcct

SEQ ID NO: 150351 - DNA, 963 bp, Homo Sapiens
agtggttattgagtggccaaacccaaccctgtttgccaacactgtcgtgcctcttggtgatgaacatgtggtttcgatgctgactgaagactttggggataaaagccagaagtacgggttagaattgaagtgagattcttccattcgtaccctctctctctctttcctcctgccgtcttatgccttgctcgctttccagggctcctgaactttctgtaaacgaaattgtctaaggttacagggtccaggcagggtgcagccaccagaagaacttgtggagaacctcaggaattatttgtcagcagtcagtctggaaggcaggcagaccccccagccagcaatccaaagacgggtggatataataacagcagtctagtgctaccctctacgtggatacaagagaaataaatccaattcccagaaactaagacgaattctatcaccagcgtttgggtttcactcctaggctcagagactggtccttgttcgttcccaggccacaggtaaccaggggtcagagaacattagagatggaggaggaggagggtctgtgcccctgaggagtggcttcagaaggcaaagctgagggctgggggatgcacaagaccttgtggcaggcacagtgccagttcaggcccagccacttcctctagccttccccccacttcttcgaggacttcgccccctgcctacccgaggccttgtgccaagaagtacctccctcagcctgcaccgtggtctatctactggagaccccagctgtcccctcaaaaccttcgctcccctgagacagttcctgggagccttctcctgatgtcgtcccctacccctttctcaaagacccttccttgggacgtccctccttcccctccagggagctgaactctgccacccaccagacaggcacccgccccactaaacccgcccattccttcccatcgcccgctcctccacaaccacccc

SEQ ID NO: 150352 - DNA, 1009 bp, Homo Sapiens
cacctggcgtttcagacgttttttgcctttttccacgttctgttttcctcgccctcccggttcgtcccccccattgtcctggtttccttagttcatttccccttttttgcccgaaccggcgtgcccaaactctgactctcgatttaggatttgatttctctcagatgaactcgaacttgggaccggtaaggaccccgtgtctactggtcaaggcagtcacttagatcccaatgtcagaggtgtacgcccacttcacctgtcccctgtgattcactgctgaccaggattcacaagacactttatttattttggatttcaaatttgaggggccttcagctccaggacctgctaattcatccaaactgaatttccttttagttctcaattccttatttttttctatcatttggtcattctttggggaaagacaaggatatattgtctcccagtcttcttcagtaacttcatattcatactccgcattctccttattttccagaggcactccaagttggatgtagtctccctgatgaatggaatagacccttaaaggttccagacgcgctctgttcagccaaacaccatttagactcttgttgtccataattgtccattggccctcaggattctgcttcaaaacacagtggtttcgagaaatcatcagggggcagatttttgataccagttggtatgtgacaccaaatcctcgtcctacagtcacctcgcacccatcttccagcagcagccacccggcgctcatccccacccgccgcaggcaccagctccggccaccggcgcggtctcctgtgacgaagaagccgggctcccccatcgcctactcgaccccgggggcggtcagcaccgagcgagaccctgacctaggttctggctgcctctgtgcatcccctcagcttccatatctaaataacagacagaagcaatcgccacacgctcgcgatcgctgccaagccctcgtgccgattcaccacccaggcctcgcacctagcct

SEQ ID NO: 150353 - DNA, 1771 bp, Homo Sapiens
  misc_feature (25)..(25): n is a, c, g, or t
  misc_feature (1556)..(1611): n is a, c, g, or t
ccacagcccattcgtgggcctacgncccaccccacccagctgggccaggggacaagagatgaggctctccgttccttgtggtggcttccaccccaccaaactggcgggcagccgcagttcctgggggtccaccccgcccagagatgttgcacagcagggaggcagtttcccccgcggtacactgtgcctcctgctagccatgccacagccttccaggcaccacactttccctcccgcacatgtacagggagaggccgggaacgggcactggctgcttcacgaagccgggtcccagaccctcgaacataggctttggcgaggcagcggtaggtgtccgcatcaccaggcctggcagcctctagccgtagccggtatgttctggatgccaccttctccatggcaatgtgtggtccctcataggcagggcccaggctgcccacaccctctgtgtccagctgggctaccaggcggccgggcccaggtgcccccgcaggtgccatctcccaacctacagagtatgcagcatgacggcctgctgggggaagtgcccctgacacattgcacagcagttccaagggctcccctgggccgatccgacgttcaccaggccccactgtcactgccagctggctggacagcgtctgcacatccacgtgggccaggacggcccttttctctgcaatctgggcccagctgccatcaggatcctgaatccactcagcggcagtgcagtggtaggtgcctgcgtcccctgcctgggcaccccctactaccatgcggtaccgatcggtcccttccttgcccagacgaagctcccctgcagccaatcgctcagcatagggagctccagcctccacggccaagtctgaccggattcccaccacttcctgcagagttgaccgcccaactggtgcctcgggcacagatcgcccaaaggacactgccaggtgtgtgtgcttctgtgtgcttgtcctcgccaggcagcccagtgccagctcctgcccctcatgcaccgtcatgcgtgggggtgaggttggggcctggcggcctcggggccctgggggggcagcagacacctggaggacatctggaagaactctcagctccaccttgccgctgtagctgcccaggtagcgggtatcagtggagggggtgtggcactcataaatgccggcatcctgggcctgcaggcgggcaatcttgagcaccacggcatcaccttgtaggcgctgcacctgcacctcacccgccaccactcgggacttgaagacagcataggagaactgggtatccttggtactgacaatgcccagtgcagtatctggggcctcgggcctatacaggaaccactcgaagttctgctgggcagggccctcatagccggtcacattgcaggagatggagacagctgtgccagccacgcggtacaagggcccctcggggaccagcacctcccgggcccagcatcccattcctagcattagcagcagcagcagcggcagcgaaggcggcagcagcgtgggcctgagggcgcccatcctgcgcggccagctctnnnnnnnnnnnnnnnnnnnnnnnnnnnnnnnnnnnnnnnnnnnnnnnnnnnnnnnntgcccaggttgagggcaggaagcggggcagcgaggcgtgggtgcgccgagcgagctgaactggagcaaccgaatcccctccctccgccccatggaggaatccggaccggaccaccggcgttgtggtaggagtggtgcggggtggcgggtgtgcggggccg

SEQ ID NO: 150354 - DNA, 901 bp, Homo Sapiens
gtccgtccctttgagcctggcagtcctcagaccaagcagggcagcgagctccgagtgtgaggtacctgggtccctcggacagcccgggaggtgcccacagatggaaggagagtcccagtggtgaacaaagcaggatgtgccgtgcctgggcctcccccgggtttccggccaaagccagctgctcccccccacgggctgggccatcttggcgtgcaggctctgatgcgcgatgaggtgcgcgcgctgcttgaagctcttgtcgcactctccgcagccgaagggccgctcaccggtgtgcacacgccgatggtccagcaggtaggagcgcagcgagaagctcttgccgcagtcgctgcagccgaaaggcttctcgcccgtgtgtatgcgctggtggtcggccaggtaggcgctgcggctgaagctcttgccgcactcggaacaggagaagggcttctcgcccgtgtgcacgccttggtggcgcaccaggtccgaggagctgcggaagctcttgtcgcactcagggcacttgtgtggcttctcgcccgtgtgcgtgcgctggtgccgcgccaggtccgagccccagcggaagcgctttccacactgcccgcagctgtgcggcttctcggctgccaggtcccggaactggcgccggcgagtgggtggccgcccccgtcgcgcgcccaccactgggcccagggccgccctcggccggttctcgctctcccaggcctcagcctcctcggggctccaggacacagtcacgtcgctgcctgtctggcctggcaccaccggcaccatctcctgcagcagggacttctcactttggcctttgagcccaaaacccagggtggtgttccgggagttctcccgctcctcgtgccgatttacacgcggcctcatc

SEQ ID NO: 150355 - DNA, 1138 bp, Homo Sapiens
  misc_feature (32)..(32): n is a, c, g, or t
ggggatgaaggagatgccaatgtggttgtggncagcctcttcaggagacagggctcgtctcggccagatggggccctaatgctggccgtcaggctgctgaggtcagtctcactgatgtcgacgcaggaagtcagcggctgagcccaacttcacctggcgagcaccgcctgctgtcatctgtgatcttggctgtgaaggggctgccagggatgtgcttgtcattgtacttgaccagaatgctgtagtcgcctggcagagtcggcaggtaggtcactgtgcatgtcccatctttattgtcaatgcagctgatttctgcttttgaggggccctcaatagccaagtccagaccaccttctcctgcatcctctgtgacgatggtgaaggtggcagttttgttggccactccatacacgaggcctggaccgtatgcagaaacacttccactgttggggtagttcacgtagaactggagtgggctctcagggatgtggctgcccatgtatttgatgtgcatctcatggagcccgacctcagtgggggcatatctaacagtgaccgtgccgtccttgttgtccacaatctcaggtgtggctgtcttcccagaaggcatgtggacctctccagtgatttctcctttcctgacagcaaacggaatgaccaggtcaaaaggcttaaatcccaggccgttcatgtcactcactgggacataggcctcttcggtcaccatgacagtgaaggggctgttaggaatatcaacaccaccgaagcgcacatagatcacatatgtgcccggcttggcagctgtgtagaagatgtcataggttccatcttcattctcaatgacatcggcctcggcctcagtgccatctggggtcagaaccgtgcaggtcactttacccttcccggcagtcttggcatcaaccacaagcctacttcttcgccagttttcacagtggaggcgattccaggacccgtggccaggcacttgctggcatcacccgtctgtgtggctcggatgcgataaggagaaagtgggatgtcgtcacccccgtaggtgactcctatcatatagcgcccagtcttgtcggggatgtaaggtgacagcataccctcgtgccgattacacacgcagccgcac

SEQ ID NO: 150356 - DNA, 840 bp, Homo Sapiens
ggagcacttcagagcacttgtagaggagcagctccacctcaagtcactacctcatgtgttggtgcagcggcagatgggacagtcgcccccttccccaccctcttctgcctttcggtatgagtgctccacagccactcgggcctggcccacaggaggccctagaacaactggggaccccaggacaacaggggcaggagccttggtgggtgtggcccggaggtgcgtctgccggtggttcagccagagctcctggctggcaaagagagccttgcaatccacacactcgtagtggatggtgctggagctcaggggtggtgccttaggtgatggctcagctggcactgcctcctggggtgccatcatcttcaggtgcagctcctggtgctccaggagctggctgggtgacatcagcagttgaccacactccaggcactggtactggctctcctgcacaagggtctgatagaggcccgtgcctgaagctgtgtctgtggccacagtgactccgggatcagccacgcccaccagctcaaagtgctgctggggcacgtgggagttttggtgcataagcacctcttccagtgatccatacagctggttgcactcagagcagacatagcggtgctcaatgtacaggactgtctcctctgattcctcagtcatggcggcagcaaggccctgggctgcttccgccgtctcgcacgccccgggcccgggccacggctccccttgcacggccaccctaacgctgcgcccgctctagctctcgccgtcgcctctcgcctgaatccgtagcctctctcctcgtgccgattaacccagcctcgacctagccttatt

SEQ ID NO: 150357 - DNA, 1010 bp, Homo Sapiens
aaacgggggcccaacccccggggggcaaatctccacccggagggagtcagggccgattccctcccaacgcctggcacaaggcgatccccgcccaaactaatcttaggatgacagacagaactgaataagaccaggatcacggagaaggaaagtctgaaaaggcgcccttaaattcagatggctgcttatgccttttcgaagcaattaaagtgttcctgggtgttatttacacctttaaatttgtttccatactttggaaatacttttctatgttcaatctgagaaactgtttcctcagaaagtaatcgatcctccttgacgtttgtacccccagaagctggtctaccccctcgctaggcctcccagaggccctcaaggactcctagttgattccgagtcccacgtcagggaactaccaccttacataagtatactttgcggggagaaaggcagataagaaaatagggcgccaaaccttctccaccaacagccgtcacaccccacgaggactgtcctgcgggggctttcccctgggagccgcagctgttctgccgtatgggggaggggaacgctttccaacagtcatctcttcctcttcaggccagccaacgccgaccgcaccacagtctcctccgcccaagccctgtccccgtcccccgccccggcctgggtcggagccaaaccccacaggaatgcagcccggtcacatgcgctgcggcggtggacgtgcctctccccccgcgccccaaggagacccagcgccatcttgccctgacgcagttacaaaagtcacgggagaaatcctgtctcctcctccgcgccagcgccccaaagttttgcagaggccgagccggggccctcacctcgcgcagggacagtagaaaatggtcagggaagagccttgcgattcccttcgccactgcttgggttccatatcggcctcggcagcaacgatcaccatcgtcacttccctcgtgccgattcgccacccagcctcgtacctagccttt

SEQ ID NO: 150358 - DNA, 886 bp, Homo Sapiens
  misc_feature (89)..(89): n is a, c, g, or t
  misc_feature (231)..(231): n is a, c, g, or t
gggcctccttcccgaagggggtggggcccttcccagggggccttttccagacccctggcccccaggttgtctttttgcccaagcaggantgccttgatgacccttcagggcttcagcctgggcggtcctcttctttcttccttcttgttcatcatcctcctttttccccctcatcttcctttctgggataacccagctcccggaagttcccccagctcatcctcctctttngaggctgggttctcattcaaattgctgatagactgcaggtgagactcagcaatgcgctgcacagcctttcagcgaaggctggctgtgataggcaccaggggttggttctccttcgacttgagatggtgcccctctcctgaggctctctggctggggggaggcttcctcctctggtgaggagtgctctgagagccggaacagcatggcaggcgttggtctcctgcgccggatcatctccacctggcgcggggtcgagctggctagggggctgcgggcaccgagaactggatcttcttgcggtccttggggtccatggcgcgcgggttggtcggtggggctggggtgcgcgactcggggtcccggcggcggtctgtgctgggctcccccgcgcaggcggcgggctgtgcggcgagaggaggaggagggctgttcgcgcacggataaaaataccgtgcccgccgaggggagggcgcgggagcgggaggagggtcggcgcccgggctgggcgcgcccccaggctctcgggactcggggctcgccccccgcgctcgctgagccaggtctgtgcctcgctccctcgcgctccccggcctgggtgtctctgcgtctcggtgtctctcccctcctgagtgtctctgcgtctcggtgtctctcc

SEQ ID NO: 150359 - DNA, 1634 bp, Homo Sapiens
cacagaagttctttaggcccccctttttttggaacccagaggggggcgcgggggacccccgccaatggcccatctttttcccttgaaagaccttaaggtgatgggccatgcccgccgtaagatggagcttcctgttcctcgttcattggcagattgctggttcatgaacgagggcagggttggcggaatcaaacccaaagttccttggccccagggagtagttccatgggccccggttggggggcggcacctcctgggcaaggtacaatgactccatttgcccacgagatcttggtatccagactggatgatctctcccaagctcatcaaaagctccggggcacaaacactcctgctttccttcaaagcctggttcttggctactgcagtttcagaagcctgggttggcacaagctcgagcatggccaaaactggacctcagaggagaacatggtggcacacgtcccgatgcaccagcagacgatgggcttagtgaggcggccctccttgatgccccggcaaatcttatattcctcaagtggcccccaatttttccaagacccacaatcattttgactcctggagtgtcctgatagcgtaacaccatgatccatgaatgtggagcccggggtacctgtccccccccaatggccacgccttcatagacgccatccgtggtccgagagatgatattgttgagctcgttggacatgcctccggaacgtgagacataggccacgctgcctgggcggtacagtttggaggccaggatgttgtccagcatcccacctgtgttgccaatcttaaagcacccaggcttgatgcctccaacagtggcaggtccgatgatggtcactcccttctggtccgccttcttgatcagctttctcggtgagggcctcagggatgccttcagctatgatggcgatggtccggatctgggcatagttcatggtctccatggtgctgtcataggcagagcggagagaggcaaagttgatgagcacatctacctccgggtgcttcctcatggcatcagccatgttcttgaagacagggatcaggatctctttgtgcccccagtaaaacttctgcttgtggtccccagtgaaagggtagaccatggcagccactgagggctcgtctcgggagcagacatagtcaaagtccagcatgccttgcacggcccgggtctgcatgccccacacaatggccttggtgtggcggctgaagagggtggtgctctttccttgcagggatcttggacttgggactgaatcttgtggcatggcaggcttggccttctttgcaggcgccacctcatcggcctggactcagaaaaagatgctgtcctgctgggggctggcgtcgatgtgctcccgctggcgttgaggaggaagtttgcagtgtgggccgctgtgggtggctggttggggatgggccggtggcccagggccatgcccacaatggccgtcatgtgagtctctgtgccaaagacatggatggggatcccagtggtcttcccgacttctcccatcacccgtaagccctcctgatagttggggccacctcttcggactaagattgtagcttcgcctcgtgccgaattctacacccaggcctcgtacctagcc

SEQ ID NO: 150360 - DNA, 996 bp, Homo Sapiens
gggagttcccctttaggagtctcactttcggctgggcatttctgggcttcatggggggcagatctggccgtgggggcaatggaggagccgaaaggggcacctgccccagctccaactccctgccttcctggtcactgctgttccctgagtcctcagcagtagcctgaccgtggaactggtagatactcacggcctcccaggccttgatttcgcagcggcagaaggggcaggtctggctgtccgagtgctgccaggcagccaggcagcagctgcagagcaggtgcccgcacggctcaatcttcacaatccttgttgctctcagcacagatcttgcagagctcaaatgtggagtccatggcccagtagagctgcagctgctcctctgacacgtggatgcgctgctggggttctgcctggccgagctcagtcaggtctgggttgtgggtctttccatctgggtagaggtagaagccgtccttctgtccctccaggagcacctgggacaggggtttgttggcagggatggtctgcaggatgctgccatctgagctcacatagccgatggcccactgccccaggcgagtacagctgggccggaagatgtaactgcctggcttgtccctgcaggcctgcagacgctcttggacctcatcataggtgaggaaggccatgtagcctgggtggttgactgccaggagctgccagttcttgaggagtgttggccatggctgaaagagcctggtgaagacgtcgaactcgaagatggacacgtgcccgctgcaggtgaggtcaatggtggtgcgcaaggccagggctgtgcagcctggttccacagggtggcaggtgcccaggagggactcaaactcagcccagggcagcacacaccgggctccgcaactttccctccagaaggtgtgggcgggggccttggtgagctggtacatgtgtccacaggtaccctcgtgccgattcgccacccaggcctcgctacctacc

SEQ ID NO: 150361 - DNA, 735 bp, Homo Sapiens
  misc_feature (723)..(723): n is a, c, g, or t
ggacttcttcctgggctgtagcaaggtcagtggaaaagttgactggaagatgctggatgaagctgttttccaagtgttcaaggactatatttctaaaatggacccagcctctaccctgggactaagcactgagtccatccatggctacagcatcagccacgtgaaacgagtgttggatgcagagccccccgagatgcctccttgccgtcgaggtgtcaataacatatcagtctccctcaaaggtctgaaggagaaatgcgtcgacagcctggtgttcgagacgctgatccccaagccgatgatgcagcactacataagcctcctgctgaagcaccggcgcctcgtcctctcgggccccagcggcacgggcaagacctacctgaccaatcgcttggccgagtacctggtggagcgctctggccgtgaggtcacagagggcatcgtcagcaccttcaacatgcaccagcagtcttgcaaggatctgcaactgtatctttccaacctagccaaccagatagaccgggaaacaggaattggggatgtgcccctggtgattctattggatgacctgagtgaagcaggctccatcagtgagttggtcaatggggccctcacctgcaagtatcataaatgtccctatattataggtaccaccaatcagcctgtaaaaatgacacccaaccatggcttgcacttgagcttcaggatgttgaccttctccancaacgtggagcc

SEQ ID NO: 150362 - DNA, 792 bp, Homo Sapiens
ggcgagagagtatgaagtcgacggcgcgccgaattcggcacgagggttaccccactctggagctgcagggggcagtggccctggccagtttggttgcaggatggacagaggctcgttaggaggcagctccctgaccgacctggggccggggagcagcaggcgggtgtgcatgaccaactgcccaactctcattgtcatggtgggcctgcccgccaggggcaagacctacatctccaagaagctgactcgatacctgaactggattggtgtgcccactcgggagttcaatgttggccagtatcgccgggacgtggtcaagacctacaaatcttttgaattttttctccccgacaatgaagagggcctgaaaatcaggaagcagtgtgccctggcagccctccgtgacgtccggcggttccttagtgaggaggggggacatgtggcggtttttgatgccacaaacaccacccgagaacggagagcgaccatctttatttttggagaacagaatggctacaagactttttttgtcgagtccatctgtgtggatcctgaagtcatagctgccaacatcatgtcaatgaaactgggcagccctgactatgtcaaccgctacagtgatgaagcttacgaagacttcttgaggtcattgattgctttagaacacctacaattcctagattatacctgtaagggacatgtcatattaatatcatgattgggactaaaataactaaaataccttaggttaaataatttaaacctaattttataaacatatatttcttatta

SEQ ID NO: 150363 - DNA, 972 bp, Homo Sapiens
catgccctgtttcaggtttgcggccctctggtgcttcggctatgtttggctcggccacgagtctgggagtcccctggccgggtggtgcccaaccacgggtgtaacgtgttatgtgaggactcaacctaggtttcgccggattattagcctttctggcatcggtccaagtgtattctctgaaggttgggaattctctttggaaatctgcgtccgcaatggccaccggcctcgtacgacgagcacctagtcaaattatcgccagcaaccataatcatcaggagttctgtaacacatattcaggtgccaaccacttcttctgagatgaaccagtattctgttcaactgtcattagattatgcttggctttcactgaggcctcaaatgtatcaacattttcccggttcatactctttaacatcagcagctactcgctccagaatgtcatctggagatggtgatcgtgttctcgtactgctctgggggctgcttggttcagatggcacagacatgttgctatcttcagcaaggtatttatatttctgaacaattgcctgcctttggattcttctctgttctattagggcttcttcatcttcttcctctacatcaaagtcttcaaggttatcatcagacgaagattcctgctcaactttcattccttcagaaagacttcctttaaatttatcttcctttactttgcttctgctccttcgtctacgaccaccgcgtgatcgagaccgccttcgcaagcgtgatctgctcctccgacctctgtcccttctccgaggagatctgcttcttcttcttggagacctgctacgtctgagtggggaacgagacctccttctaatgggagatctacttcttcttcgggttggagaccatctattgatggggctggcatcttttgatctttcacgtctactgagcctcgtgccgaattcacacccagcctcgacctgcctatggttt

SEQ ID NO: 150364 - DNA, 907 bp, Homo Sapiens
cgggcgtgtttggttgtgtggtttgtgggccgcctctcttgtgctttttcttcctcgtgtgcttccagtttcatggggtttccctgtctttctcggggtgtgtctgttgggggtgtggtttccctctgcgtgttggcgtgttggttatgggctgtccgtgtaggatttttccatgatgtgatgccaggtcattggcattggccaggttcctggggcacagaagatggttgtgaggagggtctgggtggggcgccgtgcaggttccttgttgtgtcgcgtcagatgtgtgtattgtgcagtgagtagtgatccaggtgcagagtcggttcatagtaccgggaggtgagagcttctatagaagattggatcagtggtgggggtggcacttcatttctggtggcccgaggggtgtcgctggattctgagggggctcagtcccatccatggagttgtccagctccctgaggatagagccaatggtggctgacagggagatatcctcctctgcccaggaagaggggctcgggggtcagggcagggtcgggagccaggcgaagtgcagcctgcagctgttggagggtgttatggatgaggacatgcctgcggaggctgggtgctcgggggcccaggctgcgctggactttgtctagggagatgcggagcagggcttgctggtagctctgaaggcctgctggactccactcccacctctcctcctcctcttccaaatcagagtgtttcctcttcaagcctcccaccatgatgcccgcagctgccaggttcgccacgaccacctcctggaacgcccacagcgttgcgacccgccagtgccaggacccagccagtgaccggttggagcctctgctcacctcggcgggcctcgtgccgatttaaaacccggcctcta

SEQ ID NO: 150365 - DNA, 852 bp, Homo Sapiens
gcatggccatcgtgagcgttttttccgccccttaaaattcctcggagagtgtttttcttttcatttgtttatttactttgggaaaatcatttctttgtaatgacagaggaaagcacaccaaatgatgaacagaagcctcattgggagttaccactgtacgaaatcaatgcctggaggccttgaactagcattagacattcagagggaagtcagctgaggttaaggaaacatccacgcagcatctctgaggatacagaagtgggaggaggaaggtgacagccgcaatgcacacgctgtgtatctgtagcttggactcttcttcaggcagttcttgttttccttccacattggatggtaggggctgggggaggtttgcaaatgatcatgtggaagagaggccttgtgtatcagcctcgcagaagagccaatactgtagacagatatcacccagatgctccatgggccatgcccatgaagcgatgtgacattggtcctctgaacaatggttcagggagctcgtacaacagaagaacagtgggtccttcacaatctagggtctggcacaacttcctgaaggcatgctaggaaataggtttatcaacaaaacttggctgtccccaagggtaaaagtcattctcctagtttttactgcatgtatctaggtttcaaattaaagaacgagcagaaaggccgcaactgaaaagttatctggaatactgtggcactttaccaatctcttcttgcttataatatatggcagagccaacgaaagcctgttgatataaactttcattataataatcctgtactgtacactctcctcgtgccgattcacacccagctcgactagcc

SEQ ID NO: 150366 - DNA, 844 bp, Homo Sapiens
  misc_feature (19)..(19): n is a, c, g, or t
  misc_feature (235)..(235): n is a, c, g, or t
tcttcataaattgtaccancccagtgagaaccaagtggtttacccagggtcacgaagggtaaaatgaagtttccaactttctaagagaaaagttctcttttctcaggttcagaatctaaacacttactccttctcaggatggcatatatccctatatgccttgtcagccactggtatagagggcatagcagtttggaatccaatagcaacaactttttgtgcaaagtttggcatntagaatcatgcctcattaattcaaaaacattactaagggcctaccatgcattaagcactatgtatacaggtaaatttttaaaatatggagtttaccaacaataaagaaaataattacaaagcagtgtgatcagtgcgacaacatgggaggggaagagtaaaggaccagaacaaaggagcatctaatttgactgaaaagggctttaaaaagcctatgaaaacagaatcactgaagctgagtcctaagaggtaggtaggtattcacttggtcacaaagaaggatgcagaagtaatgatgtgtgcaaggctactgaggtggaaaacacacaaagcgcatttagggaagaagtggaagtacttgcaattgatcaggatgctctaaaaagagggatagtctgtggttctaaaaaccgtattaaaaataatttaaatctttatacttagaaagcacaaaggtattttcataagaaaacttgctaaaatgctaagttaaatacaaatcttagctgtgtaatgataaacaagggggctggggcaggaactgagaaattccctttgccacagaggctctatatcagcctcgtgccgattcgcacacccaggcctctac

SEQ ID NO: 150367 - DNA, 1041 bp, Homo Sapiens
cccggaggggccccctccagggggaacccgccggcgcacccgcggggccagaggccccgcggggccccaccggccaggcggcccccaagccgcggcctggccaggcaaaggcccaggaaggaggggcccgccaccaggcccgcttgtccccgaagaagacctctcagggggcttcaaatcagaggcgtccaggcaccgtatctgctgtccagcagaagtcgagttccacagcttaagagtctgcccaggtgccctggtctgcagaatgaggcaggtggtctcgctgccctgccagctctgaggtggtgtctggaatgccctgctgagcccccgggctcctggagagggtcgtctgctatttctctgtgttccagcacaacagaggcttgcggggacacacggaacccctcgaggtctcgttcgaggttctggccacctaactcggcttcctcttgagcaggacctggctcctgcttctgattgacacatggacctgtgtccggggatgcatgaccggaatctccagcacccatcatggactctccgctcccaggtgccagagccagggaggctgtagggcccactaggacatcgccggggggcttgccatcctgccctgcctccccactttctcctgtggtttccccagtgagcgaggtgcagcctggcaaggccctcctgtggcctccatcagcggccttcctcctgggagaggcaggtgatatggcactggcctgcccatcgggcccagccacctccagagccctctcttccagctcagtggggtctgtgctcaggtctgcgatgacaaccatcccgagggaggagcatcccaggctgctatgagtcccttccccttccctacccatcctgctgggggtctgctgggggtcaggggagcctgggccacagacccgggttccaggcaccaagaggcagggcccagtcctggagcagggcctgaggtaggagctgatgctgggtacagggacaccgtctccccctcgtgccggattcacacaccagcctcgtactagccga

SEQ ID NO: 150368 - DNA, 1029 bp, Homo Sapiens
gttttttggcacagctgttcccgtcttagattgagactccgacgtgaattcttggccattaagataggtcttggccatctggtgaaatggctcatcacacgaagcccggaccaggaactcggccaccaagtcccgctcactagtgcaatccatgctgttgagagtgatggccccaaagttgagttctgctcggacagctctcggtccacacccaggggattggcctgcaatggcccccactccccagggggcaggacattgatccgcttccgcacctccagcagccgctcagagtctcgggtcagtgccacggcgtggctcagaatccagtggctccagcggatgggctgggccctctgcaaatgggtgtaccccgggaagagaacatcacgttccgcctctgcccgatccaccatggtcctaatgagctcccagaggaggcccgagagcgtggagcaggtctgccgcatccacagcctgaggtctgtgaccacctggtcattccggctccgtcccgtgtgcagcttccctgccgttgcaccaatgagctccttcaggcggcgctcattggctgtgtggatgtcctcatcattggagttcagtttgaaggtgccctgggcccactcctcagccaccttgtctaggccatggagtatctggtccatctcggccttggtgaggagccctgccttctccaggcccctgctgtaggctttgctgccttgaacatccacctcccaaaggtgccggtcgtaggcaatggacgcgttgaacttctccatgatggggtccactgcacccacaaaccggccaccccaaagcttcccactctccgaggccatgttgggcggttcctcgtcgtccggaagcttcggtcctccgggtctggaagacaagaccggactgacgacctccttggccagcagggtcccccgggccgggctggctccgagttctgggcactgcgcttgagggagcgcagcccttggggacgcggacgtgagcgcgcgccacggtgctcggcgtcct

SEQ ID NO: 150369 - DNA, 658 bp, Homo Sapiens
  misc_feature (371)..(371): n is a, c, g, or t
  misc_feature (541)..(595): n is a, c, g, or t
ctcactagctcacctaccacaggtctgctggggcagagcgtcatttcagaggacagcgtggcaagaagcatccagggcccgggaagaacagagctggaaggtgtgcggctgggcagtcctcccactcaggcccacattctgcactgctgagtctctttgggggctcagctggctcaatctttgcagtctacaggattgaaggtcagtggaaatgtgaacataaaataagcaggaagtccatctatccctgctaaccctacctctggacacacggaatgctcagtgcagtgggaataggctccaggaagaccatggagggagatgctgcacagtgaacagtgaacctggctttctcatggccttccactagngtcactggcacactgtgctccaaggagccccaggctgtaataagtcacacttgagagttcatggaagcgtctgagaaccatgtatttgagatggaagttcacttgaaataataaattaatgcagataaaaaaatattgggggaattaaagggccaggcaccatggctcannnnnnnnnnnnnnnnnnnnnnnnnnnnnnnnnnnnnnnnnnnnnnnnnnnnnnnaccgagaccattccggcacgagcctcgtgccgattcaccacccagcctcgtacctagcctaat

SEQ ID NO: 150370 - DNA, 941 bp, Homo Sapiens
gtcagcctggggtttgaatcggcacgaggcccctgttggctctcctccatctctctcagcaggcacagctgtttggtctagaaatggaggacaggcctcatcgtctcctaattatgaaggacccttacactctttgcaaagccgaattgaagatcgtttagaaagactggatgatgctattcatgttctccggaaccatgcagtgggcccatccacagctatgcctggtggtcatggggacatgcatggaatcattggaccttctcataatggagccatgggtggtctgggctcagggtatggaactggccttctttcagccaacagacattcactcatggtggggacccatcgtgaagatggcgtggccctgagaggcagccattctcttctgccaaaccaggttccggttccacagcttcctgtccagtctgcgacttcccctgacctgaacccaccccaggacccttacagaggcatgccaccaggactacaggggcagagtgtctcctctggcagctctgagatcaaatccgatgacgagggtgatgagaacctgcaagacacgaaatcttcggaggacaagaaattagatgacgacaagaaggatatcaaatcaattactaggtcaagatctagcaataatgacgatgaggacctgacaccagagcagaaggcagagcgtgagaaggagccgcgaggattggccaacaatgccccgagagcgtctgcggggttccgtgacatcaaccgaggctttcaaaagagctccggccgcatggttgcaggctccacctcaaagagtgacaggccccaggaccaaggccctgatccttccaccagggggtgggccgtcatccctcatcctggagcaccagtcccgaaaagggatctgatccgaaacccgcgtgtctgaagcacggggcacaaagggtcccgac

SEQ ID NO: 150371 - DNA, 1282 bp, Homo Sapiens
attttttggggccctccaataaaggtttttccccggttaaaaccttaaaaaggtgtttttttcttatacaggggtgtccgggttccccttgaaagcccaattttcccttcccagtttaacaggcggcggaaacaggttcattaagtccccgggtggtgggtttggttccccgcaggatccttccatggttgaaccggaattcagcatttccccgcagctttcacaaagttcgcagtgggcttcgttttcaacctgcacagtgccccaagggatactgccgcgcccctcatcatcttgttgcctatcttcagttcttctgtgctgccaatgacagcaaacggcaggtgggcgttcatgggtcccattgatctctgcccacggactcatcatctgtaggaaactgatagatctggactccggttgctgacaagctcgctggtgattttgattttgaactttgttagctcactcttcgaaatggcatctgctttggcaatgatggggatgatgttcaccttactgtccagcttcttcatagtcactaggtccagagacttcagggaatgacccgtgggggcaatgaaatacaagcagacatggattcgggagtcatggtaggtgtgtagcactcttcggatctttagctcttcctgcaggtaggcctcgaattgtgcatcgatgaattccacgataggcttgtagctgtcctctttgttgatctggtccccaaagccaactgtgctaacgatcgtgagctttagcctcacgttgctctcttggaggtcataggtattagactggagctggacacccggctgtgtgtgggtggctggctccccttcgaatttggtgttgaacagggtgtccatgagggtggacttgcccaaacctgtctctcccacgcacaggatgttgaagcagaagccctggctgacggacttattcaccagctggtcaggcaagctgtcaaaccccacatgtccagccagggggacagttcggcaaccttcacccacctggcgagctatatcggtcgctgccatcgctcctgcgtccgccagggctgccacgggtgccgccgcaacgggagctactgcacaggaaacagaggagctcctccgactaagagaaagtgttacacttcgggcgcgaccaagtccggtggggggaggtgcaagggaggggccccctcgccgctgctcctaccccacctccccctcgtgccgtgttcaccacccgctctcgtacctgcacgtcctgttttctttctttttcttttcta

SEQ ID NO: 150372 - DNA, 724 bp, Homo Sapiens
gaaggtgactcgtcaaagttttattagttggtgcatggatagtgatgttacagagtctaggccccaggggctctcccaagctgcagcttcccctccttcctcagggcagggccaggccaggccagatggttttcagcagcctcttagccgtgggctcctctaaggcagaggcagtggaagggaagggaaacaggagagaggaaaggccagaaggaatagaaaaggaaagtggttttgcgtcagagtgtggcagaggcagtccctcaaagaacctctgatgtcccctagcccaggcccagatagagttccagggcctgacctccctgccaggccccaggctggccagcatgtgctgtgagaagggatacattgcagggccgtcagaaggcaggagggtgggctaggccaaggagttcctctccccatagaccctcctgggcccttcaagatgagggctcctcttctcagatcatgtggaaaccacttggggagctgtaacggggtgaggtgggtcctgactagcctggaaagtagaggtccacatctgggtgcgggagggagctaaggtttttggcttgggaatctctggggtccaacctgcagtctggtatttacatgggtctcccaggactgaagttgcctggctcctcggcaagagagcttgcttgcctcctgtggccttgcaggtgcctcgtgccgattcaccacccagctctactgccta

SEQ ID NO: 150373 - DNA, 1081 bp, Homo Sapiens
  misc_feature (827)..(888): n is a, c, g, or t
  misc_feature (926)..(952): n is a, c, g, or t
ctcgtgcatcagcccggcgtgtggggttgtcggcactgcttcaggtctctctcttttccacaggcttttttcgcggcaccttctcttcgcctccccggttcgccccctgggtggccctgactctctagacacgcggagctcggttctactggactggcctcaccaatttaccccggtttggtcggcatctgggatggcccgccataatcaacacggaagaaatacttatgctctcgggccatagactatcaagtatagccatcagtctgcccaaggcaccaggcccagtcagcagacggattgagacacatacgtttgggaagacggctaggaagtagtcagccccacaggggagaggacactgcatgtccagatgggggcacgcaaaatgatacctccaccctctaagccctggaatctgtgaatgtgacctcacttgataaaagggccttttcacatgtaattaaactaaggatatcgaaatgagattatcctaggtttcaggcgggtcctaccttcgaacgacgatccgacctcttacgacattaaacagggagattggagacagacatggggagaaggccatgtgaagacggaggcaggaactcctgtgatgcggccacaagccacagagggcctggagccaccaggagctggaagaggcaggagggatcctcccctagcacctgtgaagggaacagggtcctgcccacacctttatttttgacttttggcctccagaattgtaacgaataaatttctgttgtttgaagccacgcagtgtgtataaatttgctactgcggtcaggccgggcgcggtggctcannnnnnnnnnnnnnnnnnnnnnnnnnnnnnnnnnnnnnnnnnnnnnnnnnnnnnnnnnnnnnaccatcctggctaacatggtgaaaccgcatctctaccnnnnnnnnnnnnnnnnnnnnnnnnnnntttttactgcagtcacaaagaactagtacactgcccttcttggtggtgggtcccgggctctccgaggtcccccagggtcaaggttggctttctgcctcgtgccgatttaacacccagcctgtacctagg

SEQ ID NO: 150374 - DNA, 1049 bp, Homo Sapiens
aagtggaagagcaggcctgggtgtgtaatcggacgaggcttagccgacctaatcctcactggccgtcacaattagatcttatcacggaggctggggccaggcagccttcggttcgggtgggcccatggaccccagtccaacgccgagggaataggaccatccaaaagcggaaccttcgcctcagaaaaagggtgcgggacccctcctcaccgtgcggtcacggtacggacagggtagatcacaggctgagggacagagcaaagacccctgaggccggacacctggggtcctgccgggcccctccccacgagagttccctgtgtctgtgccaatcgttttcgtctttctttgccgcagtttcttttcctgtaaatcatggttaatgacattaaccttcttaccatcaggggttagttgtggttgtgataaataattactaccgttattaagcaattgcaatttgcagtgtgccaggcactgtgccaagtattttgcttcgatgatttcacgtcatcttcaaaacaacctcatgagggctgggtcagttagaacctaaacaaactagagacctggttgcaacccctcaggctctgctgatgctgtccccctttgttcctgcagcgtggaccctgccagcagccaggccatggagctctctgatgtcaccctcattgagggtgtgggtaatgaggtgatggtggtggcaggtgtggtggtgctgattctagccttggtcctagcttggtctctaactacgtagcagacagggtagcaaacagtcatgggcggctattgtgtcagcaggcgacacatcgtctcactggggatgtgacactgttgagcagcacccgagcaatgattccaacataagcaatatcctgaaaaagccgatgatgatacaggcgctgaaaaaacacgaacgggcttgattcgcatggtgttttgcggcaccggtattagcctacttgccgacaagccatttaggccaacgttggggggaacaacaaagggcgtgacctttttcaatttccctcgaggtcttctccctg

SEQ ID NO: 150375 - DNA, 1161 bp, Homo Sapiens
ctcgtcgtcgtgtcctctcttcgcagtgtttctcacctgttcggctctcgatctctcactctgggggtgctctcctcccgccaagtgtgtggcgctctgtgtgtccgcgcgtctcggcctcgtggtgtgtgcgcctcgaccccacaatggggtgcccattaagcttctcgcgatctccagcccccggaacgggcccattgtcggaggtctcgattcatcccggcgtggaccctgtggaccaggatgtacccctgtcatccggatcactcctcagcaaatctcgtgaaccattagatatttcgcagaggtcagtctggatccgagacttgacacatctgggggattccaccagcccagttgaagatccctgcaatgcccccagccaccaagattccgaggggccctgagctccactgaccctctttccctccggagtgaagatatttttcagcccattcatatgtcatgaaatacattccactagctgggacatctcgcataagggtaagcacagtccctttgtagatgcctcggatcccaaactcctggtacagcttctttgcacagtccaaggtaccagtgtacttgctttctcctgaagaagcctgaatctgtaataagcacttgatccgttctccaggagtcatgattcctgtggtgaatacgccagataacatcccagctgcaaaaagctggggatagctgagcacatcttctgggtgtttctgttgtagtttcttccccaaaccaaacccaaagaagcacacggcaaacatgggagtgaccccgatgataggggcagccattccccgatatagccccgtgatgccctctctaaaaagagtcttccggaaacagtcaaaggtcccagagtacatgggaggttgtccaggcaaactcggtggctgtgtctgcagtcggaccttgaccgtgtccagagggtgaccgacgaacaccaggcacacgccgccaaagccgccggccagcaggttcttgagcgggctgatgggttttggctggtcggccatggtcagtccgtctgtcactccgtctgtcagttctcgggccgtcctggcttctcagccccagctgcagtgccggcgccgccgacctttcacccaccctcgtgccgattcgaccacccagcctcgtacctcgcca

SEQ ID NO: 150376 - DNA, 1342 bp, Homo Sapiens
taccaaggccctggagcagctggcctgcaagctgtgtccccatgcgctgagacaccaccagttcctgcaacattcctctcctgggagccccagcctgggactgcaactcctggctcctaccctggatcttctagctccgccaggcagccctgttcggaatgcacacaatgagatccttgaagagccacatcactgtcccctccagaaatacactcggctgcagactccctcctccttccccactctggccaccctgaaagaagaaggacagcgtaaggcctgggcctcctttgaccctaaggcccttctgcccctcccggaggcctcctacctgcccagctgccaactcaatcgccgcctggcttggtcctggctctgtctgctgccctctgccttctgcccagcccaggttttacttggggttctggtggcttcatctcataaaggttgtctgcaacttcgggaccgaagtggttccctgccctgcctgctcctggccaagcactctcaacccctcagtgacccacggggtgataggctgcctggtgcgggcagagaggtttcacgttgagtcgtagagagggacgtgaggaagcagcttcccttcctggaaggagctgagcatgccaggcttcatccagaagcagcaggccagagtctatgtccagttctttctggctgatgccctgatcctgcctgtgcccagaccctgccttcattcagcaacaccctcaacacctcagacagatcccaccgggccagagggaccccacctaggacagagccggctcttcttgctctgccacaaggaggccctcatgaagcgtaattttgtgtgtccccccaggagcaagtccagaggtgcccaagcccgccctcagtttctatgtgttggggagctggcttgggggcacccagaggaaggagggtactggatgggggctgcccgagccccaggcaaatgacgacaatgatcagaaggttcacctcattttctttggctcttcagtccgctggtttgagttcttgcacccgggacaggtgtaccggactcgttagctcctggcccgctacaccaatgttgtttgaaaaggattggttcatcctgcatatctcggcgtccctctggagtggctggtgtgcatcctgctcaatgtccggacactggatctgaagcttgaaagtttcaggatatccaagatgtcggggagccaacaaagtcttgctgatcctcaatgaccgacctggccgtgaccaatttccagattcgtggcgcttcccgaggaattggccggatatgtgaacctgggttcttggtcaactgggaccgggcccatgtttg

SEQ ID NO: 150377 - DNA, 1052 bp, Homo Sapiens
gacgcgccggcacagcaaaaatggcggcggcattacgggtggcggcggtcggggcaaggctcagcgttctggcgagcggtctccgcgccgcggtccgcagcctttgcagccaggccacctctgttaacgaacgcatcgaaaacaagcgccggaccgcgctgctgggagggggccaacgccgtattgacgcgcagcacaagcgaggaaagctaacagccagggagaggatcagtctcttgctggaccctggcagctttgttgagagcgacatgtttgtggaacacagatgtgcagattttggaatggctgctgataagaataagtttcctggagacagcgtggtcactggacgaggccgaatcaatggaagattggtttatgtcttcagtcaggattttacagtttttggaggcagtctgtcaggagcacatgcccaaaagatctgcaaaatcatggaccaggccataacggtgggggctccagtgattgggctgaatgactctgggggagcacggatccaagaaggagtggagtctttggctggctatgcagacatctttctgaggaatgttacggcatccggagtcatccctcagatttctctgatcatgggcccatgtgctggtggggccgtctactccccagccctaacagacttcacgttcatggtaaaggacacctcctacctgttcatcactggccctgatgttgtgaagtctgtcaccaatgaggatgttacccaggaggagctcggtggtgccaagacccacaccaccatgtcaggtgtggcccacagagcttttgaaaatgatgttgatgccttgtgtaatctccgggatttcttcaactacctgcccctgagcagtcaggacccggcctcccgtccgtgagtgccacgatcccagtgacccgtctggttcctgagcttgacacaatttgtccctttggaatcaaccaaagcctacaacatggtgggacatcataccctcctgttggtgaatgaacgtgaaattttttgagaacatggcccaatttatgcccaagaacattcc

SEQ ID NO: 150378 - DNA, 983 bp, Homo Sapiens
  misc_feature (93)..(93): n is a, c, g, or t
ctccacagtctcctgacgatgcatcatggatgccaccgtggatcgttgacagacccacgggtgcttgagagcctggtcagccgtgatgcgctntgctgggtttatggtcagcatctggttgatcaagttcttggcttcaggagttaccgtgtcccattctggtgatgggaaatcataggctccagccttgatctgctgatacagcttgtgctgatcctcatcccagaagggaggatagcccaccaggaggatatacaggatgaccccgcaggcccagatatccacaggttttccatagggatctttcctcaagacctcagggggacaagtaacctggggtgccagcaaaaccaaaccaagcctgctgctctccctgtacttcgatggctaggccaaaatcagccagcttgacggcggcacccttgcatttactcgccagcagcaggttctcaggcttcaggtccctgtggacgatgtcatgctggtggatgtggttaacactctccagaatctgatgtatacagtggctggcatctgcttcactgtagtactctctggccacaatgtcttcaaacagctccccgccggtaaccaaggtcaaacacgaggtagtgaaacccttcttcagaaatactgtcatggaggcgcacgatgtttggatgtttcagaagtcgacatatccgagcctcacgttctagtttctggtgatcccgggcagacaacttcttggtattgatgatttttgctgcgtactcctgcgtggaggttttcttcacacacctgcggaccacagagaaagcacccttgccaagctcctcgaagagctggtagtcgtcggtgaaacgggtgcaggtggcggtggtggccatgctggcgggcgggcggacgcggccggtgcagcccgcgccgacgtcggtgcacagtcaccgccgcccggccgagcctcgtgccgaattcaacaccaggcctcgtacctagcctaa

SEQ ID NO: 150379 - DNA, 1033 bp, Homo Sapiens
caccctaaagactcgtcggacgaagaagacgtcccacgccccccccacttagccaccaccccctgaggccgcccgaggcacactccggagcgccgcgagcaaagcgtggacaccctttctccacagcctgagtgacgcgcacccgagcagtgcaaccttaccacggctcagccgccctgccctcgagacccaccgagcagcagcaaacacagtcccagacctgtcccactggccagcgtggccatgaagccctggccaggaagtgagggcctgacctccgccatcatgcacacgggagaccgggttgtttttcagtgtagtcccggtgaggactcaaacaggcccagcaagccccagcagagccatgaggcaggaccaagttcattttcctgcccaaccactattcctcttccagaactccagttcaaagcctgcctcttcccaaagtctgcacagatgcctcctatttcctggccccagcagccagctcagcgcctctgtcctgagcaatctgcttctggggagtgtgtgcaggctctggggccagaacacccaggtctgcctcctgcttcgcagctctaccacttccaagttctgtgaactgctcaccttctgagcccccaccatctgtgaaatgggggagtaacaggacccacacttcagaggcttgttagaaggcttactcgagccaagacatgtcacatgcttggcactatgtggtccacagagggtgctgtattggcctgtctaccatgaaagacttggtgaaggctgggactggtgccccagttcctggcccggggcttgagaagcagctggcttcaaacacacagtgcgtgactgaatggaaggtggtgattcttttattttaccctcaaaaaaccaactaagggatgtcttttaaatcagtggctcccaaatgccaaaccagatttcctgggtagacacagaagtctgttctccctcgtgccgattcgacgcccggccttcggctgcctagcggcggtatgggggtttggggtgtgggggtggg

SEQ ID NO: 150380 - DNA, 1012 bp, Homo Sapiens
gtacaccttgtccttgggttcccccgtacctgaaggaggccctttttagcaataccggttcaggagtttccctcatcgattctttcccggcaaatggtccctcccctttattttgcccacagcgatccggatctttcccggagtaccggacaccatcactctgtccccggggcttgtagtcagggagtggctccactaagctttagttcatcatctttcgtgacccacattcatccatcgatctttcatgatttgctctaaagtgccctctcttgctgggattaagaatgagaaatttcttaagcaggttttcacagtccgtggacatgtagaatggaatacggtattttcccctcagtacccgttcccgcagctccttgaggttctgtccatcaaaaggcagggatccgctgaccagtgtatagaggataactcctaggctccacacatccacctcgggtccatcatatttttttgccctggaagagttctggggcagcataagggggactgccacagaaggtgtccagcttgttcccaaaggtgaattcattgctgaagccaaagtctgcaatcttgatgttcatatcagcatccaagagcaggttttctgcctttaagtctctatggacaataaacttctggtgacagtactgcacagcagacactatctggcggaatttggctcgagcctctttttctttcatcctgccatgagccactaggtaatcaaatacctctccgccactagcgtactccatgacaaggtagagcgttttctcagtctcaatcacttcaaataatttaactatgttgggatgattcaaaaccttcattattcttacttcgcggaatagtttctggaggctggaggagttcagttgagtcttgtcaatgatcttcacagctacctctttcccagtcaggatgtgtcgggccaacttcaccttggcaaaattaccctgccatggtctgcctctgccgattcacacccaggcctcgtactagccta

SEQ ID NO: 150381 - DNA, 1081 bp, Homo Sapiens
aagatagcggtgaattgcgctgcgtgctctccacctcttgtacccactcgccttttcttcgtgtcgtgttctctatactctcctctccccctggttactttgttttcccaaccgtctggacggtcaggcgtttattctcctcgctcccttttactgcttttacttagtttgtcgaatatgggtgccttacttagatccccaacgcttggttcgggacggagtaaagctgctattagggactgtggagtcccatcctgtataaatgtctgggttctgggaggacccctccaccggattaaggatgctttcggttcctgagacccggaagacaggcccacacctccagcccttctaaaacataggttagccacaacggttgttgaaagactggaaaaccgattccaaatagtacaggacatggtggacaggtcccataagggtgatacgaaaatcctcccaacaagggggattagggacgtagcagctcaggaaaaagttcaaggaaggcactagattggaaaggggagtgtgggcagatgctttgcttaaacatttaatgccctactgtgcaactctgagccaacttaccttgtcaactcaccaaacagattctaattatgttggaacaaattccaacataaaaacagtcggtatccatgacacttacaccaaggaatctcccaggcattatcaaagctacaggagacaacaggggataatgggagaatcttggcctgttattaaccaggatagctctatgaggaaaggtaagtctacatggaagagctgtgaataaaaattgcacaatcttactgggaagagctattttaaggtcaaacgcagaggctatgacagtccaagtacaatcccccaaacattagtaaactactatgtggcgccaagggaaggacacatacctgacatttctggcacatggtcatcactcataaacatttgctggatgcacaacaaactgttagagccaggaccaatagtcagaaaactatttttcaatgaaccagtggtcattccaggagtcaggaagccctcgtgccgattcacccacgcctcgtactagccg

SEQ ID NO: 150382 - DNA, 903 bp, Homo Sapiens
  misc_feature (14)..(14): n is a, c, g, or t
aacatgggtgttcnaaagctacactgttgccgtttggttcctgaaaaagcagctccttggtgtcgatgtcatacaccaggcaagtgttattttgatgtaccacggccagcttcttacgggaggcactcatgtccaagcagcgcacagctgtggcctgcttcagcaggacgatagcaaagagattgtccacgaagatcttcaggatctgtccattcttcagccccactaagaggccttctcttccaggagggccaccgatcaccttgatgtaacgaatgagagactccatctgccactcccgctccttcactccgctgaaggacaggcactgcagccgtttctcctggcacaggatgatgtgattggcacacaccaccaggaggttgcactcaaacttcttgataatcttctcctttacccggtaatgcatgtctgataagtcctctgaatacaactcatagatgaggattttctctggcagttggatagccatcgatttctgtagatggcaatcttcttgacaagctctttgcatttaatccgaactttctgctcagtgatcaggtgctgcacaatgacgtcagtcatgctatccctgtaggcatagcggtccttgtaaagcccatggactgtgctgaaaataagctggtagaaggaaatggtgccgtcctggcagccgaccaccacatagttggaatccggtttcgcttgacacgtccacacccaggagttctgctccccaacagtcccaagccgcactccatccttggtgaaaagagatacttgcttgtctgaaccccccagcaaatgtactcgcctttagtaaagtagctgatgcagcagggtcaagttcagtgccctcgtgccgattaacccagggtccgtcgctgccgtggcggggtg

SEQ ID NO: 150383 - DNA, 1317 bp, Homo Sapiens
tgttcccacatctgtaggctctccgcggcagcttccctcacacttcgtggtcagtttggcagaagtacaacagggctcaatgcctcggtaccttgatcagcctaggccaaggcagccacccactcgagttctgcacgtcgtcatcctccagctgttccaggaagcacagaggccctctcccggaaggtaggcccagtacaggctccggactgggtgctgacacacccatgaccttgttgttgtccatgagcgacacagggagctgaggcccgcagcccgtcccttcgcagacgcccctcgggcccaatctcaggcccttcagcacaacagcctgatcatccgagttcagattccgcaccagtagcacctcctcagcggtctcagtcacgtaggcctccatggtgggggctgtccaaggtttccacaaaaactccagaactggaagactgtgagctgctctccaggccctggctggggccttctgggcagcttctgccccagggcatcctccaggaacttcacacacacagcctcagccaagcctggctggcgcagggagaggcgggcaccatactggttgcagaaggtgagaagcacccgctccaccgggcagaggaagcagctgagtctctctgtgcactggtcccagaaggtcaggaagccaggccgagaggccgagaactgcaccacttcctgggcagagctggccgggatctcccaccgcctgctgaactcgcatactgcctccagtactcgggcttcccgcagcagccgctccagggcccatgcctcctggcagcgcaggggcccaaatgtgcccagtttcagcaggaggcgactgcagtggtacaggtgccggaccaaggcagcatccagagctggacaccccgtgctgagggggcgggcactgggtgagtctatgctgtcctcagccccagcctccgggctgcttggaggcctgtccccaggaacatcattgtcttcatcttcgtcttcattgaggaagcctgaagctctccaaggcatgctccacagtgatgctgagactggaggcccggctgcgagtcagaccttgtctctgcatgagcagactttctaggcgggtcacctcctgctccaggccctgcagctcaggaaactggccacggtagtcatccagggcagccattagggcccccagtgcctcctccaggctcctgtccccagaccctccggctgccgttgggactggggtctggacagccatggccaggcaaaggtctgaatgctgggtccagggctgcctcgtgcctgatttaaacccagcctcgtacctta

SEQ ID NO: 150384 - DNA, 1122 bp, Homo Sapiens
  misc_feature (262)..(262): n is a, c, g, or t
  misc_feature (389)..(389): n is a, c, g, or t
  misc_feature (392)..(392): n is a, c, g, or t
agcccctggccccttttgccaagtttttttggaaggagggggagattccaccacggtcggtttttaagaaatcccccccctttttactgtgttatgggctgccgccagaagggggccatggacccaaggggggggctccagtttttcttcccccttggtgctcccacctggtgggggctgcgttgagaaggaggcagtaagcgtctctggcccaaaggcctgcccgcagctggagcatcggtgccaggcagtcgcctggctnccgggcgcgttgggggggtcgtgacatagcgatggggcggccagcttggagggaaatgagaaagccttggggcaatgcgggcaaggataggggcgggcgtcggtggcgtggtgcgtgtggcggtggnccnccagcttggaagggtagcagaaggacttggggcagtcggggcacgggtaggggcgggtgggtgcgtgggtccagaggtgagccgccagcttggagcggtggccaaaggacttcgggcagtgtgggcacgggtgcgggcgggcgccgctgtgcgtgaggcggtgggctgccagcttggaggggtaggagaaggccttggggcagtctgggcatgggtggggtcgggcgcctccgtgtgctaagcggtgcgtggccagcttggacgggtacgagaaggccttgtcacagtcggggcagcggtgcgggcgctggggcgggggccgccggcgaggccggggaggcgagcccgcggacgcggtgggccctggagctgactggctgggcttctgcggtgggccctggtggggagcttctttggtcactggttccttgccagtgggactaggatcggtagccccggccgcggactccgcgcctcgctccagcatcttgctggcacaggaacccggcttttgacttagtctcagttcattgacgccgcgtcaactgcgcccttcttgccgttaaatttcatccctggcttggatggggccgtggaggatagaggggggacctgcaggacggcccctccccgggggcggggcttccggctcctcccgccacggccacggccgcagccgctgtcgccgctgctgcactgccctcggaccagcggagatcccgagaattcc

SEQ ID NO: 150385 - DNA, 1005 bp, Homo Sapiens
ttccctccataacttggggaaacttccatccactcgtttgatcaccacacccaggccatgggtcactagctttattagacatctcagcctggggcataaaggccaccagttgtcagcccacatagaccccgagtgtcagggggcaggtaattgggcacggttttcccattccagattattgataatgggcatccggaaaatgtgcgcccatacccgcccggagcactttgggctccccaggcatcccacacagcctttggtgagtaacactttgctgcagcctgccccagctgcagatctcagaattgtccccaggttcccagggtcacggagattgtcacaaatcaataataaaggcagtgaatgctgaagctgagtctttggatatgtcatcttaacatggtcaggcttggcaaaaatccccattattccttgtggcgttacgaggtcggaccaatccttgatatcctcaaatttcaccttaatgaggctgacacctttcagcttatcgactggcaactcctttaggtattctagacggctaaagaagaacatttttggcacagctccagccttgagagcgtctgaaatgagcctgcgaccttccagcaggatcttcccttgtttttcccgaaatggcctggactttactattgtcattacactgctcagcctcctgtccccgggataagctttatcgtagcgaagcccagactcttcccaggtgctgggagcgcgggatgcggactcctcgagcggttgtttctctcgttgctcctgggcactggcctcagatggtgccttgcggggctgcttcccaggagcgcgcttctgttccaccacctctccggaaggaaacaccactttcactgggctccgccgcagcgcccggacccagcgcctcgcgtcaaggtcccaagcctggaccacctgcagcaacggtcgcacgacaaacctcgcgggtctcaccagcgccgccatgttccctgagacccgggctgcccc

SEQ ID NO: 150386 - DNA, 1011 bp, Homo Sapiens
  misc_feature (88)..(108): n is a, c, g, or t
  misc_feature (773)..(875): n is a, c, g, or t
cccaaacatagcttcccaaggagcaaaagggctgaattttctttagttccaggaaaaccgcagggctactgggctctggatgtctcgnnnnnnnnnnnnnnnnnnnnnattctccaaatctcaagacggtgtctggcacataccattcaatacaagtttggtccctggaacccactgaatatgcatgtccagtaactattaactacatgtgttggtggcagggaagaaggtcgagcaaccggatctgctccatcatagcccgtctcagtcgcttcattcaagtcagcggggtgaggttgaggggattccaacttcacaagggcagatttctcatggactctctttctctggttgtactggaacactttctggcgttattcctctgctgggacagcatgaacttatgaaacgtggtcctgtctgccctaaagccagggtctcaccgacaaggacagcgatgctggggcgagaaataaagttcgtcctgggcctgcgtacggtacagcgcccttgggaagcccttgtggagttaagggtgatgcccacttctttgtctccctcattctgtttcggtggctctctcgttcccagttccaagctgcccacttgttagaggagccactgcttaccaggcatctttagtgggcacatcagcacattccacgattaatcacagctcctcacagttgcctctaagtagtgacactaccgaaggacgggagttcctcctcctgcagtctgaggacttgcactctctaacggagtagattccnnnnnnnnnnnnnnnnnnnnnnnnnnnnnnnnnnnnnnnnnnnnnnnnnnnnnnnnnnnnnnnnnnnnnnnnnnnnnnnnnnnnnnnnnnnnnnnnnnnnnnncagtaacacaacccgcggggccgcctcccgcccaccctcaggtgcaggagaccccgggccatgcatccttcagggcaggaaattgcctcgtgccgattcaaaccagcctcgtacctagcctattttcctccccctt

SEQ ID NO: 150387 - DNA, 579 bp, Homo Sapiens
  misc_feature (253)..(314): n is a, c, g, or t
gcagctcctggtactggcggccccgactgtccccccagaagctgaaaatgttggacactcctgagaaggcgcctgacagggggttgcaagtgtcgctgctcttctcgcagtcctccatcaggggctccccacccggcggctctccggggggcctggggctggagaagggcaccaggcggagggggctggagctgcggcctgggccctcatcctcactgctctcagggctggaggggccactggacgggctctnnnnnnnnnnnnnnnnnnnnnnnnnnnnnnnnnnnnnnnnnnnnnnnnnnnnnnnnnnnnnnaaggccgacacctcccctggctgctccgtgtccttgtccgtgcgcctgcggaaggacaacttgcgcttgcgttgccgactgaagccaccctctaactccgtactgccgggggagcccgggatcatgttggtatctcgcaggttgaaggtgatctccaggctggaccagaagtggtcggagaactcagggtacatgtccagcacctccagcaggtcgtcccgatggatcctcgtgccgattccaacaccaggcctcgtactagcta

SEQ ID NO: 150388 - DNA, 979 bp, Homo Sapiens
ctcgtcacctttggttttcttgccagggacagggtaagcgtccctctttccatggctttctgggatgaacttatagtagggggttgaggtagtgttcggaggcgcaggaaagtcaaactgggagtttcggggcctgtttggccttcagcatgatctcaaactgtgctccctgcctgcacacgaagctggccgtgcgctcgatgatggcgtgcattttagcggttgggggcaactccacgtcagacgggacgctcaatcctaagggggcaacgaagggctcttcattttcctctaaattttcggcctcatttttttctctctgtttggaaggctcctcctcctccgtcggctctgacgggtcgtaatagtcgctaccgtaagtgaaccccacggcattgtagctcccatcctctgctagtgcttcactcaatcgcttgtattcttcctcttgccttgcctcctcctcaagcaagtccgtatgcaaggctaaatacctctcttcatcacacagggcctctattcgcgcctcctcttcagacagctgataatctctgttccacgtggaatactcagcatcgtactcagaaaggtcatgcaggtgaccacgtccatcatatctgtcgatgaggatcttgtggtcccccatccaggggatgaggtgctgtccctgttcctgagccagggcccgctcgtcgtcccggaacagcttgcaggcatagccgaaaaccaagagctccactcggctgcccccaccgccggcaccgcctggcccggcctcctccttcgcgccgcttttcctctcgggtttggcgcggcccccgctcgcgccgtacatgacagcgtccccggcgtccaggctggtcctcttctgtgccgcgcgacgtccctgatacctccacttggcctaccccttcagtcaaagaccccgcatcccctcgtgccgaattcggcgcgccgtcgacttcataccctctccccc

SEQ ID NO: 150389 - DNA, 505 bp, Homo Sapiens
tttcttcacttttgttttctgccaggacagtgtagcgtccctctttcatggctttctggatgaacttatagtaggggttgaggtagtggtcgaagcgcagaaagtcaaactgggagttccgggcctgcttggccttcagcatgatctcaaactgtgctccctgcctgcacacgaagctggccgtgcgctcgatgatggcgtgcattttagcggttggtggcaactccacgtcagacgggacgctcaatcctaagggggcaacgaagggctcttcattttcctctaaattttcggcctcatttttttctctctgtttggaaggctcctcctcctccgtcggctctgacgggtcgtaatagtcgctaccgtaagtgaaccccacggcattgtagctcccatcctctgctagtgcttcactcaatcgcttgtattcttcctcttgaataaaaatgagaattttatcaacaaaaatagaaaattactgagaaaaactttatatatttct

SEQ ID NO: 150390 - DNA, 1081 bp, Homo Sapiens
cttggcccggttctccatcccgcggaggaccccacgttcccccagagcgccttccagatttggggctcaaaaaatgtgggaagaccggttttagactggacccccctagcccgaaactattcggggaataaccgtgccatgaccccccccattatttgccccagagaaagatgaattgccggcctgaaggtaaatgagccaaacagtcaacccaatatttaccagggcttgtccagataaggggatcttaccagctggacagcagcacaaccattaataatcccacttggtgaaatgtgacaaactgctagcaggtgaacagaagacgcccagctcacactcttcctagcaagtgcctgcatttaggaaggaggtgcactgcccactgagagctggaagcccgctcccaacagcagcatttggaggacagaaccaccaaggggctctgagaaagctacctctggcttggagaaattggggtgacaggagcagggtcacagagctcaagagtatctggccggaaaagcccacggtttccctttgctccagcagatgcagcctcacactcccgaaagcctttgctccgttgctctgtgatcatatttctacttaatcctggggaagacactggggagggctctctacctcaagaagccctttgggctgcaataagagattctgggctggctgcgagctgcttgcataagaggaggaaagggcttcctcccaactactactgactggtctgaccctttgcttgatgcctaaagagctgtgcacactgcatagccagtaaggtcctctggctggagctgcccttcctgggtcttctgaaagagccacgcaatcagtctgtcagtgtagcaggagcacaagccagagatcaaataggccatgccaaattggcttccagaaatcctaaagctacagccaactctcctacataccacgttctcacggcacaggggtgtggaagcatatagcctgcatcctgctaagagctgggggaccccagtattctaccatccagttacctccggcacgagcctcgtgccgattacaccccagcctgtaccttagc

SEQ ID NO: 150391 - DNA, 968 bp, Homo Sapiens
tccccactgtgcaatggaagtcatgggtatgacacggtgtgattcacgagaagtgccaggatcaggcctggcgccgggtgtgcactcaagcacatggtggcggatgggggaggcactcgacacctccagctaagatggctgctctgtggacaccagtatgcgagaggtgtaaccctgtaagctcctggccagcccagcacctctaccagtattaccaagccccaccacctctgagggaccaaccggaagaatcgcaccaccctgttatgccaagtttccctgtcacaaagcccaggcctctcaggcccctctcatcccagcgtgaatgtcctataggcagtcttccgtcgctgccctgctctatctacccaggatcacggactgacacgctaccaacttcacttatttaactagtcctgcgaggggcatcatccgctccatgtccacggccagtccccagagcccaggagggctcgcacacaggcgctcggcagatactgagaaacaggaaagtggccgttcaccgggctgcttcctctcccaaggctaagcggcccctccacagattccggggcggggactcggtaagagccgatggaggagaggagcgaggggtccttcggcggcggccagcgcgcgatcctcccggctccgtccccacatgcgggtggaggggccggggctcctcccggtacgtgcgggcccccggacagcggcctctcggacgtgcccttcggcgctgccaagacccgtcctggtacttgccgagccacggaccgcggcggctaccgcccggcctccctcgaccaccctccgcagcagcatcgcccgcggacgggatccggcaacccctgaccgtgagcggcgggcgtctccggccaatcccggaccttcaggaagtcgcgccgctccagacacaggcgtgaggctgcctcgtgccgattcaaacccagcctcgtacctagccg

SEQ ID NO: 150392 - DNA, 1306 bp, Homo Sapiens
gacggcagtaactaccacggtcttaaggtagcgaggcctgggtggcgaattcggcacgagggtcccagccgccgcactaaacccggcccgtgcggtgattggacgcaggccccgggccgcggcggaggcgggcgatccgaaagaggctggtgctggctgcatggggaggcggcggcagcgggtggaccccgcggctggggcccgggccggggccctgcctgaggccatcgccgcgttgagtcggtcgctgccctcgggacccagccccgagatcttccgccgcgccaagttcgaccgtccggaggcgacctccgcgctctggcagctcctcttccgtgtgctctcgccactccctgcgggcaacgccttggcatcgctcgccctggaggtccaagcccgcttggtgaagtcagcactatgctcccaggctacccgaggctggcactggcacaactacctgaggatggctcgcagggcagtcgggagctgctgctggctctgtcctggctcttggcccgaggacctgtgcccgagcagatgctggcccaggcccgagtgcctctgggtgacgagatgactgtgtgccagtgtgaaggccctggccagccctggcccacctgcaccccacatggaagcagagggtcctgtggatgtccgccatgtgcagtggctgatgggaaagctgcggttccgggtggcgccagctggtgtccagtcagcaggagcaggtgcgccctcctgaagcaagatccagctgtacacacgcggctgccacagcgaccagagccttaggccatctgtctggtcactgaagcagagatgctcaggggacccagaagggaaggccagcagttggtggggactctggaagcgttagaaccagggcctggaggctgtcctggcgtggcggcgctctgagctggtcttctggcggtggatggacacggtcctgggcacctgtgccccggaggtgcctgctgcagcctcacagcccaccttcctgccctgggtccccgagcgcgggggtggcgagttggacctggtagtgccgggagctgcaggcactggagggagggagctgcggggaagctgaggagcgcaagcgggcggcttgggaaggcaagcttgaggctgtggacggggccacatttggagtgccccgcgggggcctctcggaaagggggggaaagacctggaaccctaagcatgctgcagcaaaaaggggccggcaacccaggcaccggcgtgaccaagatcggcgggccgcctcgggctgtatacaccaaaccaggccggaggggataaa

SEQ ID NO: 150393 - DNA, 1239 bp, Homo Sapiens
tgttctacgagagtgggccgtgttgttctgtgtctgttccgtcctgttctgtgccttgtccttccgccttgttgctgtcccgtggctttccgctctccccggtttcggttccccggctcctcagtgtcaccgttcactgttctggcgttggacccctttgcccatgcccccgccgcctcgacctgggctcccaccctgggctttttacccgcagacctcgcccccgatttctcccctcgtctcccggcgatgactgcttctcttgtagtgaagggcttgcggcaggccagctcagggaacggcagagttcctccaacgttccggctccagcctgtagatgtactggccatcgggcgtgcgctcctggcggtaggtcaggctgtaagcgagcatcgtgcccaccaggctggccagctgttgcttttcacgggtgctgtacagctgtgtgctcacggggcggagcttgggtgcaagaatgtccaggagcaggcagagggcatcgaggagcagggcctggggcgtggcccggctgcgcgtggctggcgcgatgccggacaccagcgtctggatcaggttcctcatctggctcatccggttctgggcctcctgctggctgctggggaaggtgatcctgggtgtgtggctggaagcaaacagcacatggaaggccacgggcaggaagggtgggtagcgcagcagctggaagctctggctgtgatgagcagcccccgccagcaggtcatcgaaggccagccagtcgagggccacacacacagcacccaggctggagtctcgcagccgcagacgcaggaagttgtcaaacaagccctggaccaccttctcgtgctcgcccgcagaggcagcggcatgcaggacacggtagaatcgctgtgaggcggaggtgagggagcccgcgtccccgtcacccagcaggagtgtgtcagcaggcagggcggggtcctggcccacacggcgcctctgggctcgaggcagctggaagacctcctgccacaccgagaagagccctctgcgctggtccttgaggcccacgcgtgtggcctgcacgtcccgcacgctcagctcccgctggccccggctgtacaggaactgcagggtgttgatgcaggcccggatgtcattgtcagttttctcacagagggcggccagcacacctgggtcggccctcatgccctgccgcagggagacctcctggagctgctgcaccagcctcgagggcag

SEQ ID NO: 150394 - DNA, 1057 bp, Homo Sapiens
  misc_feature (89)..(89): n is a, c, g, or t
acggggtgttggttctcctcctggagatgatgttccggtcatcccgcagcaaggggttcgcccggtctggagtgtagttgctgtggctncaacaggggctgggccggctctgggttcgtagatggtcactttctgtcaataggtgccagtcaccaggatgtcagcaggtaggagaggcacagcacggctgagctggcttttatctcgccgaactgctgcccatccgctgccatgtttcccagagcttcactgtgctgtcccaggagccggagcacacgcggtggtcctgcgctgccagtgaccacacccagcccctcatgggtactatttcgcttagtgcctaaggtcttgatcagaacctggttggactccgtccccagctgccgcaggtcccacaagttgacgttgcgatctcgggagcccgacagacagagtgacccaccctggagcagcagcactgagtcaacggaagccacgtggccttcggccaggcagaagtattcgacccagcgcccatcctctgcccagcgggacaggtgctgctccagcgcaatgcaggctgccggccagtcaaagttcttctcttccaccactgggtagggcgcgcgtacgcggcgtagcgcgcgtagcctccaggtgacatggtcagacacgaggtcgcggagcgcgtggcacacccgcgacaggacgtggagcacgaggcgggcgtccaggtaggagcagatctcgagcagcagctccgggggaaggctcagaaggcccggctcacttacggccgaaaccctggacgcggcccgaggctccgaagcgctcggggacgcggcgggtgtggatagctgcgaggggcgcgagaacgccagcccggattttggcggactgagaacgcgggccacgtaggccttggcctgcgcgtctgggtctgtctctgactctgggtccgagtcatcgtcccaggtgcgggaatcatcgcaccgccctaggggaagctccattgcgaccgggtgggcgctgccggcctcgccctcgtgccgaattcgccacccaggcctcgctcctt

SEQ ID NO: 150395 - DNA, 1509 bp, Homo Sapiens
ggtccggaattcccgggatggcaggcgagccggacgccgctcgcagcaccggagagggcgcactgcaaaggcgggcagcagaccgtggagagcccgggagcggagctggacaccgcctcggagggaagaaatgaggtagcggcggttcccggacccggccatgcccgtcccctgttctcggagcccagcgccgtctcggccaggccagcccggacactgagcgggccgagcgcgagtccccggcgtccggcggagcgaagatgcagtgagtccccgcgggactgctgcgcggggcccgccgcggccagccggacccagcatccgaccgcactttgggcgagctgctgacttgagaccagcccagccggggggctttccgtctccagcacccctcggagggccgctcccagtagttttattcttcgatcttgcccgggccgagcctggcaggggccggtggctcagcgggcctcgcacccggcgctccgccgccgccgccgcccagctgcgccggggcgccctccggagatgctgccgtggaagaagcacaagttcgagctgctggccgaggcgccgccgcggcaggcgtccaagcccaagggctacgctgtgagcctgcactactcggcgctcagctcgctggcgcgggcgtgccccgaaggcgcgcttagccgggtgggcagcatgttccgctccaagcgcaagaagctgcacatcactagcgaggacccaacttacaccgtgctctacctgggcaatgccaccaccatccaggcgcgcggcgacggctgcaccgaccttgctgtgggcaagatctggagcaagagcgaggcgggccgtcagggcaccaagatgaagctgacggtgagtgcgcagggtatccgcatggtgcacgccgaggagcgcgcgctgctccgcccgggccacctctacctgctgcacctcgtcaccatactgcgtgtccgacgcgcggctgcccaaggtcttctcctgggtgtaccggcacgagctgaagctcttggccgtgatgctgcgctgccactccgtgctggtgtctaattcccgaatatgcgcaggccatggccctgctgctttaccttactttggccaacgcgctggcggtatttaaacgcctcaagcggcgggacgacgcgcgtcaccagcagcaggagctggtgggcgcacacaccatcccgctagtgccgctgcgcaagctgctcctacacggaccctgctgctataaaccgccggtggagcgcagccgcagcgcgcccaagcttggctccatcaccgaggacctgctcggcgaacagctggagcaggagctgcaggaggacagaggaagaggagcaacccgaggggctgccggaggaggaggagaaccgtgcggcacgagggagatccagcagaggaggaggccgagcgcagcgtgcgctagtggtcgccatgcactttgagtgcggggacttgttggatactctggagaatggccgggggggaagccctaga

SEQ ID NO: 150396 - DNA, 885 bp, Homo Sapiens
  misc_feature (111)..(111): n is a, c, g, or t
cgggcagcaaggggggggagcgggaagcaggacacgtctcagtggccggcaatagaataatatgggcgcttgtaggagtggggaggagcaagaatgttagacccgcagagngcggtaatctctaaagaaaatatcagctcgagtggcaaaaaagttgtgcggggagacacgcgacacacagaataccccagccgggcaaggcgagagcaaagagtctcaggcaagcaacaaaatgcaagggagaaagaacgagcgtagagtggaaaatgtcaggaaaaaagctagaagcgcgcgtgcaaataaagagagccccagcaacagcacccgggatggtgcatgaatatgcaggatctcctcggcgactgtgaggtgggtcccctaacacacacagccgtcaggactgggtccaaaacccgcggaaactgtacagcgagtgtgcttaggggccggtgctccccacctctgaggggtgctggagatggaaagccccccgtttgggctggtctcaagtcagcagctcgcccaaagtgcggtcggatgctgggtccggctggccgcggcgggccccgcgcagcagtcccgcggggactcactgcatcttcgctccgccggacgccggggactcgcgctcggcccgctcagtgtccgggctggcctggccgagacggcgctgggctccgagaacaggggacgggcatggccgggtccgggaaccgccgctacctcatttcttccctccgaggcggtgtccagctccgctcccgggctctccacggtctgctgcccgcctttgcagtgcgccctctccggtgctgcgagcggcgtccggctcgcctgcccctcgtgccgaattcggcgcgcctcgacttcatactctctccccct

SEQ ID NO: 150397 - DNA, 1478 bp, Homo Sapiens
  misc_feature (416)..(477): n is a, c, g, or t
aactggggcagtaactctaacggttctaaggtagcgaggcctgggtggcgaattcggcacgaggctctctgcttcatgaccctgccctgcaccgcacactccacaacatgatgaagaagctcttcctgcagctcatcgctgagttcaagcgcctggggtcatcagtcatctacgccaacttcaaccgcatcatcctctgtacaaagaagcgccgtgtggaagatgccatcgcttacgtggagtacatcaccagcagcatccattcaaaggagaccttccattctctgacaatttctttctctcgatgctgggaatttcttctctggatggatccatctaactatggcggaatcaaaggaaaagtttcatctcgtattcactgtggactgcaagactcccagaaagcagggggagcnnnnnnnnnnnnnnnnnnnnnnnnnnnnnnnnnnnnnnnnnnnnnnnnnnnnnnnnnnnnnncggaggaatccaacgtggaggatttactgggaaaacaactggaacattttgcagtttttgccacaggcagcctcctgccagaactacttcctcatgattgtttcagcgtacatcgtggccgtgtaccactgcatgaaggacgggctgaggcgcagtgctccagggagcaacccccgtgaggaggcaggggggccagccagctttccccaggaggccgagggggcggtcaggagcccttcccggaatgatcacctttctctcaggattatgtccgcaaatgagctcactcagagcttcttcaccatcactcagaagattcagaagaaagtcacaggctctcggaactccactgagctctcggagatgtttcctgtcctccccggttcccacttgctgctcaataaccctgccctggagttcatcaaatacgtgtgcaaggtgctgtccctggacaccaacatcacaaaccaggtgaataagctgaaccgagacctgcttcgcctggtggatgtcggcgagttctccgaggaggcccagttccgagacccctgccgctcctacgtgcttcctgaggtcatctgccgcagctgtaacttctgccgcgactggacctgtgtaaagactcttccttctcagaggatggggcggtcctgcctcagtggctctgctccaactgtcaggcgccctacgactcctctgccatcgagatgacgctggtggaagttctacagaagaagctgatgggccttccaccctggcagggacccggtctggctgaaagtgcgcggggtgaaggagaacagcatgccctgtgtactgcagctgcgcgggagaactcgcctcaccaaccaaaccaggtcttcctggacagacccgaatatcccggagacaggccgcctacgctggcgtacccggaacccggggggcgcgaaaacccggggccaagcagccgggccgggcccggcggcaggccgagcaggacaccggcaggaacccacgcg

SEQ ID NO: 150398 - DNA, 1377 bp, Homo Sapiens
  misc_feature (67)..(123): n is a, c, g, or t
  misc_feature (162)..(212): n is a, c, g, or t
tccctgtctcgttccctctctctttcccgctctcgatcgtggtctcggtctctatccctgtcacgannnnnnnnnnnnnnnnnnnnnnnnnnnnnnnnnnnnnnnnnnnnnnnnnnnnnnnnnctctctttttcgtcggttcccgatcccgttcacgttccnnnnnnnnnnnnnnnnnnnnnnnnnnnnnnnnnnnnnnnnnnnnnnnnnnngccctttcatctctccgtatcatccactctgtctactcttcgttcctttcttctttcatcacgctcaagctcgctcattccttccctgatggtcgaattggtgagccttggtctttgatctcctctctctgttgtcacgacggtctcgctctccatgtcttctctccaaggaagaatcccttgccttgatctctgttgtctctttcaggatatctatctctttcaggatagctacttcgagtttcccagctgtcatgatagttgctattactactgtgactatcaatttgagaacctcttgagcctcgacttcccttttcaggtcactcacggaaccctccccctacttcggccccttcggtcctttctaatttcccttcgagactcatttctggactcattccttatttccgtacgagaactttcttctctcaaatggtttcggccataactccgggattcttctggatatgtatcctcctttcgatgagtatctcgaccttcacggtccctgtagtcatgggcatcacgagtggaccgagaatctctgggatcacggctctcttttgtatctctgctataatctctcatctcccttgagtcccgcatgtctctggagtctcttagttcccttcggtcccctagtatctctggcatctctccgatcccgaccatctcgaggttctctgtcatctctgtggtctctagaagagctctgatcctgttcatattctcgttcttctcttgagtccttttctctgtctcgtttgcccctagtatcttccctcctttcgtggcgtcgatcatgagactgtgaagttcgttcatgatcatgtctccctttctctcgcattggagagcgatgtcttggaggactctgctttctctggggagacgacaaagaatgtgaaggataaggagaggcagagcgtcgtaaaggtggagttagtgtccgctgataagatggtgaaggagttctttttcgaagaggagaaggagaatgtctttgaatagatgatcctgattgtgaggaagatgagtgatgtctagaagatataggagaatgatgctgtcctgctggggaagtagaccttggcttgtctctcttttctctttgtcgttcaaaatctcgtcctctgtcctttccatctcttgttttttcttc

SEQ ID NO: 150399 - DNA, 1139 bp, Homo Sapiens
tgaaaactctgcaacattccagctacgcgagagagagcatcctcccaagaagtataggttaaaagccctttttcatttctgaccattggctcggtaagtctttgacgttttagcccatcataggcaaatctggttttatcagagatccactcttcattgatgtcctcatgcatacgtggcaaaatcctcatcacttctccagttcttgtgctaaccacaatattacttccaaccgcatccattacatcaatggattctgtctttcttgtttccccaggccgggcaattaaaggcatagggtttagaggttagggcacctaaccagggcagatatcaatgatattcccagacagttcagacatgaacaatcttttccaatgtatgtgccaacttgcatatcatttcctctgcctgttgttcccaaatcatctactcctgcaatctcacttgcaaacctgatgcagcgagtacactgtatacatcttgtcatgatggtctttaccaatggcccaatgttcttgtcttccacagcacgcttcccctctaaaaatcggctcctatcatttccaaacatcatggactggtcctgcagatcacattcacctccctggtcacaaataggacagtccaatgggtgatttgctaataagaactccatcacaccttccctggcttttttggatttttctgagtttgttaggatattccaacccttcattactggcatggcacaagcagctacaaccttaggggctttctcaatttcaacaaggcacatcctgcagtttccagcaacagacaacctttcatgataacagaatcgagggatctgcatgccaaccttctcacaagcttggaggacggtcgttcccggttccaccatgacagactgaccatcaacaaatacttcaatcaagttgcttgctgctgtggcagttgttcgaacacatcctttaggagacttagaaaggcctactaaggcctttcttacaggtatccttaacatattgcttctccccggagccgcggaggctgttctgctaaactgtctggaccacgacgaccccctaggaggccgggtcgcttattcaatatggcggcctcggctaactctgtcagccgggccaagagaacggaaa

SEQ ID NO: 150400 - DNA, 1021 bp, Homo Sapiens
gcgtttcaccatgttgtcagctgtgttctactcttgacgtcgtgatctgcgctgcctcatctttccaagtgtttgtgatttacagggcgtgagccatcaatgcttgctccacttcaaggaaaattttttatgggttcacattttgggtatgtaagagggacatgtagaagtaacctgagacagaagagactgatggtcttcccaacccagaggcttcctgagttatcacccctgagagaggaagaacacaatctctctccttaaggcacccagataagagtacaggcaaactcttcacttgcccagtgcctgggtgagggagcaggcttaagaggcagaagaggcccagccctgtaggcactgggtactccctgctaccaaccctgaacccccggcagttgtccctgaggtctggggagtagcagaacccagtgtagaagccagcagacccagtgatgcccttggagaccctctgctgccttcccttattctctgtgggttttgagaggttcgtttgctgccatttcccacgaagggaaatgcgtggagccatcaggcgtggatccattctgaccacccagacctggacggtgatacaacccggtcactgtattcccgtagaacccccacgccagctggatgcccaggagacttaacaccaaccacagcagcagcagcttgaagagggtcacgcgcatgtcctgcgcctcccactcccgcaagaactcgctgcccagcgcgcccagcaccgtggccggcagagcctgcaaggcctgcccagaccaggactccgccatgactggccctcgccccacccggggtactgtcaccgtagtccccaccacgcacgcgtgtggtcttccgggaccaggcccgttagtgcgcacgcgtaaacccagccagggtggggcctacttcgcgtgcgtgaagagttggcagttcggggaggagtattaaaccgctgacacgcgcacctaaccctcgtgccgattaacacccagcctcgtacctagccgtattt

SEQ ID NO: 150401 - DNA, 1063 bp, Homo Sapiens
ggggggtgccctggtggggggaccaattccgaagcggtggggtgaaagccttttggcgcagcgggtcgcaccacgtagggcttttctcccggtgtggatgcgctggtgctgaatcagcgtggagtggtggctgaagctcttccgggcaggcggggccaggtgtagggcttcctcgcccgtgtggatgatctggtgctggatgaggtgcgagctgcggccgaagcgcttcccgcagtcagtgcaggcgtagggcttctcgcccgtgtgcgtgcgccggtgcgtcaccaggtgcgagtgccagctgaagcccttgccgcactgctcgcaccggtagctcttcctgcccacctcactgtcaggggccaggccctcctcgccactctccggggcgcccttctcctcctcgttgggcttctccgggacgcggtactcctggggctccgtgggactggggtctggcggagctgcatccggggtgcgatctggctcagccggctgcccggagtctttggccggccctgagctccggccgcaggctgcttcctgcgcgcactgcgggacgccccactggactctccctgccctggttctgaagggcttcacattcccaagggctgccacggatgaggtctgcaccctctgccccacctcgacggctcctgtgcacgcgcctctccactccttctcatctcctgcctgccggctggagcccgaggcctcacccttgccgtgcgcttgaggggcccagaaaggcctgctgaagggaaagcccagtgacagcccatttttcttctgcaggacatccctgtagaagttctgctgcgtgtggtccagccgtccccactcctcccgggagaggtacaaggccacatcctcgaaagtcactggcatctgggaccaggcagtgaggagcgctgcagccatctgccggtctctggtcctcccctctcgggaaagcaggaagatccggggggaggggagggctccgccaggcaggaagagagctttctctttagagaagtgacttaggggtgcccctcgtgcttgaatcgccacccaggcc

SEQ ID NO: 150402 - DNA, 1143 bp, Homo Sapiens
ctttgttctggtctgtttcgttatttctcccacttgttctcctctgtgcggcgacacgtgtgtgttcgcgtctacggtttccccctttttccggcgcggtcaccctcatagtgttggtggatatatggggcttccccacggtcgtaggtcccgctctccgtggcattattgtgaattcccacattcggaatctttgcggggtttctgatgacccttaattccatccctcgggcaaaatcttcgggtttaaaccactcaattgcttatagttgccactgcccttctcagggtccttgtcgtggagtttgaaggcgaattgttgtctcccccacacctggagagattgcacgtggctcggatgtgggtcttggcctcccgaagctcttgcctcaagtccctctgtcagtgcagtgacggcatacttggtggcactatagaattgggtcacagacaggggtaacactcggtggccagacaatgctattgatgttaatgatgtgcccatcgtccacattccgctccttcatggactggtaggcttcccgtgtgcagatgctgagggccagcaacgttcacaattgaacatgtccttccaaccactggtgctgcctgagagcagggttgtcaggccgggccaagccagcattgttgatgcagatgtctacaccgctgtgctgagaacggatagctgagaacatggagaggatgtcctcttcatttgataggtcacatctgtaggggatcaaagtcccggggtagcctgcactcttacattcagcagccagctcctcgatgttgcccacagtgcgggcgcagcccaccaccttcagtccctgctggaccagggcccagggccacggccgcagccagatgccaccccgaggcccccgtcacacagcgccagccggtcagcgccaccgctccatgccgggcctggccatgggcccacgccgcccgtccgccatcgcatggactagcccgacacgggggtcgaggagctgacgcccggccgctctcctgccgccgccgccagacctgcttgggtccgatccgcgcctagacccaccagagtcccggcctgcctccggccgggaccctcgtgccgaattcaacacccagccctcgtacctagccgtaagtttt

SEQ ID NO: 150403 - DNA, 1063 bp, Homo Sapiens
ggtttcctgggctagccccgagataaccctgctttccagtttcctggggctttcccctgtggaagcccccttgaggtgggagtcacactctttcgcacgtgtaggaacccgttggggtttcttacagaactgggcagcgttgcagggaggcggttgggccggcacatttgttccacatccacacaggcgccctcgtccagcacccagcccacttcacactcgccgcagtctctgttggtcaggcccgagcacgtcttgcaggactcgtcacaggctgtgcagatgctgtgggtctcgttccggagcgagctgaagtagccgtccatgcagtcagtgcacagcgggccctggtaccccatgtggcaccggcaggacccgtcgccctgtctgctcccatctccgctgcagtggccattcccgctgcagggcctctgggatccgccctggcatgcgagacagtcgggaccgtaggttcctggagagcagcacactttcagtgtcttcacacaaaaccactcgaataagtcaggatattcgctcttcagctgcagccaccaggcctccaggtgctcctcctgcgcctctagcatctgattgcattcgaagtcgctgctctcgcacagcccctccaggatctccagcaggcgaatctcgctggactcgtacttggacagcgtcttttcctcccaagccgtgttcccgccgccaaagttcttctttgcggtgtccaccatcccctggttaaacttgtccaccagcccccggcaccggtggcagggcgtcggcttcttggcggcctccggcgcgggcggcagcagcagcagaagcggcaggagccccagcgcggcccggcgcggcaggcgcatggcgggtagcgctgcgggaagacgcagccggagctccaggtcctgcggccgtgctgctccggcctcccggccgcccacccgctcccagccgcgccggcctgtcccccaggctcgacgcgtgggtcgacgatatcccgggaattccggaccaggtaccagcctgcttttttgaacaaactggttcatagtactatagg

SEQ ID NO: 150404 - DNA, 1154 bp, Homo Sapiens
  misc_feature (1028)..(1043): n is a, c, g, or t
tattcccccaaccctttcctttttcccttcgccgcgcatcgattcatcggataaagagaaccaaaggcaattttcccgaccaaggcaaaataagtctcggacttataaccagggcccacaaccaaccgaacaatctcccaaaaactcagatcccactaacggtgatgaagggggacattggctttctccggctgtggccttaagctagcagcgtctttcccagtgccctggaggaccaagtgagaaatggcaaccctttgggatttttgctcctaaggtcttgatactgctttgggtttttcaagaaattcacaaattccatgatctctagcttggcctcctcacagccagccacatctttgaacttcacatcaatttcatcctttaagaccttggcagtggtttctccgacactgaagagtccgcccatccctcggcctgtccggccaatgccagcaggccctcttctgatggtgtagagcaagaaggcgatgatgagcaccgtaggcagcatgctcagcagaaaagagccatcactttcagcaatgtagacaacaggcacccgattttctccttctatgcccaattcctgctgtaaagtttccagattccgttcaaaggtgtccacactgccaatattaaaccaaacgtattgcccatcaacaggagtttttcctggtgtaaaggtcactcgaacaaaacgcttgttgacgacttccaatctgtctactactccttttgaaagatagttattgacaaagtccttccaagtgatttctctcccggatctcttgagcagcaagtaaaacatgactccaccccagaacagagcagtccagaggaagaacatcctgaaatccttgtcgtcccatggaatgtcacccttctgaaacctggaccaccagtgagaatcatctttcttgccacctcgttttccaccgccaccacctcctcctccagaagagcgtgtggtagcagctggctttgattcttttttctctcccataacttctttaggttcactagcnnnnnnnnnnnnnnnnccattaggaaagtatttttcaaatccttttgggggtcgagaacagaatctttgataagcagcaattatatccctcgtgccgaattcggcgcgccgtcgacttcatactctt

SEQ ID NO: 150405 - DNA, 1070 bp, Homo Sapiens
aactggcagtactcatacggtttaaggtagcgaggcctgggtggcgaattcggcacgaggggcctttgaagcacctagtggagcctgtgaatggaaagtttaatgataatgcctggcatgatgtgaaagtcaccaggaatctgcgtcagcactcaggcattggacacgctatggtaaacaaactacattgttcggtgacaatatcagtggatgggattcttaccacaacgggctacacgcaagaagattataccatgctggggtctgatgactttttctatgttggaggcagtcccagcacagccgaccttccagggtcaccagtcagtaacaactttatgggctgtctcaaagaggttgtatataaaaataatgatgtgaggctggaattatctcgacttgccaagcaggaggagatcctaagatgaaggatccatggagtggtggcatttaaatgtgacgaatgtgtgcaacctcttagacccaatcacctttgaaagcccagagtctttcatctctttgcctaaatggaatgcaaagaaaactggactccatatcagtttgatattaccgtaacaacagagccaaatggcctcatcttatttaagccatggcaagccaagacatcagaaagatgccaagcacccacagatgataaaggtggacttctttgctattgagatgctagatggccacctctacctcctcctggacatggggtcaggtactataaaataaaagccctgtttgaagaaagtgaatgatggagaatggtatcattgtggactttccagagaagacggacggtccaggtacccattttcttgtcaacacggttgcgtacttcccttaaactggtccctggtgaagaggtgacattctgggccctggattttattttaccgggcggggtctccgaaaaaaatgggcttgcttccccacggggttgcatcgttccgcccctatggtcacggggccacggggaccacggacacacaatatcggagtgggcaacactggaaatcctcacgaaaacgtctactcaaagtcgcggaattttcatctttaag

SEQ ID NO: 150406 - DNA, 1108 bp, Homo Sapiens
tcctgtcaacgatgcgcgttatgtccactcgatgtgttgatagtctacactgtagtacctatgtatgagtcattacacggcagaacgggtgttggttgtgctcaatagcgtgcggcgaaggtgtgcccacgcttatgtggtagtggtcccttgtactcgcagggccccgggatgtccttcaaagcactcttcatggtctaatatccgctcagtccctgctgatctctggtaactaagtttcctggaacgggctgcctggtgtgcttaagcttggagacgtcaggcactgctatgcaggtttccctgtaaagtcacactgtcaccagcttgaagcttgagtgccacagctctagccccttaaattactttctatctgcgggggatactccctcgagaagctcagcttggctctcttgaatacgaaccttgttgaaaatcaacatatcgtgatttatttgtatccagtaagaatctcctcctgttggcacgaactggatttcggcagatgtttgtctgtgtgtatttgaactgctgttctacatccctgatcactgtctgacagtccaagcacagaaaagttccgctcacaagctctgggtgaactgggtgagtccgcaccacctgcccactgatgcgagtgagcaaaccaattctggatgaggtgagctctcgaatcttgtgtctggtaggcaggtcttggaatgcaacataagaatccttggcaagagggatctctttacggtctttgacgaatgttttcaaggcccgacacaggtaagggtaaactctatagaactcctcttgaatggtggtggaaagttgctggttaaattgttccaggtccacaaaactcacaacctatgtgtttctctcaggacgaatcagttcctctgctaattgcaagtatttaatttctccatcgctgctctgaaactcctccaagaagtccaggaacagtttctggcacttctcggccacctcgtcgcggacctccaggtgctggctgccggcgcccggctccgctgccgccgacgaggtccatatttgcttagtgccaaggattcgcctgcgccctcgtgccgattaaacccgggcctctacctgcgta

SEQ ID NO: 150407 - DNA, 1040 bp, Homo Sapiens
  misc_feature (56)..(228): n is a, c, g, or t
cgagggtgcagcggtgcgtatccgctcactgaagctccactcctgggttcgcgccnnnnnnnnnnnnnnnnnnnnnnnnnnnnnnnnnnnnnnnnnnnnnnnnnnnnnnnnnnnnnnnnnnnnnnnnnnnnnnnnnnnnnnnnnnnnnnnnnnnnnnnnnnnnnnnnnnnnnnnnnnnnnnnnnnnnnnnnnnnnnnnnnnnnnnnnnnnnnnnnnnnnnnnnnnnnngtgtgagccaccatgcccagccttcattcctttttgtggttaaataatatttcattgtatggatggaccacatttggtttatccattcacccattggtagacatttgggtcgtttctaccttttggcgactgaataagctgttttgaacatttgggtacaagtatctgtttaaagacctgttttcagttctgttgggcatacacctaggagtggaattgctgggtcatacggtaactatgttgaacttcctgaggaactgccaaactattttccttaacaactgcaccattttacattctcactagcaataacgagggttccagtttctccatgtcctgattcttatatttgaagtgttaaattcttgcaaacatttttctcatgtcttggtgctcctgctttgctggtgcctgaatctgtgcgtggccaccaggttagcctggtgtaggtctcgtggttccaagattggcaacaggaggaccggagaggagaaccaagccagctggggagccccagaggtgggagctagcttgtagggtccgaaggagtctgggcctctctcagaccatctcggaaccgtcgacccctggttccctcggaaggccgatgatacaccaaccacgcacaaccccacgcaagagcaacgacgacacacagcgcacgccgagtgcgcagagcagcgacgagacaacgacaagcgccgaaactccacacagagcgaacaacgcacagaccaacacacaagagccacatctacagaactcgccagcacgagcaagcgacagcagaagcacacacaggcgagaagaac

SEQ ID NO: 150408 - DNA, 1079 bp, Homo Sapiens
tttcctcgcgggggcataggagtgcaccctgggggcagattgtggcccagaagaaggtgacccgcccgctgctgctcaagtttggcaggaacgctggcaagtccaccatcacggtgatcgccgaggacatctcggggaacaacggctacgtggagctctccttccgggccaggaagctggacgacaaggacctcttcagcaagtccgaccccttcctggagctctacagggtcaacgacgaccagggcttgcagctggtgtacaggacggaggtggtgaagaacaacctgaacccggtgtgggaggccttcaaagtctctctgagttccctctgcagctgcgaggagacaggcctctaaagtgcctggtctgggattacgactctcgaggaaagcacgacttcatcggagaattctctaccaccttcgaggagatgcagaaggcctttgaggaggggcaggcccagtgggactgtgtgaaccccaaatacaagcagaagagacgcagttataagaactcaggagtggtcgtcctggctgacctcaagttccacagggtgtactccttcctggactatatcatgggcggctgccagatccacttcaccgtggccattgacttcaccgcctccaatggagacccgcgggacagctgctccctgcactacatcaacccctaccagccgaacgagtacctgaaggcactggtgtccgtgggcgagatctgccaggactatgacagtgacaagaggttttccgctttggggtttggagcccggatccctcccaagtatgaggtgtcccatgactttgccatcaatttcaaccctgaggacgatgagtgtgaaggcatccagggcgtggtggaggcctaccagaactgcctgcccaggtccagctctacggccccaccaacgtggcgcccatcatctccaaggtggcacgcgtggcggcggcgaggagagcaccgggaaagcctctctatactacatcctgctgatcctgacggacggcgtggtgaccgacatggcgacacacgggaggccattgtgcgtgcctcacgcctgccatgtcatcata

SEQ ID NO: 150409 - DNA, 1100 bp, Homo Sapiens
tgagggggtctctggaggccccagaagctgcacagccacaggagggcgcttggtcttcatctggaaggggctgcagctgccgggcctaggagtgggggggcctgcaggagcggcagcacagccattgctgtagtaccagtgcccgcagaggttcactttgatggccagggcacagttggtgcctggctggtcctggcagctgtcatctgggggctccgtggggcagggctgcagatcacaggcctgtctgccaacgggcttcaccaacggatcgcaaccacggacgatgtcgttcccctggtagcacttgacgtctcgcatcctcacgcccaccccgcaggtcttggtgcactctgaccaggggctggtgtaccacttgaagcagggcctctcgaaacacgtgctctcctcgggaggcttcttggcgagcccgcactcggggccactgcgcgtctgcggcttcccgttggccagctccatgcagagcaccagccgcttcttgaccccgcgcccgcaggtggtgttgcaccgctcccagtcctgggccagccagtgggcgggacagtttttgtccccacaggggtggatggccagaggcttggtctccatctggcactgggactcaggtactacccgtccgtcgctggtcttgcagtacacgtgcctgatggtgcggccttgcccgcagcttccactgcacggtccccagtcggagacggtccactgccggtcacagggcgggcccgtgcagttcttctcccctacaggcctggtgttggggtcacacagcttctcatcctctgagcagcggatgtccctggtcaccacactgcgctccccacacttggcagtgcactcggaccactccgacatctcccactggggcccgcaggcggggttctggcaggtcttgcgttcctcgggccgcacggcctcggctgcctcgcacaggtcgctgtgcacggagctgtcgaagccgggcgagagcatcttccagcagcgcacgacgcggaactggtagccctctccgcaggtgcgcgaacactcgctccaaccctcgtgccgattaaccacccagcctcgtactagacctatagttt

SEQ ID NO: 150410 - DNA, 1588 bp, Homo Sapiens
cttgttggggcattggcctgctggctgcatatctcaccaatttcctcgttgcaaggccctcctggatctcagggtcctttgagaggttggttcagggcccaatgtcagcgtgttgaatttcgtttccactccagccatgagcagctcaggcaggctgcccatggcctcccgaggactgagctgtccactggccagtaagaagtgcaggtagccaagacacctggatgccatctggccctgctgcctgcagttggcctccatatcttcgagcttctcatcaatcagcttcttcccaaaggaaaagatggcattccaaccatccaggtatcgcttccagaaaggcagcacggggcgagtccacttggggaggaaggtggcatagagtgagttctggaacattaacccgatggatctgacgaaggtcacggtgtcctcggggatggatcgctgcaggcagccaatgcgtttctcgaacaggatgtagcaaatagcttccaaggcaaagtagtagaagagttgagccatgtccgacacctggttccccgaagcactctctgcccgcagctggtccagtcgagtcataaagtcatcaatcacctcattgaaagcatccgtatagagcgctgcttccgctggcttcagcaaccgctggttcagagcctggcgcagctggtaccagtggtgtccttccgtggtgaacggcccataggtcaggtcgtgctggtcccggtgctccttccatagctccatgtcgttccgtactgggtacttgccctcttgccgcatcacttgctccaagagcggggcactggccaggttcacgtgcatctgaggccctaagtaggacatccacattggaccgtacttggccttgtaaagcacctgtaactggtgcagttgcagggcatagccttgaacgaacagctgaaagaagaagcgcagctgtcctagacgtggaatctcctctaagctccgttgccgccgccggacaccaggcccggctccgggagctccggtggccttgtccgaggggagggcggcagggatcgcggccttggctctggccccgtgggggcagaggccacggccggcccctcgcagcgcccacctcagcctcgcgcagcccagcgcagccatgggttgtgctcgcgcgcctgcacctttgggtcgagtgctgagtccccggacccgcccagacagcagtgcagggcgggttcaaagccgggcgctggggagggccgagcaaaggccagctagaccccttcccgctcgctccctcgctcctcccagcgacgcgggagctgcaggagagggacgcggtgactcggggatatccacggcgccccgaccaaggcctccgccacgactcctcaccccgcgcccccgaggcctctcaaataacttttcgcttggtctgaactctgggcgggggtgcagcgagattctttcgaaatcgggaagccccacaccgggataggtcctcgcccggtcgcgggttccccacccaaggcgaccctcgcgtcctggagggaacgggaaccggccgtggctaagccctcgtgccgattaaaccccgagcctctaccta

SEQ ID NO: 150411 - DNA, 577 bp, Homo Sapiens
ctcgcgaacgtgtatcccctaagaggaatttgaccttgcaaataaccaagaggtttctataatcctcctgaagttatttcgtttggaagaagtctgtggtagccaatatcagcccagaattagtgattccataatatctgttagcttacacatttgcatctgccactctcttcccaagacagctccctcctcaacctctgctcactgtaagtccggcgtccagatcccccccttactggtgccgtcctgatttaagcccttcctcgtcctgtttatctcagctcaaagggctctgtctgcactttgcccattctccctactgatttccagtttatgaccatagcctcagtgggtccccagctgagttcctgcagccttcactttctgtccaacgtcttctcacctctagcctctctgttccggtgcccactcccatccccaggacgcgatgcccccgcgggttacctgtaactggtgcagttgcagggcatagccttgaacgaacagctgaaagaagaagcgcagctgtcctagacgtggaatctcctctcagctccgttgcccgatacacgtaacg

SEQ ID NO: 150412 - DNA, 1121 bp, Homo Sapiens
  misc_feature (236)..(236): n is a, c, g, or t
tcttactattttgttctgtttatatgttcttctctgttgttctgtattcgtcgtacttttgactggcccgcaatatctgtgtgccgagttgttttgtgctcatttgggatgagttcctgtgcttgagcccttttcctgtgctgtttgtttctggcgtcatatggggcatccggcggtcccggtattgcctgcaggccgttgtactcatctctcgcgaaggctcgctgttaagagancatccaggcactttactttgcttcgttttctgtaatacgtgctggtttcagtacgattagcgccttatgacattagcatgtgaagctgcgtacatgcatggtttttcctgacatttttgtcagccagatctgttatattcacacggcggtgccctgggatcactgcaggtaagccgcctgtctcctcttgggacatgttgttcaaaagaaggtccttcaaggtaacagtattttcaagccactcaattaatcctaacctggagttcatgggcacaacgctataggtcctcagctgcagggccctctggctgcagtcggagtcttgggccaggatcccattcatgacctggaagagctgctccacgcgctggtcctgccgcaggtcctcgccacccttcaccaggaaagggtgttccctctcgtcatggccacggatgatgatgcgcttgggccttcgcagagacgccatgactgtcacccgctcatcaaacccggcgattcgcacgtggtactctggcaatggctttcccctaccgtcatactgaccgggaatctccagctcatttctcaggaactccactttgaagtcgctcatccagggtgaacattctttcagattcccagggggctttgagtctttgttcatttttaaaagtagcatgttggtaatgtcgttgaagtcactgagcttcattctcagtagtttagaacctgcctttcccaaaatgtttatcaaattcttttccaaaagtctgaataaacttccttctaaaggcccccaggcctggagcctttgggtcacccaaggctgcatacattctttcatacattttaacaatgttgtttgtcctcgtgccgaattaaccgtaggcctcgacgtagcct

SEQ ID NO: 150413 - DNA, 544 bp, Homo Sapiens
atcaccaaggatgtaggctatccggaattcctcaacatacgtccgtatatgtcccagaataatggtgatcctgtcatgtatggactctatgctgtcctggtgcactcgggctacagctgccatgccgggcactattactgctacgtgaaggcaagcaatggacagtggtaccagatgaatgattccttggtccattccagcaacgtcaaggtggttctgaaccagcaggcctacgtgctgttctatctgcgaattccaggctctaagaaaagtcccgagggcctcatctccaggacaggctcctcctcccttcccggccgcccgagtgtgattccagatcactccaagaagaacatcggcaatgggattatttcctccccactgactggaaagcgacaagactctgggacgatgaagaagccgcacaccactgaagagattggtgtgcccatatccaggaatggctccaccctgggcctgaagtcccagaacggctgcattcctccaaagctgccctcggggtccccttccgccgtagtcagcg

SEQ ID NO: 150414 - DNA, 994 bp, Homo Sapiens
cgcagtgttcgctttctccgccgttttgtgcctgcgcggaatgccccctggtggccgcctttttggtgttttcctgttttctggctgcacactcgggcattgtgccacctgtggtcgcgccctcctccgtgcacagtcttcaatgttgccgccactgtgctgcgggcccttcgacacccttgcgcatccttacagccacgttgggtcccgaaaccaggtcctgaagtctgtccaaaagttgatggggccacgcgccggaggttctccagccgcgctgggtggggtcccctaaggttaggaatgtggtttaattgggggaaaccaaacatggggtacccccaggggctgatcgcaggaggagttaatcaagttccgcaggacctgcttattgttctggatactgccgcgctccggattgcggttgcgaagaaatataagctcctgctgctgcccggcccaaagtcctcggacgcattctttgttaaccttgatcaccttgaagctcaggaagcttctgtggagcatgatgaccttgtactcgtcggcaccctcgtccaccacgtgccgcagggtgagcagctcttccttgttggacagcactgcgccccgccaggccgggtcgccctcgtggcagatgaccaccttcttctcgaaggactggatggcctcgtagaggactgctgggtcttcatactcgtcagggcaagtgaactggtcctggtgaagtttcagggacatcctgatagctggagctacaactttatgcagtaggtccatgtcagcaaatacccactcgtcacgtgctgttattctgaagtcacctttgaagaggacatggaggccatacaggaaagaatccaggctgatggccatattgtgagcggctgttcccagagctctcctccccagggtgcacagggcgaaggacagagtcaccaagggagagtcctcgtcactgtccagggtcgttgaagcctcgtccatttaacccggg

SEQ ID NO: 150415 - DNA, 1499 bp, Homo Sapiens
  misc_feature (137)..(165): n is a, c, g, or t
ggcagtaagtaagttcagaacagccatgagccccatgcagggcagccaggaaggacagtaggccaagtagccagaggcccagcggtcccacgcaggccccaggtgtccaaggctgcccgcagtgttcgtgagcacannnnnnnnnnnnnnnnnnnnnnnnnnnnnagaagatgcagggtcaggttggtggagatctgcagacactcgttctgggccccccaagtaccgggagggagctcctggttccccccgcagccagcccaacagcttctcacgcctaccaggtttctccaatggggctcctggcccagggacgctcagtcccccttcaggggacacccctggtctcctggtgccacctgaatccacatgatcccatctgagtttgggactggcccctccagcctccagtctcccagactcttgagtgctagagataggctggtcccacttgagggaatccattcttttgctccctagctgctcaacttggggctcctccttgcttggttcggaagcagccctagaaaccctcaatgcccccgagtccttagtcttgggatgccccacatcttccatggtttctggggcactatcccagtcacttcctgaattctccgaggagctgtccacccgtctgggttctgggtaaggcgggtcaggcctcattggtttccggcggccccaagggcgaggtagccagccaccaagccgtcgcaggaacatggctggggtgtgtaatgggcccccaaattctgaggctgcttcctggcactactcagactctcaggatctcctcagaagccagagtctttctggctcagaacaggtatttgcctggtgatgcagtcctactctgaattcagaagtggctcctcccttctctgaatagtcatgcagcctcaagtgtggcaagtagtttgcttcctcttcagttctggggtaaaggggggcatacccaaattcattcaccatccacacccccacaatctgagattccaagaatctcagatctgacaaggcctgggtcaccaccagagagtcctctctgcgtttccggatttccttcccagcaggcagcaccccaagtttcactcaccaaggccacaccccaaggtgtcccagaaactggggaggcagtgctccatccaataaagcgggcaggaaggtggccccaggtcctaggtgctcctggatcgtgtagtctttaactgctgccccaagggacctcaaggaataggaattctctttgttaggaggtggaatgaaagtgtccagcaaactccagccagcagcgttcgtcccttgatttagagggctatgatttctacaaagtggcccgactggcccgcgaacacgcagcagagacgcggcctccacaaggtcagaactaagatgtcctcagagatccccagttacgaagcaaagcgcgggcctacttcgggacctacgcgtccgggcgctgtgcgcggggaccgctcccgggcccagcgtcgggg

SEQ ID NO: 150416 - DNA, 1066 bp, Homo Sapiens
tggtacgctccggatttcccgggatatcgtcgacccacgcgtcgggccacgtacgggctgaagcatgcggagtccatcatggtccttccacatcgacctggggccctccatgctgggtgacgtcctcagcatcatggacaaggaggagtgggaccccgaggagggggagggtggttaccatggcgatgagggcgccgctggcaccatcacccaggctcccccgtacgccgtggcggccctcccctggcaaggcaggaaggcaaggctggcccagacttgccctccctcccctcccatgctctggaggatgaggggtgggcagcagcggcccccagccccggctcagcccgcagcatgggcagccacaccacacgggacagcagctccctctccagctgcacctcaggcatcctggaggagcgcagccctgccttccgggggccggacagggcccgggctgcatgtcattcaagacagccagacaaggagttctccttcatggatgagcgaggaggaggatgaaatccgtgtgtgaggcggacagtgggtggccaccgggagctcttggctgcatcttctccctgcccccaccccactatgacctttgaccctacggcgcaggggcagccaggacccttgattcagaccatggaccctggaccttgtagatgagggacactggcctggccctcgggtcttcggaggacgtagggggctggcatgggtgccgactggctgctgacttcatcatgctccctgcacttaggctgcgtgggacaagggctgtgttgtcacagcaggaataggttttcctctgttggctccctttcctccaccctggcctcaaatggatgccaagatgccaaccccgagttctggccacgtacagcagcgggtcagcccagaggcagcctcagctcccagggctaaggactctcgggtccattttctctgctggcgtttctgctgtgcccagcaagtgctgtggggaagcagttgcagcaggcgggagaggtctgcccttaagacctcctgggccaacccagtctgccctggatttggacct

SEQ ID NO: 150417 - DNA, 959 bp, Homo Sapiens
aggtccctttcttgcaattccaggaaagccggggggggctttcctttccattttcccatcccgttctcctttcccccgaaaaggggcggcgttaagtgccccatgtttcgcggttggccccccgtccaggtcagttccaagggggctccagatttacagggcaggagcttggggtggggcagggaggggctgagaggcaagacggtttccctcctgctgcagttgtttccccagcagccattgctgggcacagcagaaaccgccagcagagaaaattggagccggagagtctttagccctggagttgaggctgcctctgggctgacccgctggctgtacgtggtcagaactggggttggcatctggcatccatttgaggccagggtggaggaaagggaggccaacagaggaaaacctattcctgctgtgacaacacagcccttgtcccacgcagcctaagtgcagggagcatgatgaagtcaggcagccagtcggcacccatgccagccccctacgtcctccgaagacccgagggccaggccagtgtccctcatctacaaggtccagggtccatggtctgaatcaagggtcctggctgcccctgcgccgtagggtcaaaggtcatagtggggtgggggcagggagaagatgcagccaagagctcccggtggccacccactgtccgcctcacacacggatttcatcctcctcctcctcatccatgaaggagaactccttgtctggctgtcttgagacagcagcccgggccctgtccggcccccggaaggcagggctgcgctcctccaggatgcctgaggtgcagctggagagggagctgctgtcccgtgtggtgtggctgcccatgctgcgggctgagccggggctgggggccgctgctgcccacccctcatcctcccctcgtgccgaaatcgccacccaggcctcgctaccttggaccg

SEQ ID NO: 150418 - DNA, 1630 bp, Homo Sapiens
ggggagagagtatgaagtcgacggcgcgccgaattcggcacgaggtgaggatgaggaggagtatgagagtggatatgctttcctcccggaccttctcatctttcaaatggtcatcatctgccttatgtgtgtgcacagcttggagagagcaggatccaagcagtacagtgcagccattgccttcaccctggccctcttttcccacctcgtcaatcatgtcaacatacggctgcaggctgagctggaagagggcgagaatcccgtcccggcattccagagtgatggcacagatgaaccagagtccaaggaacctgtggagaaagaggaggagccagatcctgagcctcctcctgtaacaccccaagtgggtgagggcagaaagagccgtaagttctctcgcctctcctgtctccgccgtcgccgccacccacccaaagttggtgatgacagtgacctgagtgaaggctttgaatcggactcaagccatgactcagcccgggccagtgagggctcagacagtggctctgacaagagtcttgaaggtgggggaacggcctttgatgctgaaacagactcggaaatgaatagccaggagtcccgatcagacttggaagatatggaggaagaggaggggacacggtcaccaaccctggagccccctcggggcagatcatgaggctcccgattccctcaatggcccactgggccccagtgaggctagcattgccagcaatctacaagccatgtccacccagatgttccagactaagcgctgcttccgactggcccccacctttagtcaacctgctcctccagcccaccaccaaccctcatacctcggcgcagccacaggccttgcgtcaatggggatgtaggcaagccttcagagccagcctctgaggagggctctgagttcggaggggagtgagtccagtggacgctcctgtcggaatgagcgcagcatccaggagaagcttcaggtcctgatggccgaaggtctgcttcctgctgtgaaagtcttcctggactggcattcggacgcaaggcccgacctcatcatcgtgtgtgcgcagagctctcaaagtctgtggaaccggctgtctgtgttgctgaatctgttgcctgctgctggtgaactccaggagtctggcctggccttgtgtcctgaggtccaagatcttcttgaaggtagtgaactgcctgagctcccctctagccttctgctcccagaggacatggctcttcgtaaactggccccgctccgagctggccacagacgctttaactttgacacggatcggcccctgctcagaccttagaggagtcagtggtgcgcatctgctgcttccgagttgggcctttcttcgccggctggcaagagatcctggaagtaaccagaggtggatctcgccagatggccagtctggagcaggaaaaccctggtggagaggcccaggcaccgttccagagggccaggagaaacccggcggaacgggtctcggaaaaaatggcacgacagactaccggcaagggtcaggaggggcgtggaaacagagcagaaaagtacaactggcggaacagagcgctgaactccgcatacaagcacaggggtgtcacagaagaggggcaa

SEQ ID NO: 150419 - DNA, 1080 bp, Homo Sapiens
tttttcactgctggtggccagtgtttatttatgcagataagcactgtgtgccactagcatcaggaacagccacaaatctcatgcgcctgccactcagtggctggggtaagtcctagcagagcttctgagcgtggttatttaggaaccatgagtccagctaggatggggcaggcccacctcctgggggctgcaggcagaacctcaggagaggacagagaaaggaggtgggaagcaagtcacgattcagctcacacggtgtagacaggctgggcagaggcggggtggaccacgctgcagaccagcaggatgtggctgtccctggcagtgcccatgctgcctctttctgccttccgggccagcatcaccacacggcccatatggatgatggttactttggcagtcggcccctgctctgggccacactgctggggctggaggccaggctcttagccaaaacttgctgggtgacccttggccagtggttgcccctctctgggcctcagtttccttccccccaaagccaagtgtcctgagctctgggctgttggcccaccctcagcagtccagggcgctcttcatggggcctccaacaccacctcccaggacagcacaggtccaatgtggtggtgtgcagggcagtgggagactcagctcacggagcagctgcgcccatagggacctgaagctgcagggcccccgggctgtcctgggccgtgtccccatgggcagcagtgcttagggtttccagccactgctgctgcagctctgcggaggaggcgctcaggtaccaggactgcttggcccactgcagcttccacacatgccccgagtccagcctctcctcagggtccggcacactcagtttgcagctggggagagggatggtgcggggcagccggccgtcctggctgcctccctgcaggtgcagcacctggggatctgacatggggatggcggcccacacctcgctccaggtctcaccgctctctgacagccgcaggggccgcagagcaggctgggctgggggtctgcagtggcctcgtgccgattcaaccccaggcctcgtacctagccttattt

SEQ ID NO: 150420 - DNA, 1025 bp, Homo Sapiens
cccccagctttgctgctcagcatgaagacaaagtcagggctcgattggactattgaagcgttctacaaccttggctcgcttcttaatggacatcgtgccatccaggcggacgtataagtaccttcgggcacggcacagcttctcaaagagatccaaagtctgggtgtaattcgacaccagcactactttgtcactgctacggcttcgggtcaccgccagaatataatccaggaccagcatcttacctgacagctggggctccagggccttagagctgtaaccaggagggaagaggtccaaggcacccacaagccatcctcctcttccacacacttatcatagattagagctggatgattacaaagcttctttagcgaggtgatggaagaaagggaagacacactcatcttgccctcaagcaattcttctgccggtttggcttgtctcagaaacctcttgtataactcagtctgaaggggtgtcagcctacacaaacgacctgctcaatcttcacaggcagatatttagaaaggatatcagaagtcctccgtatcaggcatctattcacaatgctggtgagctcccgcagccgctcctctcctagctgcctgtctgcctcactagcagcagcgtctcgacccttcaaaattggcaattcaaaatgcttcttgaattcatgggcagtccctaggatgccggaattaacaaaatgtaccaagctgaaatactcaagcagatcattctggatgggagttccggagatgagcacccgccggctggtgttcaagctgtccagggcttggtaagtctgattctcagagttcttgagcctgtgtccctcgtcacatatgaccagaccaacacttcctttctggaggactccaacatgaaggcggaaggtctcataggaaatgatgaggatgggagaagacacctggctccacgctggttcatgaatccttccagcttttggtctatttcatcctcgtgccgattcacacacccagcctcgtacctagccgtat

SEQ ID NO: 150421 - DNA, 812 bp, Homo Sapiens
  misc_feature (143)..(162): n is a, c, g, or t
  misc_feature (394)..(411): n is a, c, g, or t
cgtgcccttgaccatgacccctcctggtataggctgaggccacagaattgcgttgaccccggaggccgaggttccaataaacccagagccatgccttattgcccctcccaatctgggccaccaaaaaggacatctccgtttcnnnnnnnnnnnnnnnnnnnngtagaaagatggagtggaagcctgcccagggttgtgagcatgcacgggaaaggcacccaggtcaggggggatccccgaggagatgcctgagctgaaggattgtggttggggaaagcgtagtcccagcaaggaagcagtttgtgggtaagtgctgggaggtgagtggagtgagcttgtcagggagctgctggtggagcctggaggggaaggagggaggcagtgagagagatcnnnnnnnnnnnnnnnnnnatgtcgccagagctcaggggtggggacagccttgtgcgcatcagtcctgaggcctggggcacctttcgtctgatgagcctctgcatggagagaggctgagggctaaacacagctggatgtcacctgagttcatttataggaagagagaaatgtcgaggtgaaacgtaaaagcatctggcaggaaggtgagtctgaagccctgcacccgcgttccgactatcagtggggagctgttagcacgtaggattcttcagagcagctgggctggagctcccctgagctcaggaagccccaggtgcaagggcaaggaaatgagggggtggtgggtcagtgaagatctgggcagacctggtgtgggaacgggtgctgctgtgacttcagggtctgaggtccaaagacag

SEQ ID NO: 150422 - DNA, 776 bp, Homo Sapiens
gcacttttttcgaaagctgggtttcccgtggagatcccaggcggtgacagagtggagccatggctagaggcaggaagatgtccaagccccgcgcggtggaagcgacaggccccgtggcccgtgagatggtggagcggaggggcccggggaggccccgcaccgacggggagaacgtatttaccgggcagtcaaagatctattcctacatgagcccgaacaaatgctctggaatgcgtttcccccttcaggaagagaactcagttacacatcacgaagtcaaatgccaggggaaaccattagccggaatctacaggaaacgagaagagaaaagaaatgctgggaacgcagtacggagcgccatgaagtccgaggaacagaagatcaaagacgccaggaaaggtcccctggtaccttttccaaaccaaaaatctgaagcagcagaacctccaaaaactccaccctcatcttgtgattccaccaatgcagccatcgccaagcaagccctgaaaaagcccatcaagggcaaacaggccccccgaaaaaaagctcaaggaaaaacgcaacagaatcgcaaacttacggatttctaccctgtccgaaggagctccaggaagagcaaagccgagctgcagtctgaagaaaggaaaagaatagatgaattgattgaaagtgggaaggaagaaggaatgaagattgacctcatcgatggcaaaggcaggggtgtgattgccaccaagcagttctcccggggtgactttgtggtggaataccacggg

SEQ ID NO: 150423 - DNA, 1266 bp, Homo Sapiens
  misc_feature (1160)..(1205): n is a, c, g, or t
gtgatgggaaaggaggttgggagagagggggggtacccgtgggattcgggcgagtggcggggaactgtgggggcccgcaacacggggttaagggggggccctggcaaagtggacaatggaaccgcgccgctgggaagaaggtgcccagcccggggaacttgtggaatgctcgcctaagaaaagggcacgggacgaggaaataagcgtttcggttccttccaggcttgggttagattggttgggtctccccaagccctaagcagagggctgagatccaaaaataaaaattactgtaaagaaataaaattaattttggacacttaaagaaagcttggttgttttagagaaattcaggcaataatctatacaagctgtcaggaaaactggataatgcaaaaagccataagttaaggaaataatttgagtaaataggcagatttggtactttggtgaacctaatgctttaaaagtacaaaattcctgaaataccatatgaatggaaattgttttacccaaagtgaaaggatcaccggattgctagtgaaaatgcaaaaatattccataaaattttgacaggtgtttttgtcttgtcaattcgctagtgtaaggatatttaataaatattttcccaaggtatgatcaagaatagcagatagttaacatctaggggctggtttgtttgacgtaactggtactgaaaagagcagttctctgaagagagagcagtcatattgtttagttaaatttcaagaagacctgctgaaatacaacagtgataaaccactgcttcagttttctgtcctctccagtgggtcttccttgactgatgatcttcctattgtaatttcactgtttactgccttcaattatgttatttttggttccattgcatattcattttgatataccaaatatgctatgtgagtaagctcggagacatttgcgcaagtgtaggacgaagcgagagcggttccttccagccgaacctgcctccggaggcccggtccgtgcgttcgtctccaggactgcagggggcggccctgccaccacctcgaggccacccgaggatcgatggctgtcggctccgcaaggttgaggccccgacacctgcagcgcccgtgcccaggtgaccgcccgagggaggggcgagggcccagctnnnnnnnnnnnnnnnnnnnnnnnnnnnnnnnnnnnnnnnnnnnnnnggaggggcaggggagcacggccccagggaccccgcggcgacctgctgtggctcagccggct

SEQ ID NO: 150424 - DNA, 759 bp, Homo Sapiens
tacagtttaagcgttcaggggtggtgaggtgaggtcgctcttctctggcttgtagcacggtgagacctcacatctgactacactctgcaggatctttctctcatcctggtccaggcacacagcaaaggggcagctgttggagccgatgatctgcaccttgtccactttgatctgcgatgtgctaatctggttaaagcccttcttggatttggagttctgccttttcaccacttctgtcaggtttagcgtcagggcctccatgctggaatccagctcctcctgcttccggcaggccttgttgaggttcacggaggtacagaccttctccaggttgctccagcgacttcgtccactgatggcccccttgctgtaaataatctgtagtgttagaggaacagcctcccggtcgccatcgatgcccagccgcttgctgccaggacctgacgccttgatggcacgtgtggcagcggagtgacccagctccaaggagtggatgaagatctctgtcgtcttctccccagtgatgaaggtcagctcggtctgatagacttgcagcagcaccggtctggcggcaaagcggcagtagtagagtagcatgtcagccaggatgggcagctgggttggggagccctccaggcctgggcttcagccttgcagggactgctggcacaggacgttcagggggcaggtgcatgaggcccagtacattgcgctcatatctcatggggtccagcatgccgagatagtggatgttccctg

SEQ ID NO: 150425 - DNA, 861 bp, Homo Sapiens
ggaccgtgcacctggacacgtggagaggccagggccacagagcggcccgcatcagctaggtcccagccgggcgctcgtgcaaccggatagcgcagtcggaccacccggcacatgctgggatgaggcagtcctgaagcagggcatactgcaccacgacacaccaggtcacccacccaccagaccccacagctactgccatcccagagtgtgcactgaagataggggagcactttctaacgtcaacttctattcactgttgcactgcgtgtcacagagactctgtgccaggcgctgtgggagaaaaagacagaggaatacgtccctagggcctctcgggtgccagacactgctgcaatcacatacagacatcactcactgagtcctcaccacaaggctgccaccaagccctaccagaaccactagtctaaggacagaaagaccaaagcgctgcaccatgaagaagctggccccagctcacactgaagagaccagcacacttgctcctgagtccggcccctcaaacgcagacatggctgtggtgacagccctcttcttcaccatgggccccttgaggtgacgcgcacaccgagcaatgtctgcagaacctttacccacggggctccaggccgcccctgcccctcgagagccacccgagcagcagcaaacacagtcccaaggcctgtcccactgggcgcagcgtgggccatggaaggccctgggccagaagtgaggccctgacctccgccatcatgcacacggtgagaccctgcttgtttttttcagctgtaggtcccggtgaggactcaaacaggccctcgaggggcagaggcgcgcgcgagggcagggacgtccaatggacgc

SEQ ID NO: 150426 - DNA, 753 bp, Homo Sapiens
  misc_feature (337)..(374): n is a, c, g, or t
taccacctcactgccattacttcaatctgactttcataggatttgatagcttcatttacagcttcaactcttgtttgtaagatgtatgctctctcttgagctcttccagttccagagtgatagcttcaacttcctgttgtttttctttcatcttcttgctagatgcatctgcctttgttttggcacaatccagtttgttttctgagcatctgttcagcttctcgctctgctggtcagcttctgcattgtgtgtcagtgtgttattttccaatacgttcatagtttttcttctgcttttctttggatttctttagtgtttcttcaaagtctcctcacnnnnnnnnnnnnnnnnnnnnnnnnnnnnnnnnnnnnnntgttgcttgtgatatgagctttgctggagcttggtttgtaataaatctgcctcttcagttttcatctcccactgctgttttagttggcgatacttttcagcagtgtttttaagacctgctaattcctcttctagagcccgcagctcattctctttgattctcagttcatcctgaacatctttgagttcttgaaacttggttaaaatggaagctgcctgggatcgagcacctccactcaatgtcccatgaggatcaaacacatcacctccgagagttacagttctaagtcagttatcctcttatcaaaggccacttttttggcattatccatattgtcacaaacaaatgttgttccaaagacaaactccacctcgtgcca

SEQ ID NO: 150427 - DNA, 869 bp, Homo Sapiens
atataacgcgtaggaaccgcaggacttttcatcccctgtggtcccactggtcctcaactgcgccccggaggacggacagacccgctcggacgctcgtttggccctataccctgccgccatggtcttcacctggacgacccatctgcgcgcagatcatatggtaaagtgaaccagtggacgacacagatccctagcactttatcctttaatatgtcatgacggggtatcccattcaagatacggaactccctaaagctgaagaatggtgatacaagttactttgaactgcccacgaaattcaagatatgaacaactccgggagaagaaaatggctttccagagtagcactggagatcctcttccagagatcagcaaggacaactcctgcaacagaaaactgtacttgttcctcctgcttgctccgggctcccaccataagtgacttgctcaatgatcaggacttactagcacgtgatcaggcataaagctggatccgtgtcagccaacggtgaccgactggcaggaacttttgcgagcaaatggcgggatgtcctatgacgaattgtgcttcctggagtcagaggccacagatgccccaccttggaagttctatgactccggaacagtcagaggacggtgggccacgctgagtggagctctgcaggctctaccaccagggccgacgtggaagacggttatgcgcacggtggcgtggacgaggagtggccaagcgggagcgtgacgaagaccatccaggcacttctagaagcctcaatcttacttcactttacttggcctctcggcaatgtgaaacaacccagggtcacagaagggaatgtgactcagtagcacataagagttaggacaag

SEQ ID NO: 150428 - DNA, 965 bp, Homo Sapiens
cggcagtaactactaacggtttaaggtagcgaggcctgggtggcgaattcggcacgaggatccaaggcggcccggatgacgtgctgggcttcctgcgcgtggtgcgcttcgtgcgcatcctgcgtatcttcaagctcacacggccacttcgtggggctacgcgtgctgggccacaccctgagggccagcaccaatgagttcctgctgcttatcatcttcctggccctgggtgtgctcatctttgccaccatgatctactacgctgagcgcattggggccaggccctccgaccctcggggtaatgaccacaccgacttcaagaacatccccattggcttctggtgggctgtggtcaccatgacgacactgggctacggagacatgtaccccaagacgtggtcaggcatgctggtaggggcactgtgtgcactggctggcgtgctcaccatcgccatgccggtgcctgtcatcgtcaacaacttcggcatgtactactccctggccatggccaagcagaagctgcccaagaaacggaagaagcacgtgccacggccggcgcagctggagtcacccatgtactgcaagtctgaggagacttccccccgggacagcacctgcagtgataccagcccccctgcccgggaagagggtatgatcgagaggaaacgggcagactctaagcagaatggcgatgccaacgcagtgctgtctgatgaggagggagctggtctcagccaagccctgggctcttcccgaccccgaggagcgctgggcctgcgacgctcaccatcgagacagaaacaggaggcagtgctgcttctgctcacactgggactatgcctgcgccatgtatgtccggaaggccatcgtctcgtgacttccttttgattactgagtgtgcctcatgtggtctgtccgcctggagggtggccacaggttatcaggccttccgccggagatccggc

SEQ ID NO: 150429 - DNA, 889 bp, Homo Sapiens
tccgtgagtccatcgcgtgagctctaagcttctgtcactgcagtacatctgcgtcactgcttgaggcacaaatcagaggtgtgacatgacttgccaacaggacctggcactggctcgtattggcatccggcccagtctgagtgccaggtgattgggctggcgggcgaccccctgtgagacgcagcgggccatgggcactggctctccagtgagctggaccttctgaacctcagctgtgttctggggcttggcaagcactcggagccagatatccacgctcctgctgccctgcgggaacgtgacgaacaggcaggtgtagttgccttcatcctctacgcgcaacccgaacatcctcagcgaggcattccgcagctccgcgcccagtctggctgccacgaattccagccgtttggactccgaatagctggggccctgcgtttggtggaagacggccatgctgccagattcaccatgccgcgcccaagtcagctgtgacacatgcgtcacctccatgttgggcacctgtaggtagcagggcagcgtcacggagtcgcccaagaagccgggcacctgggtgggcgcctgcacgacgacgtccccggttcctgggggtggccaggacagcaccagtagcgccaccagcagcagcggccacgcggcggccatggctcgggccatgccagttgctccgagcagctgggcctcccgcgggcgtctcctcgcttcccggcgcccgctcgctctgccgcggtcgctgcgagtccagctcccggagctcaggtcctggaatccccggggggccgctcctccagtgcctggggtgggaaggggaatacccacttcttcaagctccctcgtgccgaattcggcgcgccgtcgacttcatact

SEQ ID NO: 150430 - DNA, 826 bp, Homo Sapiens
gtgggaagagtatgaagtcgacggcgcgccgaattcggcacgaggtgggtattccccttcccccccaggcactggaggagcggccccccggggattccaggacctgagctccgggagctggactcgcagcgaccgcggcagagcgagcgggcgccgggaagcgaggagacgcccgcgggaggcccagctgctcggagcaactggcatggcccgagccatggccgccgcgtggccgctgctgctggtggcgctactggtgctgtcctggccacccccaggaaccggggacgtcgtcgtgcaggcgcccacccaggtgcccggcttcttgggcgactccgtgacgctgccctgctacctacaggtgcccaacatggaggtgacgcatgtgtcacagctgacttgggcgcggcatggtgaatctggcagcatggccgtcttccaccaaacgcagggccccagctattcggagtccaaacggctggaattcgtggcagccagactgggcgcggagctgcggaatgcctcgctgaggatgttcgggttgcgcgtagaggatgaaggcaactacacctgcctgttcgtcacgttcccgcagggcagcaggagcgtggatatctggctccgagtgcttgccaagccccagaacacagctgaggttcagaggtccgctcactggagagcagtgccctggccgctgcgtctctcaggtgtcgccgcagccaaatactggcctcgactgggggatgccatacagcagtgcaggtctgtctgccactgtacagcctgattggccccgccgtgagcaatgtacgaggacaaacttaac

SEQ ID NO: 150431 - DNA, 2228 bp, Homo Sapiens
  misc_feature (527)..(588): n is a, c, g, or t
tcagtagaggatagtgggtctgcacacgtatgctgagagagtcagcgtgtgatgtagtgctaatcagcattgggagccaggcagagttcacttgagccagagtcagacccagcttggcaccacagggaacttcgactttccaataataaaagattagcccagacgtggtggcacatacctgtagtcatagctactcaggaggctgaggtgggaggatgacttggcgttgagaagtcaaggctgcaatgaactgtgatctcaccactgtactctagtctgccaacagagccagaccctgtctcaagacaaacaaaaaactctggacacaaagatctcgagtgagctgctctggttggcagtattggcagtacttcttgcatgttgtcacatgttgctgtgagaatcaggtgctgcctatatggctccactgggagagggcagatggaagccgtcgcctcatctgtcgtggaacgtgtgctgtgcacctcctccctttgctgatcttaatctctgtccttttactgtannnnnnnnnnnnnnnnnnnnnnnnnnnnnnnnnnnnnnnnnnnnnnnnnnnnnnnnnnnnnnaggagggtggtcttggagacctatgaacttgcacctgcccccgtcgttttgaggtctggcacagggagggaggctggtctctttggagggggtcttcatccattggggtcgggtccaactctggaggcccacgtccttgccagctccagtctctctcccctctcagtcccgacgctgtcaccttgtgccctctgtctgtggatcctgggaagagctgttctctctgctcacagctgaataggagacatgcccattagctgaggcgctggcatgctctgtactcgagggacacagatgacagtgccaaaggacctcacgggaacatttggaccaatagaaataaatcccgatccccagcaggatcagaaaaaccaggattcccagaaccaggaagatgatggcgttacgggacatgcctgagtgctcactgggaggtccctctttgacctggacggtcagttctgcctggcgagctcctagggcattggtgacgttgcagattaaagttgtgttgattggtttgtccacaggacggatcaggagctgggcgccctgggccacagcaaagggtggcaggggacccatggtcgtgctccaattatagcctgtgggctctgggttgctgcgagcatcgcaggtcagggtggcctcattctggccaaggtaccagttgttatcatagccagagatggatacctctggggggtagtacacggtgaggttcacagtcagcagctgaggcttctcaaagctctcgtgctccaccttgcaggtcacattcttgccgtccacctggcttgagggcaccaatatccagaggctggtgacagtgactgtgccagacaggaaccctggcacctggctcgtattgggcatcccgcccaggtctgagtgccaggtgatttgggctggcgggcgaccccctgtggagacgcagcgggccatgggcactggctctccagtgagctggaccttctgaacctcagctgtgttctggggcttggcaagcactcggagccagatatccacgctcctgctgccctgcgggaacgtgacgaacaggcaggtgtagttgccttcatcctctacgcgcaacccgaacatcctcagcgaggcattccgcagctccgcgcccagtctggctgccacgaattccagccgtttggactccgaatagctggggccctgcgtttggtggaagacggccatgctgccagattcaccatgccgcgcccaagtcagctgtgacacatgcgtcacctccatgttgggcacctgtaggtagcagggcagcgtcacggagtcgcccaagaagccgggcacctgggtgggcgcctgcacgacgacgtccccggttcctgggggtggccaggacagcaccagtagcgccaccagcagcagcggccacgcggcggccatggctcgggccatgccagttgctccgagcagctgggcctcccgcgggcgtctcctcgcttcccggcgcccgctcgctctgccgcggtcgctgcgagtccagctcccggagctcaggtcctggaatccccggggggccgctcctccagtgcctggggtgggaaggggaatacccactcctcgtgccgaattcggcgcgccgtcacttcatactctctcgccct

SEQ ID NO: 150432 - DNA, 858 bp, Homo Sapiens
ttgggtccctgcagtcattgcgtcactgctgagcacatatccgagctgtgcaggatgtgcagacagaccctgcactgctcgtatggcatccgcccagtttgatgccagtgatttggctggcgggcgaccccctgtgagacgcagcgggccatgggcactggctctccagtgagctggaccttctgaacctcagctgtgttctggggcttggcaagcactcggagccagatatccacgctcctgctgccctgcgggaacgtgacgaacaggcaggtgtagttgccttcatcctctacgcgcaacccgaacatcctcagcgaggcattccgcagctccgcgcccagtctggctgccacgaattccagccgtttggactccgaatagctggggccctgcgtttggtggaagacggccatgctgccagattcaccatgccgcgcccaagtcagctgtgacacatgcgtcacctccatgttgggcacctgtaggtagcagggcagcgtcacggagtcgcccaagaagccgggcacctgggtgggcgcctgcacgacgacgtccccggttcctgggggtggccaggacagcaccagtagcgccaccagcagcagcggccacgcggcggccatggctcgggccatgccagttgctccgagcagctgggcctcccgcgggcgtctcctcgcttcccggcgcccgctcgctctgccgcggtcgctgcgagtccagctcccggagctcaggtcctggaatccccggggggccgctcctccagtgcctggggtgggaaggggaatacccacttcttcaagctcccctcgtgccgaattcggcgcgccgtcgacttcatactctctcccc

SEQ ID NO: 150433 - DNA, 1360 bp, Homo Sapiens
  misc_feature (1051)..(1171): n is a, c, g, or t
tttggaggtacaataaataagctttaatgagattctgggtgctggagacagacaaggagcttacgtgccaccaaagcaaccaatgttcctttatctccccaactctgtggggtcccactggcctcctcacccttgagccctttgcccctgccatcctgctggttcctatctcttccccacacttctctgttcccggctcttccatctctgtccagagcaaatcctctgtcctgcttattttctcttgcagagcagctcaagctttgcattcccatttagcatcttggcccaaggtcttctctccctcaacgtattttcccaaacagttttctttataagaggaattctgctgtctgccctcaagatcatagacctttttaacttgtcagttgcactgagcagctgggcctcctgggtcttgggtcgcatccatcttggtcctataggagcgtgtcctgagcaactgcagcgctgcctccccctgcatcccttcccccttgtgttggaaattgcatttgcttcttttgtgggttatttcctgccagtcccagcttgctggctgcagatgctggcagaaagtggctgcagatgctggcagaaagtggctgcagctgacaaccttcttcaagttcacatctagtagttttctctgctccttggacaccccccaggcagctgcttgcggcctgaattgcagcctctggtgaccagggtcagtggctgtttcttgtaaccacagagatctgacggatacagagatttagaagctcaaggccagaggccaattttttaccaaaattctctggtggcccacacccttctgtgtggtctgctatgcagtaaaggcttaaccttgcccaaagaaagatcgggccctttatcctcagctcctgggcattcatctctaagcccttggaatatcctgcctggtagctgatctgggagtcttgggccactctgggtggttcatgctaatgatgtgatttatggtgggggtcttgggccacacggtattggcttgatgtatgaggtcagccgtgtggatggtgannnnnnnnnnnnnnnnnnnnnnnnnnnnnnnnnnnnnnnnnnnnnnnnnnnnnnnnnnnnnnnnnnnnnnnnnnnnnnnnnnnnnnnnnnnnnnnnnnnnnnnnnnnnnnnnnnnnnnnnnacgtggtggcacatacctgtagtcatagctactcaggaggctgaggtgggaggatgacttggcgttgagaagtcaaggctgcaatgaactgtgatctcaccactgtactctagtctgccaacagagccagaccctgtctcaagacaaacaaaaaactctggacacaaagatctcgagtgagctgctctg

SEQ ID NO: 150434 - DNA, 1142 bp, Homo Sapiens
  misc_feature (68)..(94): n is a, c, g, or t
tttttttgacacaagactaattactttattaggtgcattctataagttgaagaggagaatttttggcnnnnnnnnnnnnnnnnnnnnnnnnnnncaaacagagactctggggcccgaggagctcaggaaaatggaagcggagtctttgcatagttctaaatgaacaggaggtggcagcagtaggcaacgcggattctcggcggaaatgcagcacttgcaaaaaccagggacagaaggctttgagaaagaggagaaggtcagaaggtgactaactatttctttttcgtagagaccatggtgtggaacattcgtcctctctaccaggggcaggatgccgcgtcctacatgatctgcctgggcatcccgtaccctgtcatgcccgcctgggaggctcccttgttgctgcccatctgcaggcctattacgttctgtccctggcgaagctgctcctcggaaaagcctctccgattctgctgggctttcctgtgaaaccaggatggctctccccgatagcagccatcatccttggtgactgcaacgctgcctaaagccatcagggtcctctgcacagctgccatgtccttcccttcccatagatccaccgtctgaaagatgtcggtggttctgacaccataggtctccgcagcttttaggaactgggagatttgctccatctgcttaaaagccatctttgactctgagatcttgggtatgggctcttgtcctggtgggtataaactatttatcagcttgcacaggaccgtcccgtccattaaccatttctgaaaatgggccctgccggggggcgggtgctctatgtcctcggcgcactgcaggatgatccagtccaccagcttgttctccaggtccgcatcatacttctgctcgatcttctcctgcacctctcggcttaagccatagctcgggcccctgttagccatctctggaaagaagagaagacacgcgcggcatccacacaatagcagcagcagcagcctccggctccctgcagacggggctgggatatggctgggcaacctggcccagcagcagcaaagagggcagaaagccgggcgtggtttaaatcaaggagccaatgaagccaatgggttcacctcctcgtccgattcaccccggctcac

SEQ ID NO: 150435 - DNA, 555 bp, Homo Sapiens
  misc_feature (60)..(86): n is a, c, g, or t
acacaagactaattactttattaggtgcattctataagttgaagaggagaatttttggcnnnnnnnnnnnnnnnnnnnnnnnnnnncaaacagagactctggggcccgaggagctcaggaaaatggaagcggagtctttgcatagttctaaatgaacaggaggtggcagcagtaggcaacgcggattctcggcggaaatgcagcacttgcaaaaaccagggacagaaggctttgagaaagaggagaaggtcagaaggtgactaactatttctttttcgtagagaccatggtgtggaacattcgtcctctctaccaggggcaggatgccgcgtcctacatgatctgcctgggcatcccgtaccctgtcatgcccgcctgggaggctcccttgttgctgcccatctgcaggcctattacgttctgtccctggcgaagctgctcctcggaaaagcctctccgattctgctgggctttcctggacaaggaaagtgagagggaataatgtcattatgacagttttccaatccttttcaagatatgcaattagacaggctc

SEQ ID NO: 150436 - DNA, 994 bp, Homo Sapiens
ggttttaatcggcacgaggccggaatatggagccctgggcgcgggggcggcgtgtcaggtggttgcggagctgaatcatattctaagaactcagccactcaggtatccaccatggtgctgggtcctgaacagaagatgtcagatgacagtgtttctggagatcatggggagtctgccagtcttggtaacatcaaccctgcctatagtaatccctctctttcacagtcccctggggactcagaggagtacttcgccacttactttaatgagaagatctccattcctgaggaggagtactcttgttttagctttcgtaaactctgggctttcaccggaccaggttttcttatgagcattgcctacctggatccaggaaatattgaatccgatttgcagtctggagcagtggctggatttaagttgctctggatccttctgttggccacccttgtggggctgctgctccagcggcttgcagctagactgggagtggttactgggctgcatcttgctgaagtatgtcaccgtcagtatcccaaggtcccacgagtcatcctgtggctgatggtggagttggctatcatcggctcagacatgcaagaagtcattggctcagccattgctatcaatcttctgtctgtaggaagaattcctctgtggggtggcgttctcatcaccattgcagatacttttgtatttctcttcttggacaaatatggcttgcggaaagctagaagcattttttgggtttctcatccactattatggccctcaccatttggatatgagtatgttacaagtgaacccagcagaggcaagtacccccaggctgtcgtacctcctggtcaggtggtcgactccccagattgaacgggctgggcctccgggcgacacgtacagcacaaaaagtactgttctgcttacagtaaagggacggaaataggagataaagcaaacttggacgaggccgtcccacggttggcacactggcaag

SEQ ID NO: 150437 - DNA, 820 bp, Homo Sapiens
ggctggttaaccggtccggaatttcccgggatgaattccattaacactgaagaagtgatcaatgctattgcacccgagaaggatgtggatggattgactagcatcaatgctgggagacttgctagaggtgacctcaatgactgtttcattccttgtacgcctaagggatgcttggaactcatcaaagagacaggggtgccgattgccggaaggcatgctgtggtggttgggcgcagtaaaatagttggggccccgatgcatgacttgcttctgtggaacaatgccacagtgaccacctgccactccaagactgcccatctggatgaggaggtaaataaaggtgacatcctggtggttgcaactggtcagcctgaaatggttaaaggggagtggatcaaacctggggcaatagtcatcgactgtggaatcaattatgtcccagatgataaaaaaccaaatgggagaaaagttgtgggtgatgtggcatacgacgaggccaaagagagggcgagcttcatcactcctgttcctggcggcgtagggcccatgacagttgcaatgctcatgcagagcacagtagagagtgccaagcgtttcctggagaaatttaagccaggaaagtggatgattcagtataacaaccttaacctcaagacacctgttccaagtgacattgatatatcacgatcttgtaaaccgaagcccattggttaagctggctcgagaaattggtctgctgtctgaagaggtagaattatatggtgaaacaaaggccaaagttctgctgtcagcactagaacgctgaagcacgggcctgatg

SEQ ID NO: 150438 - DNA, 1096 bp, Homo Sapiens
acaatgttcccccttggaaacagggtgttcttgaggttaaagggttggttatacttgaaatcatcccccttttcctgggcttaaatttctccaaggaaaacgcctggccactctctactggtggtttgcatgagcattggcaactgtcatgggcccctacgccgccagaccagggagtgatgaagctcgccctctctttggcctcgtcgtatgccacatcacccacaacttttctcccattggtttttttatcatctgggacataattgattccacagtcgatggctattgcccccaggtttgatccactccccctttaaccatttcaggctgaccagttgcaaccaccaggatgtcacctttatttacctcctcatccagatgggcagtcttggagtggcaggtggtcactgtggcattgttccacagaagcaagtcatgcatcggggccccaactattttactgcgcccaaccaccacagcatgccttccggcaatcggcacccctgtctctttgatgagttccaagcatcccttaggcgtacaaggaatgaaacagtcattgaggtcacctctagcaagtctcccagcattgatgctagtcaatccatccacatccttctcgggtgcaatagcattgatcacttcttcagtgttaatggaattctctgaatctaaaggtagctgcactaagaacccatgtacagtagagtcttcattcaaagatgtaatgtacttcatcacctcagattctgtggttgttcttggtaacttaatgtgagtggctttgatcccaatctcttcagcagccttcagcttcacatttatataaagattggaatcatctctgttgccaacctgtaatattgccaggcgtggtgtgaaaccaggtacttgctccttcaactgagtgacttgatttttcagtctcgcccttatttgcgcggagatctccttcccgttcaggatttctgctggcgccatggcctttattagtccgctgcccacgatggacaccaccaatatcgaggttccactccctccgcagccaagcaggacaacccaacccacgtgcttagggactggccggggcccc

SEQ ID NO: 150439 - DNA, 854 bp, Homo Sapiens
ttttcagaacctgagtaccttgggtaagcaggaaggaccagctttcgttagacggctgggttgacccgcagcagctttgggacagagtgctctgccttgtgtgggaacagcctttgttagcaaggcaatggggggcttctccctgggcctggtctcttgggtctcaggctttagcctcctcttgatgcaggctcctcaacagtcacaccttcagcagacacacatgctagagccttcatctggggacttttgcaccagggcagacaccttgtgtttcggatggggagatgcaggcactggcttgacctccaccttggtaggctctgtctgaggagctccatggccaggtagcccaagactgaggggaggagccatcgacaagggaagtacattttcaggagggccagctggagtgcccctagactccattttaggttggggaacagctctcccaatggaggctggaggcaaaggaggtgggggaacagtagaccagaatggagcatgttgaggccctgggccccatcccaagggcccataggtacatgtggaactgtaaggtgagactggggcaggagggggtgcccaaggcacactgcaagtgggaggcacggcataggcaccaggagtaccagacactaggggcaccgttggtggggggggcaggcaaggatagccagaaggggacacatgaggataacaaggccaggatggcaagggggcatagtgagtaaacggatcaggtagtactggccccatagacaatggaagactaggaggctgcaagggaggtgggggcagactggggggcatgccagcccacctcggccgattgacccgcgcccactgcctag

SEQ ID NO: 150440 - DNA, 1791 bp, Homo Sapiens
gccggagcgcccgcgaggccttttccctctctctccctgtatccgggtgtttgccccttccggtgtttttccctccaaaacttcaggctcgcgagttgtcctcccccgtgccggaatacctctggtgaccaggtattactttgatatttcgtatgctggcacctctacaatccattggcgaagaacagagcgggacctcgtcccaccctcagtctaaccagcccccctgatgtcacctccaaggccaaccccgtactcacgcacaagtgccacatacctgccaaccctccccactctgggctacaattgcccgaggaagccgcaatcagctcgggcctactacccaaacccctccttgtctgaggactgtagggagtgggtggggcctgaacatcagctttggcctcctgacccaaagcatgaagcaggaccatgggccagagaggggagcaggcttcctgggggctggactcgagtcttctctgcctcagatggggtggccctgactttgagggagctacagatgggtgactgggggctccccaggcctcggggcattgggggcagccagaagaggaggggctatgggatggcctggagctggggcagttgccagaagctggtctcactcctagtagcccggacagaggagctaagagcgagtgctgtgtgcatagttggtgagggacacactcccggcctggcaggtccactttccgctgtcctcgtctcttgcgcaaaccttcagtttttgggataaatccaaggaggccaggagagcagctccaggcacaacacctggtctggaggccctgccctgaccatggcatccttcgagcacgctttcctctgacccactgggctgcacctgttgatttctcaagcccccatccttgcccagccccactacatccctgctctgttttttttcaggacgcagctacctctgtggagcaggtttgggatgctcatcccttgacagtcttgggtggacctgtcgtctgtcctgttttatcccccacaccccccaagaggcctccccgtggccaccaccgccactaccacttctcaatgatgtggctcatgtagtcctcggtgggcacgcggcccggctcgtcggcatcctcccgcggcagtgcctccttggcccggtgcagcagacgctcctcgcggctcctcaggcgctgctccctgcgctccagctgccgcttgtactggtagcgctgctggaagaggtccttggcgtagtcgtacagctgcatgtccaggtcgttgagctcctcgatgcgccggatggtgtcttcatccacctccacgccgcccgcccgcgtgctattgtactgcatgaagggccggatgaacttgaggttgaacgtccgctcgaacaggtactgcgtcttgcgctggaactcggtcaggccgaagaaggccatgccccgcaggttcttcttggcgctctcgagcagcagctgggcccgcttgccctcggggatgaaggacaggttgtagcagcccaccaggctcaggtcggccagcatgcgcacctggcggttgttggccaggttgtacgggcagtccatgaactcctgtagcgtgcagcccgaccagtccgtgccctcgtagcagggcggcagctcctcaggcgtgggcgtgcgcccatcacacatatgcaacgacgtcttccacgtggcacccctctgcacatgccgccactcgctcaggtagcgggacacggggtctcgtagccctcgtgccgaattcggcgcgccgtcgacttcatactctctcccc

SEQ ID NO: 150441 - DNA, 1183 bp, Homo Sapiens
tggaatttgttgtgttcgcttgtgctcactatcgtgcgtcgggtggtccctggcgaccatcgctacgtctcgggttaggttctcaggccgctcgcccccagtgcgttgtgtggccgggtacccagtccgcttctggaaattgggggccttccacgtcgtgatccccagtccagggctcaacaggccgccgcccttgaagtgttggcctggccagagaccccaccagaatgctcgccctcaagcagcgccttcctggctctggactctggagggcagggctggccccgggccaagacggtgcttcccagccaggtgagttcagacagtccaagtgtcacaaggacgcacgtcctagcgcccaaggctccctgggctctgcagcgttgtctgccccagcacagggccaggcatctggctggctgcgtggccccctcttggtccctcttgcagctcaatgggtgacaaggcacagcatcagggcaccagcaccaggaggggctgacagcagacagcaggtcctggtgctccctccagcctcaccaggcaaagccggccctgggccaggctgggtgtagggccagggcgccacgaggagcggaggtcagcggggattgtcaaaaacagtccctcaagttgagtctcgaactttgaaacagacaaaaccttcgctgcatgacaggagcagccctggagtctcttaaaggcaggtgggcagaggcagtgctgccgaaggggcctgggggctgtaggcatcttggggctggaggcagatcggggacaagctgttggccagctctgccatgctgaacttgggtgccagtaccacaccctgccctgggcatgcagcaactgtcagccttgctgccccagcttgcgcactggtgagggccaggctgctctctgtaccttggcttcctgcctcctaggccggggtccccttgtggccttggtgttggctggggtagctgttgaggatgggcctgggaggccagagccgcagccccacccggggggcaggcaggggttcctgagctcagccggcacgcaggtggggcacgtccccagggagggattggtcccgaaccagagaggtgtcccgtgggggagaggattggcagaaagaagaggatgtgttggttttgatagaagagaagcctcgtgccgaattcgccacccaggcctc

SEQ ID NO: 150442 - DNA, 998 bp, Homo Sapiens
  misc_feature (157)..(157): n is a, c, g, or t
  misc_feature (370)..(370): n is a, c, g, or t
cttcttttggtctcgggtgttcgtgggcctgagtggcccacgcttgtagtgtgtgttctcgcctgtctcgtcggccgtgtcgtgggcgccctcccgcacttgcctgcccggacggctcccgaacctgtcaggtctcccttcctgggatgtgtccatngagacgtcaccggatgcgtcactcctcgtctcacgatcacgctcctcagggtggctactcacatcatcgccacagccccgtgtcgttgagagtgtactgctttcttctgtaccgcatccccgggcccttttccacctgatgtttgatgccttgaagagcttgtacaggggctccccggcactgtcccttgaggtactggtacaggcagatggnacatccacgttggacagcatcctctccaccacagtctcagacctgcgcagcatcagcttggggttcttggccaccacgtactgctccaggagctccaggaagagcgtgtgcatgatgtccgtgtagtactccagtttcccgtgcagcgccaccgtcagcaggacgcgaagtagaccttggcgcgggccgagaactcccgctggttctccagggtgtggatgaaattgatgaggaaagacttgctgttcagcaggttggagaactggtagagggcctgctccaccaccggccgccgcggctcagggatgtccagcttgccggtgatcatcacgtccttgtcgccgtccttggagggcaggaagaagacgcggtcggtgtaggtcttgtagtccagcacggggatgccggcctcgtgcacgtcgttggtctggtcctccatctcgatcatcaggtctgtgaattccttcttgcagcggtcccgcacgctctcctccaggccctccagctgggacttgatcttctcatactctcgttcggcctgctggctcttcctccagtagcagtagacagacaccgcgatgacgaccaccatggcacgcctcgtccgattgaagcgcggcccactagc

SEQ ID NO: 150443 - DNA, 922 bp, Homo Sapiens
gaggctccccgaacgggtgatgcggttggagaactggtagagggcttgctccaccaccggccgccgcggctcagggatgtccagcttgccggtgatcatcacgtccttgtcgccgtccttggagggcaggaagaagacgcggtcggtgtaggtcttgtagtccagcacggggatgccggcctcgtgcacgtcgttggtctggtcctccatctcgatcatcaggtctgtgaattccttcttgcagcggtcccgcacgctctcctccaggccctccagctgggacttgatcttctcatactctcgttcggcctgctggctcttcctccagtagcagtagacagacaccgcgatgacgaccaccatgggcacgatgaccagcggcaagatgaggctgagcggcacgtcgctcacccgtgtgtcgtactccacgcggcccagcacccactcgcgagagccgaacttcacaatgaactcgggcaggttgtgtgtggtgtctcgtttctgccgccgcttgggcgggggctgcacctccgggggctcacagtacaggtcggtctccgtcagcgtcttcatggtgcagcgctcggcacccacgaaggcctcggcctcctgcagcgtcatcgccttgttcagattggtgccccgggcgtggatgagcttgttgacctgcttcttgacgccacctgtgaagttctcaaaggtggggtcaggcacgtactcgaaggccccggcctctgttctgagcagggcacggtgcccgtccatctcgatcagcaccgtgaggttgtaggcctctggctcctcaggcacagccggggacaggaagacgaccttggtgtcattgtggaacacgtagtctgtacccaccaccgtcatgggctgcagggattcagcctccatgcaaggaattccggaccggtcc

SEQ ID NO: 150444 - DNA, 1389 bp, Homo Sapiens
  misc_feature (68)..(68): n is a, c, g, or t
  misc_feature (71)..(72): n is a, c, g, or t
  misc_feature (95)..(95): n is a, c, g, or t
  misc_feature (171)..(171): n is a, c, g, or t
  misc_feature (197)..(197): n is a, c, g, or t
  misc_feature (215)..(215): n is a, c, g, or t
ggggccccaaggtgccaaggccccgttgcttggggccaggattggggggaagcctggaaccaggcttnttnntggccctcccatcccccaggagncttgatctggggacccaggtgggagggggatggaggtgccccagggggtcaaaggcggggggcgccccctgtctcnagaggagcagcccccttcttcccgtnccccccgcccccaagccngttctgctcagtatttcccagtctgagtcacaggcacggggtagaagatcaagttgaggcccagtgggcgtccatttctcccagcagcagcctgaccaactctccatgtgtctcaggcctcactgtagcactcgtagatgttgtcctccatcaaagccaccacctgctcaaacttgtgctgcagttgtgtcctccgggccgtggggttggcctccagcgcggccatgatctgcggccgatacctcttggcgtacttataaatctctgccatggccacattggtgttgaactcattctggtatttcctcgactcctcggccagatgggcattcatctcttgctcgctgagcggcgtcatgtcctggatctgcttgtagtagcgctgcacgatcttccggtactcaggaatctccttggcgtagaggagcttgttggttggcgaatccttgcccagctgcaggtcagagatggagcaggcgtcgatgaaggcctgcgcgatgactgaaaggcaggcgtcgatgtggtctgtcttgtcgatgtcaaagacaaactgggggttcttcaggatgttcacccagaaccggagaggaaggctgttggtcttccagatgtgtagggtgtcggggtcggagattcccctcttctcagcctgctcctccaggaagtcgaaaaagtacttgacagccagtgggggcttgtcttcacggatactcagaatggccttgaacaggtcatccagaaacttctgcaacgtgcccttggtggagagcaggcgggtcaggtagatttccgggagcaccttcttgcgatggctctgccggtgagacttcttgggctccgccagctcgtccgtaggcagcaccaaatggaaatacttctctgtgtccaagtctttcactcggcccagtgtgttgtccttcttgtctatgagactcatggccagggaggcaccttcagggatcttgtaatgggccagcgtgttaagcttcttgcggccgtcttccaccactgaggtgtcgtccaggtcccgaaggatgtagctctgtgtgctggaggcgaaccactcaaggtcgacgtcctctgcacagcggccactgggagtagggcacattcttgcagaaggcctccaggatccctcgtgccgaattcgccacccaggcctcgctaccttgga

SEQ ID NO: 150445 - DNA, 1125 bp, Homo Sapiens
  misc_feature (1044)..(1060): n is a, c, g, or t
  misc_feature (1064)..(1096): n is a, c, g, or t
tgagccacagtgcccagcccctgctaaatgttttgtaggggaaccttaggagccctgtgaggccttcattttcctattagaaggatttcccttgccctcttgctgtgagttcctagagatcgtgctttctctgtctcaggacctgggatccagttggaggacggcggtgatggcagggaggatgccccgttgagaatggagtggtaccgagtgctctcggcacgatgccaggggcctggccacccgctcccaggtcagaggccagccccagtcaggggcttggtcaggcctgatcagccaagaggcggccccccaccaggaagacgggcttcccatggggctgacaagccgtacacctgccccgaatgtggcaaaggcttcagcaagacgtcccacttgaccaagcaccagcgcacacacacgggcgagcggccttacaagtgcctagtctgtgggaagggctttagcgaccgctccaacttcagcacgcaccagagggtgcacacaggcgagaagccctacccgtgccccgagtgtgggaagcgcttcagccagagctccagcctggtcatccaccgcaggacacacagcggggagcggccctatgcctgcacccagtgcgggaagcgcttcaacaacagctcgcacttcagcgcccaccgccggacgcacacaggtgagaagccctacacctgcccggcctgtggccggggcttccgccggggcaccgacctgcacaagcaccagcggacccacatgggggcaggctccttgccgacgctccaggccggtggctcctggaggccccggtgcaaaagcctgatcaccatgcctgaaactcccttttcaggactctcatccctgggcacagaattcaggaaattgctaagacagctggtccgaaagcattgcagctgccgtttctccatggccatatgaggccgccggcccttgggatgccggcggagagtgggcggtgcgacaaggcagacgtcggtggcgtgcgccacggaccacgggttgcggaactcgggcgacgcccannnnnnnnnnnnnnnnncacnnnnnnnnnnnnnnnnnnnnnnnnnnnnnnnnnttgtgaggagaccaggcacgggcggccgt

SEQ ID NO: 150446 - DNA, 888 bp, Homo Sapiens
  misc_feature (180)..(180): n is a, c, g, or t
agtgccttggacgtaaagaaggccttcaaatcaaacagggtagaagtagtttgtcatccaccaagtctgtcaggagctgattagccaggcggtagagagtcgacatcataggttagtttgaactgccagcgctggtaagttggagccattgtacattacttcctgctgtcccctcagcgnctgggtggtcatagaaccagtcctacacaggggcgtcctcctcagggtccagctctagctgaatggcctccagtggctcaacatctaggatgttgtcagcatagtccaagggcggctcctcatcatccaaagggggaatacgcatcctcttgaaatgcctcctatctcttttttctcggcgcatcataatccacattgacccccactgggagatgtagacaggttcaatgacccagggaatctcattgacgaaggaaatggctccagtgatgtggtacagcacaggcacatcccgaatctgctcccaaggcataggcatgttctccaggagtttgaggactgcgtggggcatgtactttagggcacccaagtaaacccttttgtcatggcggaacttcctgttggtcatgtctccatggtctcgaatgatcttcctgacatgttctgggggcatgtcttccttctgggcatccacaaacccaaacttccgcttttctgcatagcgcttggcctgcaattgctgccattttcgagctttctcctgcagcttctcctccgacatgtagtccggtagcggggctagagggccaggcaccgggttacccggccctcgataaggaaacactccggccatatccggagaatcccacaggccctcacacaagagccgctttccccgcagctaatgcggcagaccctcttcctgaa

SEQ ID NO: 150447 - DNA, 1026 bp, Homo Sapiens
aggtagccagaagtggtcagaacgtttggtcgaacacacggacattgtttatccgccccaccagtgaggatcttgttggtgtcggacgggcagagttccagggccagatcccaggaatgctggcactgtgcaaccccacgtgggatgccacctgccggtattttctgagctcttctggcttcaccagctcctcaggcacagtcttccctctcttcttgcgctccgtggttagcacagtggctttgtcttgaagcttgtgaataatctctggggtcattcccaccagctcacccaaatccattggctcacccgcacccacaacacttggttgggaacttggcacagcctggggcacaatgaggccagcctgtggtttcagggtagccagagcttctcgggcagcagtgacttccttggtgagacgggcaatgacacggcaggcggcatcgtgctggtacagagcgtgtgacagctcttggcgggttgtctgcagctgctggcgcagagtgaagctgtgcagcatgactgcatcccactcatcctgcaaagctttcagaatggccgggatgctggtggctgagggaggcttgggccggattgggtgagcaactttgatgtcgatgagctgctcctcggagagaggctggttgttgatggggtcggtaccattctccgcaatgtacttctcgatgagccgccgctcataaacatgattagagacaggggatacacatgggtgctccggcacttcgttagagatggagcagattagggacatggcgccgtcaccgtgctccgaggcgccacacgccgggctccgggactagcttctgagcctccgcgagccacttccggtcccccgctgctgccgggactgctccagcggcgagctgggagccgccagccgagcgatgctagcgtagcgcttcacgtgggaatggggacagccgcgcgccacagccttcagcacccctcgtgccgaattcgccacccaggcctcgctaccttaaaccgttagagtactgc

SEQ ID NO: 150448 - DNA, 1009 bp, Homo Sapiens
gttgtgttaccattttcggtaggtttgtgagtactgttcaagacctgtaatcatcggctgatggttctaggaccccgaatccgaacttcttcgatcttccgtggcacatcgccgtaccttcccaagtcttcgtttgtcagcttgcctgggcttcccgcacccctgatcacggagaacacgtcacccaaggcccggtgattttgcggacagctcataaaaaggcccgtaggaggttctttggtgtgttccgtcatccctttggtatagctcagcggtccgctccagctcctctagcctcttgacaagcccatcattgcacaggatggcccggctcaggcccagagcatctggcggtccctgaactcatgttctccaccagccggtgcttgactttcttcaacacaatgtccagggacatgccctgcttggggtccgcctgcagcttgttgtagtggatggtcacctcccccttcacctcctgaatcatcttcgccacctccaccttagttttccctttgattgacctgccattgacaccggtgatctcatcgccagctgccactgtgccgtccaaggctgctggggtgttgtcaaatacctggacgatatagaggcagggacagtactgggcccctcctccaatgctgatcccgatcaggttctgagcatccttctgcagggtcaccttcccaggcacagtcgggattccgagtttatcctcttcgatgtcataatccaagtctgcaaacatggttccgagagttggagtgggctggctaactgcccagctcggtaggggaatggggaataggtacaaaggggggctccaggccagggcgataggctcagatcccagagtccgccccacgggtctccaggccctggggagctgcctctgtcgctcaccggaagcgttggtcccacagccgggtcccggccaggctggtacctgaacccacctgccgttccacctggcggatccataactctccgggccgtaccagccgct

SEQ ID NO: 150449 - DNA, 989 bp, Homo Sapiens
  misc_feature (48)..(58): n is a, c, g, or t
cggcccccggggcccattctgtggccccccgctgtgccagaaggtcgnnnnnnnnnnnggggaggatccggctgggaccacccccagccctacagcaagggaaggcagaaacgcgcctggcctcggacagagaccagaggcattcagagccagtgtctgtgctacagagctgaagaggccagattgacaatggggatagcagcttcagcttacgtgggcatgtggtctgtccaagggcaggggtacagacagcccagataagaagctgcctggggaaagaaagggagggaccataggcctcgcaatttttaggatgggaaaggaaggccagcgataggaagacgggacaggaaaaataacgttgacaagatcctgagagggggtggaccagggttgaggagggggtacaggaaagaccccaaggctttaaagttagcatgtgcatggtgaggtgagaagagggtgcaaatgccacagctggcctccaaccagggaaggcggggattcaggacaggccagtgctaggtggggagtgcacaggaggcctgccctgtgcctctgtgcggacagccgatgctgggcggagactgccacgtgaccggctctcatccttgctttctttccattcctcatccaactattcagagtcacatgatatggctgagaacagccagaagggtctatagttgaaagataaacccaactctgcaaaaatcgcaccgagacttcatcctaaaccaggtctacaggaatagatgggtcaggcctgcaggagccttccaggagctctggcagggagggtctgtggccacccactcccccaggggaggctgggtcagaggcatctagtgaggtgggcactgccaccaacccccttcacagaaaggccggcacacccaggacacacagctcatgcagcagcagtgcccaggcttcaatcccatgtccccacttcgacaaagtgtccgccagccctcgtccgaatcacg

SEQ ID NO: 150450 - DNA, 1199 bp, Homo Sapiens
gcctgggtggctctgcagctgcgagtctagggcggagctgttgggtggaccgagcaggcgaggcgcaggcaggcagcggctccgcctcggaatccgcctcgaccggggcccaggtgcccgccccacctgtccctcggtcaccccaaccctgtttcctcgacccccagcactcctccaggcctagttcgcttcagaagcgcaagacccggaaaacaaggaagaagcgagctcagcctcaatccccgtccccaccccactttcgggaccgctacgctggagaattgaagggggcggaccccggattaagccgctcccttcccagcctcgccccgctttcctaatgtccgtgatgatttcgttattggcagggaagagccaggctccctgcgctcccaagacggggcgattgggagggggttctggagctcacgcctggggtcggcccggcgggggtgaccccgcgccctcgccggtgcaaggagaacaggtggttcccgccggggcagggaagcgtggacggtgtgggctcaggctgcctggcaggcacgcggggcctctaaagcttggtcgctgtcacagatcgtgtggttgtttcttccgtccccgccacgccttcctcctgggatggggattcattccctagcaggtgtcggagaactggcgcccttgcagggtaggcgccccggagcctgaggcgggaactttaaaatcagacgcttgggggccgggctgggaaaaactggcggaaaatattataactgaactctcaatgccagctgttgtagaagctcctgggacaagcggtggaagtcccctcaggaggcttccgcgatgtcctaggtggctgctccgaccgccacggtcatttccattgactcacacgcgccgcctggaggaggaggctgcgctggacacgccggtgtgtgcctttgccttgggggagcgcagcctggagtctctggcgtgcagcgctgggaggccggggacctcggaggctggtgcctggggacccaccggttgggcgaaggcgcagggagatcgggctcagggttcctccagagaatccccaatggagcttgaccccgcaaggcgggccggccaagtaaggcccgggcccccgggtgaactgcggccgaaactgagcagcctgaatagtggtgacccaagtggttctttattgctatcaacaatacaagccg

SEQ ID NO: 150451 - DNA, 1101 bp, Homo Sapiens
gccaccttgtgtgtccccccccgtgcgtagtgtcgccgtcttggtgcccccacctggggggtgcccctgtgtcctatccgtgtcgttcgcggggtgccgacctttttcctatctgctggcccggggctcttcctacccagtagttcgccagtgaggtggctcccttggccccagcatacacagcgggccccacgctaactcggccaggcccagcctggccacccattaaggagcggtcttgaatatatgagtatcgtcttgagtggtctcatctttgctgacagctaaggatgtgcctcttttatgagctcttgtgggctgacaatgtcctcctcgccccctacagctcatataccttcagcagcttatgcattcgctccattttgcggatggcagcattcgagtgctctgctgctgtggcgatcaggtccaggagagttttgggcatccttgttgtccggggaggccatggggcagttttatacagatagtccttgagaagaagctcatagcgggggatgcgttgcacaggctgcagcatgtggtgtctgcaatgtcaggttgccacaggcttcctccttgtgcgcctcatggatgatgactttaaactgggtggagcgctctgtccaggtgttgaccagctccacggcccggtcaaagttcttcacatactcaccatacatcttgaggaagggggccagtttctgcaggatgtctccaatgcgtggatagcggtcccattcctccatgcgcttctctagctcaggcagcaggaactgctggtggaagcaatagatggagcagatgttagagaagatgccgtggacaacgtcggccgggaaggaactgcggttccgagcttcttccagcagccgggcacagaacacctgatccaggagatggagcctggaaacgtaggccttctcagtttgccggagctcattggcaatgtgaaactccttttggtgcacagtcaactccacaggctcctgtctctccatacaggggcactgggatttccctcgtgctggaatcgccacccaggcctcggtacttaggaccgtttggggaacagaatagggcgggggccacccacacccg

SEQ ID NO: 150452 - DNA, 1023 bp, Homo Sapiens
actctagaggatctctttgcggtgcttttcccaagcacaggatgttgtccccatccttaggttcttacttgcaaactgtctccagcaggggaacactttggcccccacagtggacagacccacctccaaccaccagccccaggagctgattttcttcggtgctggatgggaactggcatattcttttgggataagagggtgatgccactgtggacggggcgtgtaggctggagggagccatctatccttttccgtctttgagatgtttgatgtttgcaaaggagtgttcgcagtgacgctaaaaccatgccagagacaagagacacccaagagctacagtgttccccaaagccagctgggaactttggggcagtccgggacaaggataatggccatgatggatcttaacagctgagcaggactggacagaaaggaaggcggaccaaagacaagaccctcggagccccgagaccacgccctgcctgcaaaagaaacagctgctggagctttgggaacaggtggaagggaaacatccgtgtgccttgcagagcacagctgtttgtccgtgttgcgctcacaaaaggagagacacacaaagccggcccaccaggcagagggatgttcgtgtctgctgcgctggcagcttttctgctctctccagcccacgtgcctcacagttctgtggggtgtggttctgggtgacatcagatggagaagacaggttagtgaggtagaagggacaatgaggagtgtgaagaagagggaggacatctggggagggacagggccccccaccggcagcacaggagccaaacctccagcctaaagtaccacagcaaatagcccagcacgcccaccgctcatgccccgtgttgctacatctcgccctgtacagctggcttgtcggccttgggatgagtaaggtctatgggcttttgtttttactggtctgccaagaagcgcctgtcatactgcatttaaggcaaaggctgtcgcccctcagttcagatctccctcgtgcca

SEQ ID NO: 150453 - DNA, 783 bp, Homo Sapiens
cccctgggttgaatcggcgaggcggtacacacagtccccaattctcacccctgcccgcgcgccgggccgctggactgcacggcttcccctccagccagatggcctggagaacacacactgattcgctgctttccaagaccctgttcagtctctttctctatacaaagatttttttaaaaactatatataagaattctttatttgcaccctccctccgagtcccctgctccgccagcctgcgcgcctcctagcaccacttttcactcccaaagaaggatgaagggtggttgtgtctcccagtggaaggcggccgccgggttcctcttctgtgtcatggtttttgcatctgctgagcgaccggtcttcacgaatcattttcttgtggagttgcataaagggggagaggacaaagctcgccaagttgcagcagaacacggctttggagtccgaaagcttccctttgctgaaggtctgtaccacttttatcacaatggccttgcaaaggccaagagaagacgcagcctacaccacaagcagcagctggagagagaccccagggtaaagatggctttgcagcaggaaggatttgaccgaaaaaagcgaggttacagagacatcaatgagatcgacatcaacatgaacgatcctctttttacaaagcagtggtatctgatcaatactgggcaagctgatggcactcctggccttgatttgaatgtggctgaagccttggagctgggatacacagggaaaggtgttaccattggaattattgatgatggg

SEQ ID NO: 150454 - DNA, 941 bp, Homo Sapiens
ccagtcctaccttcgggatcctcccaggaggctgtgccggctgctcactgcctcctgaccttgagggaccgtgtgtctgggcctggtgtttctagacggtcccccctacagtcacttgttctaatttctagcaccttccctcttcaggatagaggcccagccagccagagcacaggctttctcccttcaccctggagctctcaggtaacaaccccctgaaggcacatggaccaagctgctccccatcccgccacccgaaacaccatccttgccccacctcccaggtgacagactccctggcgtggccatgccccagcccaccagccccacgcttgtcagctgggcctgacagctgctgctcttgttttctattcatgaaaactcaacccttctccccgtttctgccagcacaacagggcagagtctgggctatcaccctggcttctccccctccctttaaaggaagcccacattttcctgcgagccgaactcctctgaagagtatggcagacctttggaatcgtgtcaggacgagactgaaagtcaaggcaagtgtgaattcagcaccgcaggcctggtgaccctcctgtgcctctggagtgggctgtcctgggacaggctgaccaggaacaagtccccgcccggggcttatcgctctgagtcagagaaggaagagggcttagtccatctccacaccagcatgtcctctcctgcaacgcggtgggactccgtctggatccgggattcgttggaggccaggaactccacagctcggtcccagacacgcttcatgcgcctccggctctgtggagggatcaagctgtcgcgcacgtgcaggatgcctacatatggatagcgctccatgtcactgctcccagtccaccctcgtgccgaattcgccacccaggcctcgctaccttagaaccgttagagttactgcc

SEQ ID NO: 150455 - DNA, 1449 bp, Homo Sapiens
cagggggccgtcggtggacaggcgcggtcggagccgagtcgtgcgggtcggatttcccgagtgaaagcggggccggccgtgcatgtggggcgtgggcaggcgtggcctcgcccgctgggcgcccgctttaggccccaggagcgtgacctcagctgttcatgagaagtcgacacatgccgagagctggcggccccaggcctggcccgttttcccccggcacctggggggcttgttggtgccagctttgccgaaccctggtctgcttctgcagggtctccacacactgggtccagcgacttccctcgaggcaacaccacagcatggatgggctccacccggccttccgcgtgtcggcccaaacccgttgccaaactcatagcccatcttggtgaggagtctggagcctatacctcgcgtgtgcacctcccagccagcaaaggcagagctgcaggtcccagagtccacagcatctgaccccaccactctggcatagctggagtcacccgtaccgtcgctgtctgagtcggactctgtggcctctgtgcgcagtgggggcaggatgccgtccccctccaccacggcctccctcagcagcagcgagtcaaacttgactgtgtagtagccgttgtccacatcggtgatgcgtgctgcgtgccagaggccatcctggtgcttggccagacacgcagagccggcctgcagggagctcaggtctgggtcctggaaggggcgcagctcatccagagagaccacctgcccatgggagaacctgcagttctccttaaagcggcactttccctccaggaagaacgggcacggcttcagagacttgtgagtggggtacaggtaaagcacacggacacccgccgagccatcctccgcctcttccgttcccaccaccatggcgttgtgatactccagagtgccccaggagctgtagtagggcgcgctcacctttgtcccactcagctcttcctcgtcctctccctcttcctcctcctgcccacctgccgcagattctggccccgcctctgctttaggaacggtctctgatccggacccacgggccgctgctggtgcctccaccgcctcagtgatggcctcccggaaagcctggtactcagcatcttcctggcggcccgggcgctcttcgtccagcgcggccaacaacctgctcttcctgacagacaccaggctggcctcggtgagctcgatgagctccttcaggtccccctgcagctggcgcaggtcagcctgctcagacgaatccaggccggcgcccaaggccagctccacctgctgcagctgcgcacggtaggtctgcaaggccgactccaggctctcctcgtccatgctgagagagggaggcgctggaccagggcggctagagcggcccggcgcccccttttcgccccagcagccgatcggcacttcctcccgagcgccgcc

SEQ ID NO: 150456 - DNA, 606 bp, Homo Sapiens
acaatggcctccatcaatggagactgtagctgtgcacccacactccttgaagataaaggccgccacggatctacccctacgcacacggcctcctcaggcacaggtggaccctcgccgcagtcacacactctccaatattttggttagatggttggtgccctcaccggccaggagcctctcagggtgaccccaccttcctggttcctgggctccgcagctgctgccatacctctggcatagctggagtcacccgtaccgtcgctgtctgagtcggactctgtggcctctgtgcgcagtgggggcaggatgccgtccccctccaccacggcctccctcagcagcagcgagtcaaacttgactgtgtagtagccgttgtccacatcggtgatgcgtgctgcgtgccagaggccatcctggtgcttggccagacacgcagagccggcctgcagggagctcaggtctgggtcctggaaggggcgcagctcatccagagagaccacctgcccatgggagaacctgcagttccccttaaagcggcactttccctccaggaagaacgggcacggcttcagagacttgtgtttggggaacaatccccgagtcctg

SEQ ID NO: 150457 - DNA, 1498 bp, Homo Sapiens
  misc_feature (128)..(138): n is a, c, g, or t
  misc_feature (280)..(323): n is a, c, g, or t
  misc_feature (584)..(585): n is a, c, g, or t
ccccggccccgcttatgggaagcaacttagggggcgctgcgcgcctggatatcgcgtgtgctcacatggccgccgaggggtatggctccacgaccccacccatggcggttcgtcccagatccgaggtnnnnnnnnnnncccccaggtgtgctgggggcgaggccctcccggaggggttgccataggtgtccgcggtgggaggccacatagtgtttggggggggttttgcccacacttcgggcactagggtttcgtcagggggcgctctggcccgcccgcnnnnnnnnnnnnnnnnnnnnnnnnnnnnnnnnnnnnnnnnnnnnagggtggtccgcggtgagcgggaaagggcgcagggccccccccatatgggtctgggggcgcctctgagagttcggtaaacccaataggtgattggaaatgaagatgtcattccgccatacccaggggggatggccggggcgatgcacgccctggggaggaggcgggcttcggagggtgccaaaagtgcagttggggataggggagccaggggggttccgccttgggaatctttttgataggcaagagattcggtaatggannttttctgccccgctgcagcccctgcttgggaggcactggacttaggcgagccgttgtgcatggcttgagtggacacggcggcggcccctcccacaacagccctgagccctggcttcaagaggctatccttcctcggggccccccacgccccgctctgctgctgctgccgccgttcccgctcctgccacagctgcaaggtgtccgggcgccgccgctcctcccctgccggctcctcccgcctgctgcttggtgccctctccctgtcccctgccccagggcttaattcgggtggtcgctgctcctccacagtgcctcgctcttcatcctccccggggacatggctgtcgatgaagtcaatctgcacagggtctccgtccgctgagccatcctccttgcgttctctgggcccccggggctcccgggccagctctgagatccggaatgacagctctgaaaattcatctgttgactcatttccagaccacctcttgctgccactatcaacgctgtggaagcctgagtccagcccaccatcgtaccgatgtcccggaaatagatcctctgcagggcagggactgaaactcgggggccgagaaggggccaggtcccccagggccgacccacgctgcccggcctctgtggacaaatacttgaagatgtgaagtttccccttcaggcagacctgggcaggtggactctgcagagggttgctgtccagcagaatgacctgcaggtgcctcaggcggcagaaggagactgggattcgggagacgcggttacaggagaaatccaggcggaccagagggaggtcccccagctcttcgggcagcgtactgagctggttcctccggacattgaggtccccctcgtgccgaattcggcgcgccgtgacttcatactctctcgcccctaa

SEQ ID NO: 150458 - DNA, 1639 bp, Homo Sapiens
  misc_feature (1458)..(1528): n is a, c, g, or t
gggatcgggccgttccccctcacggtactcctccgcccgggcgtccggaacagtcgacggcagactccggcccgctgagccacccgaggggtcccgtggcctccgcggacccggaatctgggccctcgcggacccgcgccccgcccagtcgccccagggcttccccacacccacggagtgaagtcagccgcggccctgcctgggaggaacttaccgtctaccgggaaaggtggccagcagatgtgtcgggcctggtgagaggggcctcctgcactggccatgcccatgcccacggagggcaccccgccacctctgagtggcacccctatcccagtcccagcctacttccgccacgcagaacctggattctccctcaagaggcccagggggctcagccggagcctcccacctccgccccctgccaagggcagcattcccatcagccgcctcttccctcctcggaccccaggctggcaccacgctgcagccccggcgggtgtcattccggggcgaggcctcagagactctgcagagccctgggtatgatccaagccggccagagtccttcttccagcagagcttccagaggctcagccgcctgggccatggctcctacggagaggtcttcaaggtgcgctccaaggaggacggccggctctatgcggtaaagggtttcatgtcaccattccggggccccaaggaccgggccccgcaagttggccgaggtgggcagccacgagaaggtggggcagcacccatgctgcgtgcggctggagcaggcctgggaggagggcggcatcctgtacctgcagacggagctgtgcgggcccagcctgcagcaacactgtgaggcctggggtgccagcctgcctgaggcccaggtctggggctacctgcgggacacgctgcttgccctggcccatctgcacagccagggcctggtgcaccttgatgtcaagcctgccaacatcttcctggggccccggggccgctgcaagctgggtgacttcggactgctggtggagcttgggtacagccaggagctggtgaggtccaggagggagaccccggttacatggcccccgagctggtgcagtgctcctatgggacagcagcggatgtgttcagtctgggcctcaccatcctggaagtggcatgcaacatggagctgccccacggtggggagggctggcagcagctgcgccagggctacctgccccctgagttcactgccggtctgtcttccgagctgcgttctgtccttgacatgatgctggagccagaccccaagctgcgggccacggccgaggccctgctggcactgcctgtgttgaggcagccgcgggcctgcggtgtgccgtggtgcatggccagccaagggcctgaaaccgacggtgggcccctgaggcaagccccggctttgccccgccctagctgcctctggcctgggccgacctnnnnnnnnnnnnnnnnnnnnnnnnnnnnnnnnnnnnnnnnnnnnnnnnnnnnnnnnnnnnnnnnnnnnnnngccatttacgcttcgtgcggaagagcagtcctcgccaattcacccgccgaggtccgatgcgcctaaccggcctacgcggtccccccacgtaaggtttgccccccccacacg

SEQ ID NO: 150459 - DNA, 1043 bp, Homo Sapiens
  misc_feature (25)..(25): n is a, c, g, or t
  misc_feature (78)..(78): n is a, c, g, or t
  misc_feature (102)..(102): n is a, c, g, or t
aacaggcagttaataattatttttnccttccaggtgttctttgggggtccttaggaaatgacttctgtggtccttccncaagcccaagttaggcccctgaancaaatgcctttagagagttccaacagtatgaaactcctactacgagtaatcaaatgttaggtgttgtggggtatgtgaaaaagtgaaaaaataatagtccctgctttaaaggacaagaaatgattttccctttatcaaatgtccaggaaggaaatctgtgggatgacactgttggcagtgaagtctcacatctgataaaaggcagtgggctctgggcagcatggacaagtttaaggaacacctggatttgccatctatcaagatgctccatttaggggtggtccaaaaggtctttcagtaactcagcagttctcttctcagaattagttcccagtctgtgccttccaatcttcccagtatattcctttaccagcacaaaaactcatgtacagccaatgaccagttcagaatagatgtcaaagtaatcagactataccagtagctcaccccatgtctggtcaccaagtaagccatcacagactctgcaaataatcctggaaaggaagaggtaccaggacaagaaggaaagaactaatacaaggatgtgaataacttctaaactggtcagccttggacaaaaggaaatctggaaatctcgacttggcctgagagaaacctcatcctggcccttaaagtgccaattaaggctgagttgaaaaggagctgggcatcatcaaactgcaaacaaacttagcttaggcacccacagtgtgatgatgtgtttatttccatgaaggagcagtctatggagaagtgcaggaactttcaaagttgcatgggcagagctgcttcttatatgacagaattggcagctgcctgtcacttcacagtgggtcacatgaatatgaagccagagaactggctgtgtgcgtcagcaggggagcttaagactgcagattctggggaatcagcactcactgtgacacatggatatcccggga

SEQ ID NO: 150460 - DNA, 1205 bp, Homo Sapiens
  misc_feature (275)..(275): n is a, c, g, or t
  misc_feature (313)..(328): n is a, c, g, or t
  misc_feature (338)..(400): n is a, c, g, or t
ctctggcggtgagttcgtcgagactctcgatagcagtgccgatagttccttgtgtcatgaagtaatcacatgatgacagggggaatatttgcttctgctcctgagtaccaggaaaagacgcctaagagcaccccagccgggaaattgttgaaaaaaaccctcgggtttcccgcgcgggccttttttattttgggggagaattccaaccgctttagtacggacccaagggtttttcatagaaaccaggtatgagcccagtctcccttccctcgggnggcccccggcccaaacggaagggtttgaaaagcttctnnnnnnnnnnnnnnnnccggccaggnnnnnnnnnnnnnnnnnnnnnnnnnnnnnnnnnnnnnnnnnnnnnnnnnnnnnnnnnnnnnnnttccaaggacaagagtgtctttactggagttgggactggggcctctataggggcttctggtttctgggctgtaggtttgtgaggtgtgggatcttaagtcaaaggtgggggactagggcagggtatcagaaggtgatgtcatcctcgtacagggacagcagcagcaggacggtccagccgcccagcaggcccacgttgtgcagcaggaagaggagccagggccgcgggtcccgtactttcaacatcgccgggagcatgtcgcagagtgctacgtagaggaacaggccggtggccactgccaggatccaggcctcgctctcctcgctgactccaaccgcgagtgccacgtagagaccagcgaaggccgtgagcgcggaggccaggttcagcagcagtgcttggcgcacggacagccccgcgtgcagcaaggcggcgaagtcccccagctcgtgtggcaactcgtggcagaacacggccagcgaggtggccagcccggtcttccaggaggacgcgaaggcggcgcccacggccagcccgtcggcgaagttgtgcacggcgtcgcccagagtgatcatatagggcagtagcctcaactctgcgggcgcagaggcccgtgggttcgcgtggcctgtcgcctaccgccaagccttgggccccacccgcgctccacacaaaccccagatcccccagcccttccggggtcgccacctgggctcacctgggctcagtctcctgggctcagggttcagcagctccgggctctcctccgccacctgggaggagccttgagtaagtcctcgtgccg

SEQ ID NO: 150461 - DNA, 1012 bp, Homo Sapiens
cgcggcgcagtagcggttgtgactagcgggccggcccgggccaggacagcgggcggcgggcggcgcgggcctggccccgggatggctatgttccgcagcctggtggcctcggctcagcagcggcagccgccggccgggccggcgggcggcgacagcggcctggaggcgcagtacacctgccccatctgcctggaggtctatcaccggcccgtggccatcggcagctgcggccacacgttctgcggggagtgtctccagccctgcctgcaggtgccatccccgctgtgcccactgtgccgcctgcccttcgaccccaagaaggtggacaaggccacccacgtggagaagcagctctcatcctacaaagcgccctgtcgaggctgcaacaaaaaggtgaccctggcaaagatgagagtgcacatttcgtcctgcctgaaggtccaggagcagatggccaactgccccaagttcgtccccgtggtgcccacatcacagcctatccccagcaacatccccaacaggtccaccttcgcctgcccgtactgtggtgcccgcaacctggaccagcaggagctggtgaagcactgtgtggaaagccaccgcagcgaccccaaccgcgtggtgtgccccatctgctcggcaatgccctggggggaccccagctacaagagcgccaacttcctgcagcacctgcttcaccgacaacaagttctcctacgacacctttgtggactacagtattgacgaggaggcagcttccagggtgtctggccctgttctctctgagaacttgaggagcgcagcaccgctgcgtctggggtcggattccccgtctgtgtcgactggacctggtcgggagcgccctaccggatgaggtcacggagagctgaccggccaaggaccggcagtccgggctaaacgcagcgcgagcgcaaagggcggcccgggggggtccgggtcgcgagggcctgagggcggcagaccgctaagataccggagggggggcagaaga

SEQ ID NO: 150462 - DNA, 559 bp, Homo Sapiens
  misc_feature (65)..(362): n is a, c, g, or t
tgggtttaaaattttgacattttgtccatcatggaatttttctgcattaattttgaatttgtttnnnnnnnnnnnnnnnnnnnnnnnnnnnnnnnnnnnnnnnnnnnnnnnnnnnnnnnnnnnnnnnnnnnnnnnnnnnnnnnnnnnnnnnnnnnnnnnnnnnnnnnnnnnnnnnnnnnnnnnnnnnnnnnnnnnnnnnnnnnnnnnnnnnnnnnnnnnnnnnnnnnnnnnnnnnnnnnnnnnnnnnnnnnnnnnnnnnnnnnnnnnnnnnnnnnnnnnnnnnnnnnnnnnnnnnnnnnnnnnnnnnnnnnnnnnnnnnnnnnnnnnnnnnnnnnnnnnnnnnnnnnnnnnnnnnnnnnnnnaaacaattatttgtctcgattactgaggtctttggtaccccctaaaattttgcaccctaaattttgagtacttcactcacttcctattctgcaacttgccaaaacttggaattttcatcccccatcccagtactgccatctcaccagaggacctcacctcttccataagactacaggcaagaacaccagcccagctg

SEQ ID NO: 150463 - DNA, 1437 bp, Homo Sapiens
  misc_feature (161)..(220): n is a, c, g, or t
aatggaatatagaaccagttgtcaaaaaagcaggctggtaccggccggatttcccgggatatcgtcgaccacgcgtccggtgggacagagggaggaggcagctgcagtccttccccaaactgcgcacagcacctcacccatgcgctcagtgctgctcactnnnnnnnnnnnnnnnnnnnnnnnnnnnnnnnnnnnnnnnnnnnnnnnnnnnnnnnnnnnncggcagcatgcgcggcagcaagacaaggagcgcctggcagccctggggcctgagggggcccatggtgacactacctttgagtaccaggacctgtgccgccagcacatggccacgaagtccttgttcaaccgggcagagggtccaccggagccttcacgggtgagcagtgtgtcctcccagttcagcgacgcagcccaggccagccccagctcccacagcagcaccccgtcctggtgcgaggagccggccaagccaacatggacatctccacgggacacatgattctggcatacatggaggatcaccttcggaaccgggaccgccttgccaaggagtggcaggccctctgtgcctaccaagcagagccaaacacctgtgccaccgcgcagggggagggcaacatcaaaaagaaccggcatcctgacttcctgccctatgaccatgcccgcataaaactgaaggtggagagcagcccttctcggagcgattacatcaacgccagccccattattgagcatgaccctcggatgccagcctacatagccacgcagggcccgctgtcccataccatcgcagacttctggcagatggtgtgggagagcggctgcaccgtcatcgtcatgctgaccccgctggtggaggatggtgtcaagcagtgtgaccgctactggccagatgagggtgcctccctctaccacgtatatgaggtgaacctggtgtcggagcacatctggtgcgaggactttctggtgcggagcttctacctgaagaacgtgcagacccaggagacgcgcacgctcacgcagttccacttcctcagctggccggcagagggcacaccggcctccacgcggccccttgctggacttccgcaggaaggtgaacaagtgctaccggggccgctcctgccccatcatcgtgcactgcagtgatggtgcggggaggaccggcacctacatcctcatcgacatggtcctgaaccgcatggcaaaaggagtgaaggagattgacatcgctggcaccctgggagcatgtccgtgagcagcggcctggccttgtccggtctaaggaccagtttgaatttgccctggacgccgtgggaggaggaagtcgatgcaatcctcaagggccttggccaagtgagacctggggcccttgggggcagccaagctctggcttcttggctgtgtaagctctctgtgtaccaatctaatggc

SEQ ID NO: 150464 - DNA, 889 bp, Homo Sapiens
gtccgcgtcctcagggacaagcccccaaccttcagtgcctggggatgcctcgtgggacaccaaaggcacaaaaccaccatggtacacaagcacgggtgtctgaagcaccccctgtcgtgaccctggtggggtctcttctggggaccccgctttctccaagcctcctccagggagaagttgcagcccaggaagaaggccaccatggtccgttcagctgctccgagtactgcttccagcgaagccaggctgccggtgcaggcaccgaactcgtatttccagaactggggatggcccatcctggtctctgagatagcaccttgagggggcagcatccacgttttctggctcactctggcccagcaggggtagaggaccagtgttgacctggcagaatctgttcaaaagctgcgagcaagggacctgggcaggaccaccaggctggctggtcggagctctccagccatgctggatgtatttctgatgtttggtttcttttgtagaatccaactccttatggcagagggaaggccgggacctcaggtggagtgtgaagggcatcgtgtcaacttgaataagtagcagagaatcttacagagtcgtccctttgaaggcagggttaaacagggtgtaatcttggctctgtttgtcttggggcgtctggacgagggctacaaacagttcctccctttgtttccacggtccttgcagaatgtgtgcttccctcaaaagggcatcaaggccccctttcttctgctctcctgctccccggggggttgttctgcagggctcgggtttactagctgaggccagccccaagcgctgactgtagcagctccattcgagtcgaacgcgtgggttcgacatatcccgggaatccggagcgtaacag

SEQ ID NO: 150465 - DNA, 874 bp, Homo Sapiens
atggtaacaccaaggcactgttgtcttgaaccacccgcctgctgtgaccggcttggtctccttcttgggacccccgctttctccaagggcctcctccagggagaagctgcagcccaggaagaaggccaccaatgtccttcagcttgctccgagtactgctccagcgaagccaggctgccggtgcaggcaccgaactcgtatttccagaactggggatggcccatcctggtctctgagatagcaaccttgagggggcagcatcccacttttctggctcactctggcccagcaggggtagaggaccagtgttgacctggcagaatcttgtcaaaagctggagcaagggacctgggcaggaccaccaggctggctggtcggagctctccagccatgctggatgtatttctgatgtttggtttcttttgtagaatcaaactccttatggcagagggaaggcgggacctcaggtggagtgtgaagggcatcgtgtcaacttgaataagtagcagagaatcttacagagtcgtccctttgaaggcagggttaaacagggtgtaacttggctccttcagttggttggtctggtctcagaatcacacattggtccagaattacacttgccctgctctgaagaagaatgccacctgcttgtcagctttggagtcaacagccctgaggactcaagtccccttttgacagagtggctctggacaagtcacttgcctttccttctccatctgatatgttctgtcctcaggtgctatctggcttgaaccaagccttgacttttcaaggagaggaacagctgggcctcagtggagaatttcaggaattttctgccttgctcactggttttgcctgccattgtcctggg

SEQ ID NO: 150466 - DNA, 680 bp, Homo Sapiens
tccaacctctgaagagggtggtcacatcccggcccgcggtgaggaactcggatcttccctcctccctcaacccacgctgggacctttcccagcaccctttgggacgcttctagaactgttctcagcccttcagagccttaaggaatccaccggtcccgctctaaggggttctaggagccagcaatcctggccacccccactccccacacacaccccgcaaacatcccccgcaccaccacgggtccgctgaggtccagtccactagcgcgcctcctccttggggctgcacgcaggggccgcgcggtgcacgcgctggtgcttgagcaggtgctgcttctggctgaagccgcggccgcaggcgggacacaggtagggccgctcgcctgtgtggttgcgccggtgccgcgtcaggttgggcttctggctgaagcggcggccgcactcggggcacgggtagggccgctcacccgtgtggatgcgctggtggatggtgagcgccgaccaccacgagaagctcttgccgcactcgttgcagatgaactggcgcggctcgccaggcccagcgaggcccgcttgtccccggccccacagtgtgtcccgggcccccggggaccgttgggagctccgcggcctcgcggccaagcccgggatgcatcgcctgcggctgcctcgtccgataa

SEQ ID NO: 150467 - DNA, 1329 bp, Homo Sapiens
  misc_feature (285)..(327): n is a, c, g, or t
attcttctagtgtacctggtatgcttattccgtctttgtccttgtgttgtgtttgatcgtaccttctattcctttcgtgtgtatgtatagtgtgtattctttaggtctactttgatttgttctgtttttcctagtttgtgtagcactctttatacttttattgctttttatatttcttttacttactagtgcattgcgtccacgctgtcttctccattgtttggtcttcgcaatagtacacttggtatatcctggtttgacttaactccttgttttgtatactannnnnnnnnnnnnnnnnnnnnnnnnnnnnnnnnnnnnnnnnnngtttctcgtaatcttcctgagggttattcatctctattaccttatggtgatcggtctttttactactccttgattgtgatggtcctctcttattaggccttcgtgtatctgatgctgggcctttgtgtagacttccgacttgctggtactacaccttggtgcaatgctcaattcccatagctattgaagttatccgaggtataccgggattctggatagctgggttgactccagtttacttgatatggttttacatcctctgttctgcaaggatctctagatgttcccataagatgtcccctacaaagtctggggccagtctcgagtaagcagtctttactcagggcgcagaggcttctccattcagtacagaacttctggaagtctacacctttcaggctgaattcattcacagcccacatcacccagtcccgaacatgggtttctgtccactgtccgggggtcttttgggatccccagtcgttgtctgttctttagtgaaaccactgaaagtagcttttaatgcttgagacatcatttctttgctgcttggagttaatatgtgggacatctgcacattccatatccggggaggggaaaagctccagatcgactttttccgtcttgatgatggtgagagtcggcttgagatcgacgccgccttcatggtgccaggagtgggggacgtacgggatggtagcaagtttgcagttactgttgtttttctttttaatgaggattagtaacagggggaaggggacgggggaaatccgactttcttcccataaatctcatattcccgctgcctttctattcccccgcgcccggacggtgcagcgacccggcactccaggggaagttggcacttttgcggcgaagtgagcgcgctcgggtcccatcctcgccccgcccgcgcccgctcatacctgccacggcacctcgcaccgctacctccttccgccggcggctgccatgcataactccgaggaccagtacacgcaa

SEQ ID NO: 150468 - DNA, 913 bp, Homo Sapiens
gattcttgccagaaaccactaaagctcctgggaggtttttcctttgcagtttggaaagatttcctccccgagaaaccaagttcattaagtggggcacagacatccttcacagccaaggggccacacgggacccttctggtctgtctctactgcattcttcaactcctgggagcaggtttccctcacagactccatcatcacgcgtgtccatcagctccacgtccaggccctggctcagctcacttaacacccagctctctctcttgtttcaacctttcctcttcagcccgctgcctctcctgctcccttcgctctctttccttagacacttcttcagctgcaatgtgcctcaaaatgcccgtggttgcagctgttaacaaatcctccatagcagcattagaaacacccagggcggcagctgcgtaggcagcacccgcagagccaacttcctcacagtccctctgcagggcctcctggatgagctcgtccaccacctgcgccaggtcctcgtcagagtacatgggcacgggctctggaggcggtggttcaggctgcacagacagctggaagaggctgggcgccacagacggggtcagtgccaggacaggaggcagaggcactggtgagggcgcaggggctggtagagactgtgggagactggacaggggtgcatccggctctacaccacactcctctcctctccctccgcccactgtgtcggagccgggtctctgggtgctgacgggcagctccgcggccaggctctccccgatgtacttgttctgggagttgaagctgcacacaggggtatgacgagggacggggggcaatggccctccgttcacaatttccccgactgacaccgtcagcttcctagtaataaacaccgacttcctggtcttggataatccct

SEQ ID NO: 150469 - DNA, 1132 bp, Homo Sapiens
  misc_feature (15)..(15): n is a, c, g, or t
cataggaatggaggncccccccgcggtttttaaatcggacgagggatcaggtggtcctcgagtgttgggcgcatggtgggtaaaagccgggaggcggtggctccaggccatggtgctggagatgtttcgagaggaggactactacaacgatgatgttctggaccagatgggcgccagtatcctgggcgtggagggcccccggcgccacccagatgagccccctgaggatgaagtcttcgagctcttccccatgttcatgggggggcttctctctgcccacaaccgagctgtgctagctcagcttggctgccccatcaagaacctggatgccctggagaatgcccaggccatcaagaagaagctgggcaagctgggccggcatggtgctgcccccatcagagctccttgagcacctcttcttccactagtgagttccagaaccagcgcttctccgctgaggtgctcagctccctgcgtcagctcaacctggcaggtgtgcgcatgacaccagtcaagtgcatcacgtggtggcagctgtgctgggcagcgtgaaggcatgccctggatgaggtgaactatggcctcctgccagctagatcctgctagggctgcgcacactcctgcctgtcttcctgctgtgcccggaagctgggcttgcaactcaacagcctgggccctgaggcctgcaaggacctccgagacctgttgctgcatgaccagtgccaaattaccacactgcggactgtccaacaacccgctgacggaggcaggtgttgccgtgctaatggacggggctggcaggaaacacctcagtgacgcacctgtccctgctgcacacgggccttggggacgaaggcctggagctgctggctgcccagctggaccgcaaccggcagctgcaggagctgaagctgtggcgtacaacggtgctggtgacacagcggccctggccctggccagagctgcccgggagcacccttccctggaactgctacacctctacttcaatgagctgagctcagagggccgcaggtcttgcgagacttggggggtgctgctgaagggtggtgcccgggtggatggtgttcctgaccgaggggacggagggtcagagtactggtcagtgatcctc

SEQ ID NO: 150470 - DNA, 1195 bp, Homo Sapiens
cgggcttgcccaggcggaaggaggtgacggaggaggaggctgagaggtttatccaccaggtgaaccaggccgctgtcaccatccagcgctggtaccggcaccaggtgcagcggcgcggagcaggagctgcccgcctggagcacttgcttcaggccaagcgggaggagcagcggcagcggtcaggcgaggggaccctcttggacctgcaccagcagaaagaggcagccaggaggaaggcccgggaggagaaggcacgccaagccaggcgagcagccattcaggagctgcaacagaaacgagccctgagagcccagaaggcgagcactgccgagcgtgggccacctgagaatcccagggagaccagagtgccaggaatgcggcagcctgctcaggagctgtcccccacgccaggcggcactgcccaccaggccctcaaggccaacaatgctggtggtggcctccctgctgcaggccccggagaccgctgcctgcccacctccgactcatccccagaaccacagcagcctccagaggacaggacgcaggacgttcttgcccaggatgcagctggggacaacctggagatgatggccccgagcagggggagcgccaagtccagggggccactggaggagctgctgcacacactgcagctgctggagaaggagccggacgcgctgccccgccccaggacccatcacaggggcagatacgcctgggccagcgaggaggatgacgccagctctctgacagctgacaacttggagaaatttggaaaactcagtgcgttccccgaacctcctgaggatgggacgctgctatcggaggccaagctacaaagcatcatgagcttcttggacgagatggagaagtctgggcaggaccagctggactcccagcaggaggggtgggtgccggaggcggggccggggcccctggagctggggtccgaggtgagcacgtctgtgatgcggtgaagctggaggtggaggagaagaagcaggcatgcgtgctgctgcagagagcgctggcgcagcagcgagactcaggccgggggtcaggagacagagaaggactgagcgggagtgcagcgcagaggggcataaagaggcaccatcacgggttggcttcattggcagtgattgggaaaacagccgagggaatggagcttggggccatgagggacaattccggt

SEQ ID NO: 150471 - DNA, 1743 bp, Homo Sapiens
  misc_feature (455)..(532): n is a, c, g, or t
cccagagcaaatgtgggccccgcccctcatcttgccaagtgtgcgctcagcacctcacaaattagaaggggccccctcgcctgtggcacagtgttccggccacttcacacaaggccactctgccaggtgacctcagtaccgaggttgctgggggccctgggctccacccttggagtgtggaggcccccttccccgtttgccagcccataggtcaatgaggctggtgcgcggggggtacgttgttggcaacagtggtgtcacagtggcagtgtcagtttcaatggtgtcagctgcatcgtggacctccgtggcgtcagctgtgcaggctccacgggagcagccaggacagcctgctctgcagactccatgaacatcaagtcctctgcagggctgcctggcccccggggaggcgcctgtgcctgagggggctcctccatggggccggcccaggcctnnnnnnnnnnnnnnnnnnnnnnnnnnnnnnnnnnnnnnnnnnnnnnnnnnnnnnnnnnnnnnnnnnnnnnnnnnnnnntggcgtggtggaggctgcgaggaggtgacctcatccagggcccgctctatctgctcagcgacaggggtggaggcggtgctggagtcagacgggctccgcgtggggatgggagtgggcgccatcctccggtggctgtccaggtggctgcctggtcgatggttgaagggcgagggtacatcacagctgcccgcagaggccgatgcgactctttcctgctgcttgaagaactcccttgggttgtcaggccgctgggcaataatagctgctgcctcctccacctccgactctgacttcttcatgtgggtctcttcctcctcatcccgatggtcaccaaagatagactgctccttcaaccgcctcttggcctcttccgcttctaaagtctgctgtttcctcctgtgctcctcgatctgctgctcccgctcccggtagcgccgctcgcgctcctcttgctcctgccgctcctgctccatccgctcctgctcgaacctgagcctctcatccagggccttcttccgctcctcctccttccgcagctcttcttccttcttggcctgctcccagaactgctctcggttaatccgcttcatttccacagctgcatccgtcttctggtaggtggtgcccacgggctctgcgttctcatcctctcgcagccgcagtcggtgcagcacagggctggagagtcgcgccagcccgttagagagccgctgcccgatggcacccgcgtctatgtcttccacgctgctggcgttcacgatcacgtcgacaccctggaagaactctgccaccttagccacgtggctggcacaagcgcacttgcgggcatcaggcacatcttcgcccacccagttgatgagcacgtattttggcagagcagcttgggagtccttgacactgcagaagccgtacatcaccttctggttctcaaagtgtcccgaaagctcctgcaagcccccttctcctgatgctgcaagcttgaggtcatcggagccatcttcatatgtgtacagagcccagtcggccgcgctctcctctcggatcacctcctcgtaagccgccagcagctccaggcggtggccgctgaagctgacgccggccatgcttcgggccggaccgggccgaacggacagacgcgcggacggacgggcggacggaggaggagggagggaaagaggcctcgtgccgaattcgccacccaggcctcgctt

SEQ ID NO: 150472 - DNA, 1654 bp, Homo Sapiens
catgactggttcttgttacacacccggggcccaatgaggcccaggcttttcccgtccccatacctgaggcattccaactagtttcccatgaacttggtgaagaggcaattccccaagtttccccgtgcgcctgataggccttttccgggacttccgatgtgatgagctagaacttgctaagatttcccacttcacgcattcatagccttctcagtgtgactctcagctgtttaatgaggtaagatttacagtaaaggatttgctacattcactgcactcaacaggtcttttctccagtgtgaactctctggtggttcttaaggttggagctatggctaaaggatttcccacattccccagacacataaggcctttcccctgtgtggactttccgatgtgaacttgaagctggagctttgcttaaatgacttcccacatttactgcactcatagggtctttctccagtgtgaagtctccggtggtgaatgaggctggagcttcggctaaaggattttccacattcattgcactcatgaggtctttctccagtgtgaactctctggtggtaaatcaggctgaagttttggctaaaagatttcccacattcgctgcattcataaggcctttctccagtgtgaactctgcgatgctgcatgaggttggacctttggctaaaagatttcccacattccccacattcataaggcctttctccagtgtgaactttcctatggctattgaggctgtatatctgactaaaggatttcccacattcagggcacacataaggcctttctccagtatgaactctctgatgtataatgaaactggagtagtaggtaaagaattttccacattcattgcattcataaggcctttcttcactgtggactttctggtgctgaatgaggttacatcttcgcgtacatgctttcccacatttactgcactcaaaaagtccttctctagtgaggattctctgtccctgaacaagtgtgtctatgtggctaaaggctttactgcattttccccagttgtgatgactttttccactgtaaaaggccaccgcacacttgttactgttatttggcttctcccctgtttgagtggcgtcttgatggagaaacctcatgttggccaggaagtctttcctgatctccctgcaggtaaagggtttctccgacacatggactatgcaactctgtgtaaacgaggctgtgtccacataacttctgaaaggtgcctctgtaatgtgctgcctctggtgctgttgaagatttgcactgatgtagaattgttttccacatgtgtgtagtttctgcccgcagtttgttccttggtgttcagccaagtgcaaaatatctctcaagaccaggcaacatatttcacaggagtcggcattctgggaagatgaaccttctttggaagtcctgaactgtggcactctttctccagaaattctctgttcagaaggtgtttcctcatgttccactccacaccaacaacccagggaggacgtaagtgcaaagttctccagcatcacatcgaagtacaggtgtttctgagcctcatcaaggagatcccattcctcccaggagaagtacacggccacatcttcaaaggtcacattcccgaagccggtccctcagtgcg

SEQ ID NO: 150473 - DNA, 1176 bp, Homo Sapiens
gttaatcggccgaggaagcggttgggaaagtgtcggtttatcttcgcgccccttgcgttcttgccgcggcttgcctgggcaggtaaagcgcgattgcgagagctcggcaaccctgccgactcagccggaaccggctcccggcccgaggggcgtggtgtcctggtgctccgactccttccgcaggctccttgggacccgcggttccgggagtcccttgctcagggtccctttcctgcagtgaggcgccgtccgccttccctgtgtccccgcagacccccatcatgggcaataccagcagtgagcgcgccgcgctggagcggcatggtggccataagacgccccggagggacagctcggggggcaccaaggacggggacaggcccaagatcctgatggacagccccgaagacgccgacctcttccactccgaggaaatcaaggcaccagagaaggaggaattcctggcctggcagcatgatctggaagtgaatgataaagctcccgcccaggctcggccaacggtgtttcgatggacggggggcggaaaggaagtttacttatctgggtccttcaacaactggagtaaacttcccctcaccagaagccacaataactttgtagccatcctggatctgccggaaggagagcatcagtacaagttctttgtggatggtcagtggacgcacgacccttccgagcccatagtaaccagccagcttggcacagttaacaacatcattcaagtgaagaaaactgactttgaagtatttgatgctttaatggtggattcccaaaagtgctccgatgtgtctgagctgtccagttctcccccaggaccctaccatcaggagccctacgtctgcaaacccgaagagcgctttcgggcaccccctattctccccccacatctcctccaggtcatcctgaacaagacacgggggattttcctgtgatccagctttgcttccttgagcccaatcacgtcatgctgaaccacctaataacgcgcctgtctatcacggatggcagtgatgggtgctccaggcaacccacggttaccagaagaaagtacgttcaccacccttgttataccaggcccctttgaacgagctgggggcggatggtggcccaggagaactgccaccaaccaggtcccacacgtgcatgctttcccca

SEQ ID NO: 150474 - DNA, 661 bp, Homo Sapiens
tgctgtacctgttttaggataacggaatgaatctgccctccttgtttccaacataggggatgtaacatgaataatttccacctcagattcatcattttcttcatatagaattctaagaattttaccaccactgggagttgtttcagcttttggacaccaccaatagccagaatatctatcaaattcttcttggagaacaaaggtagcgactccagctgatctggcatcttcttccatgttggctagctcattgtgcacataagtgagtctcctttcttctctggttacgatgttagatatccaaatatcgttgctatgtataaaagcaatccagtctggatcagcagggcataattttggatccatccgtatgttgggacaactagtttccactagattgggccttaaaggttgttgcgtaaatccttgtggccctccatcttttacgtgataaattccactaccggcttgaaacagaaatgttccacttccttggtgataatcgtaagaagcaattccgactgttccatgcgttttctttctcttaatagttcttcttctcgagaatacattccatagtccagtgttgcctgaaaaagatccaaagtatggcttccaagagagcctcggccgatttcaaacccagcctcgtactagcctt

SEQ ID NO: 150475 - DNA, 1034 bp, Homo Sapiens
gtcagtggaggcagcagcggtatgaggcggcggcgaggactggcgacggcgaggaagatagtgtcctgccttctggagagctgaccaaacactaaggatgctgaagttccgaacagtccatgggggcctgaggctcctgggaatccgccgaacctccaccgcccccgctgcctccccaaatgtccggcgcctggagtataagcccatcaagaaagtcatggtggccaagcagaggtgagattgccatccgtgtgttccgggcctgcacggagctgggcatccgcaccgtagccatctactctgagcaggacacgggccagatgcaccggcagaaagcagatgaagcctatctcatcggccgcggcctggcccccgtgcaggcctacctgcacatcccagacatcatcaaggtggccaaggagaacaacgtagatgcagtgcaccctggctacgggttcctctctgagcgagcggacttcgcccaggcctgccaggatgcaggggtccggtttattgggccaagcccagaagtggtccgcaagatgggagacaaggtggacggcccgggccatcgccattgctgcgggtgttcccgttgtccctggcactagatgcccccatcacgtccctgcatgaggaccaccgagttctccaagcaactacggttccccatcatcttcaagcggcctatgggggtggagggcgtgcatgaaggtggtgcacagctacgaggagctggaggaaaattacaacacgggcctactcagagggctaggccgccttgggaaatggggcgcagttggggaaagtacaccgaaaagcacggacacgaggtcagacactgggggaccaaatggggacacacggccggtacagggaaaggccaccgaggggccacaagggcgagtgccgcgcactggaccgggacgcagcggcccagaatggacatcaaaggcgcaacgcaggaccgaagcgaacacacaggaaaccggacgcacaaaccacagacaacgacagcccccaccacagccacg

SEQ ID NO: 150476 - DNA, 842 bp, Homo Sapiens
ctcatgttggccccaggtaggctgtctgggccgtttggcgtccaccctccctggctactcggatgcctgagagaatgcacaggcgctactagggccctcagtagcagcctcctggcctgggagcctgtcttgggactgtccggagtttgccggagccctcggggtgcagccatcttactgtgtgactcacatctgggaggtctgcggagatagcaatggggtggctcaggggtgggccccctgagcctcggcggcgtaggtcgtgggctgggtatcctctcctgagacctgcggcgtggccacccggtggctagcgaccacctgactgaaggcggtacgggcagcggcggcagcggcccgagccgcacggttggaggcggcggcgcgggctacgttggcagcacgggcggccgtctcattggcaagtgtttccggatccagctgcaatgcctccaccagggtctgggccagcacagggttttccagttcccagggctcattcgataagatgcgaaggcctggacccaagcttccgaaggctctgaggatatggatgtcaaagctggtgagggtgccatagccaccaaacgcaccgaattcttcatagtcgttgccttcaaccatctcttcctccccgacttcgtcgctaccctcatccatgtcttcaacactgtagctttccgattgcacgctgaagcttccctcagccatgcttctcgggaactccaatggcgtccgtcctcagcaccaggaaccccgcagccgcgccctcgcctactgcctcgtgccgaattcgccacccaggcctcgctaccttagaaccgttagagttactggccgtc

SEQ ID NO: 150477 - DNA, 1506 bp, Homo Sapiens
caaggtgctggtacgcccggattacgggatggttcctggtgctgaggacggacgccattggagttcccgagaagctgcttcaccctccctctcaggctgagctctcatctccctgggacccgcagcatggctgagggaagcttcagcgtgcaatcggaaagctacagtgttgaagacatggatgagggtagcgacgaagtcggggaggaagagatggttgaaggcaacgactatgaagaattcggtgcgtttggtggctatggcaccctcaccagctttgacatccatatcctcagagccttcggaagcttgggtccaggccttcgcatcttatcgaatgagccctgggaactggaaaaccctgtgctggcccagaccctggtggaggcattgcagctggatccggaaacacttgccaatgagacggccgcccgtgctgccaacgtagcccgcgccgccgcctccaaccgtgcggctcgggccgctgccgccgctgcccgtaccgccttcagtcaggtggtcgctagccaccgggtggccacgccgcaggtctcaggagaggatacccagcccacgacctacgccgccgaggctcaggggcccacccctgagccaccccttgcttctccgcagacctcccagatgttagtcaccagtaagatggctgcccccgaggctccggcaacctccgcacagtcccagacaggctccccggcccaggaggctgctactgagggccctagtagcgcctgtgctttctctcaggctccgtgtgccagggaggtggacgccaaccggcccagcacagccttcctgggccagaatgatgtcttcgatttcactcagccggcaggtgtcagtggcatggccttcccgcgccccaagagacctgccccagcccaagaggctgccacagagggccccagtgctgcctctggtgtgccccagacgggacctggcagggaggtggcagccacccggcccaagaccaccaagtcggggaaggcgctggccaagactcggtgggtggagcctcagaatgttgtggcagcagctgctgccaaggccaagatggccacgagcatccctgagccggagggtgcagctgctgccactgctcagcacagtgctgagccctgggccaggatgggaggcaagaggaccaagaagtccaagcacctggatgatgagtatgagagcagcgaggaggagagagagactcccgcggtcccacccacctggagagcatcacagccctcattgacggtgcgggctcagttggcccctcggcccccgatggccccgaggtcccagataccctcaaggcccgtactgtgcctgccccccgcaacgtgacccttttgcaggagagggcaaataatttggtgaaatacctgatgattagggactccaagaagatccccctaagcccccaaaattgctgaaggatttttccaaaaaatgaggaaaatttccctgaatctttaaccaacaacctacccctcg

SEQ ID NO: 150478 - DNA, 505 bp, Homo Sapiens
cgtggccacccggtggctagcgaccacctgactgagggcggtacgggcagcggcggcagcggcccgagccgcacggttggaggcggcggcgcgggctacgttggcagcacgggcggccgtctcattggcaagtgtttccggatccagctgcaatgcctccaccagggtctgggccagcacagggttttccagttcccagggctcattcgataagatgcgaaggcctggacccaagcttccgaaggctctgaggatatggatgtcaaagctggtgagggtgccatagccaccaaacgcaccgaattcttcatagtcgttgccttcaaccatctcttcctccccgacttcgtcgctaccctcatccatgtcttcaacactgtagctttccgattgcacgctgaagcttccctcagccatgctgcgggtcccagggagatgagagctcagccttctcgggaactccaatggcgtccgtcctcagcaccaggaaccccgcagccgcgcc

SEQ ID NO: 150479 - DNA, 1037 bp, Homo Sapiens
aagttctttttttctttgtgggtcccattcggtcgtgtcgaccggatccggcggtttttaagaattcttaaatccctgttccggggtcaacattccctttgtcccggcctcaaggtttaattccttccttagaccgagtttggcctttaatcagtgagagtcatccaactgggtttggtaaacgatttgagtgaaaaccgaaaatactgggaaatatccagggaatacgcatgacccaggtaggccccaataccaggacaagagaggaaggcacaacgcgtatgagtctcttgaagttgatagtgtcacttttttgcagggttcaagtgaacacttctggctccagaaggccagcccggagtgtcttcagaaaccggatggcagaaacagtcatgttggttgcccgggtgagctggtcattatactcagattttgggtcaggattgaaagccataaatggattaaagttcagaacaacggagtctcgagcagataggtacatatcaaaccagggtcccgaaatgtagcttgtatgtttattctgtttgtccagagcaaccagctgctcatgcagttcttttccaatcccattttcaaaactcttgcaaaattgttctgttttccttggaactaggccatcattacaagagaggcttcctcatcggcagcttgaggctatctacctaactaggtgtctcttacaagttcttgccgagaatatggcagcactggcgcaggctcgtcctggttagtgcataggtcgaggcaccaagcagcgacgcaaggtactggcgccggcccacggaccggcctgaggcgaccgactgggggctcccggaccaaccggccagccaccgggttccaggcgctcagcagcaggcaagagggcactatcgtcccgggagcctccggcggcgagaacgcgggcaagttggggagttctggagtctaaacacaagcccaccgccaccggattagcgcccaacacggtgcgctcagactcctgagcacttctcacgcccgcaggccagccctct

SEQ ID NO: 150480 - DNA, 1295 bp, Homo Sapiens
atgggcgagagagtatgaagtgacggcgcgccgaattcggcacgaggaaggtcatgggcatcctcatcaaccgcaagacagaccagctcgtgtcctttcttcggaagaaggatgacttcgtggacctgctgctgcagcacattggcacctcggccatcatggacctcctgctgcgcctgctcacctgtgtggagcggcctcagctgaggcaggatgttgtcaattggctcaacgaggagaagatcgtccagcggctgattgagcagatccacccgtcgaaggatgagaatcaacattccaacgcatcccagtccctgtgtgacatcatccgcctgagccgggagcagatgatccaagtccaggacagcccagagcctgaccaactgctggccaccctggagaagcaggagacgattgagcagctcttaagcaacatgttcgagggggagcagagccagtctgtcatcgtcagtgggatccaggtgctgctgaccctgctggagcccaggaggccgaggtccgagtccgtgaccgtgaacagcttcttcagcagtgtggatgggcagctggagctcctggcccagggggccctggaaagcactgtgtccagtgtgggcgccttgcacgccctacgcccgcggctcagctgcttccaccagctcctgctggagcctcccaagctggagccgctacagatgacatggggcatgctggctccgcctctgggcaacacgcggctgcacgtggtcaagctcctggccagtgccctgagcgccaatgatgcagccctgacgcacgagctcctggcactggacgtgcccaacaccatgctggacctcttcttccattatgtcttcaacaacttcttgcatgcccaagtagagggatgcgtgagcaccatgctgagcttggggccacctcctgacagcagccctgagacgcccatccaaaaccctgttgtgaaacatctgctgcagcagtgccgcctggtggagcggatcctgacgtcctgggaggagaacgaccgtgtacagtgtgcgggaggccctcggaaaggctacatgggtcacctgacaagagtggccggtgccctggtgcagaacacggagaaggggcccaatgcagagcagctgcggcagctgctgaaggagctgcccagcgagcagcaggagcagtgggaagccttcgtatcggggcccctggcggagaccaacaagaagaacatggtggacctggtgaacacccatcactacactcctccagtgacgatgaggacgaccggctcaaggagttca

SEQ ID NO: 150481 - DNA, 997 bp, Homo Sapiens
  misc_feature (957)..(957): n is a, c, g, or t
tgcggccgccctgggagtctccatccagggcggcttgggcgtacatctgcacagacaactccaggtcttgtgactggttttggtggccatagtagtaaaggtctcccatcttcaaatatgcaaaggaaggagcatcgatttgaaaaacagagaaattatagtatctccaaacacagttaacacccaagtatctcctggccaggtctggcctctcctcacagatgtgtgctaaatttgtctgtgacacttcaattccagtttctgctgctaaaacataatacagcaaagcttcatgccatgaaccttccaggtaggcattgaggcctttgcggatgacatggcccaagtagccatttttctcagctacatgttttgcccatacaacagctttctcaggatctctagggaatgtctccaggttgcctgtgatatagtagagagaacaccacaaggtcccttccatgtgtccaccttgcgcagccttatggaaatattcaccagctaaagtttgattccttccaggaactccagggaagatgccatccaaatgcaggactccaagattgtatgacgcatctgggttccccatttcttctgcttttaaccagtactttgctgctttggcgtaatttttcttgaatttgtggtaataccatcccaggccattgactgcctgatgcaatcccttggaagctgctttcttcatcagctctaaggcaagccgtctgttcttttttactccttgacccttgaatagcacaatggcatagtcatagattaacgcaggatcctccgtctccagggcgcccttggcgtaccactcaattgctgcttcgggattcttggccacaccttgctgcccccagaacagcatctgggccaatcgttgctgagctgctgcattgcctcggggtagcttcatgcttcaaccacataaagacatctccatcttctttntcctcggccgattcaacacccaggctcgtactagccgtat

SEQ ID NO: 150482 - DNA, 473 bp, Homo Sapiens
gggttggggtgcccaagcccctggtaaatttcccccaggtttatttcagggagggacttgaagggagggggggacttcgccttgaaacccccggtgggccgagggtgtgggtgagccaagaattgtgccatggtactccagctggggcaacaagaacaaaactccgtcttgtccgagtccgggtcggggtcggcctggctcaagaggtacaggaaggatttcgggtcctgacacagcggcgtctgcccagtggtgaggaagtaggtgccgccgctgtagagccggacccacttggacctgctgctggggcgctgggccaggacgctgagccccgcgctttaagggaggcacaagaagccaccccaaccccgccccgagcctgccacgggccagcggcaggagctcgcagtgattccccgccatgatcccagcaagccccaccctcggccgattcaacaccagcctcgtactac

SEQ ID NO: 150483 - DNA, 944 bp, Homo Sapiens
cgtgggtcctttgcagaagcaccctgcacagctgttccaagggcctggttccagctcggggaggaatccccccgcgttcgtcccagcaacctgaaaacttctcctggttgtgaagacacagttccacatcccgggtctggtgcttccttggttgaaaagtcggttctggagggtttccagcttttttgtcatagcagggcatcacttgtgacgtggttagatcttgtcaggggtcaaaggtgctgctgctggggcgaaggaagtccttgaccagggagcccatgaccttgctgcggggaccggcggtgctgatgtggtggaggatgaagcttccgtgagtcttctcggcatagcagatccagcctgggcaggcagaggccagcaggggcagtgcctgtgtgcaggtcggcctgtcctgcggaatcgccgcacaaactctcgctggctctccaggaggctgaagtgccttgagaaggcggtgtcgaagacgaagtgcacccctattttgtttaaagaatgagggttaatgttcctggcagtatctgtaggattcagcgtggaaccgtgcagccagcgatgctctagactgtggtgagaccgagaactacagaccagcctctgctgactgggtgccgccatcttgttagcatctagaaccttcttcagctcctcgtggctctgctgggtgataagcacggtctctgcggaggtgatgcagccgctgcacgccaggcagtcgtttagcgagaccttggccttctccagcctccgggtcccgccgtcttggttaatttggaagtagctcccgtcatcttcaatgcgaatcttggccacgccacttcccgcccttttttccactttgacaggcttgatgcactcctgagacggcccgatgaagtcatccaggtccgtcaagctgcagcgccccgctgaagggcgacgcc

SEQ ID NO: 150484 - DNA, 832 bp, Homo Sapiens
gggggtctgaaagggagtgttcgggtttcgctggggcctcgcggctccagagcccagcatggcttcctcgcgagcctcttccacggcaaccaaaactaaagcacccgacgacttagttgctccggtcgtgaagaaaccacacatctattatggaagtttggaagagaaggagagggagcgtctggccaaaggagagtctgggattttggggaaagacggacttaaagcagggatcgaagctggaaatattaatataacctctggagaagtgtttgaaattgaagagcatatcagcgagcgacaggcagaagtattggctgagtttgagagaaggaagcgagcccggcagatcaatgtttccacagatgactcagaggtcaaagcttgccttagagccttgggggaacccatcacactttttggagagggtcctgctgaaagaagagaaaggttaagaaatatcctctcagttgtcggtactgatgccttgaaaaagaccaaaaaggatgatgagaagtctaagaagtccaaagaagagtatcagcaaacctggtatcatgaaggaccaaattagcttgaaggtggcaggactatggatttgctaataatccgttggccagggcaatgaaacgcttgggaagaagcccgactcccataaaggagattccttgaaaacaaaccagggacctccccagaaggcaaagaggttggcccaaggtcttctcccgggccttttggaaccaaattttttggcgcgacccaaaatatgtggggggaaggaaactcgggcgccctaatcctcccccataagtggggggaacctctttcgaaa

SEQ ID NO: 150485 - DNA, 1177 bp, Homo Sapiens
  misc_feature (521)..(521): n is a, c, g, or t
gctttgtaatcaggagtaagtttaatgtttcttccccacttcttttgggaggataaggaattgaggttcgtatcccttcacatatgagtgccctggatttgggttcttacttgatgaatactcgacacccagttctctgttttggctgcagccaacgcagtgcactaatgtgtggcttaagaatgaccctcttcctaggcctcgcccaccttgggacggtggccagggaccctcagtagaactggtaaattacttgttccgtctttaaagggcctcctacgagctactcttggccatatgggttaaaggaacttcctgaacatagcactctggaggaaggagtcctcgttccctccacctgttagccacagtgttggttggcaaaccctcaagcctatcaggaggtagagggcaagatgagcgctttgtcttaaaggccaaagagaacagcaccaagcgtttctacccagggccttccttctctcttcccatgaagtctttgccctgtctcccataaactnttgggtcccaggagaaccttggttgctgaaggctaggctcagtcctccgcctgggagtctgaggaaatgctcttcttacctaagaaatggaagatggggcctaggaggccctgctgttgctacattcccctctgctgtgcaaactgctgtcctggccagctctcccttgctcttaacctgatacataggagctagtccttcatttccaaatgctcccctttgtggagtgcatggttggcctgacagtgtcactgaccccagggctctccttgcccctggagtacccacaggccttggtccacatctttaaatttgggagccaggtggagagaaattgtgttcatgctgcatgggaggtagagaatggaggtgactttttatccgtgccacccctcattttgtttccttctctgaagcacctgcctctgagctcagttccccaaagaggcaggcgggcagccaagcaagggcaaagctctggtcggggaatgggtagaggtagggcagccccaggctcgaggactcctggttgccgtttccctcctacctcgatgctccactttcgcaggtcactggggaggcaggcccatggcacatgagggacagtgggggtgggggaagaggaagaagccctcggccgatgaccacccagcctt

SEQ ID NO: 150486 - DNA, 1049 bp, Homo Sapiens
  misc_feature (826)..(826): n is a, c, g, or t
  misc_feature (837)..(837): n is a, c, g, or t
  misc_feature (884)..(884): n is a, c, g, or t
  misc_feature (898)..(898): n is a, c, g, or t
  misc_feature (931)..(932): n is a, c, g, or t
  misc_feature (938)..(938): n is a, c, g, or t
  misc_feature (948)..(948): n is a, c, g, or t
  misc_feature (951)..(951): n is a, c, g, or t
  misc_feature (1013)..(1013): n is a, c, g, or t
ctgaaccatttttattcttccagaaatgtgattgataacagtaaagccacactcctcaagtgcctgaaatacccctcattgtcttcttcaggtggcaagggctctggaacagccacataaaggtgagggcaatatttttactgtagttctttcattgattggttgattgatttttttctcttagagggttagcatacatttatctgaaattgaaattcaagaggagagacaggcacctgtactagttttctcttgctgcctattatcacattaccacaaaccagtggtttgaaaccacagaagtctggaatgaagtggccgggttctctgatcagagtcatgtgaggctaaaatccgggaatgggctggctgtgtttttttcctagagctcaagctatttttccaggttcactacagataatgaaagagttcctattcttgtttgtgggggactgagggccctttttctgtgctggctgtcagcggggagacagtctactctgactccagaggccacatgctttcctccttacctgtctgtttcatctttcaaccaataacaactcatggagtccttctcaagctcccaccttctctgacttcatcttctccaaccagccacacaaagctctgtcatgtatggagtgatgtgattagatccagttcatgcggtaacctcaccatcttaaagtcatataactggcatataacaacatagtcacaggaatggtgtctcatcaccttaagaggctttagagacaagggtgtggcatgtttggggaccatttcagaaattccatttaccacagtaggacactcacattcncccatctgcanagtgcatttaccctctcccctgaggtttccagatttcatgtcattanagcattagttcaancatgaaaatgtcatgtagaccacatcagatcannagtttnaaatccatcntanacatccacaccaagtgtgaatgaggcttccgagagtgtcattaagtgcagatcttgacatantcccttactctgtcgactgtgaactgacaacagcta

SEQ ID NO: 150487 - DNA, 1076 bp, Homo Sapiens
aagaggcgggcgaccgtggtcctgggggtggcgggctttcggttacaaggtgagggcgggggctttaagccccagcacgcagccgatgtcggctgtgtagaaaatggtatgcagggcgtggtccatcatgccctcctgggagtccgctgtcaagaccttgatcctcttggtggagacgaacaggtccacctcccgtcatgggctgggtctccccatcgggggccttgacgcggtccatggcctcccgggcttgggccatgcgcgtgctggtgggcgggttccgttccgacaccagctgggtggaccccaggtacctggccccaaatatgacaccgtccaggaggtcttcatggtcacagggaccaggcacctcctggggggcagggtaggaagccagggtctcggggctctgggcaccagcgggtggctcttcaggtgtgactagaggcaccgtctccagccagggttccggggaactgcttgagctcctgctgccctcctgctcagcagaggccccctccacccattctggggagtcagaatcctcatctgggtcctcagggggctgcaacagtcggggggcaggctctagaggctcttcaggaccagtctgggaaggcgggcattcctcgcagtgcaagaggcccagcaggtcatcccggccagcttcggcagacaggagcccgtgggcatcagcaatctcctgggaggccaggccatggcctgtggcaatgtgtaggggacagggggctccacctggggatgggcccaccagatcgcctggcagagcttcaaactgctgcaccagctcctgaaggcttgactcatcaagttccatccgactgaggctgccggggcctcctggcatagggtcccactggctgtcaggggtgaggtcctccgaaggcacaagaatgtccctgggcccctccaagtccatggctggaggccccgaaggggatcgggaaattgtggggaagtccatgcctggactccaggcttaggccggcatcttcaggcagttcccaaatcgaggccgcctcagccccgccctcggccgattttacccaggcctt

SEQ ID NO: 150488 - DNA, 221 bp, Homo Sapiens
tttttgcaaaaccatgtgtttatttttattagaaatgttcttggtataaaaacaatcatgcgctacacattgtcgtcaataaccatcaccaaacacccaggcactgaactccgtgtggtcggcaggaggggcaggcgggcaggcgggcaaaacagacggcagacgggcggggcacacacagaggccaccaggaggacgcagcacttggcaacacactcgag

SEQ ID NO: 150489 - DNA, 505 bp, Homo Sapiens
ttttgagaagcaaataaacattttatttccacagcacgccttcccttttcccaaagaacatgagttcacctcagccatcaaagcagagggcgaaagctgcaagtgacaaggcaagaggctcctagaaaaatagattatacccaaggctctcctcctggggacccaaacccgtccccaggctccccctcagagcttgccaaatggagtgaaaggcatggaaaggggctgggagaaaagccagctccactgaacaaaggggagaggagcctggcagtgagcagacctgggaggggtgtggggtgtggatgagctttgctccttggttgagtgctggaaaagggaagggggaagaaataatttatgttgatgtaattaatgtaatgatgatgtaatgggggcgtggtttcaatcatggcgaccattccagatctctctcaagtgaagctaaattctggccggtctatggaggtagaaattgaggacggaaggaaagtttagaatccct

SEQ ID NO: 150490 - DNA, 756 bp, Homo Sapiens
  misc_feature (62)..(79): n is a, c, g, or t
agtgccatgctaaaattaaccctcactaacagggaataagcttgcggccgcatacgcggtcnnnnnnnnnnnnnnnnnngtatttctgcattttaatttatttttcgtttctgtttctcacttaccaacacatgtgtaaaatgtagcaggtgtgttagtaaaggagaagcagctggggggagaggggcaggaattaagcagccacatgtgaagagtcaggtcaagcaggaagtgactgggggcagaggtggcgggcagcctcctccctgccccaccttcccacaaggcaccagcaactgctgcagctcacaacccctgccccagacgatttggtgaacgtggtaaagagcattgctcccaaacgtcgtctcagatattctttccccagccccagcaatggcacagtgtctgctcaggcagccctccaaacctccacagcctggtgcgggagaaatctgccctggtctccccgggccggcccctgggtagcatctgagaagcatgaagctggtgggagtccaggggggccacagtggggctaccccggagctccttctgggggaccctccttccagaccttggagagctctcccagaaggccctctgcttcatccacaggctcttattccagacgacattaatgcgggctgggcggactgggggacacagcaccagaggccaaaaagctgcctccaatgtccggcggagcccctgggtccctggaagggaaaggtttaccttccacgcgggggcagg

SEQ ID NO: 150491 - DNA, 684 bp, Homo Sapiens
ttttttatcagaataatatttattgatatgctcggtgctaccttgttaattctgcatgacatggtctccatggctgaggtatttggggtgggaccagccgggtgccggccggggctcccacaggaagccatgtggcctcagccgcggcggggggcccgggtgggggacgtggttattgcgttgggccccttcactcctcatacatgggccacgcgctggcgtgcactcacgcactcgcccgcctgctcacactcacacactcccactcaagctggcaccacaccctctgtgcacacgcacacacgtgcacactcgtacatacacacccgctcgctcacgctcacctctgctcatgcccgttcacacacacaccatcctgctttaaacccatcctgtctcctgatgataaatatgcttgttcggtacagcagtcttagtaaaataaaatgtctgtcaggcgacaaggagaaagtgcacgttgacctttgacccgagggtggacctcggtccctcccacccgagggcatcaggtccctgcagggggtgacccctgagcatgtgaccccatgggcgtggccaccccactggtgggactggccccaccttcctcttccctggctctgggctgggggagctgggctgggggagttgggctgtctcgccacagcccggggccaggatgaa

SEQ ID NO: 150492 - DNA, 850 bp, Homo Sapiens
cgcctggtctgtgccctggagctcctctgccccatgtgtcagagtcacgggcacctcagatcttggtcacatagttgttggggcacaggccctgcttgcctcgtagtcgacccgtccaccagccagaaggatcttctttgataatatcgataatgtcattggcattaaagctgagttcgtctgtgtcctgagcgtcataggcatacacagccttgcactgtggcacctgaggcttgggcttgggctggggcttgggtcttgccccctgcatgggggaggccgactggttgtttgtctcctgacccctgcagctccctggtccgggaccttgaggaaatccaggctctctggcgtctgtgacactcggtctgaactggtagactgctgccgaggcaagggcgggctgggccatggaggtgtacacggcttttctgatttgacctctggcttccaggagcatggggatatggcacatactggtttctgatgactccgttctgatggtatcctgggggaggaggggcagctctcactgggtagcttggcattttgagtcccactggaataacctgtattttggctagtgttccttctggtaggacgggagttcttgggcagtccaggtccgatgctgacctgcagcactttgttactgggcttgaggacagccaggtccccaaacccttggtggaactgcacttgccgggagccccctgcactccaggggccccagttttcctttttcaacttcagttcaagcgtattgctgaatttcagaggtagttgcttctgggtctcctcgtgccgaattcgccacccaggcctcgctaccttaggaccgttatagtta

SEQ ID NO: 150493 - DNA, 468 bp, Homo Sapiens
gttctctgagcaccgttttctcactgcgtccttcgacctgttaaccccactgtgctttttgcaggcttgaactgaagttgaaaaaggaaaactggggcccctggagtgcagggggctcccggcaagtgcagttccaccaagggtttggggacctggctgtcctcaagcccagtaacaaagtgctgcaggtcagcatcggacctggactgcccaagaactcccgtaagtgctccacgggccctgcaggcagaactgccgccgctcccccgagtctcccgagcaaatgctgcaaacatgtgcacagatgtgggggctgagaatcagtacaccttctgcttgctggggctcacgctttcttcagaatggaacatttcaaactaaagcaacagcaaggaaaatgagcaggttaaaagtttctgagggacttagtacttatgtatcagtacaactgcggtgggggtaggagtc

SEQ ID NO: 150494 - DNA, 542 bp, Homo Sapiens
tgaaggcaataataacatttacttcatctaattgatttgaggattcaataagatcggcatgaaacatgtgaaaggaaaggcaaggcctgggcagacctggatgctagatgctagagggatctagggcatctgggcatcctggggcatctgggaggttggcagaggtaaactttgataactctctgcttctttctaccagttcattccaatgcctgtgctctatggcatcttcctgtatatgggggtggcagcgctcagcagcattcaggtgagcccattaaaatcacctgtcccagaggtggtgactgctctagtgactgacgctacgctcctccaaccaggcaatggcaggaaggtggagccttcctaagactgatggcttcctttctccaatcccggtgcagctattctccggccatagtctcggcgcccagcggagagcgacaggtgggagctgcgttacttcggcgcctcttgcatccttgacgtagaagtttcaccaagcgcaggtgaagtctactccaaatttgaccaatcttgcg

SEQ ID NO: 150495 - DNA, 796 bp, Homo Sapiens
ctgtcgcggatgatggtgtcaggtacacctgggcacgccacatggctcgctggacctggctgtgtgacacgtgcatggtggatggtgcctgggagaaggcattcagcacggtgaggctgccatcagccaggcccgaggtgtggggcatacatcgccgcatgcgggctagggtacatcatgtggccacccacagttgtgggcacggatgacgtcatgatggtggcgggcagcgtcactgtcaccagcttggaggaggtctgcgtgaggtctgtgctgctgtcacgggagggagacgcttgctatggggcctggtgcacttgaatggcctgcactgggacctgctgggccactgccccaccaggcatgagggtgaagctggtaggcagctgcataaggcccccagaggagacagggccgctgcctgtactcttcagcacagtcccattggcactgctgacagcactggggctgacactagcagacactggtgccaggtagttggtgatgggaaaggaggggccgctgctgacttgcatggtggtagaggtgctaggtgctgttctggataggtgcgaggtatgtaccacggcaggttggtgactagtgaacgccggcttcagtgtgtccttggtctccccactgctgtcagactcgcagacacctggtaggtgagatctgtcgtcttcaaagccagtggcactcattctctggtctgattgtggggtctgaacgggcctcgtgccgaagttcgccacccaggcctcgctaccttagaaccgttagagttactgccgtt

SEQ ID NO: 150496 - DNA, 1218 bp, Homo Sapiens
  misc_feature (402)..(449): n is a, c, g, or t
  misc_feature (862)..(877): n is a, c, g, or t
gccgcggagccggcgggagggcgggcgggcgggcggacgggcagcctaacatggcagaccagagacagcgctcactgtctacctctggggagtcattgtaccacgtccttgggttggacaagaacgcaacctcagatgacattaaaaagtcctatcggaagcttgccttgaaatatcaccccgacaagaaccccgacaacccggaggccgcggacaagtttaaggagatcaacaacgcgcacgccatcctcacggacgccacaaaaaggaacatctacgacaagtacggctcgctgggtctctacgtggccgagcagtttggggaagagaacgtgaacacctacttcgtgctgtccagctggtgggccaaggccctgtttgtcttctgcggcctcctcacgnnnnnnnnnnnnnnnnnnnnnnnnnnnnnnnnnnnnnnnnnnnnnnnngggaagtgtaagcccaaggcgcctgaaggcgaggagacggagttctacgtgtcccccgaggatctggaggcacagctgcagtctgacgaagagggaggccacagacacgccgatcgtcatacagcgcggcatccgccaccgagaccacccagctcacagccgactcccaccccagctaccacactgacgggttcaactaaatccaggaggagctgtggtcagaggaggagccggcgcctggccacgccaaccttagaatcatgaactgtagtcacagagatgggagggcagcctcctgcctgccctggccttgctggggcccctcctgcctccacgcccacccagctgtcgacccttgacccacgaagtgcgtagcatgcagtatttaaagcagtgtagctacggtcttctgnnnnnnnnnnnnnnnnaatagcatgtatggggttctgttccatgtctgtgttgtggacattccgcggcatgaccgcgtgaactgcacggtggagctgcctcagggctctcggtcaggttggtccagtgaggggtgactgcagccggtcaaggtgggcgaggagaaggggggctgcccctttcctacctgtgcttgaggggccggaggcaggtgctgcctggcagagctgtgttaccgtcttggccctcggggatctggtccaacactctgtggctcccagcctttgaggctgcagtagggacctctgatctcaccttgccagaaagagaggcggggccaggtcctacctggaggtac

SEQ ID NO: 150497 - DNA, 1029 bp, Homo Sapiens
  misc_feature (136)..(136): n is a, c, g, or t
caagttccccataaataatcaaggtgggaactcttttagattaaaaaattttaccggggggggtggtaggtttccgccatcatgggccgggaattaccacttttccccccttaggagttccaatgttcaatggganctgagtgtccagcagaccaggaaatgcagtattatactttgtcaacttgaaaatgtcatgtatttgagatttctaatcacagtaaaaaaattctccacttgatttggtcagcttactgtgccataagatttaactggagtaagggatatgtgtatggttttcttcctccctttgtaaaacacaggttgccagtgaactgcatttacccagttttcatgaccggctagcactgtctccagagtaacagcaaatgctattttaacactttcattttctatggtaaaagtattttctttcagtcttatgttatcgtcatcctgagtttctaaagatgttgactttatatacagcttccatattcttatcaggcaatcttgtgaacagcttgctaggaaaagatctctaccaaaggctgcccattccactcctctaatccaatcctcatgtccacagagagaaagcactgttctgaaactgatcattttgttgagcaaatatgtgaattgctgcaatcatcattgccacatgctaatattggtacatcagtatttggcaaaaaggataagcagagagccaaagcaaatccatttccaaagtttagaagtctgaaggcacattacttctggacccttgtgtagaccagagtcgatacagcagaatctgcagctgcagaaacgatcagtgtacataatgcaggatctgatgtcctcctctggtaaacagcatgcaccgcataaacaggtccttcatggccttgaagatgcactgcttttaaaagctgattatcctcgtatttcccagtgaatcacttgattatcagatcctccagaaactcctcgtgccgaattcgccacccaggcctcgctacctaaggaccgtgatagtactggccc

SEQ ID NO: 150498 - DNA, 906 bp, Homo Sapiens
gtataccataactcacacagttactcttttactatgcagatatcacactacttggtaacaactctttcgctttgaacattcttcttatagatctacagtattttttgtccttctccccacacaccccattcgcccacttttgtccttcatagaggcccctttgctcttcgcaagcaaagtgcagtaaggttgccttgaacacttatgcgcctttcccctccactgggatgggtgttcaaactatacagcttgatacggctttaaagcacttgggctgctgcagggcacagaaactatactggctcttcaaaggacatcgttctcaagccacctctatggtgtcaagacaagtagaactccttcccttcccacttgaaacccacagtcagatgtgacaggggctggtactcaggagcgttagttcttgtcatcttttttgtcatcatcctccgaggggtaggaatgccacgtcagcctttcctcatagaaggatatgacaacctgtgggcacttgacattggcttccttggcagggaccaggtcagcctcatcagagtttttccatttcatcaggaacatgagctctccactggagtctgtagctccaataatccgctccggctccaaacctcgagcaaagcctcgtggcttttctgactcttctttcttcttctttggtttgctctcctctcccttatcttcagaatcagaatcagctttgcgcttgcctccctctgatttatctgtctcatgtgctgttttctgtgactgcagaaactcagcaatgaggtcggggcaatccaggttctcttctggctcccatgtgttgtcctcatctgagaatccccctcgtgccgaattcgccacccaggcctcgctaccttaggaccgttatagttactgccg

SEQ ID NO: 150499 - DNA, 918 bp, Homo Sapiens
  misc_feature (53)..(53): n is a, c, g, or t
  misc_feature (105)..(105): n is a, c, g, or t
  misc_feature (897)..(897): n is a, c, g, or t
aaggcggggctccaaaagggaccatgcccttcctgttctcccccagatgacanccccccttccccttgggccccaaccggaagcctcttctcagccccattctcncaggtcccaagtccctctgcctctggactagaccccacagccaggaatggagccacagagcccccagcaggctgtcgccacttgtgtccagaggcgacaggagaggccctgccctcgtggagtctaccagcatgtttcattctgtgttctgcaggctggaagcatggggcaggctgctttcccacccagagctcaggctgggctgtagcccccagctccaggacgccggggctggcaggtctggggggagtcgggacttccaggatgccggggctggcaggtctcgggggagtctgggggcagtctgggcgggtcaggactcctgcagctgcggctccctggcctggtcttcatccaggatgagcggggactggaactcccggccttgcaggtacacttctaaaccctctccagagtaagacaccaagggcgatatctcacagatggccggagggtctccatttgggggcaagctgggcagctctgggagccaggccccatgggcatccaggaagcgggccccggcccgcagagcccaccggtagtgctgggtgagcagggcctggcgagcggtgcggggactgtccctgtcggctggctctgcgttcttcagtggggaaaattcctcctcccgcagcacttccaaggcagcaaagttcttagcaaaccggaacacatcaaacacaaacttctccatctttatcccgttcggttttagcggctttaccagatcctcgtgccgaatacgccacccaggcctcgctacggagaaaatgattgggtccacctcgncgaggagggggagaagaaaaa

SEQ ID NO: 150500 - DNA, 1056 bp, Homo Sapiens
agccccccgcccgggggggccacttggaagcccaaaggtttcggcttggattgcggtacccagttgggaatttcggggaatcccaaatttaattggaaagagttgaccccgggatccccgtagattggtgagcggggttcaagctgctttcttcccggggcttgccttgccccggagaggttggacacagcttgcaccttgcggtggaaagaggtagtccagcagcgtgagcgccatcttctcggccgtgcgccagttggtgctgatgtgcagcatgtcggaggggatgatggcgcagcgtacccgcatctcggggttgttctcgtcgcccagccaggtgccattggggtagtcctcttccgagttcagggtgatgagccgtgacgttgctcccgatgctctgtctgcccgcctgcccacagctggacacagagtcgctgggcctccgagccgctctccccggtcctcgtggtggcttgttcttcttggcccggcacctgtcaccacaatggtgttctggccgacgcccaggcacagcgcatcgcactttgttgcacgtctgggttgccccgagaggggagccggccaccatgggaacctggatggggctgtgctgcttgttcgtgaccagatccagcttttcttctaaggatttacaagtagcctccagggcttgcaatttggcttcaatgctatccaaccgcaagcagattgtctggttgatggaatacaggaatgactttatagatggatcctggcaattgatttctagtcgctggcgtttcaaagcaggttcgtcttcatctgtcactacatgattctccataacaactgggtggtcagggctcaggtcttccactgcaatctgaaccacatcggccaggtcgtgttccgacatcatccagagcacggagagtggccggtcaacacgaaagagttcaactcacagtggggctggcttttggtcaccgtgtgggctgcggaattctcgtggtgtttgtcggggagatgcgataatggcgtccgtccatcccgggaattccggaccggtaccag

SEQ ID NO: 150501 - DNA, 1144 bp, Homo Sapiens
  misc_feature (236)..(236): n is a, c, g, or t
acccccagattccgggggcaaatgggtaaccgcgggggcccgttgggcccaaggacccaagccaccagccggcccccctggtccacgatcaccagttcccaggaaaaggggaaagggtcaaaggagaatcccagcgggaaatttttttcccatctcacgagctctcccttctcttcgggggcccccaaacactcgcatttaaggaataatcccatcaagtgagttccagtccgatntaagcgggtggttccacatagtctgttggctgcggaaacttctttggtgtcagagtccggtcttcccgagaccacgaatggccatgtcaggttcactgggtgcacgtagccgttctcatagcggtcctcctgcaacagctgccgcaggtgagcgatgtaactggaagccagccggagcgtgtccagcttggagagcttagtgtcggggggcacccagggcaggctggtcttgagcctggagaaggctttgctcagcacgcgcatccgggcaacgctcacgggcgttggccgcgttccgctgctgctgcttgcactctgcggctgagcccttggccgggaggggcttcgttgccaccaaccgcccgcgctaccacctgcgccgccgcccccagccacacggggccgcttcctcttgcagccttccgcgctgccggctgtgcccagagcgcagcgctcctcctcgccgtcgggtgcctcctcctctgccgacgagttgtcactgggcgaggcgtagctgcgctctacgccgcggaggggcggcctcttggaggcggggaccgggtactcccgctgcagcccccgaagctccatctcctccggatcactcaccgagcccgtggacatcccgttgtcccccttgcccacacgcgtcctctttcctcccccctggccagtctcgctgtctccgccgttccgctccctggcggaggcggaggccagagagcgctccaaggaagactaaaaacccaggccgggaagcgcggggtgagaaagcgaggtgggtggcgagagcgtgagcgcccctctgctgaccccggggagcgtggactacgagttggcgcccaagcctcgtgccgaattcgccacccaggcctcgctaccttaagaccgtagtagtactgccccgg

SEQ ID NO: 150502 - DNA, 927 bp, Homo Sapiens
cgggcagtaactactaacggtcttaaggtagcgaggcctgggtggcgaattcggcacgaggaagcaactacatcaccccagtgaacagcctggaaaaacactcctggtaccatggacctgtgtcacgcagtgcagctgagtatctgctcagcagtctaatcaatggcagcttcctggtgcgagaaagtgagagtagccctgggcagctgtccatctcgctcaggtacgagggacgtgtgtatcactacaggatcaataccactgcagatggcaaggtgtatgtgactgctgagagccgcttcagcaccttggcagagcttgtacaccatcactccacagtggctgatgggctggtgacaacattacactacccagcacccaagtgtaataagcctacagtctatggtgtgtcccccatccacgacaaatgggaaatggagcgaacacgatattaccatgaagcacaaacttgcggggcggtcagtactggagaggtttacgtctggcgtctggaagacactacacgccttacagtttgctgtgaaaccattgaacggaacgatacccatggcaggtagaagaactccctgacatcacaccctgctgtcactcgccacgacctcaacgcctcctacatctggtacacccttttcacggtcgtgtgtacctttggcgaggcccaccacctcgaccatccctgacctcgacctcccatgccaatacggcgacactccgcctgggcattccccctcccggcacgaactgccaacccggcagacagacagcgctgaccctgcccgtcccgtgcttgctcttacatggcgcccccttcccattcccctctgaccactggcagctactcaacagcaccaagcacctttcaccgcatcgaacatcttgccggctcttactgctacctggacactc

SEQ ID NO: 150503 - DNA, 992 bp, Homo Sapiens
  misc_feature (112)..(130): n is a, c, g, or t
  misc_feature (139)..(139): n is a, c, g, or t
  misc_feature (423)..(423): n is a, c, g, or t
gaggttcccaccaccgggaccttggccccccagggtgctccccccctcccttttgcccaaggaaggttcccaggtgggttgtttcctggaagagggtaggccgatgaggggnnnnnnnnnnnnnnnnnnnacattggancgccagtccccaatgggtgatggacagcactgcccaaggaataagggcccccggggagcttgtgctggcctggtgcaagtccccccttgggcccacggctttgttggtctcatgggacaagtagaaggctgcgatgcccagaggccagaagcagcagagcatggagaagacactgaggccccaggtggtcccgcgggggcatcatgaggaaattgtcctcactctctgtgtcgcttgagtagtcgctctccagctcctggaactcctcctccctcctccacatngtaggacagggtgtggatttttatgtcatcagctgagaggtcaatgaacttcccatccgggtactcgaggctgtctttggtgggcgaccggtcctcgatgaaggtggtctcgcagcagtcggcggccacaccgtccccccaggagcgcagcacgccctctgaatagaggatgatgttgggccggtagcgggactccactgactgctgcagggtgttggggtccagcagctgctgcatcggctcactcctgctgctgtccaggctggccggcactgtgctggcccccacccggtggctctggtactggggcgctgggtaaacagacaccagaccatctctgctctcggccatcaagtttctggtgttaattaaaccattcctcttgccagcatcactgattttactgtgcaccagcatgctcttctgttcaatgatgccatccatggtactctctccctggctgggcgtcaggctggtgggctgggaatgtaggttacacttgcctcagggaagccatttctcctccgggacaaggtgacccggcatcccgggaattccggaccggtcca

SEQ ID NO: 150504 - DNA, 453 bp, Homo Sapiens
ggcgagtgcgagcatagcatgtgatgtggtaccctttcttcaagagagacaggccctctcttgaagcaggatggcagtggaatgctaccagcttgcacccccacacatgtaacctggtcctgcctggggtctctttgttcctttttccctcttggagggaaaaccacccaggacagcagcagtgataccatattcattctcctgttaggtgacactgctgagtgtggagatgactgccctaaaagaggagagagaccgactcagagtcacttctgaggacaaggagccaaaggagcagcttcagaaggccatcagggaccgcgacgaggccattgcaaagaagaatgctgtggagctggaacttgccaagtgcaggatggatatgatgtctctgaacagccagtgctggatgccagttcagcagaaactgaccgctccacctcgcccggtcac

SEQ ID NO: 150505 - DNA, 793 bp, Homo Sapiens
agattcccgaaatggagtctggattaagaagagaggttgaagatagaagttcttggtgaactgtggcagagtgtcttccattccaggaagaagcgatgaacttggcgtgattgccgaaggccacccctgtggtcaggccgctatgctctgtaaagtgaagaatctccgtccattgtttgcagatgtagatctggacatccgtgcccccaagagccaggtaggtaccactctggtcaaagatcagtgactttacctcaaagttgttatccagctgcaaagtcttaaagttcttaagcttgcgcagatcccagagcttgacagaggagtcatcagccgctgtagccaggtagtaaccattctcagagaaggcgatgctagtgatggggcccgagtggccagggaagttggccacattagtacgttccttcaagtcccagatcttgatctgagagtccatggttcctgttccaaagatgagtccgtcagggtggaactgtgcacaggtgagagagcagccggaggtctcatctgtcaccttggtgagcacacgccctgtctggatgtcagagaaagcccagtactgatcatcggaggagctcaggagatagtcgccagtggcatgaaggctgaggcctgtcacagcactctcatgggcccgaaccacctgtacacaagaggcattggggaccgaccaaatcctgatagtggcatcgggggaacagaaaacaccagtcctgggaaggtgaaacaccacgctgtgaccttcttgtatgcctttgaggtagcccttaaa

SEQ ID NO: 150506 - DNA, 1128 bp, Homo Sapiens
ccccaatggtcaccagggggaactctcaagtgttcgccaagctgcttgctatcaaatagtcctgtgcaaaatttgggaacgtttagtgcctcacttatcttgtagatctcagcgcttgtctttgctctaacccatctgccggttcaagactaaactctgtgccggcacttggggtctccaagtgtaatggtcctgtaattctctgggtctgttatgggccttgttctcctgacggtcagtcaggcggcttttgtttggagaaagttccgccttgtgcatcttctcgtgcagcacctaacttggggggcctttcgtgttccagcccttctgcaacccgcgccgccctcgtccttcccgttgccaaagggaccaggagcctccccgtacaccagcatccttggcattgccacatgctccaaccgtcaggcccaccacctgccactgtgtggccatcacaccacctggactccggggtcagccctagcagccctgctggaagggtcccccagccccgccccttgctgccggggcggctgaactctcacctgccacgcccacaggcagcgccaaccccaccaccagctcctgtgcagggggcacacccgcggcctcactgcttcgatgggtccgctcgtgcttcctcaggctcgacgacaccacaaaggatttcccacatgcgttacagtggaaggggcgctcccccgagtgcacccggctatgcttcgtgaggctggcacgctcggacgaaggctggcccgcactcctcacagcggaagggccgctggccagagtgcaccagcgcgtgccgcttgaggtcccaggacgccacgaacgtcttgtcacattgcaggcacttgaacggccggtcgcctgtgtgcacacgccggtgcatggccaggtccgccggctgccggaagtccttgccgcacttctcgcagtggtatggcttcaccccttcatgggcgcgctggtggcgacggaagctcgaggggtcggagaacatgcggccgcagcgcgggcacaggaagggcttctcccccgagtgcgtgcgctcgtggctctggtaggcctcgtgccgaattcgccacccaggcctcgctaccttaaaccgttagtagttactggccg

SEQ ID NO: 150507 - DNA, 1275 bp, Homo Sapiens
  misc_feature (123)..(123): n is a, c, g, or t
ctgtttggggggaatgtgcgacttgtcgattgcaaggctggctccctcacacagcggcggctgtatatctgttggggtgaggtggcgtctggtcctcatattcttaggcgtgacgccgcttanattccactagagtctttctctccccatttcgttctcgggtttccgccgagtttgatatttacacaagcgcggaggtggagttgtggggggattagattcggtacaacattgtcgggggtgagctgagtggagattggcacttgtgggtacgactggtgtgagaggtatgtcgctcgaggtgagcgagaaatggcggtactattacgccgggctcttcaaaggtgccaggtgcttctacggggttttttcttctacgccggggggttggccttcggccgccggtggggccgccaggccaggggtgagatcttggtttttccaggggaaacggttttttcccgccctcttcggtggtcagggaatgtggtttcccccgggggtccgtttgggaaaaggcgggccagtgccaggcgcccaggcgggggggttcctgggcttcctgcttgtaggggcgcccagctggggagtccccaggcgccgggcccttccagccccagggggcggtgcctgctaagggaatcatcccactgtcctcctttccacctgtggccccagggccctgcgtcacatcctgaggcaccctcgttgctgacgacccatcgggggaggctgctggcccccagagctcctccagcagggccaccgcctcctccccgctctgcggctgccggctgcacacccaggcctgcgtgtcggcgggcagcgcgctcaggaactgttccagcaccagcagctccaacatctgctccttggtgtgcacctcgggccgcagccagtcccggcacagggcgcggagcagccccagcgcctcccgcgggcccggcgcgtcgcccaggtggaagcggcggaagcggtgccacggggagtccagcgccaggccctcggcctcctgcttcacgggcaccgccacctccatggggcctcccggaccgcagcgcctgctctgcctggcccagggggcaaagaggtctctgtgagggggcagcgctcactcgggtggtgaggaaagggtgtgcccttcctgggatcccagggagtcaagtccaggctgggtcctgccctgggcccctggcctctgtacctcagtcctgcagctcctcccgcagcctgtcctcactctctcaggcatcccgggaattccggaccggtcca

SEQ ID NO: 150508 - DNA, 720 bp, Homo Sapiens
gtgtaaggtggaggacttccagtgtctttcggggagctacctcttgcatcatgggggatcctacagccatatcaccagtgtgagaggctcctgtgtggatggtggagatgaggaagatggggaatcagtgtgggaaaaggaggagagcagtgggtctggggagttcaataaaggctcagagagggacttggagctgataagggcagctgggtggggcagctggaccagagggtccctcctggagcccatgttatccctgagttgctggaggccatccaagctggcctgtctcaggagacgccccccaccaccatggccccgtgacttggcttgtggccagtgtggtcaacagcatcttcaaaggtactacctcctccaccagcaggcctcagcatgtgcctctgtcgcacgggccaccccctgtggccaccaaaaccagcgtctgccacttggctggggggtccaaccagctctacctcatgttcaggaggatcagggggcagcgaactccaagtgacctcaagcatgcggagggcatcgtcgaaggcgaactcacgcttgagttccagcagcagccagcggtaacagaagaagaggtcatcagcgcctgcctcttgcaggtattgataaaagtcagggtcagcgtgtcgcagcaaccctcgtgccgaattcgccacccaggcctcgctaccttaacaccgtgagagtactgcaccgttt

SEQ ID NO: 150509 - DNA, 800 bp, Homo Sapiens
caggggtttaaatgatgtatctttattatactgaggttaaatcaaaaggaaatgtttcatataaaacactggggaaaatcactttaaaagagttatcctaaggattaaatctaaccttggaggtagaacagttatgaggcttctagcatcaataagacagctccatggggttaccgcagagagacaggcaagccataggctataggtgcagccccaataagatacttgagtcggggagcttggcgggcctggtttacatagtagagaaggggggcccctggcctgctccaagccagccttgcagcagagcttccgtgtagcggtcaatgtcgcggtcagtcacatcccagagattacccagaaacaaggggcaaccagccatgatgtacttgagcacgatgccagccccctccaggtttccatgcacagccagggccgcactgctacagccaaacagcagggccactgcccgacagctcagccgcaggacagcctgcccatcaaggaagcgggcaccagccccatgccctgcatagatatacaaatcatgctttgtcagggcttcctgcacctgttcaggtcttggcacctccccaaccactcctctccagccagcttcactgctgaaattggctcgaaattgctcctctgtgcttgacaggttattgtgagggttcaggacatagaaggtacttcgtggatccaccccttgactcagcactggcgaggccccatactctttgcctcgtgccgaattcgccacccaggcctcgctaccttagaaccgttagagttactgc

SEQ ID NO: 150510 - DNA, 1287 bp, Homo Sapiens
atcaatcctctgcttgactttggcgtcctccacgatgacgacggcgttgggcgtgagcagcagctgccgggagcgaggcttgtagcccttgcggtcgtatttcacaacaggcaccgcatactgaatgggctcagagcccaaggcctgcagcactcgggggctgatctcatctgtaccaagccgagtgctgatgaagagcctgggtacactctgagggtaattatccttcttgcccttgaagatctcactagccacggccttctgctgcagctgctgttccactcagggcgatactccggcagtatttccacaccatgttctttatgcacaactcccgcagaagctctgaggcctcacgcagggcaggtgggggcgtgggccacgaggtgtccaggacattccggggcagctgccgcctcaggtttagcaaaaaagaggtgcgcacatggtccaggaagaaggcgttctcggggcagcggggggcgtggcgcaggatgaagcctcggatgagccgccggatggtctgtgccgcccacttcctcttggctgccttcctccggcccagtgttccacgccaccacgactggatgcagatggctgatctcttcacccggaggaatttctgccgccagtgaaagcccctccaggcagcttggatctttgtggccaggctctgccgccggacctccagggcatcctctgtggcaaacagggtcttggggaagcggatgaagatcttggtcctgcccatcttgtactcttctggcttgtagcccaggtgtcggaccagcacagccaccccatcctgcggccgtcctgcccacgtgggccacgtctctgggcacagtgacttgtacctttgcaggaaagcttcgtatttgcggcgataggcaaagccggctctgcgcacgcgcaggttttccaacagccccaggtacttcacctggtggcggatcagcacctcgtcaaagcggccgggctgtttggcatcattgggtttgatgcagcggacgtaggcgggctccttagactgcaggatctccaccagctgcaggaggctcatcttgaactgggtggcgaccgtctctggccgcttcttgtcactgagctcgctccggtcgaagcactggctcataatgggattctttgagctacacatggtctccttaaggttccggaagagaaggtcatttttttgtccagaaacccggtcacgctgtaggtcacctcccccgcatagtgcagaaggccctcgtgccgaattcgccacccaggcctcgctaccta

SEQ ID NO: 150511 - DNA, 897 bp, Homo Sapiens
tgtgtatgcctctgggttcgtgtgtggctgtgctgcgggagcgttctgggtgatttgtgggttggtggtgtttgtggtaacgtggcagtggggttcgttcggggtgtggcctaatgtaggttgtccgtggccttgtttcgtagttcaggctttgtggtgtttgtacgtgctgccgtggtggtggccgagtggcggttcctcgctcccttcgcggaatccagctggtagcgtttgtgggcgcttctgcccttgcgtgtgcccggcgtcggggtagtgcacatctgtggaaggacctgggtgtcggagtgcatgcggatcttgtcaggctgaggcgtagatgtaaacctacctcctgttgacctactttcatccccagttggggtgtggtgcttttaagatatgtccataaattcttggcgtgactgctccattggggtagaggaactgtgtaatgcctctctccttgagtgcaggctgaacttagtggcttgcgttctaacaactaggataagaagtgtcggtgtgtcctttgcaagactatgtctttaaaaggcacgtgcagctttctcctggccctgccccatgatctcgtggaatcagctgctcagggagcagccaggtgtcatggtgtgaggacactcatgctgccctacgcagagacccacatgggaagaaactgaggcatcctgccaccggccacaaagagagtgcttggaagtggtttctccagctccagctgactgcagccccctgttcaatcttgactgtaacttcactgataccatgggccagaaccatcatgttaaactactcccaaattcttaacccacagaaactgaccctcgtgccgaattcgccacccagccctcgctaccttataccgttaggttacgtcct

SEQ ID NO: 150512 - DNA, 1068 bp, Homo Sapiens
  misc_feature (279)..(280): n is a, c, g, or t
cccccacgggttttccccgcgggttcccacgggggttcccccggttcccaaggggggccagagttccccgattccttggttacctgctggggggattccccgattccccggtttccctggctccccggctccctgcttgggggattcctggcccggacctgggactttcttttggcttgggagggggcctccaggggctggaagagggactttcggcaacttaagctgaagatgatgtcagaggcctcgtgggcccaggagggcccccccagttttttnnttccccacccgagaaaggaacaaagggggcagctgcgggtgcccttgtgctctgcttctcctgagtgtgctcgcagcagggccctgaggtgtccgcgtcctccggacggctcaagtcgccgcggctgagctccccagattccaagggaagtggagcgctggcggctgcctggccagccgacgctgacgagcccaggcttcctggggtcttgcccacggggtcgtagcacttcatgacaaacctgatggtggcgctgcccccggtcaggcccagcgactgcagcgtcgtgccccgcagggcagcttcacccgtcacctcatccctcgtgtacacgcagactggggtggccccgccggggtgctgcaggcactccctgatctgtggaaaatggctgagaagctcccagagggtctggcctgaacagaaagagtcctgcaacctcgagccatcgtccagctgcaaagcgatgcgaaccatgttctcaggcccctcacggctccgggaagcgggcaccatctccagcttggcattgttgggcaggttggcaaatctccactggagagaaaggtcgagcacgctcctctgaaacttcagatcatattcacaggggttgaagtcctgccgccggcacgtgtcctccagaacctgaagcagcacggtgctcggcgtcaccttcaccgtgtggcgccggccgttcggggccagcaccgacaccgcggagcctccgccgcctgccggggccgccattttcatcccgggaattccggaccgttccatcaaatggtggc

SEQ ID NO: 150513 - DNA, 1291 bp, Homo Sapiens
  misc_feature (863)..(983): n is a, c, g, or t
cggctggaccggtccggattctcgggatggccgttagcccagccaagcccagccaagcccagccaagccccgccgatcgcgggcaccggagccagccccgcagcggagggaccacagagcaccagcctgcatggaacttccttcctcactcagcttcccacgttgccagctgggacaggggagatggagtaattttgctgtggaaagacttcacgtcttgccgaatgaaagtaagcaaagatactgctagagtcaggaatctagagtcgggaattcattaagccacgggagtacggaatggccacagagtagtgaaatactgtttcttctggaaaagtcagcctccagcgcctgcagcttccggaactaagatgtgactgggcttgcggagcgcgctgactcctctacctccctccctggctgtgcaggtcccgcctgtctgtacacgctgatgcccgtgcagctgtactgagcacccggaatggaatgagtctatgcactccctccggatcaagttggtggggggcccttcctgtgactggcgtccatgaccaaggccgcggacccccgcttccagcccccgctggaaaggtgatcctgacgtatctttgtgggctgctgccatcactctggctgctctgctcccaaccgaagcggacacacactcgtagagaccctccagaccgacacagtgacacacaaaccagcgcagcgctccggaccacagaccatccagaccacactggctcacccatcgcacacaacctacacccacctaataaacaacgcccacgcacccctcacaccacgccactacaccaatactacagaatcaacacaaacaacacaccatcattcacatnnnnnnnnnnnnnnnnnnnnnnnnnnnnnnnnnnnnnnnnnnnnnnnnnnnnnnnnnnnnnnnnnnnnnnnnnnnnnnnnnnnnnnnnnnnnnnnnnnnnnnnnnnnnnnnnnnnnnnnnncccacctgcccccccgcccatggccacacacaaaacagcgcacgaacgatagtcggtaaaccaccaaaccggccagctcacacactgggcgagaaccgaactagaacgcagacaaacgacgaacagaacagaaaacccacccagaagacccgcaggtaacagcgcggccaaaaccccaacgcccaaacaacccatagatcatgaaactaataccgacacgcacagcaagacccacacacagacacaaaacccccacccatccgcacagccccaccgcaaccagctaccgacagcaccgacactatcca

SEQ ID NO: 150514 - DNA, 742 bp, Homo Sapiens
ttgttagtcttgtttcttttgtcctcatcagttttgttggtccgccgggtgtctcctcgctcaggcttgccatcatctgtactctcggggtctgactcacagaaggtgggaagctcctggagggtggcgtcctcatccatcacacagagcccgtccattatcactaatgcccagctgctccccggaggtctctgtctctgtgggctcatcctcgtcctccctcgttgtcctctctggccagggtagaccgggctgggctgggtgtgggactgggtggctgtggtgctggtgggggcagcaggaggccgagcagcagtggcagccctgtgggccagtgcgatgtcgtggaggcaacggcgcgctgcctccgccagggctcctcgaccatgggcagcataggcacaggggcccgggcggggtggtggcggcggggccgcggtcagcagcaccagctccgtgccagtccgggcccggaagcgctcagcggcccccaccacggcctcccacagctcctcggggcgccccgacgccatccgcgccgtgcccgtagccagcatggccggcccggcgccgtcaccgccctcaaaagacatggcggcgccttgcgtcacgtccgcgcagttgccccgcctcctctccgcacactccgcctcccttatcggggccgcccgagatcaagacctcgtgccgaattcgccacccaggcctcgctaccttaaaccgttagagttactgcccagtt

SEQ ID NO: 150515 - DNA, 1034 bp, Homo Sapiens
  misc_feature (399)..(456): n is a, c, g, or t
ggtggaggtccgcccggtctttgtgctctcacgtgttagtggaaccttggtggcggccccgtggtctggtgtatcggctgtggcccgtgcgtcctgcggcggtccgcgcttgggtgcggtcctcgtgggtcccttgccgtgtggtacgtgtggtatcccggcgttccagtagtggtttctcttcgctcgttttgctggtggttctgctcgttcgcccgtctggtggcgtggcgctctcgctccgccagtgccctcctgtgcaggcgatctccccttcgcttgcctgtaagttgggatactggccagctggcacctgcagcactcctgtctaattcgtgtaactgagagatgccggttcaccgttgccagcttagcctctactcccgatctcaagtgatnnnnnnnnnnnnnnnnnnnnnnnnnnnnnnnnnnnnnnnnnnnnnnnnnnnnnnnnnntgtatcctggagaactgatttaggtgccagaaatacagacaccctttcctgaaactcagacgaactcaacagccactgttgtgtcttctctgcaaccaaatgcacagcagtttgtggctgtagagtagctggggcctcctatgcctacctctgagggccgacagaaatgtagtaatgaatgctggaaaagccacttcaggcgctacaggattggatgcttttactgaaacctgtcccactcacgaattgttacgattaacagccagacatgattcaaaagtcagacaattcttaacagtgtagcagcaaagcggaagcacaagaagcgtctaaacgcagtcaggaacacagggatagggacggggagaaccaggggcagaaaaagtaggccgacacttgagccacgaggtcctctggagtccacctgcctccccacgagccttgggccgggcggcagctcagaaacagcctctggatttcagcaccgacactcagatggcatgttggggtcatcctcgtgccgaattcgccacccaggcctcgctaccttagaaccgttaggattactgcgccggttt

SEQ ID NO: 150516 - DNA, 962 bp, Homo Sapiens
ggagacctatagaagggctgtatagtgcctgggtacttccatctccagggttcagttttgggccaccactgcctccgggctgcagttggcccacactgcaattgcccacactggctggcagccatgggagaaccattgatgttcaggaaggggaaggttgtcctggatgggaacatggtgctgcgactgatcccagctcatcttcctcatcttcttcatccacatcattatccttctcatcccagggagcagaccctgtggatcctgggttaatgatcgagccctggggctgagggatgtcacacacttgatatatcttcactgggttcatgggcacctccttggtgccatcatacatcaggttgaattctctgctcttattgagagcacagcgcagctgggccttccatttagctgggtcagggtcatccaccccttcctggtacttccctgtctctacagcccaggccttaaaaatggtattttcctcttcttgttgagggctatgccgggtggcatgtttccagggaatctggaagcgtttagagtccctgtgtagccagatgagcccagggtagaggccactatccacctgggccaccagccagggctttagccggactctgcgggggtggagggccatgatatggaagagcaggcagtgtgtccacagggatctgaagagtcggcttgtctttcccttgaccgctcaaagattctttgctcaatctgtccaccagaagcggacgtccctccgaaccaagtccgcagcgaagatcacccgtcgctaccacgctcctcgacgtcttagccaaggggcgcctggctctacccaagtagggactgcaggttcctctccccgtcccgcaccagcccttacctgcccagcccaggtgcgccgcctcgtgccgaattcgccacccaggcctcgctaccttagaaccgttatgagtactgccgtc

SEQ ID NO: 150517 - DNA, 1048 bp, Homo Sapiens
ttcctcccctttttccccccggatgtgaaggctgccccttcctgcctgggggagcgcctcagctgccccccatctgccctgctgggacaggtaccctgccacgtccagaaagggacgagcacacctcccccaccaatattcaaagccaaggtttgggagttcctgcggccagccctgctccctgacttggcaaacccacccggaggtgcacaggggaagggtggaccagggcctgggccataactcgtaagtgctgctctgcagggactttggggtgcgggccggatgggtctgtggcgggctgacctcagacctcttgaggctatgacctgagtgtcagaagcccacagccccccactgtgggccttcccacactcctggctccttcctctggatgccaggggcccagcgtggtcctgtctggactggcctgtctgggagcgccccagctatgaggtttgacgggagctcctgaagacatagctgtgcccactgccgctgagacctgggtgaggtggggtcctttgaagccaaaatggctggtggcctccaatgggctggctcccagacctccttacataagcaaagcttctgggagccctggttataggaaatcctcaccccacacacctggaggtgtcccccagacgcaagttgccagccccagctgaaagaggcccctgagagtgaccctgcaagcccacatggggactgcccttttcttggccagggatgcagggtagaagccctgccctgagcagtgtcttttatcctccgctggtcctcccagtcacgctttaatcctctgctggtcctcccgggcatgctgtccagccctgaccaagacctctctccttcagtgctcagtggttacaagaccagttggagcccagagacttctgacagcaggctggtggcccacccgtgtggcatggagtgagctgcaggctgttcctcctggtcacgccttggggtggggcagccacttgcccctcgtgccgaattcgccacccaggcctcgctaccttaaaccgttagagttactgcc

SEQ ID NO: 150518 - DNA, 955 bp, Homo Sapiens
  misc_feature (17)..(17): n is a, c, g, or t
cggaggcctggcccagngggcccacgatagggccctcactgtcaccgaagggagatgctgcggtgatatcctggcacgggagctggcagtggcctccatgtaggaacaggtggaagggggcatggacacccctgagccaggcctgggttgggtgtagatgtgggcgttgggagattcctgtctgtgggcagcacggaggaagcagggacacaggacgccaggctcgtaaggcagggaggtggtgggcgccaggcctccagggtctcttcagccttccctgcagcgaggacgtgggtcctgtctggggaggcgtagccagtacctgctctgggctggcttccgcctcggtccatgagcttgacctctggagacttcacaaggcactgggttgcccggggagggaaggtatgggtgaacctggatgccttctggaggcttgagaggaactgcgtggagatactcaggcgtgggttgaagaagtggtcttcagcttcagaggcctccacgtctcccagagctgcggggaagagctctctgcagggggactcagtcagtgtctcaaagtggtggcggaggaacttctcctgctccggagtctggggtagggagctgctggggacgctgggtccctcgggcagggacagctcatcttctgtgggacctgcgcatcctgggaaatggggcagcgacgctggcaaaccgaggggcagggtcaggaggcggagctggggagtggatggctgcgaagctgcactccaggtcggcctctgactcccccgagtcctcaggcgggctctggtcctttgggctgtcggaggacaccctgaggtaggagtcgccctgctggtctccaggcccggcctccaccctcgtgccgaattcgccacccaggcctcgctaccttagaaccgttatagtactgccgtctttataaccgcgtttgcaactgagcagt

SEQ ID NO: 150519 - DNA, 1151 bp, Homo Sapiens
gcctgggtggcgattccggcacgagggggaggcggaggcggaggcgcaggcgctggctggcaggtgtcgctaaccggacggtggtcgccagggcgagaggcgggagccggagaggtgaggcaggacccgggctccactgccgcctctccgagctcttgtgacgcggacctcagtgccaggatggctcggggcgagcggcggcgccgcgcagtgccggcagagggagtgcggacagccgagagggcggctcggggaggccccgggcgacgggacggccggggcggcgggccgcgtagcacggctggaggagtggctctggccgtcgtggtcctgtctttggccctgggtatgtcggggcgctgggtgctggcgtggtaccgtgcgcggcgggcggtcacgctgcactccgcgcctcctgtgttgcctgccgactcctccagccccgccgtggccccggacctcttctggggaacctaccgccctcacgtctacttcggcatgaagacccgcagcccgaagcccctcctcaccggactgatgtgggcgcagcagggcaccaccccggggactcctaagctcaggcacacgtgtgagcagggggacggtgtgggtccctatggctgggagttccacgacggcctctccttcgggcgccaacacatccaggatggggccttaaggctcaccactgagttcgtcaagaggcctgggggtcagcacggaggggactggagctggagagtgactgtagagcctcaggactcaggtacttctgccctccctttggtctccctgttcttctatgtggtgacagatggcaaggaagtcctactaccagaggttggggccaaggggcagttgaagtttatcagtgggcacaccagtgaacttggtgacttccgctttacacttttgccaccaaccagtccaggggatacagcccccaagtatggcagctacaatgtcttctggacctccaatccaggactgcccctgctgacagagatggtaccgagtcgctaaatagctggtttcagcatcggccccaggggcccccctgaacgctacctcggcttgccaggatccctgaagtgcgaggacagaggtccaagtgggcaagggcaggcgcagttcttgataccagagcgtga

SEQ ID NO: 150520 - DNA, 861 bp, Homo Sapiens
aaggggggagagtatgaagtcgacggcgcgccgaattcggcacgaggacggtgtgggtccctatggctgggagttccacgacggcctctccttcgggcgccaacacatccaggatggggccttaaggctcaccactgagttcgtcaagaggcctgggggtcagcacggaggggactggagctggagagtgactgtagagcctcaggactcaggtacttctgccctccctttggtctccctgttcttctatgtggtgacagatggcaaggaagtcctactaccagaggttggggccaaggggcagttgaagtttatcagtgggcacaccagtgaacttggtgacttccgctttacacttttgccaccaaccagtccaggggatacagcccccaagtatggcagctacaatgtcttctggacctccaacccaggactgcccctgctgacagagatggtaaagagtcgcctaaatagctggtttcagcatcggcccccaggggccccccctgaacgctacctcggcttgccaggatccctgaagtgggaggacagaggtccaagtggggcagggcaggggcagttcttgatacagcaggtgaccctgaaaattcccatttccatagagtttgtgtttgaatcaggcagtgcccaggcaggaggaaatcaagccctgccagactggcaggcagtctactgacccaggcctggagagcatgctgaatgcttagagagcgcttgagaaaccttcagctgatgagaaggctgactctgcgacagtttggtcagctgcctcacgctctggtgaatgctctcacgacaggtgatgcaactggtgatgtctataaggaccctcttcctctt

SEQ ID NO: 150521 - DNA, 942 bp, Homo Sapiens
  misc_feature (219)..(219): n is a, c, g, or t
ttcagggtattcagaaccgaggaaccgcccttcccttcccggtggagcccccaaaatccacgcagaaattccccccaatatcctaggatccgcctagtgaaactcgtttgcagggactggagccttgggcatcctgctccatctcccccagcagggggcagcccaaatgtttcctcatccacattgatctgcaggcccctcatctgcctcttccacctntggggggcttgactcaggggtcacttctttatcttcctcctcgtcctcggtatcctcttcactccactggatcccagtcaggagcttcccgggccttcttgcttccgagcagctctttcaatgggctgcaacgcttcaccttcctcctcatcctcagagttggagtcagctccatagtcatctaccgtatcagcatcgtcctcggagccccagaggtccccgtggttcaccataccatcttcttcagagtcttcctcctcctcttcctcatcactgccaggtgtctgggcgcttcttgcctcgaggagcattaaatagggactggggtcccttcttaccagctgtctggacagctcctgcagagatcccttttggtagctttccaggcaatggtttggcctcaggagacttatttgtcttaggggcttcaacagagcccaatctcctcttggctgccctctttcgagcacgactagacagcctcttggaattttcgtcacttactgcaggcaagaatctgacgagttctgtctcggcacccttctgcttccgggcctttcggcctggcccccgcttctccttcgtagggtccaacttgcgccccatggtacagaatgcgggttaatgtccgagagtgcccttcgggcggccctccacgtgcaatcctcgtgccgaattcgccacccaggcctcgctaccttagaaccgttagagttactgcca

SEQ ID NO: 150522 - DNA, 732 bp, Homo Sapiens
  misc_feature (161)..(161): n is a, c, g, or t
tgggccataaggcatttttttccctggctggtcttcatccaggatcagcgagtcccggctttgttcgagagttttcatgggagaaagtttacttctcctatctcagagtgagtcagtccatatcattacgaatcagcacgtcttggagcccagaggtcccngtggttcaccataccatcttcttcagagtcttcctcctcttcttcctcatcactgccaggtgctgggcgcttcttgcctcgaggagcattaaatagggactgggggtcctttcttaccagctgtctggacagctccttttggtagctttccaggcaatggtttggcctcaggagacttatttgtcttaggggcttcaacagagcccaatctcctcttggctgccctctttcgagcacgactagacagcctcttggaattttcgtcacttactgcaggcaagaatctgacgagttctgtctcggcacccttctgcttccgggcctttcggcctggcccccgcttctccttcgtagggtccaacttgcgccccatggtaccttctccccacgtcccagaccaggtcagtgctgccactcttcgtcccccaatttcctctagacccaccagaatgcgggttaatgtccgagagtgcccttcgggcggccctccacgtgcaatccggacctagctttcggccggcactcgccctcgtgccgaattcggcgcgccgtcgacttcatactcttcgcc

SEQ ID NO: 150523 - DNA, 706 bp, Homo Sapiens
tgtcggtacctcggctctacttgtctggtgaactatgcatgctcatgggagctgaaaggggaatgggggcagaggacagtggtagctgtccccatcaaacatggcaggaagtcattgtttgggaggaagaagttctgttcgccccagggtagaatgaaacgtctggtctgtcctgttgcttctgaaactcttgaaaatttagtcaagaacagtcaacataaaaacattcagatcccccacccttagtttaagagaaggaaccttgggtgatgccctacaccccgtccctgctaatctgatggcctttcaaacctggggaggagagtccaagatggctcctggaatgctagggagcaacagagggcggatgagctgaggaaacactgggccggcaccaggccagactcgttcctaccctgcgatctgacatacgccacagcccatgggcacaagctgtcagccatgcctgatgtggtcctctaggcatcattctgccctgctttctccttgtcctgcctgacccactgtcccatcctaggaacggtcctcatgtcacaccaccatgcacaccactcttgcacgtgtccctccttcactttctgctccacctgcacccccaaggattgcgttgggcaccccccaactccccctcgtgccgaattcgccacccaggcctcgctaccttagaaccgttagagttactgcc

SEQ ID NO: 150524 - DNA, 1001 bp, Homo Sapiens
  misc_feature (54)..(54): n is a, c, g, or t
ctggccagctgcagcatgtcggctgtctggttcaggatcctgttctccagctgngagagctccaacgcgttgtcccgcttgcggatgatctcgtgcaggagctgcatgtagagctgcgtgacccgcgagttcatgttgcggctctccttgcgcagcagcttcacctcgctcacaatgccgccgtccacctccaccagctgctgcagcgtctcgatctgccgcttctgcttgagcagctcattgttgagcagctctagctcctgcttatgcactcggttctccagaagcacctcaggctccttggagttgacgcagatggcacccgtgacccgctgctggggcacaatgaaggtgtaggtgcacttgtcctgggactcgcccgcccgcttgtacctgtttaggtaaatgaactctcttggcgagccctcctcagtgccctcaaaaccgtcctcctggcctgcaacagctcccatggcagccagcagtccgagccaccagcatgtcacgcacagtggcctcatggtccttgcaaaatggtggttattctttgtgaatagaatctatgaaagcctcttccctcctgcttggctccggggcggctcctcacatgcttcaccctggccgtcagcggggcagcctgtccatggcctctggaggggttcctgagttgcaggccggtggctgccaagcagccctgcctcactgggctccactggctctgcctccacagagggctccggcagaggctggggccagggctggccaggggtcctgcggggctgctcacaaccttctttccctcacagtagcgtcagccgctgcctcagtgccacgcgtcggcaggtccagggcttggggtccatcctcaggccgtccgcagcagcctcatttgaactcccaactcctttgtggagcctttacatgccgccagaggaaactgtgagcctcgtgccgaattcgccacccaggcctcgctaccttagaaccgttatagttactgc

SEQ ID NO: 150525 - DNA, 962 bp, Homo Sapiens
  misc_feature (732)..(732): n is a, c, g, or t
tcagatcgcagcaaggtaatccttgatggctggatctttttgctggagaatgcttggactagtgagcaagggattcactcatgtttcgtgtgtaaagagagcaagacagatgttaagcgctgtgtggtaactcagtgtggaaaattttaccatgaggcttgtgtgaaaaaataccctctgactgtatttgagagccgaggtttccgctgccccctccacagctgtgtgagctgccatgcttccaacccttcaaacccaaggccgtcaaaaggtaaaatgatgcggtgtgtccgctgccccgttgcctatcacagcggggatgcttgtctggcagcaggatgctcagtgatcgcctccaacagcatcatctgcactgcccacttcactgctcggaaggggaagcgacaccacgcccacgtcaacgtgagctggtgcttcgtgtgctccaaaggggggagccttctgtgctgtgagtcctgcccagcggccttccaccctgactgcctgaacatcgagatgcctgacggcagctggttctgcaatgactgcagggctgggaagaagctgcacttccaggatatcatttgggtgaaacttgggaactacagatggtggccggcagaagtttgccatcccaaaaatgttcccccaaatattcagaaaatgaagcacgagattggagaattccctgtgtttttctttgggtctaaagattattactggacgcatcanggcgcgagtgttcccgtacatggagggggaccggggcagccgcctaccaggggggtcagaggggatcgggaagagtcttcaaaaaacgcactggcaagaagctgaagctcgttttcgtgaaattaagcttcagagggaaagcccgagaaacacagggagagcgagcgcaagccccccacccatacaagcacattcaaggtggaataagccctttaacggggaaagtccac

SEQ ID NO: 150526 - DNA, 696 bp, Homo Sapiens
cagtcgacggtaccggacatatgcccgggaattcggccattacggccgggcattagaaatggcagctcttttatctcaggtagagattggagattttgaaagacctttctcaactccagcagggcatgttaccaatcagtgcaaagtgaatcaaactctaaagcaagtcatagagaaattttatcctaaaaggtatagagatggctgttctgaagagcagttaaggcagctttgccagcgactttcaaccagatggatggccctccggggacacagtgctgctgactgtgtgcgcatttatttgacagtagccaggaagtggccattctttggtgccaagttgtttcttgcaaaacccataactccatcatcacttggaagtactttcttgtggctggctgtacatgaggatggtttaagcctcttagaatacaactccatgaggttaatagtcagctatgtgtacaagagtctaatgacctttggaggctatcaagatgattttatggtagtcattaacaatacacattcaaaggacaaaccaacagagaaattacttttgccatggcaaaacccaagattcttgaaatcactcttttgatcgccagttacataaacaattccatcagcaaaaggcagcatttcaccacctctctgtccagcatgtctcagccagaccggggacccaagcagatg

SEQ ID NO: 150527 - DNA, 835 bp, Homo Sapiens
aaccattccagtttggcccttcccatgaaagccaggggggttgtatgggaatatctcaaccattttaagctatattcattaaagctattctaggttaggtagctgtaaaaaggcccaacacaggtaggcagggaaataattaataggagaattatatgtccttaaagtgcttatgagaaccacaaatcgctttatggtagctccttgtgtaataaataagtccatccaagccataagattaactagaaccaagctcaaaacaaacagatcatttacctcgggttgtaatgagcgcaaaaatgaatccatggcctgaagggatataaattcgcctgtgtggtttccatacctgtaaattccttcaggagttctaagtatgtatgatggcatattatatatgccaatatctgtcatataactcttgttgtcccaattttctacattaacaaaaataaactcaactcttccagtaaactttatacttagtgcagagaagaaagctggaggctggtcaaggtttgcaaataggtatatttttaaccaatactgatcacttttattccattcttctttcaagtgttcagcattataaatggttttgatccgagaagctgcatgagcagttatccatttaaaaatgtgctctacttcaatcttgcgtccactgtattctttaagcatgactttcccttttgaagtacttgtttgtggaacagacataatgagtgtggatcggacccagcctcttctcctgcaatatctgggatcactggaacagttaaatgtgcctgtacgtattccaaatcttgacacctttttaaccattttctccccc

SEQ ID NO: 150528 - DNA, 829 bp, Homo Sapiens
tttgcagaaactgggccagttccatttccattttccattagggtgatagtattgttccatctggtgccatccatgggcacttggaccagtggtggtcttgtctattaagaagctggaacctgtcttctgtcttgggatggatcaaaaaggatttgcccactgggctttaaagtgaatatagttcactaagaccatgatggtgttggcttgaggtcttgaattagacccacaactttcccttggtttgcatctccacatgactgttaatctcctgcttggctgcagaaatgttggagaagtcggtagaaaagacttcagtctcatagagggtcttgacatcattcaagaactttgccagtggtttcagatgcttgccaatgaagagggcatttcctatctgcaattccagttccttctttggaaaattcagtgaacagatcagatgctggaagccatgctggatctctaccattggagtgtctgtgaggttgaaccccaaggtctccacaatctcagtttgggtgctgcagcaggccccaaaggaaagcataaccaaagctgcagaaatgctcacaggggaaaagaagatgttcttatctggggtctccacagtgaacctccggtacagattgaatgcaaagtcagcattaatggatgacatcttgtagagagtggcatttggttgggatgaatggcaggctgttactttgccttcaggtgatgcacagtggattgtagcatgaagcccaagtaccaagagaaccagatacaggaatggtgacattttggaaggaagttaatagcaaatgcccaagaatccacctgcccc

SEQ ID NO: 150529 - DNA, 833 bp, Homo Sapiens
  misc_feature (681)..(681): n is a, c, g, or t
gggactccgaagtggcagcagccagagagggagtcggtgtggacgcgaggagccgggcgcttagaacagaggcttgcacaggtggagatgtggaagtctgtagtgggccatgatgtgtctgtttccgtggagacccagggtgatgattgggacacagatcctgactttgtgaatgacatctctgaaaaggagcaacgatggggagccaagaccatcgaggggtctggacgcacagaacacatcaacatccaccagctgaggaacaaagtatcagaggagcatgatgttctcaggaagaaagagatggagtcagggcccaaagcatcccatggctatggaggtcggtttggagtagaaagagaccgaatggacaagagtgcagtgggccatgagtatgttgccgaggtggagaagcactcttctcagacggatgctgccaaaggctttgggggcaagtacggagttgagagggacagggcagacaagtcagcagtcggctttgattataaaggagaagtggagaagcacacatctcagaaagattactctcgtggctttggtggccggtacgggggtggagaaggataacatgggaccaagcagctctgggatatgactacaagggagagacggaagaaacccgagtcccagagagattatgccaaagggcttttggtggcnccgtatggaatcccgaaggaccgagtggataagagcgctgtcggcttcaatgaaatggaggccccgaccacagctttataacgaagaccgacgcccatagaaaggcgcttctagttggtacccgtgggctgcacggcgaaatttgagtcctg

SEQ ID NO: 150530 - DNA, 722 bp, Homo Sapiens
  misc_feature (98)..(344): n is a, c, g, or t
tttataggataggctacctaccaagctctgcttagactcctaaatgtaatcagatttcatagcaaccattatctaggctgaacgtgtggctcacaccnnnnnnnnnnnnnnnnnnnnnnnnnnnnnnnnnnnnnnnnnnnnnnnnnnnnnnnnnnnnnnnnnnnnnnnnnnnnnnnnnnnnnnnnnnnnnnnnnnnnnnnnnnnnnnnnnnnnnnnnnnnnnnnnnnnnnnnnnnnnnnnnnnnnnnnnnnnnnnnnnnnnnnnnnnnnnnnnnnnnnnnnnnnnnnnnnnnnnnnnnnnnnnnnnnnnnnnnnnnnnnnnnnnnnnnnnnnnnnnnnnnnnnngggcaagactccctctcaaactactacaaaaaacacattatccagtcaaaacatcattcctaaagaagacccagggtctatatctggtattgggtctactacacagacactagatctaaagatcaaccactgagatggagatttccacaaggcaggaatttcactctacagcaaacaccacatcgagatggtattaattatttatattctaggcattaagttggttttcatgagggcaggcctagatacagactaagtaatactcgccggagcttccccgaggccaagaaatcaggttacatattgctcttcaaagtatgccgctcttcccggccgtaatggccgaattcccgggcatatgtccggtaccgtcgactg

SEQ ID NO: 150531 - DNA, 1050 bp, Homo Sapiens
  misc_feature (698)..(698): n is a, c, g, or t
ggccacataggatgtggacggtatgtcagtcgacatgcttataagcacttttgaggaaacgcagcacacgtatgccatgcagcttaccaaccatcgagtctgggactatgctggagataactatgttcatcgactggttgcaagtaaaacagatggaaaaatagtacagtatgaatgtgagggggatacttgccaggaagagaaaatagatgccttacagttagagtattcatatttactaacaagccagctggaatctcagcgaatctactgggaaaacaagatagttcggatagagaaggacacagcagaggaaattaacaacatgaagaccaagtttaaagaaacaattgagaagtgtgataatctagagcacaaactaaatgatctcctaaaagaaaagcagtctgtggaaagaaagtgcactcagctaaacacaaaagtggccaaactcaccaacgagctcaaagaggagcaggaaatgaacaagtgtttgcgagccaaccaagtcctcctgcagaacaagctaaaagaggaggagagggtgctgaaggagacctgtgaccaaaaagatctgcagatcaccgagatccaggagcagctgcgtgacgtcatgttctacctggagacacagcagaagatcaaccatctgcctgccgagacccggcaggaaatccaggagggacagatcaacatcngcatggcctcggcctcgagccctggctcttcggggggcaggggaagttgccctccaggaagggccgccagcaagaggggcaagtgaccttcagagcaaagacattcctgagactgttctccctgacactgggagaggtgtggctgggaccttcagctacatgtgaggtgggcctaataagtcagtgaggatcaagcaaggtggtggtccttcatgcaaggtggcgggacacgcaaggggcgaccggcaccgttaaggcgggtaaagcccaaaggctaggccactttaggactggtccgggggtaaccctcgggggcccgaggcgcgattcctgggggagggtacaacccggc

SEQ ID NO: 150532 - DNA, 425 bp, Homo Sapiens
  misc_feature (11)..(11): n is a, c, g, or t
tctcatatttntcgtttttcttgtttggcttctgacacagcttgaagaaattgatcaaaaatgccaaagaactcatctggttgtattttgccagcctcttccccaaagtgcttcactgctttagtaaacaggtctttagcttctgctagaaggtcttcaacatcagagaagctgaagctggctactgtgatgaactggctgacaacagacacaaacttatctccgggctgtgggggctgagacttctgatattccagctccttaaacacaggaaatgaataatgtcaatgcaggcttcaaatacagacatgagacacacctcgtctcatatttcacatgccttaaatttaataaatcagaatggcaaacacatcaaaacttgttctaaaacattttgttatactctagtgcccctgcccctcgtg

SEQ ID NO: 150533 - DNA, 1039 bp, Homo Sapiens
  misc_feature (929)..(963): n is a, c, g, or t
  misc_feature (967)..(998): n is a, c, g, or t
cgatcatgaagtacaacatccttgcaacttgccagtaattggatcttgagtatcagttacctggaagaacttcaattatgttggggtcaaggacatagactgtttgattggagagctcaggacctgcttgcaagaacctcattaacattttcttcattgccatattacctgtgcgtcctaagaatcgttgtttacaccatgagtaccactctctgccaatgtccatggctctctggagattttgccagttctatcactgcattgtttgaagaaatgctaatcacaggttctgtggtactcaatttattctctggagcaaattgcaaaaagaaggaataaactaagtcttgtgcggagaagcgtaatttgtaccagaggggattcaaatctccttgaagactttgcggctggatccgaggcacctgaatgagcagagtcaaggtttctttgtcctgattacacagtaacggaggacacaaaggctccccgctcttggtcccgggaccacccatggcgcaggctgagcgctggccgcccgtgccctccgactcctcgcgtgtttccacactgctatctccgcgcgcactctctcttcccgcagaagaaccccacgccaggctccgggaggacaaacaaggggagcctccgccaccaggtgagttttctcctccaggagatggctcctccacgctgcccggcggtgaccccgcgtgcctgctcaagtcctgctcccccggcttggggacacgctcctctccagctgcggccggcggaggcgccacctccgggtcgcccagggtggtgaccccggagcccgcagccccagccacgcaggtatcgtggcctccgtcctccgcgcgactcctcgcgggtcccccccggaccgtaatggccgaattcccgggcatatgtccggtaccgtcgactgnnnnnnnnnnnnnnnnnnnnnnnnnnnnnnnnnnncggnnnnnnnnnnnnnnnnnnnnnnnnnnnnnnnntcttcgctactacaggtagcgcctatatatcatcaagtctt

SEQ ID NO: 150534 - DNA, 839 bp, Homo Sapiens
  misc_feature (70)..(104): n is a, c, g, or t
  misc_feature (259)..(259): n is a, c, g, or t
  misc_feature (808)..(808): n is a, c, g, or t
cgaacttgatatcatatagcctagttagcagcgaagacgagcgcaggagtagtgagcgaggaagcggcgnnnnnnnnnnnnnnnnnnnnnnnnnnnnnnnnnnncagtcgacggtaccggacatatgcccgggaattcggccattacggccgggtccgttgtttaaaatcttggactctttgctagtttttacagatcagaatttttcacgtattaatccagttttcctagcttctcttgaagaatttttggagatctncttcatactgagccttcattagcccaggacagtactgctgtagcagttcatatattttttcgcttcccaggcctgtgttattcacttaagttcatagcctggtccctgcagggttgtacccgagcacagctacttagatgtcctgaatgtattaccggttaaatggaggtttcaaagaacctgctgtttttggccctgtgctcttgataacagagtgtttgagggacaactttcacatttgagtttttccaaaattaaaggttgtagaagagtcacagtatctattgtcaaaaacgaacaagaatttaaaaaggcagcaattgccaggatacttcattgtgagcaatgatattttccagtggaaagtcacatcttaagggttaatgccccttaactgttggccgtatttgaaaacaaacaagctaaaaacaagagacactgacatgttgtatgacggtgtggtgtggatgtcgtgtctattttagtcctgagatctagttgtacttccttgatttctgtatgtagccacggagcaccattatctgtcancattactgaatggtatactgcttgcttcatt

SEQ ID NO: 150535 - DNA, 1025 bp, Homo Sapiens
  misc_feature (447)..(448): n is a, c, g, or t
cttagtctgtactgctgtcactaacagaattacacaacactaagtatttgataatgaacagaagtttatttggttgacaggtgtggatgctaggcagtccaagaacatggtgccagcatctagtgagggtcttgccatggcagaaggcaccacatggtcaagtgagcatgagaaagatatatgtggtctaaacttagtccttttatcatgagcccactcccaagatagcagcactaattcattaagtgagggcaaagccctccttacctaattacttttaagaggtctcataagcacttttacaagtgtcaagtgtaaagtttccaagcagcttgagactttggcgggacactagtttaacaccccttacatcaggaggtgctccacttcacctgacataaggagctcagtacagtgggtacgctaatcactgtggctattgtgctnngcaaacacactggttatctatccatgggagctctaagacattctaggtacaatggtacgcgtacgaatggtacctacgtgacacagccccccagtaaaagaccctgggcactgtaatctctaacaagtttccctggtaaacaacattatctcacatgttgtcacaattcagttgctggtggcatgaaacaacagatatgtgtgactccactgttaaagaggactctggaagcttatacctggtttcccccagactttgcctctgtaccttttctctttgctgttttgcttcatatgcttttgctgtaactaaatcatagctgtgtgatgatatgctgagtcttgtgaaattctcctagcaaatcatggaaccctggaggtagtccttggagaccctgggcatacaaaagcagttcctaaagtgtttacctggtaagctgtagcgactaggcaaagaagaaaccagcaaagaacacacagggcaccctgtgggtattaacttggggggtttaaccttgcaaaatggcccagatattttaagtatccagaaggtattgggctctatcgagacgggttcc

SEQ ID NO: 150536 - DNA, 773 bp, Homo Sapiens
cgtcaacgttcaaacccattcgtgtaaaatccgaataccccttgccggaaaattaatcaacccacatgtttctgccttcagaaaaatttttactatctcttcatcagacagccaagggaatttcataatgcccccacctggtatttagaagatcgcagctttacatcagctttactctgtgttttcctttagctttatccttaattattatatcttctggttttaacacctggtttcttcctcttcctcttcttcatctggaaaatcaggggggcaaccatacagctctatttctcttttcaacttatcagcacatgccttaataggcattccagtacagtgcaggccaaagggaaacagacaacattttcctttcaatcgctggtaccctacagcaaactcacatttggataaagaaaacgtgtgtcccaaatgaaggcgtccattcatatatggatatgggaaggttacaaaatacttgcccttgctggtctgtttctctaaattagatgcattgacctcaaacactctctcagtatcccatttctgttggatttctttctcaatcttcttcaaaaagtccactttggctgttccttttctttccgccattgcaccgcccagccgactgtgcaaatccacgacaatgaccctggcgacctccacaaaggagtggttacctttcccctccctctcggggatgccaggcctcccacgaaactccccggccgtaatggccgaattcccgggcatatgtccggtaccgtcgactg

SEQ ID NO: 150537 - DNA, 525 bp, Homo Sapiens
ggctggtacggaccggaagttagggatttttgtattctgattgccacgttaatctgtaatcgttaagtacccatgaaagaatgtgtttcagtatcagtgctttttggtactttaacaagtatgtaggcacggtggattttttgaaatacccatgtgtccaatagcaagttaaggaacctagcgcatcaaatttgttttcttcattcattggaaccttattttcgcaaaaaacctagctggaataataatgccatatgtattttgcacactgctttattttctagaggctctgggagcaaattacattcatcacattacctctgctctctcaagattaaagtctttcagcaacattctttattgtcatcataaggaaaaacttttatcgcaatgatagtcagttcacattagtttagcactatagatagtattcagaaatgctttctctttggtaaagaagataaataggtgaattttattgcctgtgttttcaggcttcagaggtacctggcaccttactcaagc

SEQ ID NO: 150538 - DNA, 1258 bp, Homo Sapiens
  misc_feature (1142)..(1176): n is a, c, g, or t
cactcgatgagccaaaagcctatcgcaagcctctgttttaactttaataacaccttcctcagtcagggtgctggtctctattacagggaatccttcagactgcaaatctgtaaatattttctgatcatcttcagaaagttcagctattctcttcacatcaccatttgttggctcccactatgagagggcttgttgatgaagagaagttctgatgttctggaagagttctagctgcgtccttcagcccatgccccacactgctcagacaaatccatcacatccaggactgcagcacggaggtgggccagggcagtgatggcctgcatctcgatgggtgttcctatcctccagagggtggtccaggatcccaggagtgtttacaacctgccaacgtagatacttataatccatgtgcccaacaaacagagacttggttgtgaacgcatagggctggacatccacgtctgctctcgtcaccttgttgatgaagctggacttcccaacatttgggtacccacacaaaagcagggtcctggtattcggatcaatggttggcaaacgggataaatgctgacgcacttgctccaaatactccaaactctgcttctgcctcttgatcactgtgcacatccgtcccagggccgcacgcttcagctgtttgcagcggtagagagagtcgccatacttcatcagtcgcacataatctttagcaacattgtccactaaatttttggcaatatttatttgccccagagccaacttgtaatgatccttgtcgtagagaatattcatcaaatcagcatagaacggatgaatatcatccaatttggggaaatctgttagaatttgtgaaagtctatcatggtaattctgttgagtaaatttgacttttctcatgtaaaaatgtctaatgcgatgtatttggtaatgtttatgaataacggttggagtctttcgttgagtcttcgacaacgtgaggtctatgaagtccttggcggacggcaccaccgtaattttcttgaagttgtaatgtgccatgccggcagccgtatgcacgcgggtacttggcactcccggaacttccgccgtcccccggccgtaatggccgaattcccgggcatatgtccggtaccgtcgactgnnnnnnnnnnnnnnnnnnnnnnnnnnnnnnnnnnncgccgcttcctcgctcactgactcctgcgctcgtcgttcggctactaaagctagcgccctatagtgatctatacagtctttt

SEQ ID NO: 150539 - DNA, 821 bp, Homo Sapiens
  misc_feature (280)..(307): n is a, c, g, or t
ctcgcggatttccaggattttagtccagtaatcagaggatctgtgccaggatctggctgcagcaagtggttgtaagaccattacctggtaccagcagactatccatccactcggcttaaacacatgatgacagacactcaaatggaacgccacgcaagccagttaaaagaatgaggtagcttcagcttcactgacacaaagattctcttagatatactcttaagcaaaaagcaagtgacaggatgtgtgtggtataaatcctattttattaaaaataacnnnnnnnnnnnnnnnnnnnnnnnnnnnnagacagagatgtaaagacatagaaaagggcctagaaaaatacataaacttcccttgggaggtggaaattgagggagggggtctctcatgttctacattgtggatgtctgtatttgcttgaaattatttatgaaataatataatattttgaaacaaaagattttggaggctaattttctaaagggaatagcatagcttagatatgcccctaaactgaaatgtaaacttttgttcgccatttgcaaacctgtgagtacgtagtaagagaaacattgccacaaaatcctcttttaaaagctctttcaggacactaaattaagtcattcatttctgagattttaaaggccaacaatgtctctattttcagactatgtcacaaatgacataaatgccaaaattatagatcttaagaagacaacacataaaatacagacttagacaaaacaaatgactaaagctgcatagcccggccgtaatggccgaattcccgggcatatgtccggtaccgtcgactg

SEQ ID NO: 150540 - DNA, 1040 bp, Homo Sapiens
  misc_feature (81)..(81): n is a, c, g, or t
  misc_feature (662)..(662): n is a, c, g, or t
  misc_feature (681)..(681): n is a, c, g, or t
  misc_feature (690)..(690): n is a, c, g, or t
gcgcccaaaccgaaaagcggttttggaaaaaaacctttttccgggggggccccagaggccggcccccaccaagttttaatntatggtgtggggtgttgtggtgttgtgggggaaatatttttaatttaccatttttatattttacaggagaattcaattccaaaattgggaccatattgtacagcattttcaaatccaggtgtacaaggaatgcaatggttttcatccaattcagcgaaacaaaaaatacatgtctgttttatttttggcttaaattctgctataatttgaacaaatttctaaaccaaaagccacacagagtacaaataaagtgcatttttaaatagctctatttaactttggtggatgaagcttcaaactttatattaaggcacctggaattctcccccccttctttttcaaacaccaggaaaatgcattcacaaaatttatagttacacggacagaattttagtttatctaatgtaattttagcccatttaggtcaaacataaactcaattttcaaagtaacattgtttggaaaacattttcaacagactaattttacagaacattttttttctgtagactaattcatgaacgaagatcaatgaccaatattagtgttacttactctgtcattaagcaattgtcaaacangtatgatgattcatatacntgagctttntgaaaaatcccacaagtttgagaaatagttacacagtatttttgtaaggaattttttgtctaatcttgtgtcaagttgatgtcactaatataccaatcaattaagtccataatctctgataaactatggttgacaaatcacatgaagtacattcagcctaattttaaaaataagaaaaagtaaaaatgaatattttgctttaatcttttctattaacttaaagcagcttaaatagacatttcaagaagtactcgcctaagtttgcattgctttttacattacaattccagatcaatataccccggccgtaatggccgaattcccgggcatatgtccggtaccgtcgactg

SEQ ID NO: 150541 - DNA, 864 bp, Homo Sapiens
  misc_feature (509)..(555): n is a, c, g, or t
  misc_feature (785)..(819): n is a, c, g, or t
caagaaagtcctgcccttcaaggagctggaatgaccctccatttttgtgtaaatataaaaagggatcttgaaacttcaggggtgacatttagatggcaagtacagttctctgcatagccccgaaacccatgtatcgaggcaaaccaattcatatacattaggattatctttatgtagaaatgtacaattctggaacatagttgtactttattgatttataaatgaggaaaccgaagtaccctctgccctaggagtattttttgggtgtgtacgtattttgtgtgtgtataggcaaggaacaggagaaagtgaggtgaagtcagaatttaacttttctggaagctttcatttcctctgaaacctattttttgcttgttgttagacaagtcatgctgctaatatatagcacttagttggctagtatctgagtgtcgctctgggcaaccagattgcacaatgcctcaaattccataagggaagtccttgttccttagccaacagcttatggnnnnnnnnnnnnnnnnnnnnnnnnnnnnnnnnnnnnnnnnnnnnnnnatttgtgatgactcagtgtctaggaaggtacaaacattgtagctaatctatttctgtttcttacattacctttcaggaatgggcctggaagacctggctaaaacctttgaatcatttcctgccaacatttggccgtgacccattttggaaggtagaaaatggtccttaaagatgatgtccccggccgtaatggccgaattcccgggcatatgtccggtaccgtcgactgnnnnnnnnnnnnnnnnnnnnnnnnnnnnnnnnnnncggccgcttcctcgctcaccgactcctgcgctcgtccggttaatt

SEQ ID NO: 150542 - DNA, 929 bp, Homo Sapiens
  misc_feature (848)..(882): n is a, c, g, or t
aaaggaaacgcaaatctatacagcattaccaacaaataaatctctagccagctgggggtaaaatatgcatctatgtatagactatgtgtaggttaagaaagctataaatatggtttagaaagagtcctttgattagagtacaatgctaattaaggcccaatctacaggtttaccacctttgtgggctaattagcttccaatagaggagaatctcatgtttccatagctataaagtgcaccccttatccctgcgaacctcttcacaaatgtgctgttggtcataagggggacagtttgagactatggagtgctccatgaatagaaaagcagttcaaagcacgtgtctcacactcacggagtcagcactgcctccttcacatacgaggaacagtgtagtcattcttaatgtactaagtgtcacggggagcacagaattctaccagcagagcaggcagcaaggtaccaccagtaacttttcctctactttgagctcaactttcacatagctttagcttggttgtttaaaacttttccaatataatacagcaatgagaataatttctttttaaaaaaaggcaggaatctagaatgctagcactgttgcttacctgtcagtatcacacgtaagtctcaaaccctactgaatcacacaggtagggtttaaagtccaagatttaaagaaaaaggaaaacaaaacaaactgatgaaatggaaattgtcatcagtcatgcccagggaagaatcccaagggttttcaccaggtgaccaggtttccaaaggacatgacacatgttatacccggccgtaatggccgaattcccgggcatatgtccggtaccgtcgactgnnnnnnnnnnnnnnnnnnnnnnnnnnnnnnnnnnncgccgcttcctcgctcatctgacttcgctgcgctcggtcggttaatt

SEQ ID NO: 150543 - DNA, 1080 bp, Homo Sapiens
  misc_feature (20)..(20): n is a, c, g, or t
  misc_feature (32)..(32): n is a, c, g, or t
  misc_feature (78)..(78): n is a, c, g, or t
  misc_feature (81)..(81): n is a, c, g, or t
  misc_feature (112)..(112): n is a, c, g, or t
  misc_feature (159)..(263): n is a, c, g, or t
  misc_feature (272)..(272): n is a, c, g, or t
  misc_feature (291)..(291): n is a, c, g, or t
  misc_feature (959)..(993): n is a, c, g, or t
ggtacctaaaattaattacncctgaggggggnccccaaatatttaaaatggcttcaaaaagtctcttccaccttttantanttaggatttccattatgtgaccaaataattnaattattttctttttgaaaaatccctgaaatccggctggccatggtnnnnnnnnnnnnnnnnnnnnnnnnnnnnnnnnnnnnnnnnnnnnnnnnnnnnnnnnnnnnnnnnnnnnnnnnnnnnnnnnnnnnnnnnnnnnnnnnnnnnnnnnngggatccancaggccttgctccaccccnccaggccatctctctcacagcattgctgatctcatgacgggatgtgtatgcaaaacagacattcaggaaacatttgttgtagttcttcggtggcctgtacagcttgtgcaatcagctcctggagatccaagggcaaacaagtgcagatcgcccaggacccggatacacaccccatgcttctgcagtttctccttttcgttccatcaagcggctgaacttctgccgggccagatccataagcccgtctacctcactcttggagcgtttgaagttctcaatgctgaatgcgtagactgtcacctctaggatgcccaggttcaaacaccaccgcagagtctcagctagcttgttgaagccctgtgagtggccttcctgccgctccacctggcacttcttggcatagcgacggttcccgtccattatgaatgcaatgtgtttcggcattgggcctgcctttatgatgttggcacagaaccgctcccaaagtgacagctctccttccttgatccatgacatagttcttttccagtcagaagatcactccagaacaagcaaacaccagccaggtaatctgattagctccgctgggcgcgtccccacggcttcagtgggccggccccggccgtaatggccgaattcccgggcatatgtccggtaccgtcgactgnnnnnnnnnnnnnnnnnnnnnnnnnnnnnnnnnnncggccgcttcctcgggctcactgactcgctgcgctcgtcgttcggctatcaacgacgctagcgccctatagtgagtcgatagatgct

SEQ ID NO: 150544 - DNA, 738 bp, Homo Sapiens
  misc_feature (41)..(75): n is a, c, g, or t
  misc_feature (396)..(396): n is a, c, g, or t
gaccgagcgcagcgaagtcaggtgagcgaggaagcggccgnnnnnnnnnnnnnnnnnnnnnnnnnnnnnnnnnnncagtcgacggtaccggacatatgcccgggaattcggccattacggccggggattatgatcaatattatcaccatttattttgtgctccagttcttccagctgtggccaatccttcagtggattcttgtgccccatcaacattctccatcctggcttttgtttgagcacttccttccttcctagcaccaccaggctcttgtattatccctgtccctgccctggaatcgactcctcctccagagagccctggtttctttgttagaggatggtatatagaatccaacatgcagacacttggtggacttattgttactggggttntgttatactagggtttcagtggtcagtgctagtatttatgtatgttaacccacgctgtgctttggattcaggctatttcaaattttagataatatggtacatatattattaataccactagttactacattggtacttttcagcaaaatatatctaagtgggatcaaatgagactgtaaatagctttaccatcagtttcaaggtcagcttatgttgctaaattacttttggcattaagttcagcggaaaaaaaattgggtttgggattttttggtttcaacatttgtgattgagagactatggacctgtaataagtccaagacagctgtgcagtgcatccgg

SEQ ID NO: 150545 - DNA, 343 bp, Homo Sapiens
caatctgatgagaaggtgatgcaattagaaaggagtgtcctttgcctttgagagctgaaaatttgctcatgtgatcccatcacagtccgttataatgcagatgacagtactgtctccctgtctttttcgcaaatgaagttattgacgtcttcacattggaaatcgttccactgcccagcataaatcaacccagcacagtcttctcctggcccatggccatgaccccagttatccggctgtccagctttccaatttttgtagtctggagatgtcccatccagccacttccattccccggccgtaatggccgaattcccgggcatatgtccggtaccgtcgactg

SEQ ID NO: 150546 - DNA, 1005 bp, Homo Sapiens
caaatggggaatgggattgattcttcttttaaagcgccaatcccatggttcagaaagggcctttgttttcttttcaggaaatttttggcaaaaacaatagaaagggccattcccctttgtagtcagggattgcaatgatgaaccaggcaacaataacccttgacaggagttactgaggatataagtgctagacattgtctttgcagagttttatctgcaaagccggcttttgcgtggaattactcttttcttccattgtaatccccgtcttggataaatcgggctctatttagcagacaaagtgaacccactggacggttccaacagtaccatgaatgctaagagctaggagcaacatgttacaaaaacagtggcaccccttaaaaacaagtttccccaagaaaggtgggaggaaaataggggctcaggacagttgcaaatagatgtctatcttccaaataaaatgccaagtcttcttgaggtcacagcatccacaagtttccaactaggctggaaaaacaagttggatcagagagaggttgggggagggcccgtgggtggccctgaagcaggcccctaggacgccgtttccctctctccgcccttccaaaagcccttaagccacagacaagccgtggcccgttccagggggcactcccctttcaggttcccccaaagttttgcaaactttgacgacaaaggcaaagtcagagtcccgtgacaatgtggggaggcatcgccaccagatttttcttttcatggcctggtcagagagagtgctcacccaaccgagaaggccctggcggggtcacactggctaaataaaaagcgccttcttctgcttttttcggagctccaggtgacggctcctccttcactccagggcggagctctgcagaaaaggcggggaggcacggagggaggtgtactggggctgcgggattcgcggctacatggcttctaggctctctcgcgcccctcgtgccgaattcgccacctcaggcc

SEQ ID NO: 150547 - DNA, 385 bp, Homo Sapiens
ttttaccaggaataccacaagtttttatttgtagtcaatcccactactatgaaaagttcagatggaggtgagagttttaaagaaaatttcattaaaattgacaatggaattcacacacagtcaattaacaccacagtttgttttgatttttaaggatgaaatcaagtagtagtttaggaaacatttattcctgtatttccagttcttgctcaagtaagtcagagccctcagattcctgtctgtcataaggacgaatgatgccatcttcatggatcaggcgagggggacggaggctagatacttcctcagttgattctgctgccctctgaatgccttggaaggtactactggccatatctacgattccaccagttggacgggccac

SEQ ID NO: 150548 - DNA, 843 bp, Homo Sapiens
  misc_feature (768)..(802): n is a, c, g, or t
gtatttacaatatacggcatatttggcctttaagaggaaagaaattctaatacatgctacacacatgaatgaactttgaagacattatggtaaatgaaaataagaatgaatccatttagatatctagagtagtcaatgcatagagactgaatgctggttaccagaggctgaggagagaggaggtaatgggtggttattgtttaatgaatacataatttcagtttgggaagatgaagagttctgtagacggatggtggtggtggttgcacaatagtatgaatatacttaatgccacagaattgaacacttaaaactggttaaagtggtgaattttacgatatgcatatttaatcacaataagaaatgcttattaaaagatgtactagttatgaaatagcatacctcatctgtttcaaactgggtgtggctaacaatgaggtagaaaagcagcaagcaggtacagagatttataatggctgctctaggtcctatcgggtaaagggatcagcagatgtgaagtcaagagtctcctgtaagatttgactttcttggaaacatattttaatcctgggcctcctctttccgaatcacctatttcttttagtctttttgcagtgatactgtgtgttgcttctaacagaggttcagtttcacagcctttccctcaagtgtcttatcctaaaagtaaaacctagatgatctaaggtggtggttttccccggccgtaatggccgaattcccgggcatatgtccggtaccgtcgactgnnnnnnnnnnnnnnnnnnnnnnnnnnnnnnnnnnncggccgcttcctcgctcactactcagctgcgctcggtcgtt

SEQ ID NO: 150549 - DNA, 1005 bp, Homo Sapiens
ccccttcgagtaccgccacgggccccccttccttgaggacccaggccggagccccgccctgcgctgtccgccagagtcccattcttcggagtcatcttgctcaccccaggagggggcgctctcgctgtagatcctaatgttgctctccctggaggctgggctgcaggaattctggccccccggctcgcactcccggacccgcaccaacctccagggtcgctctccattcttaaccaggtttgctccctgagcgtacccaggtgctacagcatcagccttcccttgcccgcttcctgcggcgtgaagggatggtccgacctaagcctcctgtcctgggtcagccgatgccactgcatgctttttcctgcgcttgggcttcacggtgccacggatattggctggcttgctgcgctttggagcgtagggttatgtacaccacattgggctgcagagtggacccattgccctgggactctggaggggccagggtaccatccaggggtatctcagggaaggatggctcggcggtgtcgcggctgcgatgtggccccttctcagccgcctgtccatgctggagagaggccctccccacctggctcaccaggaagcccaagtagatggcacacgcagtgcccagcagaaggtttctccgggtccttggacgcgggctgctccagagcttacgcacccgcgggacgcacagggagcagatgaaccagtttatgaagctgccccggcttgtctggacacggtcatttctctgccgcatccacatgttgcaccggagtattaaagtctgcagttggctcctgcctaatgtgatgccatggtttcctgacttcagctgccgcgctccgctctcgggatgtaagtggtctccagtgggcagagcgtggaaggaaagggttgcgtgatagaagactgggaatgtttcatgacactaccaaccttttaaattatcagtctccccacggagatatgcggctcgtttctgggactgaatga

SEQ ID NO: 150550 - DNA, 1784 bp, Homo Sapiens
  misc_feature (1677)..(1711): n is a, c, g, or t
agatttttttaaaaacttaccagaaaccccagcaagccaggttttctgctttgcttaatccccccccaaaaaaagtcaaggcaaagactacaaaaataggcaattattaataactttaaaaaatattttgcttctttgagcaaatttaagttacattcagatgtggtagaagagaaatgatgctcccaggtacttctgctcatcctagggggcagagttgatgtacagctgtcaccatcagtagcgggtttggtattcatgatgccaccggttaaagtcgttgtaaaatagcacaatgcttcctgaagccatgccagaaatgatgcacctctggtcgtaagacagcgccatggcccggattccagcgtcacatcctggataggcaaagagctgcttgaggtccgacacctgccggaccacgaccaattcctctgtctcctcctgtgagcaggtactgcccatctcggctcagctggatggctcttatgttatcatctgtttccatcgtggcctggagttttccattcacactgaatgtacagaagaggccgttttcatagaatatgacacaatgaccctctcttgaagcctgaatgagttttggtttcaggcagttttcaggaccctccaaggtcctcaacaagtctccattcatggaatgtatgagacatggtccttcttgtgaaccactcaacaccaggcctagctccgcacacaccgcagcacatgtgacctcatagtcatggccggtcaaaatggcccgaggagcagcagtctcactgcctgggttatctccaatcccactgcattttccattccaataccacagcaaaagagttgcatcacgtgaccctgagagaatgtagcaatttcccccaatatatgactcagaacgagcaaggcaagtgacgacatcccaatggccaaacaccacttggatcaatcttcctgtgtctgtagaatagactctgaaacttttatcccagaagccacagacgagaatatagcggttgtctgaagtgatgacaaagcactgggaatgcacttgaatactttggtctaaaaggtcagtgatttgcctcctgtgcattcctgtattgctggctatgagaggatcgatgttccactggcagctggtatgtctggtcttgtacaagcaccttgatgagcaggaaggttgtgccatttgttcaccgcaaataacctggttagcaagtgactgtgatcacagcgggagttgccaaaccaggctgggtgttggctgccacgtgagtaacaggggagttggagggaaacttgaggaccatgatgacatcctgctgggcttgtgtctgtgaacatcaatggactcactgtgcatggcagaacctctgggaggatggggctctatgagtagttgagaaggagtctgtccgaaacttcggatttgagcttcaacagcctctctcgacacaggatcagttattgaattcagattgacagctccttcataggtcaagtaatagaacacattgagggctcggacagcttctggtccttgctgtttatagccaaaaatgagatcaatccattggtgaagctggcaggaaacaaattcactctccagggccatctgtttatgtgaaccccggccgtaatggccgaattcccgggcatatgtccggtaccgtcgactgnnnnnnnnnnnnnnnnnnnnnnnnnnnnnnnnnnncgccgcttcctcgctcactcgactcgctgcgctcgtcgttcgcataacgcctagcccctatagtgacttagtt

SEQ ID NO: 150551 - DNA, 885 bp, Homo Sapiens
  misc_feature (299)..(300): n is a, c, g, or t
  misc_feature (376)..(436): n is a, c, g, or t
ttagaaacagtcaatccatactattttaagaaaaaaatggatgatttattatataaaattaagattggcagaatacagaaaattatttcttttacctttacatatttattgttaagtacccagcaaagtgtaacaattagaagaactcattacaaactacccacatgtattcatttggtgaaattattcaagtcacaaatgcttagtaaataaatgtacttcaaaatacgtgaagtgtaaaaacaagtatgaaaacagtgatcttaaaccatgattcctgttcaccaaaactaaccacnnacaagaagcacaagaaaaaggttgtcaggttagacagaaaaaaataaatcaaatgtattgttggttgggattgttnnnnnnnnnnnnnnnnnnnnnnnnnnnnnnnnnnnnnnnnnnnnnnnnnnnnnnnnnnnnntgagtaattaggattcaaaaagaataagggtattacaatactatatctgttttcctactaatagcaagaaatgaggatttagatgccaattatgtcctgtagacccaggtgctctcaaagtatttgcactggtcttctaggtatggacatataaatgaactttactgttactcaaaggtgagaaaacttacccattataaaggaaaggaaaacaattatacctgatagagcaaaaagatcacacattaaaatgatcaaattcatctctagcataagactagaataatctgcttccaaagaattcctttgtactttagtagatgagggcaagctttcaccgtaatgaaaaggcaaatgggaggtctctgataagttggaatcatcatagcaaaaaaagagcccggccgtaatggccgaattcccgggcatatgtccggtaccgtcgactg

SEQ ID NO: 150552 - DNA, 982 bp, Homo Sapiens
  misc_feature (234)..(276): n is a, c, g, or t
  misc_feature (466)..(466): n is a, c, g, or t
  misc_feature (697)..(758): n is a, c, g, or t
  misc_feature (862)..(896): n is a, c, g, or t
  misc_feature (900)..(931): n is a, c, g, or t
ctcagtacttctttgtcctctgtatatgtactcccgatctttaagaggcatctcagggtaatcagtacactcatcaggctctgcctagatgttcatgatgcttacactaaggaagttgttttattaagagtaatataggtatttatacccagttatggagtgaattttagtattgtagttgcctttatgttggggatagaacaagggccagatagaacatatggaaaagagtannnnnnnnnnnnnnnnnnnnnnnnnnnnnnnnnnnnnnnnnnntaagtgaccctagtgaattggccaggtgacaatactggtaagggagtcaaaggacactctgagttagtgccctcgtgacacacagcgtacagtgatcatgaaaaagagtgggctcaatagttttccatgaaatttgctcaagattcgatgcagttgccatgagagtacagcttttgaggtatggtcaacnctatggtacgttagtaaatgataaggggaggaagaaatggaaacctaaacatctactgcaatgaaaaccaacagcaatgacagtatggagtaattcagccttcgttgaaaacatgtcatcaaacacactctggtttccctgaatctgttgcctccaggtgttaacacagaattaagcatccacaattgctgaaagtcacctggggcatggtgggttttgatcttcttcccnnnnnnnnnnnnnnnnnnnnnnnnnnnnnnnnnnnnnnnnnnnnnnnnnnnnnnnnnnnnnntttgccccgttgccccttctgttatcaattttgtccacgtcaagagccaagcccccggccgtaatggccgaattcccgggcatatgtccggtaccgtcgactgnnnnnnnnnnnnnnnnnnnnnnnnnnnnnnnnnnncggnnnnnnnnnnnnnnnnnnnnnnnnnnnnnnnntcgattcgataacagagcgagctagcgcccatatgagtgagtcgtattcta

SEQ ID NO: 150553 - DNA, 1059 bp, Homo Sapiens
  misc_feature (941)..(975): n is a, c, g, or t
  misc_feature (979)..(1017): n is a, c, g, or t
cagctttaatttttggcttgcatttttctgcatagatatcaatgacaaatggacatgcctctgtcaactccagagctttattgtagcccatagagtgtagagttacccaaaggtcacaaggatctccttctcgatcattagcttccattagattcaaatccataaatccttgtcttgttagttcattcctctttgtatcaaaattctctctgcagacagcccaagcatcttcatcacatttctcaccacttgttctcaattcaaaaaaattatattcttcaaggctaagaagaccatttccatctaaatcaattacttcaaatatatctgataaagtagacttaaattcctttgtaaggaataattcccctgtttcatctctatatacaagttgggcttcatctgttactggttttatttttttcctcagcttacagccagttgtggaaggaattaaccagtaaattccaggtcctagttcaccagtccatccaaacacttctctatctcgtagttcggtaaaacacacaagctgtagatttgcttgactctcatttgtccttgagaatatacaaggcagtatcaacggataaccaaggggatggttttccttcaacttgactcaggtttaatggcttaattgttagataaaccatggacctctgagctatttgcatcctgtactgatgactaatgatttcaccatcttcttctaagaagaagcaaccttttgattgcatgtgttgccagtcctttattaaatttggctccgttaactttgagtttcggttaccattagcccccatggtaactatgaaggaaacagatgttttgaacttcctggttgctgacagtaaagaactcctggtgtcacctttatttaagaatgccccggccgtaatggccgaattcccgggcatatgtccggtaccgtcgactgnnnnnnnnnnnnnnnnnnnnnnnnnnnnnnnnnnncggnnnnnnnnnnnnnnnnnnnnnnnnnnnnnnnnnnnnnnnacaaaagacgagctagcgccctatagtgagtctatacatcta

SEQ ID NO: 150554 - DNA, 1231 bp, Homo Sapiens
  misc_feature (769)..(789): n is a, c, g, or t
  misc_feature (984)..(992): n is a, c, g, or t
  misc_feature (1072)..(1114): n is a, c, g, or t
  misc_feature (1176)..(1188): n is a, c, g, or t
tcctcgcccccccgcccgctcggtccttaggtctaagtacgagcctgggtggctttttcggcacgagggctgggaggcgaagacttggcgggcactgttgcccggcgacgctccggcgctgggtccccgaggcccggcccctccccgggaggaggtgggcttcgagtcacgtgacccgtgccctacgggagggggtgcggtcggggacccggcaggaggcggccgagaagagaggaccgtgggggcgttcgcgtggctcccagcccgggaccccacccccgctggacagtgggggaaactgaggcctgagcgggcccacacaggaccatgaaggtgcttctcctcacagggctgggggccctgttcttcgcctattattgggatgacaacttcgacccaggcgggctggactacctcgtgctgaaccacatcggcggcgccccggccggcacgcgagcccgcagcccccaggcaactcgctggctcatgcaggtaaactttgtgagctacgtgcaactgacgtcgcgggcgctgcccagcctgacggacagcaagggctccctggtggtggtgtcctcgctgctcggccgcgtgcccacgtcgttctccactccctactcggcggccaagtttgcgctggacggcttcttcggctccctgcggcgggagctggacgtgcaggacgtgaacgtggccatcaccatgtgcgtcctgggcctccgagatcgcgcctccgccgccgaggcagtcaggtgaggcccggacaagnnnnnnnnnnnnnnnnnnnnnccatggcccagccccagccgcagtccccaccgtgccctcctgtccccaggggagtcacgagggtcaaggcgggccccgggggcccaaggcacccctggccgtgatccgcgggcggcgcccacgcgtgccggccggcgccttctacccgtggccctctctccccgctgtgccttgctcccggagcttgtctatcgnnnnnnnnnggacctcggttttatccgccacggacccccaccgttcttcggccgctgcgccccttgtaacttcatcgcgcccgtcacannnnnnnnnnnnnnnnnnnnnnnnnnnnnnnnnnnnnnnnnnngttcccccggcgtcctacaaacatttacctctccccaccctttacccccgcgccgctttaannnnnnnnnnnnntaagttctatattcgagcgccaccatccttccctttttccata

SEQ ID NO: 150555 - DNA, 1121 bp, Homo Sapiens
  misc_feature (69)..(79): n is a, c, g, or t
  misc_feature (323)..(323): n is a, c, g, or t
  misc_feature (394)..(403): n is a, c, g, or t
gacctcctggcgcgctgccccgcgcccccccattgtctgatcgaaagcggcaactgttattttttctannnnnnnnnnntttttttggtgggggacaaagtttttccgccgcaaaaatttattgtggcggagcaaacgcaggcccgcggccgccgaacgggggcggggggagcaaacccaggagcccccgtttacgctgtagggccatctccccccgggggggcgggtgcgcccaaaaactttcgcaagccagggggagaacacgggggttttatttgcccccattggggccccaggttttttatcccagtggaaggacagantgtgtgtttggggaagaggcccagtgtctaaaagaaaaaggcccggagaagggggggaaaattccaatccnnnnnnnnnnaattgtggctcgcagggattttagggggtttccagtgggggggaaatggcccctggttttcttttaaattttaaacctcctggaggtttcccagggattttccatttcccctttaataaacatcttctaacccggggtcaatgtttcaattttaggtgcaaagttcaaaaatgaagaatgaaaatgaagccagacaaatacattaggagcgaaggctgatcgttaagatctgtagtctttccgaactgtgtgggccatccagttcactttagtagtccagctttccctgagcgcctcatcaaatttttgcttaaactgtttgagtgcttcttcttcactcttccctaatgcaagagagtccttaagatactgtatatctttgactgatgtgagttcaggaagccctgcagtcaacatcagcgcaaagagagtgatgaagagattcccatgccgtcgtaaaatcagatatgcatcctcacaacactggcggaaccggccaaacttttctgtatttcctgtttttccttgttgaatgacatggatgaaatcataggtaagaataaaaggcactcgctccctgtttaatgccaaacttagatttgaaatttccaagaatatgtccaaagtcaatgtggaagagctggccagtttttttgaccatgatgttgcccggccgtaatggccgaattcccgggcatatgtccggtaccgtcgactg

SEQ ID NO: 150556 - DNA, 1201 bp, Homo Sapiens
  misc_feature (1087)..(1121): n is a, c, g, or t
tcgtagtagaatctagaacctggcttttacgcgcgctgtggatggacgctgtccagggagagacttcttgtcagagaggatggcttgaatacgatccgattgaaggactaaatctggaacccgtccaaaagggtctcggtgctgtggtgtggcccacagaatgagttgataagggcgcacgcctaacaacttggccaaaggtgatggcacgctccaggttcgccctgtgagtcttggatgaaagggaccacccggtcctttcaagaggtcttgtgtgttaccttctaaaagagtagtgatgttaagtgtcagaacgcgttgacccagtgactgttgtggaacgtaagatgccttggttcatgggaaccctttgtggattgcagggattaatagggtccaggatggcaccactggaataacatcctgtgaactttcaggcagggatgtcgggctggggccgtggaagcttcctgggtcatatgtaaaaccccttcgtaattggaagtttaatccaaatgctatccctgtgcaatgccgaattaaaagcaccattggtcaaccacagcgcatgccatgacgatacgtctcccatcgttgtgtgagggaacggagaacgcacagcgttctctcctgggtcttccgcaggagagctcgctggccttgcaatcatgccatgtcttagtagtctccacgtcttacctaccagggaagacacacttctcgcaggggtcccattcttaagcttcgtctgtacccggatcggtgcacatatcaaatggcagtttctccgttactgttagcacaccagatggtcacaaacgcgaccggagctatttgattatatggcaaagctgagaatatcttcgcctccaacctatcatactttcttaacgcgggccttagcactcatctacgtaaactcgtttctgactggctcctcgggcagacccaagtcgtgacattgaccctgggtgaatgtttgtttcccggtcggactccttcggagctgctcggtcggtcgcgcttgcgcagagcccccggccgtaatggccgaattcccgggcatatgtccggtaccgtcgactgnnnnnnnnnnnnnnnnnnnnnnnnnnnnnnnnnnncggccgcttcctcgctcactactcgctgcgctcgtcgttcggctatagacgacctagcgccctatagtgagtcgatcagt

SEQ ID NO: 150557 - DNA, 722 bp, Homo Sapiens
  misc_feature (649)..(679): n is a, c, g, or t
ctctcagaactatttgaaccacttattaatctccagtctgtttccatcaatcttttatgatgtgttacaaggagtttctcaaatttaaacttcattacatcattttatagttataaaccctgaccactataattcttggtcctaactaggctatgaaaagaggaatgtattcattaggctagtacagtatgggaagcctgtagtttaaccaaggttaaaacaaataagatgccaaagttcacaattttaaataaactcaagaacctgaaaaagataatttaaaaacaacatagtgcatttctatagtttgtcattatttcatctcttatggaaatatgcagcaatgatggtctttttctatatctagaaaaaatacataagtgatttttaacagtaagaagttatttgtgtttggatttccttcgccacagcttccttaactagctcctgggtagaattcattaatttttattaacagggaaaacatttgttcccgtgacaatatttgcattgcctgaatgattttcgcctctgccaacaaggtgtactatcggctcatacatcacccgattacttggagagcagaaagaccccccggccgtaatggccgaattcccgggcatatgtccggtaccgtcgactgataacnnnnnnnnnnnnnnnnnnnnnnnnnnnnnnncgccgcttcctcgctcactgaactcgctgcgctcgtcgttcgg

SEQ ID NO: 150558 - DNA, 1054 bp, Homo Sapiens
gggaaccatcctttatacaatagctttaaaataataattaaaaaaacatgattacaggaatcttcctacataatttagacaatgtagtgcgacagtgtgctcctttataacttcagtggttcaatccccatatgatgagactgataatcgcaactccaatgacaaggataagaatgatgatgcacagggtttttctggattttgcgctgataatctgctgcccttgacagctgctgatttgcttgccttgaacgtgcaccctctgcatttttccacattggcttctatgctatctattacatctccttgttcatgaatcatcattcccaaatctttaaatatttcattaatatccataatatcagcttcaagttgcctgatagaagattctctctcatgaataagacggaggtcatcctctgtaatttcttcatcctgcacctgcacttgaggttgagtttggctttcccaggatacaagattcctttcttttgagctgtcctcaggaaaactgccagacactctggaactggctcttactcgagcaacaaactctttctctcgctcagcagcctgcctctggaccttctggaagtttgtcagtgatgttgtgaactctgccactaagcgatccttctgtattttcctttgacgctgttcactgggggtggtgggcagagatccaaactctttaatgtacttatctgtttctttggcaagctggttagtatactgctgcttctgttgcaactgttgcctcaattcaggtgaatcttgaggtgttccaagttgattcagagttctttgtatttccacagaacactgtgtgatcttctggatgttagaagagatcctctgggccaactgggcggggtcaccaccaactcctggagtgtaagacatggttgatgttcttattcgctaatttcatcagatgctgtgcagttttctaagcagtcacctggacctccacggctccctcctacacctccgaccgccgtcacccacctaccccggagccctcagctgcaattctcagctgatgggcggtccc

SEQ ID NO: 150559 - DNA, 762 bp, Homo Sapiens
cccttgggggaaatttatcctttcccggttgctggaatgaggatttggaaaaagcataacccttctgtcccacggttcagtaaaggagggctccgtgtcgggacagtagtaaagtgggcccagtctcaaagcggtcttgcatgctcttatctctacacgcccatcttctcttgttttgacttttctataaggagtttcttgctcattgtcacacatctattaaatcgttccttgtatttctctagcatcttttgctgttcatcaatctgccgtctcaaatcacagttggctcttaataaatcatctattcttccctccctcttatctaggtcagaattcttactgttctctagtgcagatattttttctattgtgaggttggactgggtctgtctgtgctggatggagatctgtttttgggagctgcaggaatgctctgtgttgccagatcccgtagatgagggactgttttgctgagctgaaacaaaagtgaagcagaggccagctctcctttacgccagctgctctgtgtcaagccgaggttttgctagcatcactgacgtgaggattggcagagcagactgctcctctgttgcctcctttgcagcactgccatctaaaccatagaggggctgttctactcgtcgcttggctagtttcatatggttcagcttttcttttccgatttcgctggtcattctgctttttctcgggagtctctacttctttatcactcaaggatccgacgctgcacaagctccc

SEQ ID NO: 150560 - DNA, 844 bp, Homo Sapiens
  misc_feature (47)..(50): n is a, c, g, or t
  misc_feature (52)..(52): n is a, c, g, or t
  misc_feature (54)..(55): n is a, c, g, or t
  misc_feature (61)..(61): n is a, c, g, or t
  misc_feature (63)..(64): n is a, c, g, or t
  misc_feature (67)..(68): n is a, c, g, or t
  misc_feature (72)..(75): n is a, c, g, or t
  misc_feature (77)..(79): n is a, c, g, or t
  misc_feature (120)..(401): n is a, c, g, or t
  misc_feature (405)..(633): n is a, c, g, or t
aaacttttttctggaggggcccggaagggcgggcccgaccaaggggnnnntntnnggggtntnnttnntttnnnntnnntggtagggaggaacaggggttttaattattatctcaaatcnnnnnnnnnnnnnnnnnnnnnnnnnnnnnnnnnnnnnnnnnnnnnnnnnnnnnnnnnnnnnnnnnnnnnnnnnnnnnnnnnnnnnnnnnnnnnnnnnnnnnnnnnnnnnnnnnnnnnnnnnnnnnnnnnnnnnnnnnnnnnnnnnnnnnnnnnnnnnnnnnnnnnnnnnnnnnnnnnnnnnnnnnnnnnnnnnnnnnnnnnnnnnnnnnnnnnnnnnnnnnnnnnnnnnnnnnnnnnnnnnnnnnnnnnnnnnnnnnnnnnnnnnnnnnnnnnnnnnnnnnngggnnnnnnnnnnnnnnnnnnnnnnnnnnnnnnnnnnnnnnnnnnnnnnnnnnnnnnnnnnnnnnnnnnnnnnnnnnnnnnnnnnnnnnnnnnnnnnnnnnnnnnnnnnnnnnnnnnnnnnnnnnnnnnnnnnnnnnnnnnnnnnnnnnnnnnnnnnnnnnnnnnnnnnnnnnnnnnnnnnnnnnnnnnnnnnnnnnnnnnnnnnnnnnnnnnnnnnnnnnnnnnnnnnnnnacactctgtcatttccctgtttctttcttctcacttcctcctttccccttctgaccatcttttcagccgtgaacataccacaccagcaagaacaataagagccaagggtcatttcatgttttcacacatgtcaaagtcttgaagcttcggtcattagtccccggccgtaatggccgaattcccgggcatatgtccggtaccgtcgactgag

SEQ ID NO: 150561 - DNA, 1112 bp, Homo Sapiens
tccagggggttggcctttttcttagggtgctctggcctttctcctgctggggttcctcttctaccggggttggttttttcttttgcacgttgctttcaatactttgatgccctcatcaccgctggctggttctttgtgggtgggtgtgctttgccctgatgtttgcgtgagcctctcaactgctgagagctcctcttttacttctttcctgagacgtgtcttggggcatctctttgtgctcgtggcagtgtctgttagttctggtgggggagatttgcagggaatttttgtgtttttgtcaatagtcattgactcttccagtgtgacctgggtgctgagaagagctctttgaagtcaaccaggtcttctagagcacgggccttttccttacgagttctcagctgcctcctgctaccagttacacttgctgctgggtccaggatctgctttggagactccttaaacgctttgatgctcttactatctcctgttggctctgtgtgtgtttgcgtagtctcccctgatgtccgtgtgagcttgctgactgctaggggctcttctttcatgtccactttcaccaggggtatcttgagcctttgcttggagcttcttgaggttttgaatgactctggctgtggagatttacaggatacttctgtgattttgtcatcagtcattgattcctcagtgtgacctggtgtctggaagagttctttgaagccaaccaggtcctctagagcctcagccttttccttaggagtctgtggctgtctcttgctgccaggtaaatttcctagcaggtccagtttctgcactggagtttccacaaatgtgttgatatttttctcatcacttactgctggttttggtgtgtccatggctttgcctgctgatggtgttcgtttcctgagtgctaaaaattcttcctctacgtctgctttcctgaggcttctcttgggccgttgctttgtgcttgctggggtgtccactgggtctggttgtggagatttgcaggctattttggtagttttctcatcagtcgtgggcttgtcagtgcctggtgccggccgtaatggccgaattcccgggcatatgtccggtaccgtcgactg

SEQ ID NO: 150562 - DNA, 1574 bp, Homo Sapiens
  misc_feature (46)..(46): n is a, c, g, or t
  misc_feature (437)..(437): n is a, c, g, or t
  misc_feature (621)..(621): n is a, c, g, or t
  misc_feature (1225)..(1390): n is a, c, g, or t
  misc_feature (1429)..(1463): n is a, c, g, or t
  misc_feature (1467)..(1518): n is a, c, g, or t
cgagaaatgggtgtgaaaggggcgggggggaaatagcacgtaagtnttacacgaaataggcggccgggtgcgtgccccaccttttgtgggggaaagaaaaataagagtgtggcgttgtggccgggggtttgtaataaagatagagcgcaatttgtgtttggtagaaatgaatccccccggagcggcggctttcccgaggtttttttgttgcttcaaaacgaggtgtatgaattgggttcagatgagaaaggggaatgctctgtgtaattcgggggggtatttttgcggcgggggtgtacaaaataaagggaaaggaaaatgcggcgaaggtggttgaattagagaggggtcttcacttgttgggcccacaagaattctaaaataatatggtgggggaacaaataatgtggcgtggtgttttatatagacccccctgntgtgtaatctgtttggaaggatgtactcctcttactgtttgtacggaagaggcgtaatgggatttttcgtgtgggaaaaggagggggattttgtgtgaaaaccccattctctgtgtggggaagtgtgaggggggggagtggaatgccaagtgttgaagccatacaaagagggtataggtggtcnggtgtaaagaagagcaacctgttttcccaatatagaccagaagagggtttaaacggccatttgtccgagccgaccgaaaattgggagggggcgcgggggctttcctaaaggcggcacaatttaccacgtttgcagggggcggaaacaagcccttggggggaaggttgcctattagttcgtaggttgaagccgttgagatgagtgtgtttcaaggaagaatagcgtttgtttgggtgtggcgggtgtaataggtgtgcagtttcggaggatgagaaaggtttacgggagttggaagctttaaagtgcggtaattcatatagggggtggggaatgtggtcatggaaaacaaagagggctattgttgcgattttagaagtgttaaatgtgaatgaatttctagggatgtaccacagtatctgttttttacaatggtaatctttgtcaaatgggatttgccagtggttgattaactcaagtgattaaaatgcaaaagacataagatcgattccagtaatgcatcaatgatacagcctaattaaaatcagcccaattgaaatatttcgtggaatatatctatagggaatttttagtgtttccctttggnnnnnnnnnnnnnnnnnnnnnnnnnnnnnnnnnnnnnnnnnnnnnnnnnnnnnnnnnnnnnnnnnnnnnnnnnnnnnnnnnnnnnnnnnnnnnnnnnnnnnnnnnnnnnnnnnnnnnnnnnnnnnnnnnnnnnnnnnnnnnnnnnnnnnnnnnnnnnnnnnnnnnnggccgaattcccgggcatatgtccggtaccgtcgactgnnnnnnnnnnnnnnnnnnnnnnnnnnnnnnnnnnncggnnnnnnnnnnnnnnnnnnnnnnnnnnnnnnnnnnnnnnnnnnnnnnnnnnnntagcgccctaagtgattggtgtgtgtgggcgggtggtgggaagcggggaggagggg

SEQ ID NO: 150563 - DNA, 856 bp, Homo Sapiens
ctctctctcttgttctattcttatgtctaggaccttagggtttgttccttctcatcctcttcagttaggtgtgttcactcatgtcaattactctgtttgttccttttcatttatttccttgaggattccttacgttgtctcgttttccctttatgctctgaggctgaccagtgttatgtacgtgctacatggcatctttgtctctgtaggaagtagatttcctgccatgaagtgttgtcctgtttacaagtgctgtgagtaaatttattactcctgctgatactgtgtgatatccattatagaagagttggcaatatttgtttgcttacttccctttttgcataatgctacataaccttttctagtttgttagctgaatgaaaggatacatcagcatttcgtctcatttagcaattacaacgttccaaatcatcaagtaagtgtctacaagattatacgaataaagagaaagtagtatctagtccttatctttggtgttctaaatcagaggattcactacagggatgtggcttgggctggtatttgaggtgtacacagtgttacacaccgcgttcttcctatatgaatgcccgacgtcacaagtgtgacacgtttccttgtttgcatgcagtgcagtgattgactaaacccaattcggtttttctcacccgcccactcttgcttatcagatcaacaaactattagtaggttaagaacaaagaaaacagtaattaaaagttgcattgttaagctgtgtcccctgtgtttacagcagtttttcactaaacctgggactgtgaagggattactaagaaggtgattaatatagtcctttgtaaggttatgtgatttctcc

SEQ ID NO: 150564 - DNA, 947 bp, Homo Sapiens
tggtttttattccaaaaagcttccccattggcaaactttgaaaacccaggtccggtcaacccaattaaaaccatttttctttagggcacttttcacatccttggaggacaaattcctctagtatctgaacatcgctgccccatgtttaatccttttctcccaatctgaaattcctggggtatctgctttccacaatgaatccagtaaaggctttattagcaggagctttaggatctggatcagaacgtgccaataaaaaataccaattagcttttcctccgttggttatccacatcttctgaccattaataatatactcatctcctttcttttctgctttggtctttataccagctacatcagagcctgctccaggttctgttacacaataagcacacatcaatggctcctcagtcattctccccaaatacttcttcttttgttgatcatttccagcaataataataggcatttgccccaaagaatttccttcaatagcagtctgaacccctgtacatccataagccaattcttcactaattaaacaagcatcaaaagttccaagtccaagacctccacagttctctggaatgtgtgtgttcattaaaccaagttcccaggctcttctaattagggggactggatattcaccagttttatcatattctgcagccactgggatgatttcctctctggcaaatttacgagcagtagcttgaaattctttctgctgttcggtgaactcaaaactaaatcctaatcctggttcacgttgtcgattggcttttgtatgctgtgatctccaatgaaaacgagaaatacttctcaggaccctgcagcatcgcccgaaccccgctgccatgttggctcccgttccggccactcggacaataatacacgggtcacggccttgacatactccccgaacgcgggactcctctggtccc

SEQ ID NO: 150565 - DNA, 792 bp, Homo Sapiens
tagggaagatgaaaaagaaaactaaaaagaatctgagaaacaaatgcagttcacctaggagatactgcgacgttagcgtaacggtgggagcgtgccggatctccttcctgcctttcatgtggttctgtcagcaaaggctgccatcttcaagagatacattcttgttcgtggcagtttccattcagaactgggggtggggaaggatcctcatgaaccatatactaatttaagttctggggccatccaagtaaacatttttacggagttcacagtttccagaaaaatcacttacaccctgcctatcccacccagcattgcagaggctactagctccagtgagattgcgctcatgctttcgttggtaatacgagtcttttctgggcatgtagctgctcagctaggagctatgtgtctcagcttcccttatagcgggtgtggcccatgaccaggctctgggctgtgcaaagtttccaggtttttcctttccaccattgtttttacgctggctaaattgggaagaccctagagagagacctgtcttagtgcctggaacatctaagtgactctgaaacaatgggaactccctatttgaagaaatgaccttgttagaaaggggaagcctccggagctcactggcaggcgtcagccttttctttcactgagctaactcagaggtgctgagccagcgttttgctgatctgctgaaaaagatcctctcttcaagatgagcttccaggggcattcctttctagattccttcattctagcacagccatatctatttcagaatcc

SEQ ID NO: 150566 - DNA, 992 bp, Homo Sapiens
tggttttgttgcttcccgagcatattttccatgcggggggagccggaaagaggagttctgccctttctaaagggctggtttcataaagggttgagaaattcttgggcgggattttcttaaggaaggttcatgagcatcggggtggttctggttgtggccggccatcgaagagacaggtggcgcgttgtgatgaggaggggttggactcgagccaatggtagaccccccgttccctgtgatttgcaacaaactggtaagaattgggttctgagacaccttgctgaagtcctccccatggcccaccgactcatgccgatctttgatgctcatgctcatattaaacaaggtggtaatgggaccccccggaaaggtgttggttggtgtagtggtaccactcattgggttgttgcctgtggtcatgccataccctgggctgctagccgggggcaggttctttttcaccatgtcttcaactgtctctgcaatgagggacagtgctggggtgtcggcttgaatggtttcagctttcctccgaatagccctcatcgtcacagggatggacatacatctttgaacaactttggcaatgaagtcatctgtgcagatcagtgcatccgacagccctttgtagagtttacagctcacatgtgttgagtcctgcacatccattaccacacacaccagggagtcattcacggggtgctgaaaagatacgctgaaacgagactctgagagaggacacacttcaaattggagaagcccaggagaatcttctttcagaatagttcttttgacacagcttccaatgagggtgttataggccacttggtgtctgatcagatttaggataagaggaactcggccagggtgctgaaaggtgattttgctaacaagggttccctgtagacttcggccatctggaagaggagcatccttgttgaggaaatagcagtgctgctgaccaggaagagcagcataaaatctcatgttcc

SEQ ID NO: 150567 - DNA, 538 bp, Homo Sapiens
  misc_feature (35)..(35): n is a, c, g, or t
gacaaggttatttgtttttgtgtttgtttttgtgnggtttccttcaagaaaatatttattgcatattattagtgattatgttttacagcaaatttaaatacatacacttttcacaaacccaaaatgggaatcagggcaactatcaaatttaaatgttgaaccaagtcctggttttcagaattcagcagccagtcatggttctgtaccagggccaccagtccatgatttccaatagttgaggatcttttctgtatttggaacaaaatcttctttatatgtgacaactgtttccacataaaatccttttgggcgttcagagagttcactgggtacttcacttgctgagccatccttttggtctgacgacttcgccattgtccggctatagtaaagcagtgagcccaacacagaccaggtgccgatcccgtagaccaccgacatccgccggtaccaggccgtgaactcatttcgatacatgggtacgccagcgagtgcctcgattctcgcaggcccacggcagaggcgggacttccggtcc

SEQ ID NO: 150568 - DNA, 756 bp, Homo Sapiens
cgatatttccttatgtaattgacattattttattttgtgtaacagtcatattaacatttatttgtcaatgacaagaattaggactgatgtttatgtatcatcatcaatgaagtcagatgtttacccattccatgtgagtactaaaacgtaaacagattttttacataaaggtgaagaaaaataacttttaacccccacaaaatttattctctggaaaattaaactgccattaaaatctcatcggaataataattttaactttttttacactgttttcacagaggtcagcaatttctgtatgtaatacaattatacaaaaggaaaaaggcaccgagacaatcggtgtatacatagtagaaaagtcgacatgagaataaaatgcaacacacagcacattttcaattatatgaaaacgattacatatatgctcactctataaaacagactgcttcacacacgcatgtttatatttttgaccaaaaatgtaaataaatgtgacaataatacaacactgttgataaccacacagacatgtgtttatactaataagatccattaatggtttagtcactagcaaatatgctggagacaattcaagaccaaggaaaaggttaatcagcagtgtatttcttcagttgtttgataagagttttgctcacggagcatttaaactttatcacactgttatatccattattagaaaaataagtaagaaagctctgtagaaactatattattaaggaagcttcttgcctg

SEQ ID NO: 150569 - DNA, 836 bp, Homo Sapiens
  misc_feature (482)..(511): n is a, c, g, or t
ttttaatacagatgtctattttattaaaaaagttacaaacaggtggactgcagggtcgtcttacaaaatgacaagaatgaaatctattggaaaaattttacttttacaaatctttataggtaattgttcaatgtttgtacttgttatttgagattttacctttcactgataaagttacagtacattagatccatgataataggttacattattttatttgcagagccctactgcagtgatttgaacaactcctaaatagatgccataataaagacaagacatatattgcatttaatattaatttattatcctaataagcaacatgcaatctattgaggaagctaaaataacttttggtcccttttcttaaaatgtgctggagaaaccacctttaaaatcactttcccctgattcctgcgatcctaagtgaattcaagtcaaatttgctgctgaggtcaatgacaatgaacactgtaattttnnnnnnnnnnnnnnnnnnnnnnnnnnnnnnaacaagaacacaatctacaggaaagaaacattataaaaaaatcaaaatctctagaaaatttaaatcatgatgaattatttgattcctttagaatttcacaaagccacaaagctaataacaatgatccatgatcacttaacctacttttaaatgagtgtttggttttaagtttggtattaaagtgcaaacttaaattaagtattcacttcaagcagttcataaataaggaacaatgtttcaattgcctctatctttacaatctcaccataaaattcaaaatttaagaacaagagttcactttgagggaatttgctcaggaatcacc

SEQ ID NO: 150570 - DNA, 1097 bp, Homo Sapiens
  misc_feature (292)..(292): n is a, c, g, or t
tttcccagttggaccattcccctgggtcccccttcttacccgggacctttcttagagggattctttcggaaggattggaggagttaccaagggtaaaaaattgaaggtttctcccaggcttccttatagtccccaaaattaaaagtgttgacagattcaatatatttccagttcttttgtcccaaggattggtgaaactaaaccctttgcttttttaaagttacaaaagagccatcttttgctttgaatttgtagggaatctgtaagttattttctccttactctgtagaanctgctttgtgcttgtcagtcaaattattgtggtcatcttgatgaaaatattcataacaggaagttccccaaaagttcctgaggcagatatcctaaaatcgctgttgccctttgatctacatagacaaattttccattcactgcaatccggggttataaattcagttggtttcacattaatctctccactgttctgtggaacaatatatggctgtaatcttccaatggccacaaggcaggtaaaattactgttgtctttcttactgttcctttcttcttccattccaacaatatttggaggccagcttctcaagtaaccagtgcaatggatagtatagaattttctgtgctctttcttctttgagttgggtaagcatccatgctcttctttgacagagattttacaactctttatccgacagaaaaaagatcgtcttgagccagaatacacacgtgtccttccagcgtggagattactgtgaacttgcaaaccagttttggcatctattagcttttctcttggtgaaatatcaaaagaagaaagttgttcctttactttggcaacatcttttggatgtaagaagtcaaataagctttgtccagtcaaactagcctgatcataattaagtattttggagactgacttagaaacgaagagaatttttcctctttcacatccaaccacaaataagaagccttctgcagtcttaaggattaaatgtctgagctcattatcctgaagaaatgatggtctataattacttcccaccataagaatttgtcaagccttttaaagatctcaagtg

SEQ ID NO: 150571 - DNA, 879 bp, Homo Sapiens
  misc_feature (251)..(251): n is a, c, g, or t
  misc_feature (254)..(254): n is a, c, g, or t
  misc_feature (436)..(436): n is a, c, g, or t
ggggcgggaggggtttctcacattaatttcgggggtcccctctctgggaccctttccaagccccagggaacctggaggtccaattttttatcccataaggtggaaggaaggcctcctttccatttttcttgcaccttgggtttcctgcccgggtttttaatcaaacttgtggcccatgttcggaggccacctctagggtgtttcttttccttggtaatatagattccacaagtttcttgcagacatcacanccnctctgcttgtcaacactctcataaagatccaggagcttttggtaaacaccaggcaagtcatccttagcatttatgtgattatatttctcatacaagtttgctaccccctgccaagctagtaattggtctggctctaattcagcagcttttttataggcactctgggcctgatcaggttgttntagttcagctgcagcaacgccaataaaaacccaggcattatagttatttttctcttgctttaacactgtcttacagtgtttcaaagcttctttgtattctttgtttctgattgcatctctagcactttttagagcagtcttcacttccttgctggacattcttatctgaaattatcttggtatatatttataggtgaaagcttcagaatgatttttttgtagtttgcaaatcttgattggagtaggtaacaaatttcaatgctgatttcacaattttctcaaaccagtttcctttggttaaaaaaaaccctgcagacttttaccaattattaccacctctatattcttcccgaattgaatttgattgttccttacccattttccatctggagcagatgctcctcttctacaaacgccgaggctgcaatgagagcgcatgcccc

SEQ ID NO: 150572 - DNA, 967 bp, Homo Sapiens
taaaattcactttaatcttatatttgtaatttactttttttctgaacagttaaaaaaaacccaaaacacactccattatcatgatcctaggttgtgaacatattggtacactgactacacatcaccataacataatcacaaaagtcaaagcagtcagtacttaagagtctagagaacaaagaggtgaaccagctgaaagctctcggggaagcttacatgtgttgttaggcctgtcccatcattggagtgcactggccatccctcagatttgtctgggctggcctgagtggtcaccgctttgagaaagctgttagtttccttggtgcccagagggctaacaccctagttggccttttccttcagtgtccaagaaggggaagggttaggaggggaggtaacactttaaaatacgacttaactgcactgatccttaataaaacacacaaccaatcaggagctaagagcgccagctgtgctggttggaaagcacatattttagatgtcatctgcctccaggacattttagatcacaggtactcaacttccaacagaaggagcttctaaagatcaatgcattaagttccacctgaaaccaggcagccatcatcatgctcttttgatttctctcttcagctcccaggattctgacaccacagatgagctaaagaagcgaaactgttttattcccctaagaaatggctctctttccgatactatgttgacactgtggttagaggaggtctggtctgttggtgaacaactgtgtggaggaagaccagggaggctgcaccctaagcctccgggctgcactaatctgggttggactgctctgctacagactggagggtgttgccatctaaggcaaaagggagatgctgagaaggtcaacagtaccaaggtatctagtccaattatgggaaagaaaaaaattgccctgattatttccagtattccccacccctccccc

SEQ ID NO: 150573 - DNA, 769 bp, Homo Sapiens
ggcaagcctcgagccagcatggatactgtccatcacatgttactttttggatgcaatatgccttcatccactggaagttactggttttgtgatgaaggaacctgtacagataaagccaatattctgtatgcctgggcgagaaatgctccccctacccggctccccaaaggtgttggattcagagttggaggagagactggaagtaaatactttgtactacaggtacactatggggatattagtgcttttagagataataacaaggactgttctggtgtgtccttacacctcacacgtctgccacagcctttaattgctggcatgtaccttatgatgtctgttgacactgttatcccagcaggagaaaaagtggtgaattctgacatttcatgccattataaaaattatccaatgcatgtctttgcctatagagttcacactcaccatttaggtaaggtagtaagtggatacagagtaagaaatggacagtggacactgattggacggcagagccctcagctgccacaggctttctaccctgtggggcatccagttgatgtaagttttggtgacctactggctgcaagatgtgtattcactggtgaaggaatgacagaagccacacacattggtggcacgtctagtgatgaaatgtgcaacttatacattatgtattacatggaagccaagcatgcatgtttctttcatgacctgttccccatatgttaaccctcgtacgcggttcttagcctctatggccaatgtacct

SEQ ID NO: 150574 - DNA, 821 bp, Homo Sapiens
agcaggtctagagcttttctgtgtttctccggacttcgagccatggcggtgacggaagcgagcctgttgcgccagtgccccctgcttctgccccagaaccggtcgaaaaccgtgtatgagggattcatctcggctcagggaagagacttccaccttaggatagtgttgcctgaagatttacaactgaagaatgcaagattattatgtagttggcagctgagaacaatacttagtggataccatcgaatagtacaacagagaatgcagcactctcctgatctaatgagctttatgatggagttgaagatgcttttggaagttgccttaaagaatagacaagagctgtatgcactacctcctcctccccagttctactcaagccttattgaagagataggaactcttggttgggataaacttgtgtatgcggatacctgcttcagtaccatcaagttaaaagcagaagatgcttctggtagagagcatttaatcactctcaagttgaaggcaaagtatcctgcagaatcaccagattattttgtggattttcctgttccattttgtgcctcctggacacctcagagctccttaataagcatttatagtcagtttttggcagcaatagaatcactaaaggcattctgggcatgttcatggatgaaactcgatgagaagacctggggtacttgagccagaaaaacctccccggagtgcaacagcacgcagaattgcattaggtaatacatgtgtccatcaaatatagaggtagacccaggcatcctactatgccttcctgagtgcttctttcttggagctgacca

SEQ ID NO: 150575 - DNA, 454 bp, Homo Sapiens
  misc_feature (180)..(203): n is a, c, g, or t
  misc_feature (221)..(267): n is a, c, g, or t
gggttctgagtcttcactttattactatgtcaccagaagtcaccaccttcacttggttcaccacagatggatggatgtcataaaggagggtgccacggggccactggattcactcgagacttaaccaggtggtgggggggtctagagtgggggcccaggatggggaccgcccttcaccgnnnnnnnnnnnnnnnnnnnnnnnngatatatttgtggagccnnnnnnnnnnnnnnnnnnnnnnnnnnnnnnnnnnnnnnnnnnnnnnncacaggcagtaacgctgcgggaggggccggggcaccgacaagggctgtgcgcaccaggacatggggagtgtcaggtcaagtgcatcgctgggaggcagccggcccagtcccttctcccataaactcctgggagggggcattccccctttcgtgctccttagagaatcaaaggggtcttgggccaagg

SEQ ID NO: 150576 - DNA, 1199 bp, Homo Sapiens
  misc_feature (1128)..(1136): n is a, c, g, or t
ttctttgggctcacatttcagcgactgatagccttcacctgtcccttaattccctggggggacataagccctttccacagacctggacttgagtatctcttgtacctattttcatttggcacgaaatctcccggtttttgtgggacaaatatctttaatctaatgggatagacccggggtcttgaccgatatgcttcatgtatcaacgttcctcgcgacaggattttcacaaagtgctgcccaaataccaactgcccttctttcctgcaagctttcttctcttacgcagccattcctggtgaacggtgatatgatttatgggcaagattttaacacggtagtacttctggtctatctgttatcttatagattctgggggcactaataatgtcctcgagtcacttacaacgccctaaaggtggattgtgattggctatgaggaatggggtatggggctggcatggaagagatgggttctgactctgagatttcatgaaattgcaaaactataggacagctgctcttccataaacagattattattatgtagtttctacgctagacagcttgatagcagccattatcttctttctgggtgtcttatcaagttccggctgtgtgcagcactgggtgataaggaaagagacaatgtcacccatgggattgccaaggacttatttctatgcactgctgttcagcaacagccaatctctcagaactgagaagaagtcctattgttcacgctgggcagcttgctattctgactatcccaagagagcagaaaagggatgtagttgccattgtgcaaaagattgatatttcattactctcagctaaagttctgaaaagcagaatcatcatgaaatatctttgaagagagaaaagacaagggaagaaaagaagaatgaaatgagttcagagctttttagaactgtgagggatgtgcgaaaaaagaaaggtgtaatactttcaaacagtggaagttataatgccaggcgtgtaagcctcagtgagattgagcagcatcacgtcaccacgacttgtggtccagctgtttattgcaaagactccatcctgcgttatctcatcagaaaatagttaactttgtatctggcattattttaattnnnnnnnnngttaacttactagatttctgtttgtctgtgtttcatacaaggttctgtacgccatgtcgttga

SEQ ID NO: 150577 - DNA, 838 bp, Homo Sapiens
  misc_feature (441)..(456): n is a, c, g, or t
  misc_feature (458)..(459): n is a, c, g, or t
  misc_feature (461)..(466): n is a, c, g, or t
  misc_feature (657)..(666): n is a, c, g, or t
gtttttccccccccaggggggccaaaaattttatatccccacagggggggaccaagggggtttgaatttcccgtctggcggaattcaagggttccatcacatccccgtttggaaggggtttcccagttcggggccgaattgctttattgaatttcccccccgttcttcccatgaatgggcagggcgggggcgtaaattgatattgaagcttcgctgggactcccgtttgataggatcccggaaaggcctccaagactcccatttgggattggtccgaacccctcggttccccccgggcctttttttattgtgaggattccaaccctagtccttgcccgggttttcttgggaacaagtaaggcccagttccctttccttctggggccgcgcccccaaaggaaggttttggaaagtttttgggggccggagccggcgacctannnnnnnnnnnnnnnntnntnnnnnnttttgcttaaaacaagcacatatatttttatgtacctatattacaaacacattaaaaaatgtctgcaagatgtatatgttttcctttacacagggtactggaattggaagtggagataatgaaaggaccctttactttcaactgtaatattttatttaaatgtaaatgtattcatgatttagcctagattnnnnnnnnnntcagctagctagaagaatgaggtaacttttaattttagtactaaaggataaacagtatttcacccaacagatgaggggggaaaatatgaattagaggacatgccaattacttagagataagaggaagtcaagactttctgaaaaccaaacttccaaattttgcctatacccc

SEQ ID NO: 150578 - DNA, 793 bp, Homo Sapiens
  misc_feature (310)..(325): n is a, c, g, or t
  misc_feature (342)..(596): n is a, c, g, or t
ggttgccagcttttctaagcaaatagattgtctgaattagtcacagaataattttgtgaaaattcatgtttaagtagcaactaccctttctttttttatatatttttaaggtattagtttatcttcttctaactggtgcagtcacttaatgttttcattaatcttcgacctggagagtgaaatactgatatttctagaaaaaaattctactcctctgattatttgaaatgctgaggaaaatgtccctcccatagtaaaacttgtaaataaggaactatatcatattcagtagctgtgttctgttccatcnnnnnnnnnnnnnnnngagatggagttttgctnnnnnnnnnnnnnnnnnnnnnnnnnnnnnnnnnnnnnnnnnnnnnnnnnnnnnnnnnnnnnnnnnnnnnnnnnnnnnnnnnnnnnnnnnnnnnnnnnnnnnnnnnnnnnnnnnnnnnnnnnnnnnnnnnnnnnnnnnnnnnnnnnnnnnnnnnnnnnnnnnnnnnnnnnnnnnnnnnnnnnnnnnnnnnnnnnnnnnnnnnnnnnnnnnnnnnnnnnnnnnnnnnnnnnnnnnnnnnnnnnnnnnnnnnnnnnnntgagcccaccatgccccgggcccatcaatgattaatttaatttttttaagaaaggttaataaattttataaccttttccttccgggcggcacagagttttccagccatagcggcccttggttggcccgctttggctcttcgaggaaacttttttaaaacccttttctttttggcctcacgcggccccagtaaggata

SEQ ID NO: 150579 - DNA, 890 bp, Homo Sapiens
attactctcaattctaattgttatatatttgagcccatacagtgtattaggttgaaccatagaaactgctattctcgtaggtcaaaagggtctagtgatggaagttttgtagataagtaccaggcatctcagtaactcctagactttttctcatcccatgccccgttttaaattgtcagttttccctctgactcttctgtgttaaaacatgaaactataaatttagtaattatcatgccttgctctttttaatctatatgactgatgcaagcccctctttcttaaccgtttcttggctttgagcccagaaacacagctctccctgtctccaactccagtaagccctcctcagcctcaccttacgaatccaaagaactggggtttgttaggttctttctctaatgtagaggcccagatcccatcacaaagtttttcattcttccttgtccaccatgatcttcatcacagtctttgatatgtctgcatgcaaagtggaacagagttgggcggcaatgacagaagagcttccttggcctgactcggtgtgcggccacttcggcactgcttaatccagatattcttgttaactaagcattgtgcttccccagtgggctgaagtcaggtactctctctcctcacacctgtagttgaatatgatttggccagttgctcgctgtaacttggagaaattcctataaagtaagatctccttgcctctttcatccattggtggccacccccttgcaaaaggaaaagaaaccgccaaagtccggaaccagtaattctgagaaaagttaccttccaggatagggaagggtttctattggtaaaacctaaaatggtaaatcctttagtttccaaaaaagtggataaagtttcctgcttttaat

SEQ ID NO: 150580 - DNA, 687 bp, Homo Sapiens
cgcggtagttgcctggtaaatggcaaagtctattaattaggttgtaaagacagctgaaacaaatggcatttaaaaactccagatgagatgataaggcaaagcaatgccagatgaattcatcaagataaaaagcagtatggcaatgtttttatcaaagtaaaattcaagtcatgaagcattcaacaggaagattattttatattgataacagttacgggctatggaggggaaagctttgcaaagcaacaacaggcaaaacagaaagcaaaagctattagaaggaagattagctatggaagaaaaagaaggctgtagaggaattttagacaattattatgtttcaatcagcaaagaacaaacaggataaatcttaaaaagtggtcttgttattgttacagaaagtgatcattctttacactacaagggaaaactcaaaatctacaaaagagaaatttcacagacaacaatctctactatatccatacgtggggaacagaacaaaaaaactaggtctagactagaagacagagagaaaccatgtcagaccagagcacattgatggctcacggtgagtgacccatggcctaaaggtgcctgtttagggcccaggagccactcacacaggcagagcagcttactccgtatgaaccaccaccagcacccctccctgcccggtgatgtcacccc

SEQ ID NO: 150581 - DNA, 864 bp, Homo Sapiens
  misc_feature (87)..(87): n is a, c, g, or t
  misc_feature (93)..(93): n is a, c, g, or t
  misc_feature (227)..(227): n is a, c, g, or t
tagcctggtgggagggtgccctgggtttccccagggcccccactgttttcgacctgaaagctgtttcctggaggagaaggcgggccnttgagnaattttggcctggttgattctattcccccctggggagctttttcagggtggagtgtgaactgctttctgtgggatgaatatagttttcatcattatctttccagggggaccacataatcagcctcatcctcaanggaggcctttgggtttgggtgggacttgaggtttctgcaaagcagtcagggccggcagggtggaggtgagccttgctttctctgaaggccagctgggcttactgggaagtgtcttgctgaagggtggggaatgcctctggcttgatcgattgtctatatactcgcctctggcgaagggcagggctgggtgaaccggcctggtttcctgctctactggaggcggctcgtagctgtcatcagcgttctcctcggcgggcatcacgtacatctctgagtccgagtgctcatctggattttcatagtcgctgtcaaagtcatcggaccactgctcctcttcgtcagcggggctctctgaagcgtagtcccttcgaggaacacttggaggtgctttgacttttagctttttgattttattcattattccaccttcattgtttttaatatcatggaccatcttttgaagctgcctcaacttctgactggcggggacggttattttattaagcttgtccattctgtttggtaattgtaagagacacgaataactgtccagtggtcacgtcagcagttcctggccctcctagggagcagcatggtaagcctctggtctcaagggttccggccactcaagtctccc

SEQ ID NO: 150582 - DNA, 455 bp, Homo Sapiens
ccattcaacccccgacggttggggggaaaaatttccggtggggaaattaaaaatgaaaagggctttcttcacaccataagaaggccccaggatcaccccctaaatttttagtgatttaacttaagaagctccttgccctgagagattcctttatcccacaacactctactcagagggggcagagaatcccaggacactacacaagccacaggataaaaacacaacctgtcttctatctggcaccaactgactaatatctaggtatacacaggactgactttaaagttggttaacaaatattttaattcattaaaataaaacttaaaaattacatgcttagtctacacaagtttaacttactttagtcacttagtgaattgtgaattggctcccattagtggtcaggagaatgtatttggtgtagaaaccaaataaatcaagattatcgccttgcc

SEQ ID NO: 150583 - DNA, 1308 bp, Homo Sapiens
gggggccactcgagtatttgctgccgattgcctgtgtcgaatcatcaatttgtgtgagaatgcagaccaggctcactttgatcttgccttggcacgttctgctaaacttcgaaaccctacaaatgacctcttggtacttcatctctctgacctcattcgcatggcattcatggctgcaactgatcatagcaaccagctgcgaatggctgggctccaggcgcttgaagacattatcaagaagtttgcgtctgtgcctgagccagaatttccaggtcatgtgatactggagcagtatcaggctaatgtgggagctgctctaagaccagccttttcacaagatacaccatcagatataatagcgaaagcttgccaggtatgtagtacatggataggaagtggagttgtcagtgatctcaatgatctccgtcgagtacacaatcttcttgtttcttctctggacaaagttcaggctggaaaaggatcttccagccagctgtaccgagagagtgccacgaccatggaaaaactggctgttctcaaagcttgggcagaggtatatgtggtcgctatgaatattaaaaaggaagcagagtcaaaaccaaaaagagcaattaaaaatactgacgatgatgatgacgactgtggtaccatcgatgaactgccaccagatagtttaataacactggtacaacctgaactaccaacactcaattcgccctgtggttagcagcattaaaagattatgcactcttgactttaccagccgaattttctagtcagcttcctccagatggtggagcattttatacccctgaaactattgatacagctagacttcactatcggaattcctgggccccaattctccatgcggtggcactttggttaaatagcacaggatttacgtgctcagagtctacagaagcagcagcaatatctggtttacaaaaacgttctacatctgtcaatttaaaccaggcatcaggagcacgtgggtagtgctaaatctttgccagaaattaacaaagacagaatgcatctgattttaggtgtgagtatacagtttctttgttcccctagacctgaggagcccattgaacatgttacagcatgcctgcaggcttacataccttgctagactccccttatgctcgagtccatattgcagaagatcagtgataggtgtcgagttgctgagtgtttgcaacgccttctatagactggaatccatcatcttgtccagtgttggttactggagttgtcgacaggcatagtagaccctggccggacttattgcacgagaagcaa

SEQ ID NO: 150584 - DNA, 765 bp, Homo Sapiens
  misc_feature (151)..(151): n is a, c, g, or t
gcacgctctcatctataatggcattttaaaatacaaggtgcaccttgttatttgtaaacttgaaagaaataacctatttttaaaaaattatatcttggtctacagacgtaccaatacataatagaatcatggttacaccatagtctgtctnttcaagatggcatgaatatataggaaactaactaggtatgcatctttgaatgcataactctgtgctagaaaagaaagacaatgttgttcttttagacaggaatatcacctcagcacaaatatcaattaaatgtacaaagtgtataggcaacagtgtgcagtggatttccggaaaatgttgtcttttcttctggttaacatgcaatatgtggatgtcttgtggctgaggaacttttgtgtgtgttgcttgacgatatatacaatatggctaatgacctcgtcctttactctaaccaagcacactgtcctttcctctttagcatgattgtttagtgatgaaaattctacatctgggtaacatacttgtggctagtcagatgttcggcagatattatgggtatctggttggctgtggctgttgcagcgaagggaacacttgtggcagatgttgttgctgcggacacagtggctggcgtagcaccgtgcaccatgggaactggtgggagaaatgctgtatgctgttgtaactgcatgttggctagagcctgttggtattggaaaataccagtgttaaagactgcggtggcaccgttggttttttcaagagcaggcccc

SEQ ID NO: 150585 - DNA, 737 bp, Homo Sapiens
tcgattttcctttggggacagggtttgtgcccatttttctgtttcctaggggggcccggggcgccaaaagatggtttttagaaaggttttttagggccggggcggcccccccagttttcttggttcgtgtcgttgttctgttgtctctatggcgttttggcctttgttgttttgtcggttgagacattcttcttttattaaaataaaacccatccaccaccccaaggttattccaaaaggaaactctccaccaatagtggtggcactagacatatactgagagacccccaagagggaagtgaagccatgggggcatctggggctacatggtctatctcgctacacaaggaggccctttacaaggctagctgccattttctaccaagacagaaggacaggaaccttccaaacagggcagcctgcaggccctgcaccttcaggccccattctcagacacctgtacaaccccttaagccagacggactcacagctgtctctggaaagttcttcgttacctgactctttaaacacagggttggctggaggggcctctccctcaccttgtacatcttatgaagccccttaccacccactgtgttgctgtcccactcagctgaaggggctggccagtcccgcataaaccctccagctctgagatcagccaatcttccctgggcactgctctctcccccagcaaaaaagccaagaattttccccaaagcttatggtgaggaacc

SEQ ID NO: 150586 - DNA, 785 bp, Homo Sapiens
ggaacgcactgttgcatatgccagccactgcgcttggttcccattttctttgccaaggtgtattagcggacggccctctggccacctacccgagagatcgtagggtcacatacatccaacttcaccacttggctgcttgagattggttctgctcttttcttcatttctttccagaacaactctttcccaccccaacaccactgccaccacccctctttttatcctggtgtgaaacaatggtaatttgatatatggtatttatattggcatttttcaacccagtgtcactagatgtcacacacatttgtggtgctttgatgtttgcaagtctaacctctgaacataaatttggtcaaataattggaacaaagggaaacagatacttgatatgaaagccataatgacggtgacttgtgtcgtgggggaaaacataaggtcattttctccctctactcacaatactaaagggaaaaaatggattcaaagctaggatttcagggcccagcagtgttcctccatcagcatgttagacaactacacagtatgttgttagttttgaaagacattcactcaaggaaaacaccatctcaactttgcccgctcaccatgtcccttgcccccatgtagcccatttcccaggttatgctcttttctttctcagggtcctctttggtgggcagccactccccgagatgttgccatcagttttgctgcagtcgcaaagaggggtatggttaggtacgggtcttcatgcctcattcctcttcctctttgtgtaggtttca

SEQ ID NO: 150587 - DNA, 621 bp, Homo Sapiens
tcggggggcagtccagagattgtattctctacagatggcctgtttgcaaacagtaggtctgggtttgacctattggaatacaccatgcaagaaactactcaaaaaggaaattccacttcatgaaccaggaaagttgtccaatagcctgtcccatctgagggtcctttacatgattagatactcaatatctcagttccacaacgttatttacagacatgttttcaaatattttgtgtaaatggcagaagggagctgggagcagtccccctgcctccattacttttttagctttcacatatgttcttgacttgtacagaaaatcccaaattttaaatgattccccaactcagccagttctatagatgaggccagatcatttttgagaattaagataagagtgggaacttgttaaaacaaaaatgaaaataaaacccacctcactcctgtatctctccctgattagacattatagaggtgaatcactgcctctggctgcttcagccttccaggaatgaagagccatccaccttgcccttctctagccagccgcaggcagctcttctgattcttccctcgcagcagtggcggtccagcccctccctcccctgcacagtgcctgcc

SEQ ID NO: 150588 - DNA, 548 bp, Homo Sapiens
gagaggagcacatatttccctcccgcacgtcccgagcaagaggcaggcccagaagagccagcagctcttctctgtgtctgtgacacttttgaggagattgcaggacagtgatctttgcagctgttgtgtgtgaactgaggtgatatgaggaaggtgaaggcgagggctgtttgagaagggcgcctacccccagcctggaaagaaggagaggcctgcggaagcactaagcctttcttctctgagtgtttacccttcatcaatgatgggttattcaaaaaaagggggttcttggtgccagttaaacctctgtgttgcccagaatgacctgaccggagagcactcgtgcatcatgctgaagacgctcactgatgaggatgaggctgaccagggaggctggcttgcagccttctggaaagatttccgacggcggttcctagccttgctctcctaccagttcagtaccttctctccttcctggctctgaacatcattcagaacaggaacatggggaagccagcccagcctgccctgagccgggaggaggagcg

SEQ ID NO: 150589 - DNA, 997 bp, Homo Sapiens
  misc_feature (167)..(241): n is a, c, g, or t
  misc_feature (545)..(620): n is a, c, g, or t
  misc_feature (628)..(641): n is a, c, g, or t
  misc_feature (752)..(761): n is a, c, g, or t
  misc_feature (928)..(936): n is a, c, g, or t
taactacaggttcaattacatatatataaatattcattttggtaacctgtgtttgctgaatcaatttgttcattttatcgaaaatttcaaagttattctattattcatttatctttttaatacttataaagtctccggttagagtttgtgccttttgtctgttttgnnnnnnnnnnnnnnnnnnnnnnnnnnnnnnnnnnnnnnnnnnnnnnnnnnnnnnnnnnnnnnnnnnnnnnnnnnnaccatactgaaaatgttttgcttaatttccaaacttatagttccactgtgattaaatatttgtataactaaaactctgtggaatttgtgtcttctcaatgattgaaaatatgattaatttttataaatattgcttctgcacttgaaaaggatatgtattctgcatgttgagcgtagtgtaccacgtatctcagttaggtccagtgtgttaaatgcatcctttaaagattctatgtgcttactgatgtttgtttatttttcagtggctgagacacagatattaaagtttcccacaatgatcatcnnnnnnnnnnnnnnnnnnnnnnnnnnnnnnnnnnnnnnnnnnnnnnnnnnnnnnnnnnnnnnnnnnnnnnnnnnnntgttgggnnnnnnnnnnnnnnaaaaaattttttaaacatttctttgggggcgggggccccaaaggaaaggaaaagggggctaactggtttccaagaaaacccggggaagaaaaagggtggggatcccccccnnnnnnnnnncccggggggaaaccaagggttttaaaaaaaccccagggggttttggggggcttattggggtttataacagggggcccaggggaatccaatttaaattaagccccccccggggcctccttggggaaagggggggaatttcttttaagaattttgccgggctggggaannnnnnnnnaaaccggctgtggtggaacccttaatttcccacgcggggttataacccccttggccgccct

SEQ ID NO: 150590 - DNA, 720 bp, Homo Sapiens
cagacttgtgaggttttaatatgaagtattaaagctatgctggttagacaatttggaaaatgtttcttctcctatttctgacagagtttatgtaagatgtgtgctatttcttccttaagcatttggaaagaattcacttattaagccatgtgagactgtagttttctttataaggtgtttaactacaggttcaattacatatatataaatattcattttggtaacctgtgtttgctgaatcaatttgttcattttatcgaaaatttcaaagttattctattattcatttatctttttaatacttataaagtctccggttagagtttgtgccttttgtctgttttgttaatcaatcttgctggaggccatcaattttattagtgtttcaaaaaagcaaactttgattttattcatccctttaccatactgaaaatgttttgcttaatttccaaacttatagttccactgtgattaaatatttgtataactaaaactctgtggaatttgtgtcttctcaatgattgaaaatatgattaatttttataaatattgcttctgcacttgaaaaggatatgtattctgcatgttgagcgtagtgtaccacgtatctcagttaggtccagtgtgttaaatgcatcctttaaagattctatgtgcttactgatgtttgtttatttttcagtggctgagacacagatattaaagtttccccctcgtgcc

SEQ ID NO: 150591 - DNA, 814 bp, Homo Sapiens
  misc_feature (45)..(45): n is a, c, g, or t
  misc_feature (68)..(68): n is a, c, g, or t
ttaaaaaaattgtgaaaaccaaagggggaaattcttccaattctnccattccttggctgggtgatttntccatcaaaccagggtttggcttaggaaaaactaaatctctctcccatttttctggatattcagatggtgagctagatttttctgaatcacgattaacaggagaaaagagattgctattattaaggttcttcaaaaccaacttcttaatgctcttcttgggcatgaatgctccattggctagggatggttcatcgtcatccagcccatcaaagagatgtgacttggctgtgcctgttgtttgtaaagcctttggtcggactctagtggcagggcggggtgtcagtttataatgagtaggtgtagtaagagccttctgggctgctggatttgttggtttccatctctcttccttcttcttagggtctgacatcggattccggaagagaggagagtctccaaaaggtgagtatgttagactattgatgtgctgctggagaacagcctgctgggcagcagaagcatttggatctgtcaaagctactggggcctggggggctccaaagcccaaagtggctgtcgtagtattaaatccaggggccccaaaggctcctgtaccaagaggccctccaatcttaggttggttgttcccaaacaaagatgcctgtccagcaccaagagctgttccaaatcctgcaccaagcccagttccaagagtcccaggtgctggtttacttccaaaaatactattcccactggtatttgtgccaaaaccaaatgaaggtgcactggttgtgctgcttccacc

SEQ ID NO: 150592 - DNA, 827 bp, Homo Sapiens
  misc_feature (716)..(716): n is a, c, g, or t
cctggctgtgtggatgtctgacaggtgaggcgggggacgcagaagtgcagccgccctctcccacagcggagtccaaaacaggcctaccagtcagttcttatttctattgggtgtttccatgctccaccatgttaagagctaagaatcagctttttttactttcacctcattacctgaggcaggtaaaagaatcatcaggctccaggctcatacagcaacgacttctacaccagcaacagccccttcacccagaatgggctgccctggctaaaaagcagctgaaaggcaaaaacccagaagacctaatatggcacaccccggaagggatctctataaaacccttgtatttccaagagagatactatggacttacctgaagaacttccaggagtgaagccattcacacgtggaccatatcctaccatgtatacctttaggccctggaccatccgccagtatgctggttttagtactgtggaagaaagcaataagttctataaggacaacattaaggctggtcagcagggattatcagttgcctttgatctggcgacacatcgtggctatgattcagacaaccctcgagtttcgtggtgatgttggaatggctggagttgctattgacactgtggaagataccaaaattcttttttgatggaattcctttagaaaaaatgtcagtttccatgactttgaaatggagcagttatttccgnttctttggcaattttatagcaaactggaaaaagaaccagggtgtaccctaaaagaaaaaccttactgggtaccatccccaaatgcaatttcctaaagggaatttttttgga

SEQ ID NO: 150593 - DNA, 470 bp, Homo Sapiens
acaagtggatagaccgcaatctgtccccgccgggattctgaattggaagactgcattgctgcttctccattggttaatacagtggatttctggggagactttgtaacttttatatttcccactgcttcttgagacatgcctccattttgagtttctgataagcccacattcatgggcttttgttttgattttttaacctttctacttcccattgtttcttcagatacatctccattttgagtttccgatagggtcagatttgaggccccctgaaactttaggttccgctgccgcaatttgaggttccgcttctcgatcttcttacgcaggagtttcatcggcaggtgtgacattctgcccaacaagtgcctagaataaggcgccacacagtacagctactcagttctcaggctgacgttacttcccttccggccgcacgtgcgcagctcggccaacaggaaacgcgtccc

SEQ ID NO: 150594 - DNA, 849 bp, Homo Sapiens
  misc_feature (71)..(71): n is a, c, g, or t
  misc_feature (324)..(324): n is a, c, g, or t
tgccatgggacattttaagtgggaaaccctctggtggctattaatccataagggcaatttttttcttcccncaggtggcctattcctggctgtgctttgaaagacctttggatatcatggaagggtgcatggacagaacaagcaaccccaagcccatgcatcagcaagtggtgtataagctcttcctcagagaccaagcccttacaaggacagacatcgcaccgttttctctctcatccactttagaaatggtgcacacgctgccagtttttcaggctcaagtttctcaccagacttggactcgctgtgcttatgcgctacctnccatgtggacctggtagacgttggacggaaagagctcgttgcagacagggcaggtcttccactgcttggcctgtttgagcacctggtttgtgtctgctgcagaggaggaggcctgaacaaacacgctctgagcagcattcaccagcactggaggagagggcatgccgggcatggaaccggccattggtgcagctgcacctgacggcaggagctggatgggcatctggggcggagcgacagtcgcaaggcctccagggggaaccggcagagtgacagacacgggggccagcgtgtaggttggaatcccattcacttgtttccctgtagggatgagctgtctgagaatagagcctgatgtcaggaaggtggtgttctgcgaagcaccaggtctcactggctgattcacaggcagaatgttggtgcccacagtctggttgagttgcaagaccccaggcctcactggctggcccacaggaagaactcccgacacaacaggctgactaagctgcagaacaccagaattcc

SEQ ID NO: 150595 - DNA, 823 bp, Homo Sapiens
  misc_feature (137)..(137): n is a, c, g, or t
  misc_feature (144)..(145): n is a, c, g, or t
  misc_feature (147)..(148): n is a, c, g, or t
  misc_feature (154)..(155): n is a, c, g, or t
ggttttttcggagggaagcgcggggtgaggcacccagggtccacttacccttacgggggcccccggcgcccaaaacgagagggttttagaaaggttttttggggggccggaggcgggccggacatgttgaaggtttntttaatnnanncttggnngcaacatttattgatggagttttcccaatttaatatttctcatcatttcctcacatgattagtactgctagcggacctactaaaattttaacactgacttattattagagatggcttgcatttttcctacaccattccaaaggagaacattagatgtctgtattaaattcaagcaaaagtgtgagagaaataatttcagcatgtctcaggtgtctcgctggctcttaaggtgaataaggtggtggtgactgttctgcagagagtttctcataagcaggtggagcattgggaaccacaggttcacagtttttctcttgaagagacactttgctgtcccgatgatcaaacccttcttgtgggcatcttcttgttaaggcacattgagtgccaacatgaagacttttatccatcaaggctctgtatccatttcgtcttctacaataccaacagccgatgagcagtaagactcccaggatcactgtcaggatgccgatcccagcggcctcttcagccgtggtgtaagagtggccgtgccccttcttggggtaaccatagatgaagtgagcatcttctcttggcatcttgtagggtcagggcacaggacaccttccttaatgagagtcctctgtctgctggctggccgcgtgtatgaagactgcttctctccc

SEQ ID NO: 150596 - DNA, 1381 bp, Homo Sapiens
cccccccaccaggggggacacaattttggtgggggaaaatattttcccccttttacagagggtcccaagcccacctttttgtggcgcccgggggggttaattttccccggggggtatatccccaggggtggggaattttaaaagcctttaaagaattgggaatgtttttggcgggccgggcgcccctccatgggggggcccccaacacaatggcctttcaggcccatcaaaggtgttccccttccagaaagaagaagaactgcccagtttccagggaggctggaaagttcagaagttggcgcccccccagccatttgggccaggaagcccaggcccattggggggattccgtaggccaaggaaaaaggggaagggtggtgggggatccttgtgcggggcaggctggaagctgaatgacccatgggcaaggagtttccccatcagcgtgcaattttcagcatgactagagggggcagccaggtgctgctggctacagagaatgacgttggccttgatccccatccagcagggagaagtcagcttcgaacagtgtgcctccctccagctccttctccagctgggcctgcagttcctccatgcctggaggaaacactaggcgagcaggaaggtgagcagagcgcctcagcaccacggggttggcgccattaagaaactggtacccaaataaggcatcttccttccaggagtcccgcacgcgctcagccagcttgctctgaccacaccagaaaatccggttgaagtcatctagatccttccagcaagtcagaacatttagagagtctttgatagcgaggtcggccagccccttggccagcgaaacctcaaagtcaactctcttgtcttccagaaatcgctcatccacagggaggtcatatagtttggccccagccatattcagaattaacccgtccttccagtttccccaccggtacaacttccttctctcttccagctcttcttcccggtgtttctggaacaggccctgagggtcctcgcccacagtgcggccggtgccttcaggcaggctcaggacgccgttgccctccacccagcggtaacaagggaacctgacctcgtccccggctccggggccctgcacagagatccagttgcagaaccaggcgtcgtccttaaggaggtgccgtttgcgcagtttcacaaacagcagcggccccagatactccggtacttccaccttgagttctgtctccttgccccgtgcgggccacagtcgcttcccgagcgccgcactccccgtgctggccgaccagccacagctgcacctggttgttggaaccggcatagagcgaggccccagtggacacgcggatgcggtagagacccatcttgctcaaagatg

SEQ ID NO: 150597 - DNA, 829 bp, Homo Sapiens
gggacagttggcagaaggctagtgatatttacaggtcttgctgcaggtcccctagccgagccccacccccatcagtaaccaggattctccatctcccacctctcttcatgtcctggtggtttggccgcaggggctgacctgctggaagagcatcttggtgaaatccggaacctgcgccagcgcctggaggaatccatctgcatcaatgaccgcctacgggagcaactggaacaccggctgacctctactgctcgtggaaggggatccacttctaacttctacagtcagggcctggagtccatacctcagctctgcaatgagaacagagtcctcagggaagacaatcgaagacttcaggctcaactgagtcatgtttccagagagcactcccaggaaacagaaagcctgagggaggctctgctgtcctctcgatcccaccttcaagagctggaaaagggagctggagcaccagaaggtggaaaggcagcagcttttggaagacttgagggagaagcagcaagaggtcttgcatttccgggaggaacgtctttcccttcagggtcacgactccagactggagcacaagctggttctcctgcagcaacagtgtgaagggaaaccgcagctctttgaggtccctccaggccagagctaccaatctacgaagcccttttatggccaattcccatgaagggggctgaaagccttacacgcctgggatgcctggcacccaaatcccttttgagcaatggacctgaagcccacctgtggggcaaaagtaccaagcttcttgaaaaggccccctgggagcacaaacattttaggggat

SEQ ID NO: 150598 - DNA, 1121 bp, Homo Sapiens; identical to SEQ ID NO: 63021
  misc_feature (375)..(377): n is a, c, g, or t
  misc_feature (379)..(398): n is a, c, g, or t
  misc_feature (401)..(431): n is a, c, g, or t
  misc_feature (434)..(464): n is a, c, g, or t
  misc_feature (471)..(472): n is a, c, g, or t
  misc_feature (496)..(496): n is a, c, g, or t
  misc_feature (508)..(508): n is a, c, g, or t
  misc_feature (774)..(782): n is a, c, g, or t
  misc_feature (974)..(974): n is a, c, g, or t
  misc_feature (1013)..(1013): n is a, c, g, or t
  misc_feature (1030)..(1030): n is a, c, g, or t

SEQ ID NO: 150599 - DNA, 383 bp, Homo Sapiens
tttttaaagaatcaccctcattgttgaaagtaaatgtactcttagggtgcgaatattagtgttccaataagcatgtgattatattaaggtggtggtagcgggaagataattctgattccattgggaatcttaggttttcgtaaatttattgggaaaatagtttttcctgtactgctgaagtttctttttggtaaacagtatctttctaaaagaaaaaagcatgaaggagaaattgaggtgtgtatacatttcctcaaatgaccagcattgtattcgtgaatactgtgtatcttgcagtgaacagtgtggaagctgttcatttttcaatctgaagtaaaatactttccacgcaacccccggccaacttaacctaaatcttgtcc

SEQ ID NO: 150600 - DNA, 1591 bp, Homo Sapiens
cgggtttccccatggggaaaagcagccaacctcccttttcaatgggcattgaaaaggaaacgggatagatttcttttcccactgggtttcccacttggggttgttacaagcttcagggatatcgataccctggcccattgcagtagtagatccatttctccccgttttgggtttggagtccatggatttcttcaggccttgcctttccacaaagggcactggattcctgccggggcccctttttcagagtcctcgagcttttccggatactgcacaccacaatcaccacaagcaccagcagcaggaaaagcacaatcatccagggcaaatgctcattgatgtcaaaatgcttgtgtaggttctgtctaggatgtcccctcttggggcccttgatgggcgtgctggacttctcgcccccagtggcctccatggacggcagcagcttcaggatgtgtctgtggtgggggccttgctggtggttgactacctgaaggtttgggagggtcttgtttcacgtcttccttccccctttgctgagcttgtgttgtcagggactggtccctttcctggatgctactcagtacctttggtctaccagaggcagaagagttggattctgttgagttcatgcctttgggaacataagtggaggaagggacttcatgggtttccatgtgctcagggcgtggaaagatggctgtgccaggggaaggtgaggtggagctggagaaggacgggagtgtgccacagacgttgtctgtctccttggtccccggcttgatcaccaccaggttctgactcagacagtctgtgtatgctttgcatttcatcacactagaaggcacatctgagaaggtaccccgagcacactgcttacaccgcacatcctcagtctctgtccctttcttccgcacaccccaacccacaggacacaccgtatggggggcacaggtagcgttagactggaacatgccaggtgggcaagtgcattctcggtcagtcaaggcagcacaaggtaatttctcaatcattgtccatgggcatggctgactacagtcatggcatttctctatgccattctcatgcctggtaaaggtccccacagggcaactgctgcagacgcgcaggcttgtgttggtacaatgctcagagacataggttcctgctggacacttgtcacaggttagcacctggccggtggcacggtcaacatggcggtatgtgccaatgagattcgaggccttctgttctggttgagctgatgtggtggtaaggaatgcaagcaggagaagggagccgtcgatcatcgtggctgtggctcggcgggcgatgcggctgcaggaggcgagggcggtgttgctgctcggagaggtccccatggctgaaccggggactcgcaggggcgcccggggcgcgcggggcagctggaatcggcggctgcttttgcccagcgccgcatccaccgccgcctcccgggccgggagcccatctacctccaacaccccatgtgcactgctgcggccgggcagaggagggaggcggcaagggaggctctaggggcgctcagcacctgcccagcggcgcggccgct

SEQ ID NO: 150601 - DNA, 834 bp, Homo Sapiens
aggggaaagttcagggacccaggggtggtccaggtgcaagctttgaaaaagttggtctttttctggacaaaaacttttaaaaagttttcttgttccattcagccacaccattggcattccccatacaaaaccttgagttcccatccatcacttgctgttgagtttttttcattttcggtactggcggtatttcttcttacccagtgtgtaaaaaagcatctttcaacacccctgtctggtcttggctgaggtttcaatgaatggaatcccgtaactcttggccagttcgtgggcttgttttgtatcaactgtccttgttggcaaatcacacttgtttcccactagcaccataggtacatcatccgagtcttttactcgcttaatctgctccctgtagaggttaatatccgcaaatgacttgctattattgatggcaaatacacagaggaagccttcgcctgtcctcatgtattggtctctcatggcactgtactcttcttgtccagctgtatccagtatgtccaacaaacaggtttcaccatctataaccacttgttttctgtaagaatcctctatggtgggatcatattcatctacaaagtggttctggattagctggattgtcagtgcgcttttcccaacaccacctgctccaaccaccaccagtttgtactcagtcatttcacaccagcaagaacctcaagctccactgcctctgctttggacagatttaggaccacagccgggaaaaatgttggagaccccggaaccgccatgaacagcccccaccaaggagcggcacttccggccccgcccgctacgtaatcagtcccc

SEQ ID NO: 150602 - DNA, 785 bp, Homo Sapiens
cagtcgacggtaccggacatatgcccgggaattcggccattacggccgggggtgggaaccttgacaagcagcatggctgcaggttgctcagaggcgccgcggccagcggcggcttctgatgggtctctggtagggcaggctggcgtcctgccttgcctagagttgccgacttatgccgctgcttgtgcgctggtgaacagtcgctactcatgcctggtggccgggccgcaccaaaggcacatcgcgctgtcgccccgctaccttaacaggaaacgcaccggcattcgagaacagcttgatgcggagctccttcgctattctgagagccttttaggtgtccctattgcatatgataacatcaaagttgtgggagagcttggagatatttatgatgatcaaggacacattcatcttaacattgaagccgattttgttattttctgccctgaaccggggcagaagcttatgggtatagttaataaagtgtcttctagccacattggctgtttagtacatgggtgtttcaatgcctccattcctaaacctgagcagttgtcagctgagcagtggcaaaccatggagataaacatgggtgatgaactagaatttgaagtatttcgtttagactcagatgctgctggagtattctgcattcggggaaaactaaatatcacaagtttacaattcaagcgctctgaagtttctgaagaagttacagaaaatggcactgaggaagctgctaaaaaaccctcgtgccgaattcgccacccaggcctcgctacctt

SEQ ID NO: 150603 - DNA, 1226 bp, Homo Sapiens
gaaggtttttgaggggcccgagggcggcccgacattttaattaatattcggtgatgtggtataaccgggatgacttcggggttttggtcctgggttttaatccaggtcccaaagggcagaaaggcagtattttatctactaagtcccacagcttgtgagaggaaagggatgtctgtttcaggcatggtaacttccaaccaaaatctgagatcggcttttttccattgacattcttagcacagcacccaaagaagtataatctagccacagtgtggctataatgaggcacggcttattgcagctggaaatcaattatcctcacgctgaggtggggattctagtgttcctttgactctgtggatactccccaaatggtgtctgtcattcctgtgccacgacctcagcttgcatcctatcagtcttggggaaggaaaagggagtacagactagtgttacaagaatctaaaggtacccaagattttacacgtagtctaatatttgagaactgagggctatctaaatacctggaagcactttcttggaatgctaagacggagcagcaagattttctagcctcgggggctgggagagggaagtttggttggttggttggttattatttactgggagttaatactgagagagtatatgcaaaggctgagggcaccatgccatcttcacagaacaagaccctaacagctacctgacatacaagaaactgcaagttatactgtaagaacacatgttaaggaccgaggaaagtctgctaaggtgctacgtctaaactaagttaacttgtcatgtttaacctccctgatcagtcatcatccagggcctctgtcttgatttcgttggctccttgtcgggccaatgccaagatagtgtggttgactgctgccatttccacagctaatgagatggggtcttggtggtcactatggctcgtactgtcatcctagatgtgcagaaataagaaatgttattagtggattggaagaattctttagtcacagagagacatgctggggcaaggggaggcagaacattcgtgggaggaaactgggggaggggctcatgataaaatagaggtaaattgtatttaagtagacactgaatggatataggtccaaagattttcagttgataatcttatgattcaacaagtaaaaagcacaaaaaatgtttttcatcactgagaattctattcattctattaataagattcc

SEQ ID NO: 150604 - DNA, 900 bp, Homo Sapiens
gtgagcaaagagcggcgggcccgaaagaaaaagggacagtttcgtgcttcttgtgagtatataattgcgtgtagttaggtgggtgctggagccttttgtgtgcggcgaggttgggttagagccagggccggctccgcgtttaactcgtgatcattccgcgggtccccctgaggacggctggtgatgatctcgggtctgccctgtaccccggtcttaaattaagggttcgggaggcttcccaacctggaaacctttttaattaccccccaattaccaggggaatagagggttttctccccccaggggggcccttttccaccacttattcccatctcataaaggtttctcaccagtgcgtttttcgatgccctaaacaggcttgttctccaaacaaagctttgcccatattcgtcacagttatgaggtctccttttaaagacgttctgatctttttcatttaatttatcccccaattcacagcattctttgccttcagaatcctggagaacattctgagactgctagactcttctgtcaatggttcaatttttgctgtaattccctcctctgaagctggctttccaatcttggtcttgttctcaccatctgacagaaggtggtgttcctgagattcataattgaactggatctccatgggctgcaactggacacctcagtgtgcaagtggagaattaccatttcctctgtaagcttttcttgtccacataaaggtctgggacctggaggcaactgggcaccactgggcttggaagggaatcattgtgctgactacagatgtaatctctgagactagaccaccagaaaaatcctcgacttggtcaccggaccgctgtgaagcctcacacccggcgaacctgccatcgccctgtccgctctccc

SEQ ID NO: 150605 - DNA, 482 bp, Homo Sapiens
cctaagcacttatggtatttattgttggaagattgagtaccttaatgcacaccaatgctcagatgacttgggggcacataggggactgctgtcaccatgcctcactcctgcagggaaggggctgccctactaaaaccccagcgggcccagtgctgtgtccagaacaggtccttatattactgcagcccacaatggaactactgagtaggagccaaaagaggagggagcaggaagaggtggcatttggagaggggagaccgcacccacaggtctgccacagcgcgtcaacggtatggggtacttttacagtcaagttgacttcggtgtccgcccaccatctacctttgtaggaccactgaaacaagggacatccaccacggcccacagccggggcgccatggccccaggaggatatgctaagaaaaccattccacggccgggtgtggtggctcacgcctgtaatcccagcgctttgggaggcc

SEQ ID NO: 150606 - DNA, 807 bp, Homo Sapiens
  misc_feature (787)..(787): n is a, c, g, or t
gggagacagtaggaaatttctccttagtgagagctgagtccttgagaagttaagagactgtttcctgcttcccaccccaccccgttttttgtccctccgtttgatcacctccctgttgagtatggaatgtcccagtttaatataaaacataccgtttattccacaccgcagtttgactttgtaaaagtttagcaaaataactgattgttttggataactcaacatgtttttcttaaatgctgttttagtattttctacctcttaataagcaccatattttagatcttgtataaaaagttgccagtctgccttatagacaaatgtagagaattgatgttcttgcttttgtgttgtgttctggtaaagctttaagtgagtgtcttacccctttcctatactttcttgttatccatatcattcttttgtgagttttgcagcagtcttgaataatacagattataactactgaaaggggaaccttcgtctttttaaatgtgttatttcacattaccataatatgtgtagtagttgaattgtgttatcaaagcatgtccaacttctgtccagatgacattaaaaccaaagcctaattgttaagcctcttattctaaagtccatagcaatgctatggaatatcaagtataatgatgtagtaaaaagatttctccagaaaacactttgagatactttaaagaattccagagcatatcgaatgttatgaaatgaagaagtaaaattaattaccgggaaaaagaatgccttggatttttcccttggccccacccanataaaccacggttgggacac

SEQ ID NO: 150607 - DNA, 878 bp, Homo Sapiens
  misc_feature (84)..(145): n is a, c, g, or t
  misc_feature (162)..(334): n is a, c, g, or t
  misc_feature (338)..(367): n is a, c, g, or t
  misc_feature (410)..(424): n is a, c, g, or t
  misc_feature (456)..(669): n is a, c, g, or t
agtaaaagggtgggaaaagaaaaatatatacaggggcgggaaagagccgcggggggcataaatactgggcgggacgcccacatnnnnnnnnnnnnnnnnnnnnnnnnnnnnnnnnnnnnnnnnnnnnnnnnnnnnnnnnnnnnnnagaagtaacaaaggaannnnnnnnnnnnnnnnnnnnnnnnnnnnnnnnnnnnnnnnnnnnnnnnnnnnnnnnnnnnnnnnnnnnnnnnnnnnnnnnnnnnnnnnnnnnnnnnnnnnnnnnnnnnnnnnnnnnnnnnnnnnnnnnnnnnnnnnnnnnnnnnnnnnnnnnnnnnnnnnnnnnnnnnnnnnntgannnnnnnnnnnnnnnnnnnnnnnnnnnnnnaaaaacgtggaaaagggagcgggagggtggggggaccataacnnnnnnnnnnnnnnnaaggaacgggcgcggggcgggaaataactcannnnnnnnnnnnnnnnnnnnnnnnnnnnnnnnnnnnnnnnnnnnnnnnnnnnnnnnnnnnnnnnnnnnnnnnnnnnnnnnnnnnnnnnnnnnnnnnnnnnnnnnnnnnnnnnnnnnnnnnnnnnnnnnnnnnnnnnnnnnnnnnnnnnnnnnnnnnnnnnnnnnnnnnnnnnnnnnnnnnnnnnnnnnnnnnnnnnnnnnnnnnnnnnnnnnnnaatggttgcgcccccgggcgggggcgaagccccagttttttaacttcccctcccagctggtaagagcgtaggtgaatccctgtcagcccccactgccgtaagtcctgctcctgcacccgcgccgcctcggctcggccctcagtatgaagccgcagtaagaagccaggggcttggcccccgcggctagtagcgcccgcgcgctccatccc

SEQ ID NO: 150608 - DNA, 872 bp, Homo Sapiens
ggggggttgggacttatcccccgggtggggattgccgtgataacccagttggcaaaaatgaaagggcgttttcttggaaggaggcagggcccgttttttccaagggaagcttggcctttttcaagcaagtcaaaggggttgtttggtcgggaagggaaaatggcccttggggttttttcctgcaggggcattatagggcggtttaggaacccggcaaggaaggtttaattatggattaaaccatatagtgggtggcataaatagggtttacttccgccgtagaaatttgggccaaaagggggggaagggatccaaaattgggcgggctgggggaacaaatcgggcccccagttatggggaaaggaacaatcagaggggaggtgaggacgggatagaagcgcagcaaggtagaaaaaggccaggatagtttggagcccctttagtgggaggtacgaaaaagaagagaaagaacaacagcggcaaaaagagcaagttcaaatccaagggggagagctcctctggaacaaaactcctaccaaagagactaagagctaaggagagggcaagatccaggattccttcttgtgtttaagcaggagcaggcagaaaagcctaacaacccccgtctttcccatcggcagccccacgcccatcatcacacaaggccccaaggatgggaaagagaaaagctagaaggacccagagggcctcgggactacaggaagagtggaaagttacagactgtaaatagagtcgggtaggcttgtgcccttccttatttgtccggttctttcatttgctgcttctgtttaagctcaagggtcagtcaccatgaaatgaatttgcacctcggtttctctttaggctccacc

SEQ ID NO: 150609 - DNA, 395 bp, Homo Sapiens
tttattctttccacagtttattgagtgcctgctacacaccaagcactattccaggcactggggatacagcagggaaacgagacagaggaaggccttgccctcatggagcttacattctagttcagggatacaaacaagtcaaataaataaggagttctgagagcaggggtgctcttaagaattcagaacaggtgatgtggcacccctgcagagggggtcctgggagtgatctctccaaggaggaaacagccaagctgagattcgaaggggatgggggtgggggagctccggaaagatgggggaagagttggaggcagcgatgacagaagtccagtggtggcaaacacctgatgcctcaaagaaccaagagaagagagtggggcaggaccatggag

SEQ ID NO: 150610 - DNA, 777 bp, Homo Sapiens
  misc_feature (27)..(27): n is a, c, g, or t
  misc_feature (56)..(56): n is a, c, g, or t
tggactttgggaggggaggagttaccntaacgtcatccctcgaacctcactttccngccccccttaaccagtgatagaaagacacttttagaatagccgccccacctaaaaggacactctaaattcaccaacagtgaaagcccaggccaaacctgcgtgaagctcttagcagctacaggccaccattattggttgccattaactctgtcagctgaaatcgtcttcccatcacccacaatgtgtggttaatgattttatatacagagtttacaaaactgctgagtaaaaagctcatggcactcctatactcacgctctggagagttggtagaaaaaaagaatgtgttctgataaaacctctgatcctcactgttcacatccatgtaacagggctcggtcccctcaaaatctcatgatacagcttctgggaaggagttattaaccctgtcacttcccagattgctgatactcacaatgtttccatttgcagattcctgccaagaatgatgaggcaggattaggcccaactggtgctctcccactagctgctgtatttacatacacttctgttcatcatctctgcccgtttcaggagtagctgagagcttgaataggtggcggtaagctcccaccaccaccccatgcccagtgcagctacccgcctgaatgaaggcagctcctcggacatgtgaggtgtgaggagtggggggaagatccagggaagtcagctgctttgtatttcccggccgtaatggcactctgcgttgataccagctcc

SEQ ID NO: 150611 - DNA, 704 bp, Homo Sapiens
  misc_feature (58)..(128): n is a, c, g, or t
  misc_feature (140)..(140): n is a, c, g, or t
  misc_feature (142)..(142): n is a, c, g, or t
  misc_feature (147)..(148): n is a, c, g, or t
  misc_feature (151)..(161): n is a, c, g, or t
gggcgggaggaggaagagaagaacgacacggcggcgcagaggcgcgaacggaggaacnnnnnnnnnnnnnnnnnnnnnnnnnnnnnnnnnnnnnnnnnnnnnnnnnnnnnnnnnnnnnnnnnnnnnnnggaaaaaaaggnanagggnnagnnnnnnnnnnnacccaccaagtcacctcatacatacaaggaggaaggttcatttaaattaaacaaatgaagtaagcacactttgggaggatgtggacagcagaattaagatttaaaaaacgaaagcatttcatcaaaacaaaaaactaacttcctcacaggaagtccactagtaacaggtattaagaggccaacacattcatttacataattgctacagtttcatttcttaacttttgctgtaataattatgcaccaattgctggtcagagactcagttggataaaacagagcagtgggctaaatccattctgctatattttcatctagttgatcagagcaaatatctacgatcctcttttggctggattgtggctgctcagatcgcacttccttggtgaaagcatagagtgtcccagatgggcctgctccaaaacacgctcatctagaaagcagcacaccacggggggtgggggagaggttggggagtgcagcagcagcaaagattacaatttatcttgcaattttagtgatgtcacctatggcctctggacc

SEQ ID NO: 150612 - DNA, 435 bp, Homo Sapiens; identical to SEQ ID NO: 329

SEQ ID NO: 150613 - DNA, 806 bp, Homo Sapiens
  misc_feature (443)..(506): n is a, c, g, or t
  misc_feature (623)..(648): n is a, c, g, or t
tgaaagtgggggaggggaacaaggcccccaattctttgccctgctgatcattggatcaaattctttcgttaattttcccgtacttgtcctcagattcagggctggtgacctacggaattggtccgcatccggggtttggctgttcacagccattaagggcccttctttctcaacgtctccacgatgtctgagtttgtccggctctcatgcgggtcgttgtactccgtgtacttgagaagcactttgtccatgtcagggctggcatactggaacagcttgttggtgctgttgaagatgatcagcgcaatctcacagtcacacagcacgctcagctcataagccttcttcatcaacccaaatttcctctttgtaaatgtcacctgtctgttacgttcatccataatcctcgtaatctgaatcttttttctccccatagtccccgnnnnnnnnnnnnnnnnnnnnnnnnnnnnnnnnnnnnnnnnnnnnnnnnnnnnnnnnnnnnnnnntttcctccaaacaaatctccttcttcagcgcttgcacagctcagttcccaaattcctgcattcgttcatgaaggaagacccgatcagattagtccttgggatattttcctttcttannnnnnnnnnnnnnnnnnnnnnnnnntaacaacaataatctttacttcgtccagcgttgaagtgcttctccacctgattcaaacatgcagccacggcgacccacacagaaccttcaaagtcaatccaatagcagcccgaagatgtctgggtgtacgcgtgtgctcaagtgtctgtgactgcccc

SEQ ID NO: 150614 - DNA, 713 bp, Homo Sapiens
tttgaatgatgatttaaaaggctttatttgcagtggaacaagcttaatgctgtattcattccaaatgaaaagaactagactgctgattgtactgtaggataaggaggaaggcagtaaagctgcagtatatccttgaagcgtgtcaaagtggtatggtaaggaaaaggagagttttatctcacaaagccataaacactaaacaacttaattttccattccagaaaatcagcagtcatcaagacagcacttggtaaaacatttaagatttgtgataataacaagtactgcagtggcacgccgtgtggttctccactttgaaaccccccattactgtgaccctgttatatgatttagctacacagcaagtggactctgaggtgacgttcttttggaccaacatcgtcttcttggaccttagtggagtgggatatgctctagagaagcagcagcccatgcactgaagtattggggcacccggctgggagaagaatgggttttcctgtagcgtgcattctgggcaatcctgcacatcaggagcggaatggagaacatgcagaaacaccgacaatgtgaccagaaagaatagctgcatattttctgtagtaatccatggcgctcctttctctgggctttttgcaggatgtgttcagggcggttgactgtggatccgaagagggattttagcttcgtcttatgagttctcagtaactccc

SEQ ID NO: 150615 - DNA, 835 bp, Homo Sapiens
accatgtaaaagaggtttcgtggactagccggaatccttgcccaccatgtaggccggttcccaaactgaccaatgggcgcaaagaggtttagattattgctacccacaaaaattttgagccaaatggataatggtcatcattagtgacatcttcaccatgatgataagaaggcatttcagccactgatccagctaattgggcaacctttacttctcgcttgtcattccgtttgaagcaagtaaacaaaactttctctgacctggtttcaaaccatccaccatagaagggatagatctctcgttatcagaatttgagaacaagataagttcctttgttgatgaagtcattatatgtcagatatgtggtagtttgtccatccaagtaatcttcaggaagcccaagtaactttcgttgtcttctatcttccatgaaattagttaaccattcctttcgatcatctatctgttttttgctaaaggccaggctgatagcagcatcatcttcaggaccagaatatttgaactggatacgatgtcttttcatatctgcaaagtattctttagcttcctttgatgtgctggtgcccaaacctttgtaatatttgactttccattttttatgatttggagtagaactcttccactcttcaaattcaggaaggctgtaaaatgccatttcttgcttgtttttagatacctttacaatgggagtgataaattcctccagaaaacgatgtcgcagaagagagggccagttgtgatggataaaattaatcagcaagcctttgatgtgggaaccatcttggtcctgatctgtcataatcattatcttccc

SEQ ID NO: 150616 - DNA, 822 bp, Homo Sapiens; identical to SEQ ID NO: 63441

SEQ ID NO: 150617 - DNA, 860 bp, Homo Sapiens
ccgctgttctcaaggttagggggaaggttcaccttcctgttgtttgcaccgcttaaggatgtgcttttggccgcgaaatcgcaatgaggggggatccaaagatggagtgggggtcagcgccaaaagcgtggggcgggaagccttggaatccagggaccacgtgggctgcgcgaattaacagggccgcctccataggaaatttcccttaaaatttgcaccttcttttgattaaggcaaaatgcagccctttttctttgggggaagggaaattcccttaaaaaggaaggcagaccaccaagcagcactggccataagccacaagttcactttagggacaaaacaaggcgatgttccccaaagggaaaaattcactgcgatctgcaagccctggcaaccaaccgagagaaagaaccaggaaggcaaggacagtgatcatggttgctagagcctgctttgcacacacgtcatcaacagacagcagtcaacaagctgcctagggcctctgcagagccagatcaaccccacagcctgtgagccaggccttaagctgcctatttgtgctgaagcgggctgcagaacgacccgtgttatccaccctgagcaccaccaacactaagcacaaatgacaacaccatctcacctgaaccctgtccaactcacagctgcctcactggcctttgccactgccctctctgatggagcaagggtctggccttccaagcaaatgtcagcctcagattcaaaagacacataggaaggagcaacacccaacacactgaaaactcctgcccgatccacaaagaccccagtgcaagcgatgggcagcatcagattgatggaaaccacaccctttcatttcc

SEQ ID NO: 150618 - DNA, 819 bp, Homo Sapiens
  misc_feature (567)..(567): n is a, c, g, or t
agtgtgaaaaagtcttttattacagttcatatcttattcagcattgaaggacccacacaggagagacctttccaatgtagtgagtgtgggaaagtctttcatcacagctcagatgttatttgacaccagagaactcacacggaaaagaaaccataccagtgtaatgattgtgggagatcctctctgagttcatatctgagacaacatcagagttcatactgaagagaagccatagcagtgtagtgagtgagggaaaagctttagctagtgcttgggcctcttctgtcaccagaaaatccacagtggaaagaaactatatgaatgtgacaagcgtggaaaggccttcagatacagttcagctcttgttggacaccagcgaatccacggtagagagaagccctatgagtgtgatgtgtgtgggaaagctttcagtaacagctcacatcttttgagacaccaaagaacccacactggagaaaagccctgcaaatgtgatgcatatggaaaagctttcaggcagagctcacacctcattttacatgagcaaatccacactggaaagaagcnccggtgatgtcaagcgtgatgcaacattgttcatctatgctcattcctgtagctccagctactcaggaggctgaggcgagaagatcacttgagcccaggagtttcaggctgcagtaagctatgatcgcaccactcactgcactccagtctgggtgacagagtgagacccatctccggccagaccttttcttccgtccgttttctgcctcaggcccagggcccagctcacgtagcgttatcgggggctgtttg

SEQ ID NO: 150619 - DNA, 951 bp, Homo Sapiens
ccaggattaccctcattttccatttttccgacttttggcccagctttcaccattggtcagatgtttcattgccgttttcagggcaattctgatgttgctctgaaggaagaataaaagttaaaaagtattcactgccaccccacttttgggacaggcttggttgcaaagaaaatggtgttcctggcgctgaaggataactaggaaacccatcagggctgagctggatagctttccagagccgaagctgaatggaccagctgtaacaatgctgactgcgcagccgcattatgctgtaattcttgcaaggatgattgtgaaggattctgaggaaacccagggatacccgggagggacaaaaggcctggaaaaacagaactccctgcagcttgaagtccagatgataaaccggcttgtgcaacaagagcggagttgaaattggaactgaatgctgaggcgaatcctgggaggactggagctggggatggggctgtggcagccacaggtagtggtgtgacagctgcgactgtagagggcgcctgcagccccgggaatgagggaagagcaggggtaacgcttggggtattagagacagaaaagcctggataggagggatttgaagatgacagaggtccttgagtaacagagaaaagtgagggaacagcagtggacaggttgagggggaaaggtgctgctgagactggtgctgaagcagaaagccctgagagaacagctgccgttgagctaggatgagggagagatttggagttgccaccggtagatgaggtggctattaatgaccctgggagagatactgacggattaagagatgggttgccagttaaaggaaaattgttggtcaaagaagtaaaagaagggaagagcacgtgaatcctcggtgcaactgggaaggtggaggaaccatgtcggtgtcttgcggtacagatagaggat

SEQ ID NO: 150620 - DNA, 1061 bp, Homo Sapiens
  misc_feature (509)..(509): n is a, c, g, or t
tttgtcatgagacaagctgtatttaaagtcaactctgataaaacagtccatcaaaagagactgaaagctgacagtctttttggagccaaagaacaaagaacattgtggctcctctgttgctgccataaatgctcaatcccattactctcatgtatgttgtgggtgtcgtcaggaccttcaagcactaggcttgactctatgggggacagaggataacatggctcctagaggaaggagaactggaaaagagggatctgcaatcatcgatctgggtgttggaaggtagatggctccattttgctctcggggccttcttttccagactagaacaccaactccagccagcacaatgacaaggacaatggacccagagacagctttcatcacaagagggatagtttctgattctgttctttgtagggtgtctttcccatactccaggaatctctttagccaggcaatacattcttcttccagccaattcttttgatacagcaactcatgctganttggcctcccatgcctgcttgatggtgtgagccactttatctacagccagcccaggagagggtgtctttattgaagatcaggaaattctgcccgtcatatgcatactgcagaaatcctgtggtgcttccatcctccagcagctcacagccaatcattctctggtaagtgtgagaccctgagtgattgtagtgcctctgtaggcgcttcagttccaccttgaacatctgctgccagcccctcggcagctgagtgtacctctcccagtgatcaggcgcgaggttctctgccatccatggggcccgtggctccttctgccgagtgacactgtcatatgtggtgatagggtgcgagtccacgtacccaaccgaaataaattcagggaccccatggatgggatccgaaacgcccaggcgaaaatatctcagagagtgcgtccgggaatcgctgtgcttcaccattaacacaatgatgagaggtaacaggaacgccatcagttccccccccggccgtaatggccgaattcccgggcatatgtccggtaccgtcgactg

SEQ ID NO: 150621 - DNA, 903 bp, Homo Sapiens
  misc_feature (614)..(623): n is a, c, g, or t
  misc_feature (704)..(735): n is a, c, g, or t
  misc_feature (778)..(778): n is a, c, g, or t
  misc_feature (782)..(846): n is a, c, g, or t
  misc_feature (871)..(871): n is a, c, g, or t
gttatggctgctcctgtacgtagtcacggtctgtgctctaaggtgagtggaggacgagctgggcttagcggcagcccgtatcacatcctagactttttacttcgaggagaagagtctcacgagtggtcctggaagaaaacgacagcacgtgttctttttcactagtagaagtgacgttggtttcatgttgacaactttgaagccatttggaagtgtttcagtggagagcaaaatgaataacaaagcgggctcctttttctggaaccttagacaattcagtacattagtttcaacaagcagaactatgaggctatgttgtttgggactttgcaaaccaaaaatagttcattcaaactggaacattttaaataactttcataacagaatgcaatcaactgatatcattagatatctctttcaggatgcattcatttttaaatcagatgttggctttcaaacaaagggcataagcactctaacagcccttagaattgaaagactactttatgctaaaagactgtttcttgactcaaagcagtctcccgcccccgctgatccacccgacgcccaatcgcacaccgagcccccactctgcagccctcccgcacctgttnnnnnnnnnnaaacataccccgctcttgcctcccttatttccctgtccgccgtcacgttctttccttggactggtggttttataacgcctnnnnnnnnnnnnnnnnnnnnnnnnnnnnnnnntctacatattcgcccccgcccggcttaacatcctctcccgctncggnnnnnnnnnnnnnnnnnnnnnnnnnnnnnnnnnnnnnnnnnnnnnnnnnnnnnnnnnnnnnnnnnttcgccgcgatgcggcgccgcccgnccccgcccccccgtcaccctctctcccctatc

SEQ ID NO: 150622 - DNA, 1174 bp, Homo Sapiens
  misc_feature (757)..(757): n is a, c, g, or t
  misc_feature (829)..(829): n is a, c, g, or t
  misc_feature (910)..(910): n is a, c, g, or t
  misc_feature (986)..(986): n is a, c, g, or t
gagcagggaacgcgagctgacagccgccgcgccgccgcctccgtccaccttcctcgccggggcttcgtctttcactccttcgggctgcctccccctccccttgtcccctgccccttgccctgcttctgcagaagatttcaacactacacttgcacaatgtctttgaaaccaagagtagtagattttgatgaaacatggaacaaacttttgacgacaataaaagccgtggtcatgttggaatacgtcgaaagagcaacatggaatgaccgtttctcagatatctatgctttatgtgtggcctatcctgaaccccttggagaaagactttatacagaaactaagatttttttggaaaatcatgttcggcatttgcataagagagttttggagtcagaagaacaagtacttgttatgtatcataggtactgggaagaatacagcaagggtgcagactatatggactgcttatataggtatctcaacacccagtttattaaaaagaataaattaacagaagcggaccttcagtatggctatggtggtgtagatatgaatgaaccacttatggaaataggagagctagcattggatatgtggaagaaattgatggttgaaccactttaggccatccttatccgaatgctgctccgagaaatcaaaaatgatcgtggtggagaagacccaaaccagaaagtaatccatggggttattaactcctttgttcatgttgaacagtataagaaaaaattccccttanagttttatcaggaaatttttgagtctccctttctgactgaaacaggagagtattacaaacaagaagcttcanatttattacaagaatcaaactgctcacagtatatggaaaaggttctaggtagattaaaagatgaagaaattcgatgtcganaatacctacatccaagttcatatactaaggtgattcatgaatgtcaacaacgaatggtagcagaccacttacagtntttacctgcagaatgtcataatataattcgacaaggagaaaaaaatgacatggcaaatatgtaccgtcttactccgtgctgtgtcccctgggttaccctcatatgattccgggagcttgcaaaaccaccatcccatgatgaagggcctttcggagccaaacacgcaaaccctttacttccaggaaaac

SEQ ID NO: 150623 - DNA, 963 bp, Homo Sapiens
ggattgccagctataataaaccataaagtgctattttctgcctccattcaacactatctagcacagcctgggcacaagagctccctttttgcctccctgaagcactatgacaaataccaatcaagctgtctgcaagtgttttccttagccacctttgtcacccaccataagaaccagaattttctgtcttgcccttattaaagtgacttctccaaactctgctccaacagcagaggaaaactacagaattctacctatcagcccacagcccagatgggggcctctggcctgagaagcaacaggtaagggctacctgcaggtcactttctaggggtcagtgacttcagtgctcactgcactgtgtgagctatgagtggccaacagggctctgtaggcctcatggtgagcagggcccaccttggagggtaatgtctactggaggggtacaggaagaagagtccccaagacagcaccacgcagcaggagcaatgttgaagaggccatgggcttaggggggatgaggtccaagtcctcgtcatctggaatctcatccaggtgatacccatcctgaagcagctgccggctcacatcctggttcacattgctctgcacgatgaatacccggaggagtatctggatcccagctccccatcactgtcagagtcgagggacaccaggttttcatctggactctggctaagagcacgtatagcaccattgttaaacattcactgacgcagcttggcattgaatggagggtgcgcgcgtcaccatgtatggcccccgcttttccacggcacagcgggggtgcgctcccccagacggagggctctattaccgatctgcccggagggtggcccacgcagctcccaggcgcgcaggtcaccgagccccgctgggccggggtcccggggtagacaaccgcaaacgcgcgcaccgctgggctccgcggtcgccatgccg

SEQ ID NO: 150624 - DNA, 803 bp, Homo Sapiens
  misc_feature (358)..(435): n is a, c, g, or t
ggggggtgtgagccccacgtgaggcttggtaggactgcggacgtatttgttttcttcaagcatttggtcgagattaagaattaaaaatgtcatccaaacaagaaataatgagtgaccagcggtttagacgggttgcaaaggacccgagattttgggaaatgccagaaaaggatcgaaaagtcaaaattgacaagagatttcgagccatgtttcatgacaagaagttcaagttgaactatgccgtggataaaagagggcgccccattagccatagcactacagaggatttgaagcgtttttacgacctttcagattctgattccaatctctctggtgaagatagcaaagcattgagtcnnnnnnnnnnnnnnnnnnnnnnnnnnnnnnnnnnnnnnnnnnnnnnnnnnnnnnnnnnnnnnnnnnnnnnnnnnnnnnccaagaaggctaatcacaagggttctgaaaataaaactgatttagataattctataggaattaaaaaaatgaaaaccttatggtaatttaagatagattcaaacataagtccgaagaaagatagcaaagaattttccccaataaaataagaaagagaaaaaaagctttggttcaacatacctacagactctttctctcgaagaaaaaaccaaggacatttagaactcagggcaccctctggaaattgttgaaaatctccccccgaatcctaggggtcgcttagaccacgaaagagaaatggccaatcccggtggggtccaacttccctaatgggccaacgaagaacagggggattgggtatattgaaa

SEQ ID NO: 150625 - DNA, 737 bp, Homo Sapiens
  misc_feature (181)..(181): n is a, c, g, or t
cttccttaacttgagaaaaaacctgtgccttctggctttgccccccagttttcggtttattcacccattattcccaaaaaatatttttgaaggctctgtcatttgctaaaaccaaattttcttctctatgtacacaacttcaagttaattgaatatttgtgcaatctcagagttcaaaacntaatacatccaattttagaaatttccttcacagatccctatttttaccatggctttaagaataagacacataatttcgcaacagcacaaataattaatacccccattatgtgaagaaaactctgagctctaaatgagtctcttcttataccaattcctatgactactgatcgagccaattttaatagtttcctgtatgtttaaggtctgttgcttgcaaaccaaggcctggatggttataaaatgtactggtcagtgaattatactgggagttctctgcaacacaattcatttaggagttgcaccttggactcactcagataaatatagttttcagaagtaatggaagctcttcatcacaaaaatctaatacaatcttggagtatgtgcccaagaatggtatcaaagcaagggtccaataaacttgactgacttaaacctgtcattgtgttgcaacattcaccatcctaaggtggggggaaaaatgatcctcacctataagaattttagaagtttaatgagaaattaaaataaaaaaagtccattttctttaatcc

SEQ ID NO: 150626 - DNA, 1345 bp, Homo Sapiens
tttttgtaattttctgccccagtttattcatcttgggttggtccagaagccgggtttatacactcaatatgcaagagctacagacaaaaagtcttcagggcccacccctcacccccactctctggatctttcacccatccacctgtcagggatgaaactctttagagataggaagagccccccactttgccgatagggagactgagggccagaggctgcatcagtgacttccatgccactgttcacccaccagtgtcccctcttcataccactgctcacccaccaggatcttgcattctcttggctcccaagaacaaagcagagagctaagctaccttagtcgttggttctctccaagactcaccccctctgtaactcgcggagcctgccaatccctgtttgaagggccatgcagtgaaagaaggggttaaaattcagcatcctaagcatctccagaggcttaggctgacactgtccccttcacatcccagaaagccaacctctggctcctcctgacagtccgacttcagagaaatgaaccaaaccaattcaacatccaatgctgctaaagccagagaggcacagcaaggtagaggcagagacagggaagcgatattttcctcatcggccttggaacatcttgtctgttacttgcaagcttataaacatacattgcttttcatcagaagcttaaatgaacacggtttgcaacagctccttttccaatggagagatggtttgtttgggaactggtattttagaattcccattctgcctattccttcacagggttccactgttatcatctttcctgtccccatctcccatgtgcccaaaggcagagttcaagagggacagtcccctatgtcctctgtccccatccccaccatcatcttcatcactactcctggttccctgtccgtgataccagttctccacacactgccaaaattgcagccaaaattccatggcaggccagagcagccactaaacctcctacaagtaaagccaacatcagggacaatagcctcagctgagcaagtctgggttaagtgagggaaagggaaaggagaggtggcctgggaaatcccaggagaatgggtcagccacaaccttcagataaatgacagcatgctagccctctgtctccagggaacagtgggacccagtggagaagaaaggctggggtaggccatgaggaacacaaggtgtgggtggacacccacagtgcagctggatatgtatttgcacacacctgctcatgagtctgcctacaaacacacatgctcctaacatacacctcgccatgcctgtggccaaacatgtgcacacctgcacacacaag

SEQ ID NO: 150627 - DNA, 1434 bp, Homo Sapiens
gtgccgccggagggatggtgagcccttgcagaggaagataggatgccgcgggttccgagaaaaggggggattccccctggcagggccaagataaaaaggaatgagttccctaaagctccagcaagttcaacaggcacgggtaatgcccagcaggtccccatcagaaaccaagaacctccgggcgccaagtagggtgggggttccacataaggtttttcatgagagaggtctctcccaaaattctggagtggcccaaatccagtaatctttataaggacagtcctcttcttgagatgacagtaaaacattctctggctttaagtcacggtgtataataccgttttcatgaaggtactgcacagccaagagcatctggtaaaaatagagcttgcaggtagcttctttcaggcgtttattccccccccactttgtcaaaacagctctccccccttccatcaattcccaaaccaatataataatcttctgcatcaaaaaaagtttttaatcttgatgatgcaagggatgatttagctttttcaaaatttctatttctgtttcaacattgagagctgggtctgcctctcttgctgaaccaatagcaaacttctttttgctgatgatctttatggctactttcttacatgttttcctctcgaaggccagctttacctctccacaggcaccacttccaagagtttttgacatgatgtattcatctcttaatgccttaggataaactgactgatcatctacagtcagatcaaaaaagacaaaaactttatttctgcttagtgacagtgcaatttcagaattgttattcaaaggacggcgttttcctttccctacaagctctgtatttacaaaggttccattgccactgtgatcttctatgtatgcaatgtaagagtttttaggacccacttccctgaaaatccgaaagtgtttcttgctgtatgttcggtatttatctgttcttttcagcagtggttcatcaaagcaatattcacagcttttgtccctcccaaaccagtagttgtcattcacacattcaagattggcaaatccatcctgaagggcccataatcgagcccagggggcaggggtaggctcctcaggttcttggtcctcaggttcttggtcctcaggaatagaatagagttcctgagtggacactgtctctaaggagctcagtgtcccagagctggagtgagaggactggctggagtttggcatcgtgctggtagaggagctggatatgccctgggactgtgaggaggagccttgggactgggtaacgctgccatggggctgtgaacaggcactgctgtccatgagactgcctgagcctcaacatccgactcccgagacatcacgaccgcgtgagcccacctggagccgcacactctccgcagcctcagccagcagagtggcccc

SEQ ID NO: 150628 - DNA, 1276 bp, Homo Sapiens
agtgtgggaagacgagtcctggtaaaatgtgaaggaaagttgctcatggcctagtggttgaagataaggacttaggtgtgaagcataatgctgaaggggacgcctggctggtgggaattagattctccacacactgtcctcgggctttcaggcctcccaagtcatagcacggatggcgggttctcacctgcagtgccattggctccgcgttcttagggatctggtggcattactctccgaaggtctggctcagtccctcaattgccctgggcattccaatatcctacaggtgcagagccagccatcctatgtatgtgtggacacacatgctggcttgcctttacagtaaagagcttcaacatgtttgaaagcttggtttcaaacaggtgagctctgtgtgttagcaacagagatgctgggcttcacatatttcattgagttgaaaattaatgactgttctaaatcactcctttatgggttttaaaacgagaataatatatagtgagggtaggtaaagaaactttcccaacactgagaaatttcaggcttgtggctaccaaccagatgtacataattaaaatgagggctaggattggatttcttcaggaaaagaggcctctggtactagatggaaccagccagggaaggaagagatttgaaataaagctttggtttctgaggaatgttgccgtttgagagattcaaaaagaaagaagatccaaatttcgggactggtgtttaaattgtagtgacagattttgggggccattaaaggtatgggagtgaaaaagcggggaacagggctccccagatatgcccacgggaagacagtctcctcctacggggcagcaagcctcgggaggctcaggccatctgagcagcctccgcaaagccagtgaatccaggacgatcccaaaggctctagcccggcgtctccctccacccagggcagtctgacagacacgactttccccaaacaattcattttcctacgcagaatatgacttgaaatagtattttctctcacaagtgcagcctctccgccctagatgcatgtagctcgaagctggcctgggcacaggttgttggccctgctgtgtcttggcacttgggtggcggcacacctgtcctgtctgctcacctgcagacccacacagcaggggctgtgctctctgcttctggggactggaaaaagacacctggtgcgcgaaccccgtgcttagcacagggtagagcacgctccttcccaggctgtggcgtgttttatctatttccc

SEQ ID NO: 150629 - DNA, 1251 bp, Homo Sapiens
cggtactgacggagagcacgcgttaggtatgtcttcccatcctactgttcacctctgaagtccagctccaaatcttttagatgtcgattcagccccaggaaaaagaacggagagacatcccgcaggtaatgtggggtaggtagctccttctctttgtgtctgccttatttcaaaaaggacgcagtgctctcttttatcttcaagctgcagtcttggagtaggctttgtacctcagaatcactgttagggcagatcacgctgaaggcatctccaggctgataggaaaagtctgtatttgaaatgtccaattctaccagcagagtggtttttatggcatcattcgtagtaagttgaactgcctttgaaattggcacttgaaaaactggatctgctgaagtcacagatacttggctttcctcctggccaagagactcctgcagatgtacctgtaaatattctgggggtaaaccaggaatattcagagaggcttgtgagagtgggggtaccgaacgggtaagtgaggactcaaagtcttcaattacaacattggattggttgctgttcactgcattttgcttcaaaacctcagaatcctttcttcctgaatcatcgaatctcagaagctcgacttgagattcaatgtgtagcagctctgacttcacaaggtctgtcctcgaggatgcaggtgatgccaccgggagtgcgccacttatctcctcttgtcctctgcttgacctaaaatgctttctgagggctggccagagtccagcaatccacggctcaaccacaagttctaaacctacacagtcatctgcatgtccagtgtcatagaaatgccgggctccaagctcttgaagtcgtttatcaattatcttccccccattgcaaaagtaggtgtattctgaatcaccgagacccagtaacccataccgcaggtgagcaaagaaatcaaccggcagtgtttggttctgtatttccttaacaaacttgcgggctgtgtcgggtgggtctccggtgcccgtggtagaaaccacaacaacaagaggagctgtttcggtttttaggtcatacttatcggattcactaatacagtgaagatctgcagaaaatccatgtaccacagcttgctcacatatttcttctgcgatggcctttgcctgtccctgctgtgtagcatatagtaacagaaacctcctcatcacttcaaggcatgtaacagtgaaaccacgccgcgccagccgggcacgaacc

SEQ ID NO: 150630 - DNA, 1367 bp, Homo Sapiens
ctgagatgcatggagaccttttcagcgtggttccacagggatcctcgtggagactatgggcttcttctttgttcactataccagggataatctggacatgtcggggacattgccgctcccatgttcctgtcgggggcatccccgtcccgtagggagtctctgctcctgaggtcctgttcgttgaagcaggaccttgccggtgagggaggacgggatttgggtgctgacaatcagtcctttatagaggatgcagccagcgagaatgtgaggcgagcgctggcaggtctgcagaatgcgggctgccttcagcaacaacaggggctccactttagtttggtccaagttccagagggaattgaaaatcttatgcagatcactggtgtttttcagaatttgctcgatgaaggtgtcccactccgtgctcagttcttcctgagaacagttctcataagctagggaaacaggtccattgtaaaaattaaagaatccaactagctgatccagaaaccgcttgcagctgacatcagggagctccacagcacagcccagcacccaaaggtaatctccatcaacttttatggcaaacttcagttttctcagacgaacaagagtaggaggagagtcagaaatgtcagaaacacagcggacaactccagcaatctgtccacaaagcaactcctgttggtctagcagggtctgggaaggataaaagtaacaaatgccagctcttgttggatcgccttcttcctttaccttggaaccatcataaagaaaaaaataattccaccacgaggctgactttgcctctgtggaggtagaggtggccatctactgtgcagtcatcctcattctcttcatttaggttttcttttccggtatcacttctttctccctagctgtgaccgttcctctatgcccccaatccagtgaatctggacgtggtaggtttcagtgttttcagtcacaactgccacttggttagttttcactcagcatggaaagttccacttcccttccttgcaggttcttcagtttcatgtatatttccatgcctcttacaactcagggagaaactataacagagaatcctagcagaaaagtcaaatccattcctctggtttcctgagtatcactgtggctgtctgcagaaccacctcttcaagctcctctccaggaaagccaaaagtgggagatgcatgctagagctggtgttctaaagaaatttctagcttgtctagttcaaacccatcctgaagactcttattaaacgttttgaagtttccagttcaaacatcagtgccttggctctgcgcgcgcggcagagaggccttaggtcacgcgccgccccgcctacctccccctccccc

SEQ ID NO: 150631 - DNA, 797 bp, Homo Sapiens; identical to SEQ ID NO: 63131
  misc_feature (712)..(712): n is a, c, g, or t

SEQ ID NO: 150632 - DNA, 667 bp, Homo Sapiens
  misc_feature (154)..(155): n is a, c, g, or t
ggggctttgaaaaaataggctgcatccatcattaaagggtcagggatacccctttagcagtttttctcccatagttttatatcttaaaaaagcaacagtcattctccacccagtaagtggatgcctcatattatatgcgtctcccaaagaaganncacctcgtttcttcactgatgaaggaggaaggaagcttgctggcatggacctcagatgagaattgtcagtggttctaagaatggttctttcaggtgatcaggtatttgtgggtaaattttttcaaccatgtattctcttaaattccttggcatttctcctctaatgtcgacaagtactcgagtttcactggatgaaatctggtagatgagaactggactcgggttagctaaaataagttcagcatgatttgctttaaaactgtggtgcattcttcataagaaagcctacaaaatgagatgatacagatactttattggagaccaggcttttcctgaacttggagaaaagcccatctgcaacaacagtcagtggagcatggagttccttgatatctccagtctctttatccttgtactgaactcccatcacaacatcatcttcctctaataactgtaacacaacaccttcaataaactttgcattgggctctgccatagctgctttccggaga

SEQ ID NO: 150633 - DNA, 1219 bp, Homo Sapiens
  misc_feature (43)..(101): n is a, c, g, or t
  misc_feature (159)..(159): n is a, c, g, or t
  misc_feature (169)..(180): n is a, c, g, or t
  misc_feature (378)..(378): n is a, c, g, or t
  misc_feature (647)..(663): n is a, c, g, or t
cggcggcgtcgggatccgtgagtaatgggcggcgagcgcttcnnnnnnnnnnnnnnnnnnnnnnnnnnnnnnnnnnnnnnnnnnnnnnnnnnnnnnnnnnnccgccccacacacgcggggttgcagtagggcggggacagagcgccagaagcgagtcgngtctcgcccnnnnnnnnnnnnagataaagcgtagagagggcacggggcgagagcgattaatgaggcgctcctctaaaacccgcgatacgactccaggggagatgcggcgagaatacggcgctgagagaacgagggggcggccataagagcggcgggcgaataacacctcctataggggagcggcacggggcagcaaaacgggccgcgagtaactgtctngccgcacagtgtcgagggtgtgtagctatggggcgcgtcaagtgggagtcgccgtggggacggacgaatgcagcagagctctacggcttctccccccgcaccgcgaactaatactaaaaagagccgcgagcgccgaaccacgccctatgaataaggacggcggggggggcgccttgtgtggggcgagggcgcgcgggatactttacacagcggcggccgaacgagcacactgggcacgcacgcgtgacgtaacgcctccatggaccaannnnnnnnnnnnnnnnnaggaggcgtggaaagatcggacggccgctgagaagaaagggtgtgggggctcccgcgttggggtccgtgtagcgttagccgtaaaccagcgcgaagggagggggcgcgaacgaggctgttggcacccatctccgctttgaagcggcgctcaaagactttggtgttggccccgatcatggattctgtcgtcgtagacgcggagggacagttggggttgcagaacgtgggggtgcgcaggtcgttcggcatcacaggctcaggtggcgggagtgtgcggcaagggctgtagccggagctagcggacttgtggccactgaggagcttctgcctgagcgtgccgtccaggcgacagccgcttggtgcgcagcgcctgctcgctaagcgtcaggcccttggtgcgccctacgccgcaggctgggaagtagcgcaggcagtagtagtacaggcagcggtaaagctcctccttgtagcttattggtgtcggcggcctggtctgggcctgcggaccctaacccaccgcctgctgacactgaccggcagtctgtggccatccccg

SEQ ID NO: 150634 - DNA, 886 bp, Homo Sapiens
  misc_feature (60)..(60): n is a, c, g, or t
  misc_feature (101)..(109): n is a, c, g, or t
taacacgcctcccgccacagatctgtgccgacgaagaggtgcgcgcatagtccattcctnacccgcgatttgtcgtgtggaagagggcggaccaagcggcnnnnnnnnncgaatttggatgtctgcggaggtccggcgcggggagctgcgggtggagctaagatcccacgtaatggccgccaaggactctccttttgcggagtcttttctcaggacggctccggtttcccgccggggcgtttttttcttgggcgaggaatccacagcccctattgtgtggcgccagagattttcttagggaaaacagggtaagggccatggctcgtttaccctacgggggcccgcgggcgcaaaggaaatggttctagaaagatttttcgaggggcgagggcgggccggcaaggagattggtggttgtccctcagttttctcatgagggggttgcgcaatgctcacgtgtccaggcacgggtttcttccagatttataatttaatggctgtgcagatcccagtccctcatttctgtcgctcacgtgcccactggtctggggtcagggttttctgttcaaaggcatggatgtgcgggagctcttctgctaggcacgcgttcaccagcctgtgtctctgaagcagcggtttcccctcgaacttggccgacaccaccaggactcggaagctacaggagcaacggttgagggtcgtgtcctccacctccacatgctccgcctccaggtcccgctgcagcttctcgcggaggtattcggcgctgagttccatggcggcagtccagctggaacggcagcccagcagggacacaaccccagctcgggcgccggccacgctaccttgctgccttacaggagccacttccgctggaaaactcccc

SEQ ID NO: 150635 - DNA, 396 bp, Homo Sapiens
gacaaggttttgagtgttattatgggtgtgtgttttgtccagatttataatttaatggctgtgcagatcccagtccctcatttctgtcgctcacgtgcccactggtctggggtcagggttttctgttcaaaggcatggatgtgcgggagctcttctgctaggcacgcgttcaccagcctgtgtctctgaagcagcggtttcccctcgaacttggccgacaccaccaggactcggaagcacatgctccgcctccaggtcccgctgcagcttctcgcggaggtattcggcgctgagttccatggcggcagtccagctggaacggcagcccagcagggacacaaccccagctcgggcgccggccacgctaccttgctgccttacaggagccacttccgc

SEQ ID NO: 150636 - DNA, 323 bp, Homo Sapiens
atgattgtggatgctttctattcctttcttcttaaaaaaatacccacaagaatcacagaggttacatgtgtgcacatgtgtacatgaacgtgcacacacaattttatgtgattcaaacaactaacagacttaatttccttagaagcgcctctaacaaccaaatttaatgagggtagcgcttctcaccatcttcccccgttaagtcaggctttgtctaattgagttaatttacagagcacccagtcatactacttattatgctggtatttctaaaccctctccctccctccttagctcttgactttaattgccttgaactcccc

SEQ ID NO: 150637 - DNA, 1273 bp, Homo Sapiens
  misc_feature (135)..(135): n is a, c, g, or t
  misc_feature (357)..(473): n is a, c, g, or t
  misc_feature (498)..(540): n is a, c, g, or t
  misc_feature (716)..(730): n is a, c, g, or t
  misc_feature (937)..(955): n is a, c, g, or t
  misc_feature (1054)..(1106): n is a, c, g, or t
  misc_feature (1161)..(1171): n is a, c, g, or t
acaagattttcctattaagcctcttggtaagaggcatttgttaaaagtgcaagcttactcctgcttctggggatgtgagcaaaattcgggcttgtgttctccctctcattttagtctgacttgactattgttttncctttctggcgcatgaatccatacatcattcctggaagtgaggcaagactcttgcatctctacaaagtagttttgtcaatttgaattcagggaaaagttggtcacagcctgcaaatgacttcatttggaaggtctgattgtttcagttgcctgacaaatactacactttacaaacaatgttaacactgtgattccttcattgttttaagaagttaacctagnnnnnnnnnnnnnnnnnnnnnnnnnnnnnnnnnnnnnnnnnnnnnnnnnnnnnnnnnnnnnnnnnnnnnnnnnnnnnnnnnnnnnnnnnnnnnnnnnnnnnnnnnnnnnnnnnnnnntttttgggcagcgtggtgggggatnnnnnnnnnnnnnnnnnnnnnnnnnnnnnnnnnnnnnnnnnnnccttgtcggcccgcctcggcccctcgaggaagctttctaagaccaattcgtttttggcgccgcggggccccaagtagggaaaagtgaaaccatgggcccaatagccttgttttcccttaagggagaattccctgggcccaatgaaccataggggcctttgggatttcctacacccnnnnnnnnnnnnnnncgccccccggggcggggaaaacccggaaggcggttctcctggaaaaccaaatatcccaagaatgggggaagttttccttggaagggggtccaattttaccctggggggaattcccttattccccaacccaggggggggagatctccccacaaaggcgcggaaagggccttcccaaaaataatttcacaaaaatattttatacgcggnnnnnnnnnnnnnnnnnnntgtggccccaaactctccattttccgggacagaagaaaaaccctgggctgtcggtgaaataattttctctaattttaaaaagaggcctattttttcttnnnnnnnnnnnnnnnnnnnnnnnnnnnnnnnnnnnnnnnnnnnnnnnnnnnnncgggggggcaattgggaagtgagaaacaccccctggaaaaaattccccgccccannnnnnnnnnnaaatatttgaaggtccaaccccctgtttggggccccgccccccttttggccgcggctatataaaaaaataatttttttgggccccccccagtgggggtgtgg

SEQ ID NO: 150638 - DNA, 877 bp, Homo Sapiens
cccgcatcttctgccgtgggtgtacaggtgcctctcagagttgcgcaaggaggggtgatgcttcgtccagctcttttctgggtgatcatctgtactgggtcatggggctctaaggtgcagagctgagagaaggtgtcagaatcccagaaacgaggtgactgggtactcggcaaagtcccgggggttaccccagaggtagcctcttccatagtggttggagtcaagtccccaagtggataatcacctcctggggaggcagaatctataggagagcgaaccatcacagtgggtaacctccgggggggtgtttttactgcttgacgagcctggtatgcagcatctgtagccttcctctttacttcagcctcctcttcttccaatttctttttcgttgcaatgtcattgcaaagctcatccagtctgctgtccatgtgtccagcttgaattagttctgcatctctctttagccgtctatatctctcctgggtttcctttatcactttctttagttcttcaactcgctcagcagtcaatttccgaacaataacatcttcaacagtttccaccacttctcccttttcacctcgtttccgttttggtgtctcagtggtctctaaaagctccgagtactgggaagcacaatgtttttgagagaaccagtctggagggcggccaggttctgcaaagggcttgattgctctgctaactgatacccaattttgatcgccacttctcatgacagaagatgctaaacatagcttctctcggatggaccatggctctgtggggccagtgcttagcagcttgtgtttgcccgttcccgtcgcccctcgtgccgaattcggcgcgccgtcgacttcatactctctcgccctaa

SEQ ID NO: 150639 - DNA, 881 bp, Homo Sapiens
  misc_feature (149)..(149): n is a, c, g, or t
acgatacagtgccagtatgagtagcacatagagagcaggttgtactgtagacagtctaagcggaagatgacactgagcgcaggagtgcacatatggtgttgtgatctcccacatgtatcatggaggacccgcctactccagaggacacngtactgtcagtggccagagccacagccattcactctcatgaccccagaggtagcctcttccatagtggttggagtcaagtccccaagtggataatcacctcctggggaggcagaatctataggagagcgaaccatcacagtgggtaacctccgggggggtgtttttactgcttgacgagcctggtatgcagcatctgtagccttcctctttacttcagcctcctcttcttccaatttctttttcgttgcaatgtcattgcaaagctcatccagtctgctgtccatgtgtccagcttgaattagttctgcatctctctttagccgtctatatctctcctgggtttcctttatcactttctttagttcttcaactcgctcagcagtcaatttccgaacaataacatcttcaacagtttccaccacttctcccttttcacctcgtttccgttttggtgtctcagtggtctctaaaagctccgagtactgggaagcacaatgtttttgagagaaccagtctggagggcggccaggttctgcaaagggcttgattgctctgctaactgatacccaattttgatcgccacttctcatgacagaagatgctaaacatagcttctctcggatggaccatggctctgtggggccagtgcttagcagcttgtgtttgcccgttcccgtcgcccctcgtgccgaattcggcgcgccgtcgacttcatactctctcccccctaa

SEQ ID NO: 150640 - DNA, 291 bp, Homo Sapiens
acatgtttttctttccttttttgccgtgttttcttagtggagaagacttcatgctgcggactccctccctggggagcggcgctgccggcgggcgggctccgcaactccccggctctctcgcccgccctcccgttctcctcgggcggcggcgggggccggtacggcacggctcacagcggcggctcttctgcgccgagcctcggatgttgcttctggggaggcggaggcagcggcagcggcagcggcccggcccgtacggtcaccatcgtccgcggcagcaggcgcttgcgg

SEQ ID NO: 150641 - DNA, 287 bp, Homo Sapiens
aattatcaaacatgaatttatttagaaacaaaataaaaacatgctatttgaacaaacttttttataaagaataagttgactgaaaagcagttttaaataacatcaactcacaaatgacttttagaagccaaataaacatttctattttagagaatagtatgtaatacataacttaaaagcatatagaacacatattcctacattcttaaaaataagagattgtgattccacagagaatttttcaaatatctaaagtatgtcctgttaaaccaacaatttgcttcccc

SEQ ID NO: 150642 - DNA, 575 bp, Homo Sapiens
ccaggctgtgtctcccctcagactggggctccctgaggacggggctgtgtctgcctcagactggaaatccctgaagatgggccgtgtctccctcaaagtgggctccctcaggacagcgttgtgtctcccctcagactgcggctccctgaggacggggctgtgtctccctcagactggggctccctgaagaaagggctgcttctccctcagactggagctccctgaagatggggctgtgtccccctcagactggggctgcctgaggatgaggctgcatctcccctcagactggagctccctgagggcagggctgtctccccccttcagactggggcctcccccaaaggacagggactgtgtctcccctgggactaggttctttgtgtcttctgcatcagacagattcccatgaggacagggctgtctccccctccatctggagctccctgaaggcaatggcctctcccctcaaatgggacatttgcaccccaccccaccctctggctccccatggcgcccaggcattcctcccaggacaccatttgtcacgctttgatgaatgaaacttactaaga

SEQ ID NO: 150643 - DNA, 790 bp, Homo Sapiens
gggaagaggagaagagaacaaggacctgtttgtatcatgccatggagaactacagttctgaattcagggaaagggagggaagatagtctttgtaaaaatgagagttttttaaaaagataagtgacattcagtctagtaagacggtttcttgttcctttttgatggaagctaacactgggtggtcaggctccgttacttccgagtccccactgcccaggagaatggatcgcccttcgtctagggcaaaaacatccgagttctggttttggcatgaatgtttaacaacctcattgggagtggagaatgttttgtcacacaagttgcatttgtagggtttgtttgtttgcaccagcatgttgtccatctgactcccttcctcaaatgtgcagagttccagagtctgtttgtccaccatggtgtaagtgtcgatgctctggttgaggcacacgtggcgggcagcctggttggccctgcaaaagcttttgtcacaagtgctgcacttgaaaggcttcccggtgtgtatgtacatgtgttccctccagtggcttttctggataaatttgcgtccacatattgtgcactcgtacttccgcctcttcacctccctctcctggtcggcctgctccaggttgtcaatgtcagcaatgtctgaggggggtggggtttccgactgctgctgcccatcgatgatgggagaatcagagatgtgctgcagctcactgtcacttatcatcccggcttcaggcacttccatggcatctttcccgaggtcagctgcattgctacagag

SEQ ID NO: 150644 - DNA, 791 bp, Homo Sapiens
  misc_feature (92)..(100): n is a, c, g, or t
  misc_feature (569)..(617): n is a, c, g, or t
ccttttccccctatattggggggccccgcggggggccccaaaaggaaatgtgttttttggaaaaggtttcttcgcaggggggccgagggcgnnnnnnnnnagagttttttcttttctcttccgtagctgtcttttgacctcttagaaagctatttaaataaatatcatccaaaaaccaaaaatggaaaagaaacaagaaaccctccgagcacaaccaccttaggccaactgaatgtaatctagtttattcaaccaaaaattgagagagaaggaaaatattgaaacaaacaaacgaaagaaagcagttcttaagactagcagtaaataaatttatacaacagttcggtctgtataatatgatgaaataaatctacatcttttcttattttggtgctttgaattatacatacaaacaacaattacagggacttgttcacaaagcatgtaggcctagaaaaaggctctctgaaaccctcaacggcaactggtgaacggtaacactgattgcccagaactggtatttcctttgcagaggccaacagctttgaacaaatgattcgcctacaacnnnnnnnnnnnnnnnnnnnnnnnnnnnnnnnnnnnnnnnnnnnnnnnnnaatgcatcaaacaactgtggccagtgaaaggaaacaaaactggcagtttgtccatttgaatatcagacctagtttcttcttaatttccacactatttctcccatattccttaaacttcttggcatccttcatgccttacagctacccagatgcaataaagtcattgtacagtcc

SEQ ID NO: 150645 - DNA, 1560 bp, Homo Sapiens
  misc_feature (80)..(132): n is a, c, g, or t
  misc_feature (592)..(669): n is a, c, g, or t
ggcgaaagaatgaacgttcaccaggtggacgggttgcaccaggagccaggggtcgggcgtcagaggactgtggaaaattnnnnnnnnnnnnnnnnnnnnnnnnnnnnnnnnnnnnnnnnnnnnnnnnnnnnntctgaagcgcagtgccaccaagagtggttttaggtggtgtattagtaccggagggcgaggctgggatttacttaatagtggtagggggtagccatgggacatttgtatagggaaaggaaaagggggcaaggtggaggatagggcgtggataaagttgggaaacgcggaggtggtattgtgtaatgggaaagggcgtttatgggcggttatacggagtggggggggcgttgggtgctattgagagtgtttgtaagtgccggaggtgtgtcaagcgaaggggaccaggggaggtcgtgcaaacgtaatagccggggcagccgagggggcgataggtagtaggtaggaggcgcgggcgggggtaaaaggagaaggtccgggggccgttgtaccggaggcgtagggggggcaagctgtgtataggaacatgtgggctttagcgttttgtgcggtgtgagtgagnnnnnnnnnnnnnnnnnnnnnnnnnnnnnnnnnnnnnnnnnnnnnnnnnnnnnnnnnnnnnnnnnnnnnnnnnnnnnnccactcagctaagaggtatttattcagttgctggcacctctcccagtgtaaatctggacttggctccagagaaggtgtttcatcacagcgggggcttagtttgcttcctgtagttagtggcgtttcatggttttctttatccagtgtacaaagcttgagactttggtgcaggctcgtggaggcatgccattgtttcgtccataggagacaatgccctgggccaccttgttacacacaagagggcctccagagtcccccttaaaggaagtctttttaatctctgggtcccccacgcacaactcaatggtactgtcgtaataatggcgtaagtcagattcgcactttcgatcttcctgcactgtcatcttcacctcttgtagtgtgtgtgagtgttttcccaggggggccgtctgcccccagccggccacactgcatgtctgccctggcttcacctgggccttgttgctaggtagcctgaggggctgcacagctctggtccgcttggcctttctctccagctgcagtagcatgatgtcgttggagaagttcttaggattataggctggatgggggatgggtcttttcacagggataaactgctgggtcggctcctgttccttgatattgtgggcccccaaggtgacatttatggagcttccccaacagtgagcagctgtcagcacgaagtcgtctcgtatcaggaagccaccgcacctcttcagagacttctgatcccagatcataagataagccatgtaggggcgggagtggggcttggcctcatgtcccccgatgatctcccctgcatctgccctgggcagcaggaggaaggccagcagaagcaggattggttgcatcttctcaggaaggctgccctggttggagctcccc

SEQ ID NO: 150646 - DNA, 551 bp, Homo Sapiens
  misc_feature (119)..(133): n is a, c, g, or t
  misc_feature (441)..(453): n is a, c, g, or t
tcttcctccgcgccgccgccggtggccattttacctccttcccagcatcctccactcgctcccgcagccaaagggcgcccatcgcgcgcgcccgcccgccggggctgtgtgggtttggnnnnnnnnnnnnnnngaaatttgacgctaccctcccccgccgcgccctcaaaggtatcacatgcggcgcatattggccagcgccggctctgcgccccctgcgctgagcctctcttccgccagcgctcgctccaacctcacctccgtccgcagcgggatggggcgcccggaggcggccctttccccagcgcgggtttggcagcctccggcctcgctctcgaggatttggcgtttcgcaagcggtgctcgacgatttcatgctagcagctttgctaacggcccacagcccacaggcgggacggagttcggcaacatctctcccannnnnnnnnnnnngtaccttttctgttaaaaaagcaaaagcaatagcaaaattaaaacttagctttccgtttccccgcaacagagcaacagaaagtacaaaaacatcttgt

SEQ ID NO: 150647 - DNA, 552 bp, Homo Sapiens
ttttgccatagttgcttttatttttccctaaaaaaaagagtccatttttttatacagacattcatttatgtaagacccacatcaggctttttctaaagtgccaaaacccgtgcaatccccataacttcaggtgagaattataatgggcagaagaatgtatcaactaaaatactcaaggccatctcaaatcctgaagagtccctggtttctgtgacaagggggaattttgctagcaaataagtaagatccaggtaaatatgctctaaatcttcatcttcaggttcttaattctttaacatattgtatcagattttgtattcaaatctaattatattttgtaaaaaatgttttaaaaattcctagataaatttcattcattaattttctattttattctctatacccttctttgttttgtctgtcttcttttctttccacaaattcccaaggacaatccctaaaaaaactattagtcccagtgttcggttggagataaatttattccaacaatcctcaggtctgtggatgtctagagtgtaaatctggtgagcc

SEQ ID NO: 150648 - DNA, 484 bp, Homo Sapiens
aagcttctcaaaacactttttaattctccatttttcccatcaagaccaaagttgtacaaacaggtacaaaatcccccaccttcagggtgtgaggcatcactgtgtgtggtcaaagtcccatctcctcccctttccctttccacgagttttcaagatgtggcccagtcagtgcattgctgccttctatgacctatgaaccatgggcagcaagaggactggtgaccgggggacatggtgaggtccagtgtgccaggaacatggtaagtgcccacattgcgggggagggaacaattcagagacaggctcagctggaggccgcacagaggagaaatgtcactctgtcccatcttccctgcattcagctgagctcagaccaagtgagcacctaagaatcatttacccccaaaggatgtttcaagtgagatgcaatgttctctaaccattattctctcagaaattaggggtggcggggcgggaatcaagc

SEQ ID NO: 150649 - DNA, 1398 bp, Homo Sapiens; identical to SEQ ID NO: 8007
  misc_feature (108)..(206): n is a, c, g, or t
  misc_feature (395)..(403): n is a, c, g, or t
  misc_feature (556)..(556): n is a, c, g, or t
  misc_feature (678)..(678): n is a, c, g, or t
  misc_feature (683)..(683): n is a, c, g, or t
  misc_feature (822)..(822): n is a, c, g, or t
  misc_feature (953)..(953): n is a, c, g, or t
  misc_feature (962)..(963): n is a, c, g, or t
  misc_feature (965)..(965): n is a, c, g, or t
  misc_feature (982)..(982): n is a, c, g, or t
  misc_feature (1009)..(1009): n is a, c, g, or t
  misc_feature (1032)..(1032): n is a, c, g, or t
  misc_feature (1159)..(1159): n is a, c, g, or t
  misc_feature (1247)..(1247): n is a, c, g, or t
  misc_feature (1261)..(1261): n is a, c, g, or t
  misc_feature (1302)..(1302): n is a, c, g, or t
  misc_feature (1307)..(1307): n is a, c, g, or t
  misc_feature (1358)..(1358): n is a, c, g, or t

SEQ ID NO: 150650 - DNA, 1840 bp, Homo Sapiens
  misc_feature (323)..(347): n is a, c, g, or t
  misc_feature (962)..(1002): n is a, c, g, or t
  misc_feature (1049)..(1057): n is a, c, g, or t
  misc_feature (1536)..(1536): n is a, c, g, or t
  misc_feature (1561)..(1561): n is a, c, g, or t
  misc_feature (1689)..(1689): n is a, c, g, or t
  misc_feature (1698)..(1698): n is a, c, g, or t
  misc_feature (1711)..(1711): n is a, c, g, or t
gggaagtagtggtggtacgggtccgactgaggggtactcgccaccggctgcgtccacccgagcggctgcgagagccaaggcccgagggggtgggcgtggcggccgccgaaacacaaccccctctgttccctctcttcgcggagcggcgccgcgtagcttccatccgccagctgccatgagcgagcgcctccgtcccaggaaaaggagaaggaatggcaacgaagaagacaaccatcttcccccccagaccaaaagaagtagcagaaaccctgtctttcaggattcctgggacacagagtcttcaggcagtgacagtggtgggnnnnnnnnnnnnnnnnnnnnnnnnntcaacagcccggacagggccagcgggccggaaggcagcttgagccagaccatggccggatccagccctaacacgcctcagcccgtgcccgagcagtccgcgctgtgccaaggcctctacttccacatcaaccagaccctgagggaggcccacttccacagcctacagcaccgagggcggcctctgacatgatgtgccggcagtttcttgccttctgtgaagggacagcgctgtgcagatttgatatttcaacttacaacttgtttttaaaagaaaaattgcacacgaaaaatgcctgttggcttttcagtctatatttgaaataacaggttaacaggcagttgtttacttgtggttttgctgcactattgcaatttcaaaggggctttgaagcaattttttataggattcttttgagggagggtatcaaatctatgtcaagggtagtgggtttgaggaaaactcattctgtgtgttgaattcatagtatgttccattcagactgattttcaaatctgtccactagaaactctactttatgtaaagggccttttaaaaatggcgggatcttcaattttttttattcaataaactactacagagtaaaacccacacnnnnnnnnnnnnnnnnnnnnnnnnnnnnnnnnnnnnnnnnnggcgattctctgcacgcaagacgccgaacatgcaccccagggccggnnnnnnnnngccgccccacaaaaagcctttcccaaaacatttgcggttggggcccgcgggccccccgggcggtatagggtgacacggcggcacaaaccttgttttccccaaaggaaaaaacccccggggaccatcggaacaaagggggcttgggtttctcgctccgccgcgaatgaaaaaaaccccccccgcggcggctcatcctcgtcagcgggttttctcggaaaacaccctcctccccctcgtcggccacctcctccggagaggcgccccttctcaacccgtggggtaatccggtgaagacaaaaacgagaggaacatcattccacaactgagatagagaaaggtatggtgcgtgatgtagtctcgcaacatatccttattgatcccctcatccacacctctagctttttcggaaccccctctcaccctacgcgcgctcatatacatcgttgggggtggggacagcaaccggatattctttagtntaggcccccattgttgtcattttcntctcttacaatgtcgcgtcctgctgtgcccactgctttcccgcgtaaaaaggcgggcacttggtgtctcgccgggcaccaccacgcgggaggaactctgcgcgccccaactgcgcgctcatatctacngatgaaaancacgaatatacgnatcttcaaccttatgtgcgaggaatataaaaaccaatatctcctgcaacccccggaggggggggaaacacacgcacggcgccgggggtacaaaccggagagaaagttatttacccgcacccagctgtgg

SEQ ID NO: 150651 - DNA, 522 bp, Homo Sapiens
  misc_feature (279)..(303): n is a, c, g, or t
gaaacacaaccccctctgttccctctcttcgcggagcggcgccgcgtagcttccatccgccagctgccatgagcgagcgcctccgtcccaggaaaaggagaaggaatggcaacgaagaagacaaccatcttcccccccagaccaaaagaagtagcagaaaccctgtctttcaggattcctgggacacagagacagtacctgtaatgagaaacagtaaagaaaacagactaagaggaaacaaagcgttctgcgcgtcttcaggcagtgacagtggtgggnnnnnnnnnnnnnnnnnnnnnnnnntcaatagcccggacagggccagcgggccggaaggcagcttgagccagaccatggccggatccagccctaacacgcctcagcccgtgcccgagcagtccgcgctgtgccaaggcctctacttccacatcaaccagaccctgagggaggcccacttccacagcctacagcaccgagggcggcctctgacatgatgtgccggcagtttcttgccttctgtga

SEQ ID NO: 150652 - DNA, 1056 bp, Homo Sapiens
  misc_feature (49)..(59): n is a, c, g, or t
  misc_feature (266)..(270): n is a, c, g, or t
  misc_feature (272)..(299): n is a, c, g, or t
gagccttttaaaatttcctgtaagggaagttttttcccaatttaagttnnnnnnnnnnnagaatgttagggttcctttccccaaagatttccccaggtttagccgtttttccccagttcaggacgtttttaaaagcgacgggccaagtccctaggtttattattccggcttcccttataggggcccccttttgtcccaagaaaagcggggtaccgcgttaaccttgggcccctcggagggatactttagaagcggccgcccctttnnnnntnnnnnnnnnnnnnnnnnnnnnnnnnnnnttttaggggccccaatgcaactttttatttccaagcagagtccccttcccccagcatggtcacacacacagtggaaagggatgtcagggtctgggcaggagcaatacccagacctgggcaaaaatatagatatcattatatacacacgtggactggaaagaagtcaagctgggggtgtaaggtagggcaggggcaggtgaggaaagcagctgggggggccccaataaattacattcttgagagagcatagtgtgtgggggggtgcgtgggtgtaggtgagagctggtagccaggacactccaaaatgtgccaggcctggcctcttgaccccatccaagggaggcggaaggccgagcttctgcccggtgcctggcttagtgctggaattcccatttcgtggcctggaggcaggtggagggccaggatcgtgtgtaggcggcatctccaccctaagcccaggcttctggggaagccgcagggctggagcaaaaggcttggaagctcggggtttgcgagcggaggtcagggcaagctgaagtggaggggtgacctccctgccggaggctgagctggggcctgttcccactagagtcagaggagcaggaagctgcagtgcaggaaagctgtcaggagtgagtatgggagggctgggtgggcgacacaagagcctggagctctttctgcctggccgcttcccacccctgcatcttccctccagctgtcaagacagccaaccggatcccgggaattccggacc

SEQ ID NO: 150653 - DNA, 406 bp, Homo Sapiens
  misc_feature (154)..(212): n is a, c, g, or t
ggggggttttgttattcatttttatcttgttcactctctggattatacagttcatcatcttgttctggtacttcagttaaaatatcatccagaacattaagttctccatctttctcctcccgactgtcagccgccatggctccccttcggtttnnnnnnnnnnnnnnnnnnnnnnnnnnnnnnnnnnnnnnnnnnnnnnnnnnnnnnnnnnncagaagcacgggcccgtccgtcagtccgtctgcccggatacgcgcgtcgcacttggcctcttaacactcagccttctcgactcttcccgctttttccctttctcccttcctttcactccagcatccagcggcctaggcccagccttctcgttagggctcagactcgggctaggtatgggggagggaagggaccc

SEQ ID NO: 150654 - DNA, 858 bp, Homo Sapiens
  misc_feature (34)..(34): n is a, c, g, or t
  misc_feature (154)..(154): n is a, c, g, or t
ttggctttacagaagacacagtcacccaacaggngggttttagatgctttgggttccaaatgagacttttcaattgttaaaatgaacgatgagccacaaaatccagcctcattatgcaaagaccactggagaagtgtcagcagtcacatgaaanaaaagccgagaggctgactttcaaacaaactgtggattgtactttaaatgtgtaacaccccagagcagctgtacaatgaatgacatagaatctttcttctagacaaagattaggaaaaaattagtacattcacgctttcaacagaaatacattacatattttttcagttttgttttacagtcatagacacaatcatattgaaactacatatggataaattgtaagttattaagtaatgattttcatttgtattacatgatgagtttcacaacatgaggattacatatttcaatatggcatatactatttttgaaccacataaagcaatatagtacaaaataatgtaacagttactgtaaagtcagtaatgccacttggcaaatacatcaaatatgccaccgaaaaccagtcaaagcatgagacatgacatctttcatttctaaactataagcagctttgaaggaaggacattaggacacaaaagggaggtagttactttaaaaaattcaaaattagcttttcaggaatttcataaaacaaattatttttcagcggtatcttcgccatatagtttttcagataacgtggaaaaaagatttttcccccaggatttgtgaagtgtgcacaaaaaaactcagactacattttgaggttatccaagtgaagcgtaatttgaccataactattaaaggttattttttacc

SEQ ID NO: 150655 - DNA, 813 bp, Homo Sapiens
  misc_feature (52)..(52): n is a, c, g, or t
cccttttttagatttttcatgaaacaaatattctaatttggcttccatttantggggcattgccatgaaaggaggccaagggctcccctccaaataaccactggtgtggtcttccgcaatggggggcttcttgaaaagatccctgtgtactggtggaggaaaggaatgcatactgtgagaccgttggaggcctgaccattcttcacaataggctcattatccttgctgctgttttcttcaatagtcatttgttcagccaattcagacaatgattcatcaatagtctgacttcctcggagtgtgagggatagccttctcttaaattttttcatcctatcaattgaatgtggcttgaaaaatccagcaagagcggggaccgcgggtcccgaggcgaggcgaagagaggcgcggggggaagctgctccgcggacgcccgcggcgaccggatgcaagtccgggtctcagcggccggcagacgtgaggcgcttccgagcgcaggcctccgccgccacagccgccttccggctctcgccgcgggtccggagcctcgggaggggccgcgggtgtctcacgcgttgccaagtccctcggtcaacatggctcccgcgccgacgagccgcgcggacggcccactaatcccctcggagcagccgggcgcgagcgcggcgggcgccgacggcgggctgagactgtctggccgggcgctggctccttctccgcggctctgcggcggcccgcggggagctcaggagactgcgggcggccgcgttcgctccttgcgtgtgcgtcgctttcacactcggcggctgcccc

SEQ ID NO: 150656 - DNA, 387 bp, Homo Sapiens
  misc_feature (242)..(242): n is a, c, g, or t
cgcagtcacaaatgtttatttggaggacctgacagccaggtctcaattgctaaagtgttgccacaagaaggaagtattaggcttgtcctgtgtggttcctgagggcaaggccaggtttgatgggcaagggtgacaagaaacccattttagctcaaggtgaaggaggatgttcaggttgaagctgcccaggagaggaacaggattgctgataaagaagtgtcctgtccctgcatgggttccancagaggccaggtatgcagggacgggcactgctcaagtgctttccctccctgcttgtgcttaaagtctgattctagggaagactctggggctggtgcctcctggaggccctctgcctctgtccctacatcatttcctctggaactc

SEQ ID NO: 150657 - DNA, 775 bp, Homo Sapiens
cctggatcctttaacgtcttcctccccggccagttgtcgggtcttcctccgctgtgttccacaccatcctcctcacaagcctctcccacgccttccccttcattgctgctgtcctcgggctggtacatgaaactgacaccagcagcctttgctgccaagccggctgctttcttccttttaatttgctgtttctttttcagtttcctttgtttatttttgcttattgtggtgcccatctgtgtgctgtcgctgagatttctcctgtaacagactctgctgtttctcgtaattctgcttgttctataagaacattattgggatttttaaattttttctttgatttatgcttcctaattcttcttctctttggctggtcatgaggatcctgatcttctgtgtcatccccgctggaggcgttctcggggctcccacagctgctgggctccggccaacaggggacgtagccctcaggaggcccgctggcagtgtagagccgtcgggcagtcggggtctcagagccagtgtctgtcaaaggctcagcatgtttctggctcactttctcagaggtcactttctttggtggattttggacggccagcgtctggggttccctctttccttggccacttggaacaggaggaaaaagtctctgcagcaccttctccacaaacacgtgcttcctgtgcgccgccatgcgggaccctgccgcggacctcagaccacggcgcgcggtcctgagctgagcgccgtgccttccgggttccgccctcctccc

SEQ ID NO: 150658 - DNA, 443 bp, Homo Sapiens
tttatttttgcttattgtggtgccatctgtgtgctgtcgctgagatttctcctgtaacagactctgctgtttctctaattctgcttgttctataagaacattattgggatttttaaattttttctttgatttatgcttcctaattcttcttctctttggctggtcatgaggatcctgatctctgtgcttaaaactgcaaccaaaaaagctcaaaggctcttccttcttgtgtgccgtgttcccacactgaccttggagggtcagagagagaggggtcccatccttgcttctcctggcctctggctcctgagggccctggaggctccatcggctctgcagctgcaaggctgtgcttggggcttagacgtctgggcatattctcttcctgtgtcatccccgctggacggcgttctcggggactccgacagctacccggggacgcg

SEQ ID NO: 150659 - DNA, 773 bp, Homo Sapiens
ctcacggctcttcccggcgctctcctggctcccttctgccccagctccgtctcggcggcggcgggcagttgcagtgtgtgcagaatggctgacctcagtcttgcagatgcattaacagaaccatctccagacattgagggagagataaagcgggacttcattgccacactagaggcagaggcctttgatgatgttgtgggagaaactgttggaaaaacagactatattcctctcctggatgttgatgacgaaaaccgggaactcagagtcaaagaagaaaccgtgctcagaacactagccagcattgaagatactccatcttctaaaccaacactcctagccaatggtggtcatggagtagaagggagcgatactacagaagcctagcgtgtctctcaacactggggctgctgcaacaccagaccagtgatctttcctaagcatcgttatacttctaaaaccttcagcattttgcagagctttgcttttcattcctggacatgatgtagaagaaactgagggtagttcttcggggcctatttctgctgatgcctgagcaaacaacctgcttcctcttgtgctctgcagggtttgatggagcctcatttccctttgtgaacacaaagtgcaaaatgaattcttcgtaattttagtaattttgacaaaggttatctaactgtcttctgattccctgataaactatactgattctatcattctgattcattctcacattcgcagccctttaacctctcccacgttgaccttctaac

SEQ ID NO: 150660 - DNA, 809 bp, Homo Sapiens
  misc_feature (121)..(140): n is a, c, g, or t
  misc_feature (241)..(261): n is a, c, g, or t
ggggggaaataacccaaccccgtctgtttctagtcccccggtgtttttctagggaaccacactatataggccccgttttcccttacaccagctggcgccccggcggggccccaagggaggnnnnnnnnnnnnnnnnnnnnaggggggcgaagggtgaccaaaaaatttttaacgggatggcggtcatggaagtagataaatcaaagaaggacgaggggaggtagtgggtgttggagttgcnnnnnnnnnnnnnnnnnnnnnagactacggagagggggttgggggcgaggtatcatctagaggaaatgtttcgttttatttttgctcataacctcccaaaaaaatcagtaccccgccatccctcacccagacacagcccctctccaacaccttcacgaaacactgattttttttcttagagctaaaatgaacacccagtcaccaactacagccctgccctgcccctcctcccactggcctgctcatcttcccgcactgcaaacctggctgcctttagcctccctcccttagcgtagtgtcccaaggtcacctagcctgctttttgcctgtaggatatgggtccccttctcaaagcccgccctgacttacttcctcatttgcatagtccttcagctctatcctgtcgccactccacccaccccagacaaccacctgtaagaaaccaggtttgaaattcaagagaccaggtttccaagctcccagctgcttctctgtgggcctcggtgcctcggctgttatgtgacgggcatagatattgactaaggccaaacatttcatgatttggacga

SEQ ID NO: 150661 - DNA, 761 bp, Homo Sapiens
ttcaggcgcgcgggcgctgcgactcccaccggtttttttggaaataaaatatttatttcagataaagttaatatttccataattaaggtaaagcaaacatatatgcttgagtccattatttaaggactataaaatgacttccatgaatattagagttcctgaatgtcatttgagtatctgcctacatgcttgttggaagcttctgtagccttttctttgtaggaattccagtttttctgaattcttccctttccttcaggtattccattttgcattcttcataaaaggctggatcattatagtaagcagttagacattctttcaatgcagaattttctttccggcattttactaccataagaactccagagttcttgcaacatttggtaaaatcttgaacttgttcagaacacctctctttggccttttctctcattattttagggatcaaaacatctttttcgacatgtctgagatgctggtctttcccaggtcggcatccagcccgcatggcccgcggcgtgagacccggggcgaggcccctcggcaaaccccgcttcccgccccggtacctgcggggtcgagcgccatctcggcgggccgagaagaacgtagccgcttggcggctccggggcacgcaggaaggggagtggaggggaggggcttgggctcggacgcacgtgcgacccccgggagcttcccgcaacagaaacacgggccctttgcaaagcaccgccaggacccgttccctcttccttccc

SEQ ID NO: 150662 - DNA, 603 bp, Homo Sapiens
  misc_feature (15)..(15): n is a, c, g, or t
  misc_feature (46)..(46): n is a, c, g, or t
  misc_feature (48)..(48): n is a, c, g, or t
  misc_feature (52)..(53): n is a, c, g, or t
  misc_feature (55)..(55): n is a, c, g, or t
  misc_feature (60)..(61): n is a, c, g, or t
  misc_feature (64)..(64): n is a, c, g, or t
cgacaattttaaaanaatctttaagtgtttcaaagtggaatattcnancggnncnctagnnccngaaataaaatatttatttcagataaagttgatatttccataattaaggtaaagcaaacatatatgcttgagtccattatttaaggactataaaatgacttccatgaatattagagttcctgaatgtcatttgagtatctgcctacatgcttgttggaagcttctgtagccttttctttgtaggaattccagtttttctgaattcttccctttccttcaggtattccattttgcattcttcataaaaggctggatcattatagtaagcagttagacattctttcaatgcagaattttctttccggcattttactaccataagaactccagagttcttgcaacatttggtaaaatctgcggggtcgagcgccatctcggcgggccgagaagaacgtagccgcttggcggctccggggcacgcaggaaggggagtggaggggaggggcttgggctcggacgcacgtgcgacccccgggagcttcccgcaacagaaacacgggccctttgcaaagcaccgccaggacccgttccctcttcccc

SEQ ID NO: 150663 - DNA, 533 bp, Homo Sapiens
  misc_feature (151)..(202): n is a, c, g, or t
  misc_feature (280)..(327): n is a, c, g, or t
ggtcaacacatgcattttgctttattcatttgctttatcttatggatctctccattttgtagagtattccattgtatagctgtacagtaatttagataaacttttgtattgatagccttttcttttggagatgggggtctcactctgtcannnnnnnnnnnnnnnnnnnnnnnnnnnnnnnnnnnnnnnnnnnnnnnnnnnntgggctcatgccatcctcctgccccagcccctgagtagctgggacaacaggtgcatgccaccatgccttgccgagttnnnnnnnnnnnnnnnnnnnnnnnnnnnnnnnnnnnnnnnnnnnnnnnntggactggtctggacttgagattcagaccagatctgtaagccactgcacccggccttgatagccatttgttttcatacacagcagcaattagtagccatttaagatatctgtgcgccagcctacaagaaatacaaatgtacagggtaaaatcctagctggatcaaatatgagctttgtaaatttttaaaaacttttttattgagtt

SEQ ID NO: 150664 - DNA, 832 bp, Homo Sapiens
aaaaaagtgctctgccataccttcaaggggcatgtctttcccattaaaagaaaatgatggttaaaccattatattaagggcaaaagcttatcttcccatataaaaactgtgaatacggaaaatccaatatccaataaaaggcttttaatgttagacttcttgtcacctgatgctgtcaacttgatcagctcatgcaaccttggtgttccaacacacagtactcttctgaatccgagggcagaaagtaagtctaccaagaactgacagctccgatcagcaaacagatactgggcatttgtcttcttgttttccagtggataaaggagttgactgggccttcttaactgggtaatggacacattacccagaacctgatgctcactatgttgcccccagtcatctggtaacaacaactgctgacatgtttgacaaaactttctctgagtcaagggcaactcaataaacttcaagtacctttccacacactgcgttcgggacaggggaggctgacatcttcggttatgagcttctcgggcagcaagtctagctcctgacaacttttcatcttcccactgaaaaaaattacagtcttttctatctctacaggctgaacaggcataaaacctccgagtttcttctttcccttgggtcacctttacaaacagaagagtgggtccgtgagggcacagcggggcggggacggcaggatccaaaggaagcaccacctccattcccgagcttccccggcaccctgcgctgccctctgcctccacggcttcaaacccattcctggaggccgccatcttcccgccgccgtcccgaaagcctcccc

SEQ ID NO: 150665 - DNA, 483 bp, Homo Sapiens
  misc_feature (177)..(186): n is a, c, g, or t
ccaagggagagggtcgaccgggttgaacactggagggcagaaattaactgtgcttattgtatatcatataatgtagtagtaaagtttgtttggagtgcatgaatgaaaagttagtgaaattacaggaggaacaatctatatagcaataataggtgcattccctgtgcatctgaaagnnnnnnnnnngagttttcactcattttggcctaaaacttagtgttcaggttcccaggattctgtcatcagaacccggatagcgctgattagagccataggggctttacaataaaagctaaaatattgaccatatgatggcaaaaagtcttattttgtggttaacttattctcttctagctactctctgatgaagttggtggtgctgtggaagaggaccgccgcctcctggacgaggaccgggaccgctcagcattgtaagtgacgtgcttgtcgtagctctccatctgagcctcaatgaaatctccc

SEQ ID NO: 150666 - DNA, 533 bp, Homo Sapiens
gtgttaaattcttttatttttgtttaaattttcacttcaattttaattcttgaagaacagcctcgacaacatatatcgcactcattataagaagcaaagggttatatcaaaaattattagtatagaatcacaggaaatctggtttggaaccagaaaaaaatacaaaacagatatagatacatagacacaggccaattttttataattatttggaaaatgttattttcccctaattcttgtttcctttttctttatgcgccatacgatgtttaaattttacaaaaaatgaaaataaagactagtattttacaaaatgaataacaatgttcagtgtgtgtgtgtttctacataggcttcagtccacttccatatgtgttgttcctgtacagacgtatatccacatccgtccacaataaatcctggaaggtccattagtttccttctgtttattaaaattctcatgtcctctcttccaatttgttttcttttttcaccagacagaccacagggttcttttttttggtgggttggtt

SEQ ID NO: 150667 - DNA, 541 bp, Homo Sapiens
ttggcattgtttttcacaattattctcctgaaggttaccctgtccaaaccccacagagcaccaggagaggtagcagtgattgtagctgctctgggtgtattgtacattaaggccagttcgccgaaactcccacgattatcatagttaccaacacatcttccaacaccatcacatttcacataaatatcaaatgtgcctctatcaattacataaaagttgtcaccatcgtcaccttggatcaattacatgctcccccatctttgaccaatttttcaaaacatggcatctaatacttgagacatctgctccggatccagattcttaaacagcaggatgtctttgcaagcctcttgcaacctatttctttgatcatcagtttttggatgtataatcctggactctgcatcatcttcttcttcatcaggattataagcttctgcacatactgaggcacgccttgtgaatcggtttattactggagcattgaacgcccctgcgtcagcgggcgccgcctcctcctcctccccgtcctcggagtcgg

SEQ ID NO: 150668 - DNA, 482 bp, Homo Sapiens
atgtattaatttagttttttatttaaccagtgaaactttcatcaaacaataaacggtttccttttagattcaatattgtggcttttccagaaccagcatgttccctttcctcagtaaacgaggaatccataaaacaagtttttgttggttactaccagagtcatgtgcatgctacaagtgctgcagccagctgggcgccgtctgggtgtagtgtcattttaagtattttggggtgggatgagggagagagagcagctccacagacaaggcagactgccccagtgtctccatcgaggctgggggacagctgctgcccccactggagacagcggactgtccttcagtagaagacaggtggtctgcatcgcccagcggcagcgcagcacagaatcaagacaaagcacacgagatcccactgcacttcagagggagcagtgccagagtgcgagtgagaagacaaaggaacaggaatcctagtttta

SEQ ID NO: 150669 - DNA, 718 bp, Homo Sapiens
  misc_feature (51)..(51): n is a, c, g, or t
  misc_feature (66)..(66): n is a, c, g, or t
  misc_feature (75)..(75): n is a, c, g, or t
  misc_feature (175)..(175): n is a, c, g, or t
gtaaaaggcccaggcattgggcttttgggcatttctctaggagctgatatntgtctctcaatggcntcattctgnaagaatgtctcagccacagttcccatcaatggatctgggatcagtgggaacacagccatcaactataagcacagtagcattccaccattgggctatgacntgaggagaatcaaggtagctttctcaggcctcgtggacattgtggatataaggaatgctctcgtaggagggtacaagaaccccagcatgattccaatagagaaggcccaggggcccatcctgctcattgttggtcaggatgaccataactggagaagtgagttgtatgcccaaacagtctctgaacggttacaggcccatggaaaggaaaaaccccagatcatctgttaccctgggactgggcattacatcgagcctccttacttccccctgtgcccagcttccctttcacagatttactgaacaaacatgttatatggggtggggagcccagggctcattctaaggcccaggaagatgcctggaagcaaattctagccttcttctgcaaacacctgggaggtacccagaaaacagctgtccctaaattgtaatgcatttgtctgttgttgacatgagagattcaagatcagattctagtgttcagtaaccctatgtgaatcagatgtctcctggataacattaaagccatgtctttgtcatc

SEQ ID NO: 150670 - DNA, 825 bp, Homo Sapiens
  misc_feature (233)..(248): n is a, c, g, or t
  misc_feature (327)..(327): n is a, c, g, or t
ggggtgcgggagaaattgccccgagcgccctattttgtctatagtggctcagagggttttctctctctagggggaaccgagatttttggggcccatagtgcgcccgtaaccgccaaaggggggggccgcggcgggcccaaaacaagaaatgggtattaaaaaaaagttttttcaggggccgcggggcggcgcccccacaaaaaaacctactaaaggtatgatcaagaagaatnnnnnnnnnnnnnnnnaaggccgcagacgggtggtgttaggtgtgaggagggcgaggtgcatacggaggcacaccggtgttctcgaaggggctgntgtataatatcgatctcttttaatttttaggccaattttgagtagtcaaagtcagagcagtcaatctgtgttgtgagccgaggcacagctgcagaagcgtgtctgaggtgtccggtggaggtggcagccgagctctgggactaatcaccgtgctggggacggcaccgcgtcaggatgcaggcagatccctgcagaagtgtctaaaattcacactcctcttctggagggacgtcgatggtattaggatagaagcaccaggggaccccacgaacggtgtcgtcgaaacagcagcccttatttgcacactgggagggcgtgacaccaggaaaaccacaattctgtctttcacggggggccactgtacacgtctctgtctgggcctcggccagggtgccgagggccagcatggacaccaggaccagggcgcagatcaccttgttctccatggtggccattgcctcctctctgctccaaaggcgaccccgagtcagggatccc

SEQ ID NO: 150671 - DNA, 314 bp, Homo Sapiens
  misc_feature (252)..(252): n is a, c, g, or t
  misc_feature (271)..(271): n is a, c, g, or t
ggaggggcttaaaagaaactataaagttttatttgaatgaacactatgcactgctgtaactggtagtgttcagtaaaagcaaaatgatagttttctagatgacataaaatttacatttaatacagataagtgttcttcagtgtaatgtgacttcatgctatatatcttttgtaagacatttccttttttaaaaaaatttttgcaaataactgatctcaagtatatgtcatttactcaaaatctgtcataagnattactttatagctagtgncagtgcatgcacaggcttggtcaactatggttgccggcttttt

SEQ ID NO: 150672 - DNA, 591 bp, Homo Sapiens
gcttttgcagaatgtactttattgacaagtgaatcaagagaaatagacatacattgaactcctcaagacccaggcagagtaggtatgtctttatgaattaaaggaatccaccagcaaaagtataagcagaagtgagaaaagaaggctgcaaaagctggcaagtcaccaagaaacattggctttaactcagcattttccaggatgctttaggctaatctttccaccacttttcactatggccttacagaaggcacatttattgccatatgtctggccatcagagccacagtgtgggttagattcccgagtgcagtagaccttggtgtcctggaactcaccacagtcaacctgtcctccctgactgaagacacctgttaaaaagcagaaaagagccagagagaggagcagaaacatgcctgacagtttcattgtgtcagttagctcactcagatcaaggctgctttgtccagctgaggttctctgtcaagacaattcccagaaagccctaaaatacattcagaccacatgagtcctatgcagtttatgcatttaatggggcctgccaacacattaaaaaaatgcttcatgctc

SEQ ID NO: 150673 - DNA, 1131 bp, Homo Sapiens
  misc_feature (426)..(426): n is a, c, g, or t
  misc_feature (445)..(447): n is a, c, g, or t
  misc_feature (450)..(450): n is a, c, g, or t
  misc_feature (452)..(452): n is a, c, g, or t
  misc_feature (455)..(456): n is a, c, g, or t
  misc_feature (460)..(533): n is a, c, g, or t
accgcgggtgtattccactccgacggggtcgggggggtggtggtgttcgcaatgccgcgcgcgcaggggttgttgaaaatccctttattcgcccaagtgccctggtgtatagtcagtgtcgggtgtgggtgggaggggttatctccttgattggggccgaccaacgcgttaagggaatcttcgagatcaagttcccgggagtgggggtctccaggagggcgcaccttggattgattataggagcgtctcgtgtgatcccccgggggcgtttgttccctgggaggggaatccagaactcccattcccgaggtcgatgcggaccgtgcgggaagcccgccagggccgctttttctcttggtgtgaaggccgagcggtccgccagggacaggttttctaaggttttcgggggagggccgtggccgcccnacgtggttggggcggcgcnnnccntnttnntggnnnnnnnnnnnnnnnnnnnnnnnnnnnnnnnnnnnnnnnnnnnnnnnnnnnnnnnnnnnnnnnnnnnnnnnnnnagggctttcctttaatgtatcttcaaaatcattctggggccaagttacatcataaaacattttattacatataaggactgaaacaggatttttcttaactgtaacatggtccacaaatgtaaatgcaaaacccccatggtggttgcaggagcaagtctagttgagacaggtcaggacgaaagcataaaagatgagtaactgaatggcatcccgggtcctgtagccacgccctccagatcgccgccgcaaaggacctggaacctcaggggcccactgtatgccatgaagaaggcgcagtcgctgcctcaaccaagccaggctccgccggggccgttcctatcctgagggtcggagggggaagggactcagccaaagccgcggcctcccagggcttgggcctccgcggcagccgggacgctgtgggttcgccgtggatcgccgcgatgtggcgtttctccaggcccgggagttcctggccctgctggaccagctgcaggagctgcgccagggtaaccgaagctgaggcagaggccggggccgagcattggggactgcggggacgctccatgtcgggtcgcgaatcctgaccggcgggcgc

SEQ ID NO: 150674 - DNA, 543 bp, Homo Sapiens
tttaaattcaaaataaaaattcgttttaattttaagaaaaatgtcaagaattacaagccatattaaagcaaactagttagcaggttatgattccattacaattacaatactgttgtgcagaacattactgcgggaacatgcagagtacctttttaaaaataacttcccttgagtgtatttgtttccgttgaagttggatttaatgtttgaaaattacctaaactcatctggaccagtggtatcgtgagtaagattcgtgattaagctggatacttgtggttcaaattaagttgtgactattaagaaactctacttaccttcttgtgagactcaaactgactttaaaacaattccaaacaataccaagagagcctctcaagtggctgttccaagtaacaactatcatttaaataattcataaatcttactttgagtggaaagttgaactacatggtctctgataccccttccaatgctcaatctttacaatcatacctcatacatacaaataattcctacacacattgtattagaaacgggcat

SEQ ID NO: 150675 - DNA, 389 bp, Homo Sapiens
  misc_feature (153)..(177): n is a, c, g, or t
attttcaggttttatttgcctgttataattctgatattatgtacatatatatatatacttttgtttttttgtagagggcttatcagtagaccaagcacaggcatacagggaggctgtggctgctgagcagtgctgggagaaccaatctttccnnnnnnnnnnnnnnnnnnnnnnnnncctgggatgggttcatcaaagctaattgctatcaatcctagaaaccacctagggactcagacatctgcctacacactagtggcgtaaagggaaggacaggggtacaaactttcaaagtcacggtgtatttacattcccaaggtgggggcgggaggaggctgaggaagacaactgttcagacgatagggagggcagggctgctaaggggtctg

SEQ ID NO: 150676 - DNA, 474 bp, Homo Sapiens
  misc_feature (421)..(421): n is a, c, g, or t
gcaagcaaagaaaacattttaatgaaggcttcgttggcaatgccagatgggtcaactatggtctaatccaaacaggaaccctcacccttttatcatttgctctaaaatatcaaagcattacccctacagtggccccaaatacattttatcccatcaagcctgggcattttaagagctcttctctcctgatttcttcttgtctgactttgtctttccaatcatggtctccacgatcacagcggcttcttcatatgtctgaatgctctccgtggaaatcttctcgatagattccaccacttccactgtcttataggccaaagccttgggagggcctttttctggcaggcttctgctcctagtcccaagcacctcagctccatcctgatcagccgcaggctttggaggctcaggtatagatggncctctgcaccgggtgtgaccatgtacgagaaggtaccgagctcgattctatcg

SEQ ID NO: 150677 - DNA, 1379 bp, Homo Sapiens
  misc_feature (559)..(567): n is a, c, g, or t
  misc_feature (606)..(614): n is a, c, g, or t
  misc_feature (735)..(743): n is a, c, g, or t
  misc_feature (941)..(941): n is a, c, g, or t
  misc_feature (1155)..(1155): n is a, c, g, or t
  misc_feature (1221)..(1221): n is a, c, g, or t
atgattaatagttcaggtggaagaaataagcatactttttgggttttctacacattttgtgtagacaattttaatgtcagtgctgctgtgaactaaagtatgtcatttatgctcaaagtttaattcttcttcttgggatattttaaaaatgctactgagattctgctgtaaatatgactagagaatatattgggtttgctttatttcataggcttaattctttgtaaatctgaatgaccataatagaaatacatttcttgtggccaagtaattcacagttgtaaagtaaataggaaaaattattttatttttattgatgtacattgatagatgccataaatcagtagcaaaaggcacttctaaaggtaagtggtttaagttgcctcaagagagggacaatgtagctttattttacaagaaggcatagttagatttctatgaaatatttattctgtacagttttatatagttttggttcacaaaagtaattattcttgggtgcctttcaagaaaattaaaaatactactcactacaataaaactaagatgaccagaacgnnnnnnnnnggagcaacatatgtcaatattacgtgaactaccggtagnnnnnnnnntcgtaccccgcttgatcccagcccgacaactaatagacacgccccccctgtgtggggccgccctccggcttcttagaaagatatttttttagaacacctcccgttctggcgcgccccgcgnnnnnnnnngtagggcaagaggaccaagttggggcaattgtcgctgccgctccctaaagggaaccccccccggttttcaccgcaaatgcaggcgcgcccggtgaccatcttccccccccgcaacagacaaaatacagcggccccgcgggggtgggacaaaaacccgcggtcgcctggtctttgagagaacacaaatacaccccctcntcaatgatggagggagagtattctctcagcggggcctggcctcgcgtcacactgggggcggccctctgctcgcccgcccatgcaggggggtgcgcgccacccgtgcccagaagcgcccccattatcttgtcaaccagtttctccccgcccccgcccccgcggtgttccgctgccgttttaatccaacgcgcagtggtgttggccgcatatttanatgtccggcccagttgttttccgcgcgcgccccacatgtggaagaacctcatctcccccgcacacncggctgttttaacgacaatacttcgcgaaaccatgcccgtccgggggcacgcctgtaagcgccactctgctgccgcacttctcgcacgtatgaaataacttcccgcccaccgagagcggaaaaacccgggggcagcacagatatcttctctcgtcctt

SEQ ID NO: 150678 - DNA, 981 bp, Homo Sapiens
gacacttattatccttcagtctttattttaaataaggcccctgtcctttaccctcccaaagtacttttagacattttccttctgcccagaatcctctgcccggtcccctgtagctagtgtccagacactggtcacagacctccactgagcccagttagagcgctgacctcccatctcaggacttcttggcccttgcccattgccatactctactgtcagattttaaaactgctagaccatgtgccaattcacattgacttgtagccactaggaccctgtgtctttttctattgtgcttgttcatggccaggaatcaacgaactttggacagacaatcagtagactttgggtgtggccttggtgaaggcttcccactttggtgacttgcatgtgcccctctttgttgagggggttttgaagcagcttctgcgtcattgggagctggctgctgcgcccagcctgaggccctggaccccttttgcaccatcctaatttcaacatccagatgtcaattcagaaaattattatatcattctaatgactcaaaacataaaatcccctcttttgtctcatgttgaagagctgatgacatcggacctatcaggtcagacttattttcctagtcagagactgaatggcatattttcaaagcacttcgtctaaattgcatggcacacaccccaggagcccaaagatctggttgttctcttgagatgcagagaggaggcccacaggtggcggaggggtgaaggaggaggagccaccacttccgaagcatcagaatgtcaaaatctaagttttccacgaggtcagcagcaggtgtctcctggtctggagagggcatggaagtggccacaggtctggacttctctgggtggatgtgagggagggtgattgcgacgcgtgggtcgacgatatcccgggatatccgaccgtaccagcctgcttttttgttacaaactggttctatattcacatgcc

SEQ ID NO: 150679 - DNA, 835 bp, Homo Sapiens
  misc_feature (87)..(87): n is a, c, g, or t
  misc_feature (135)..(157): n is a, c, g, or t
  misc_feature (184)..(286): n is a, c, g, or t
tttaacctgttggccccagtgcagtagctcactccctgtaatccccaaccctttgggaaggcctgagtggggagggtcacctgaggntaggagttcatgacgggcccaaggcaacatagccatacctattttccnnnnnnnnnnnnnnnnnnnnnnnttagccaggtgtggtggtgtgcaccannnnnnnnnnnnnnnnnnnnnnnnnnnnnnnnnnnnnnnnnnnnnnnnnnnnnnnnnnnnnnnnnnnnnnnnnnnnnnnnnnnnnnnnnnnnnnnnnnnnnnntgagagtgagaccctcatggggtggaaaaaaaagatctaacatgttaactttaggaactataaaatgccttcaggtgtatgtgatctgaaattacaagtggtgacttctcagaaagcatatgaacacggtgaatgttgtaatgttctgaagataagctgatacttagtagtgatatgttctaaagacaagaacatgagggccccaaagcctgtgtcatcaactctgctttgaggtcactaatttttaaatacagagcataaagtagaactccaaacacttgggcaagaagaaaatccattgcaaatagccaacacatttctattaaacctcacattttcaattttgtatttggttgagagtactttttaaaaaaaggcttaaatcaatattatctaacacacacaaaaaagaatctcattaattctcctcactctgggccagatgctgtggctcacacctacaatctcagcactttgggaggtactgggtcaaagggggctctgcaggtcgatgatcccctcaaacctgcaaagacatcccatctatcc

SEQ ID NO: 150680 - DNA, 1080 bp, Homo Sapiens
  misc_feature (609)..(617): n is a, c, g, or t
cgcacgtgtgccgcacacggagagcgaaaaaccgtcgtgggcgccctaatgttcgcgcttataaaaatatggcgtctcacgcctcaagagaaacgctcgctggcagcgcgactgcagtatcaccccaggtccccgccgggcgggcatacatcctctccccccacgcgcgtcgtcactgcgcataccccactcgcgccagataggcggcgatcaaatttgtcgtgcggccgcccgcctgcgcgattgcgcacccgcggtcgacaagaagtgcgcatatgtcccgtaaaggcgcgcgccaaaggcgggatcagtctgcaccttctggcagaactgtcatcggttctcaatttcgtgggcaggtctggccgaatgggcctctcccctcttccgggcaccgagaaagcggtcaaatgcaaactctacacaccaggcgcttcgcctccgagggggcgccgcggccccgaggccgttcatttcgaagccgcggagcgtctcgcgtcgcgcctcccgggcggattgcaatcccaaagtaagtgaccctcacggagagctccccctcgcgggacgtttgtccgcacaccggcctcggcttgcccgtcccggggccgnnnnnnnnncttgggggagggatcgcccaggccctcagtcagtgatccagggatctccttaagggaagcatgctacggccccatctgtccccttaccttacgtgggccccgcgcgcccaaaccaatgggtttagcaaagcttctccgagggcccgaggcgggccgccacgcccttctcttctcttctcctcgcttgcccgctcctcatgttgttctcttttcttttccatcattttcccccatctattcttcggcaaatccctctgaggcaatggtattgcatgttggacataaaggtcagtaagactgtctttgtttactcttacatcagtttcaacagctatgttcttctgctccagagtgaggagaaggaactcctgggacagcagctccgggtgcagcagcagttccgagtccgtgcagctgcgaccgcccacatcccccgccatggtcgtcgccaggagaccccccc

SEQ ID NO: 150681 - DNA, 824 bp, Homo Sapiens
  misc_feature (174)..(174): n is a, c, g, or t
  misc_feature (460)..(516): n is a, c, g, or t
agatcccaagcccctttggtcctgggcccgcggtttttctttgggaaagcaggttatgaccccagtttcccttaccctactgggcccggccgcccaaaacaaatggttctggaaacctttggggggcccggggcggcccgccaaggttttcatccaatcctttgggggagtttnggcgaaaaatacatacaatttattcattacatggggacaaaatttctgtaactctggaaggtcaagttacatcatcaaagttgtttatttaaaagtagaagtatgtgttggcaatcgttttcgtaagagtcagaaaaattaggccggtttcacaatatagagtgtcctttctggtcaacagtattgcttcaggacagaagagcatttcacagatctttcctgtaacttctagaaaagtcatccagccagatttaggctcaagcttctttacaaagccattttcctnnnnnnnnnnnnnnnnnnnnnnnnnnnnnnnnnnnnnnnnnnnnnnnnnnnnnnnnnttggtccgcgttcacgttagagttaacgtcctccatcccggccccgctgcctccgccgcccgcggccctctcgctctcgcagcaacaagggaagagccggaggaaagaggcgtccacgccgctcactccagccgaggcccccgcatatagcagggccaggccccgtcgccagggttcccccagcgcgggtcccgaagcaccgctggccacagatgaaccgcctcctcagcgcaggtccgggattcggggaggcagcgccaatatccggtctctgcagccatcttccctccgtccctccgcccaccccc

SEQ ID NO: 150682 - DNA, 458 bp, Homo Sapiens
acatgtttattttatttatttttctctggttgggcggctttcaggtttttattgtgggtgtatttctggcagggggacaggggtggtgaggcagtccctcccaggagtggccagagaaggccagaggcgagactggtggaaaaggacggggaagacagggaacttccttactctcggatcttcagttcccgcgccatctggcagagggcgcagggcagacaaaaggtgagggccgcccagtcgtgcccgacggagccctggatgtggtagcgctcccgccatgccggtgcggatggagtgcaggcctccgggcaggtagggcgcgcagcagcactcgccaaagtcgtcggagatgcggcaggcaaggcacagaggagcaaaagtgccgcacagacagacaggcatgtcgttgcagcagtccgtgagacctgtgtgccagtcactgagctgggtctggt

SEQ ID NO: 150683 - DNA, 844 bp, Homo Sapiens
  misc_feature (43)..(43): n is a, c, g, or t
gttttggaattgaaattaccagctttctgattcggaaaccaanctgggacgattacaaagggtaatgccggagggctgatattgccttaattggtctggtgtcacttggttcacttgaagacagatttctgtatcttccccctcggatgtcaatttccccattcccaccagtaattttaaataccacaacggacatcaggtcatcatgattttcctgagcaccctctgaatttgtactgatggcatctggagaagtttcaccataattctgtaggtttgcaccagcattcacactttctgctgtgcccctgtaatttgtagttgagttctttttatttcctttttccaaaaacatatggctatcacttccatcactttctaataactgttcttccaatatcatgctgtcaagtgaaatggtatccaatgacatttgtgaagagcttcttttcatattcttataagaaacacagagaggagccaggttgggtgggcaacgttccttaggctttccacttaaagatgactgtgatttaagtgttctaactgggggggtctcttctttactgatatcctggttttcagagagtgaagctgcttctggaagccaatcttcagctttaaagatggactctatggtttcatttcctttactagttaaagtacttgaaagtatgttttgattaccatcactatcaaatgaaagtatattcgaatcttctctgtagtttaagatactacttgaatctgtataaaatgaatcctttttgtcacttgtttctgatccaatttctcctgagccacttttgtaacaagtccactactttcatcttcacttattttc

SEQ ID NO: 150684 - DNA, 1216 bp, Homo Sapiens
  misc_feature (318)..(318): n is a, c, g, or t
  misc_feature (477)..(485): n is a, c, g, or t
  misc_feature (551)..(551): n is a, c, g, or t
  misc_feature (554)..(557): n is a, c, g, or t
  misc_feature (559)..(571): n is a, c, g, or t
  misc_feature (573)..(576): n is a, c, g, or t
  misc_feature (825)..(834): n is a, c, g, or t
cgatccacacctgctacgataacggccagatgtcagtggtgctggcgacggggtattgaagtagttgatgagggacgtcgcggtggaaagtgcgagtattagaggctcgaagaatcgttcaggttgggacttatgagagttattggagcacatattactggggactggaagaggatgttggcgcacggggggtagaagcgcgagtagaaggtctacgcggccactcgatgggggtaggatggggaagtgtgggatgaatgagtaggtgggggagtcagacagaggtggcggagctcttagggaggtggtgcgagtggncagggagggttgcgggtgttaatcggacgaggactgtcatggagtcaggcggagtccagtgaaaggagaagtaggagcatgagaaaagacggatggactggagaggggggcagtgcgtgtgggagagaaagcagtgctggagagagtgggacgaagatnnnnnnnnnaccagaggaatgtatgtgccttttaaagtatcccgtttaatttgattactcgcactcccgcctttnacnnnncnnnnnnnnnnnnntnnnncccactacattccagcctggacaaacagagcaagaccccgtttgctgtgttttctctggtcttcaggtctcctcactgtggcgggatccaggcgcagctctgttcaatctctagcgagatttgttcaaaatctggacctgaccccggggtcagcagttgaggactcagaggtggaatttttgtgggcacccacatggtagtcgatccgctgtcctccggaagacggtcaccctttggggacctggaaannnnnnnnnncaggtggcactcccccctacaagctggctgtccttccgggggagcacacagcgggcccggctctcgcccggtgacgtttctcccggtgacgtttctcgctggggcctccaaatgtcgtacctttaatctggagacaatacgggtcagaggtcaggaaactacatcagcgccagtgcgagcgcccacgagtccggtggacggatgagaaacggccggggggcagcctgagtcccagttcccgccgtggcaatggccaatttcccacccgtggacgcaaaaggccaggactccacgctgctgaccctccagcgtcccatgtccggcaggcacgtggccgaatagcccaagactgaggactcacacatcccgggaattccggacc

SEQ ID NO: 150685 - DNA, 1229 bp, Homo Sapiens
  misc_feature (175)..(175): n is a, c, g, or t
  misc_feature (803)..(803): n is a, c, g, or t
gagggcgtctctactactcgtgcgggagacgacaaacgtcgcgactaagtgggatgggcgtgccgaataccatgtgtgtggatcaagataaaagagagaaaccgacagagtcgtggtgagcaataaagtaataatagagatacatagagagagtgcgcgcgcggggagaaggaanaatcacgtaagtgtcgtcgtgatatatgcgcccgcgcgcagtcataaataagcgcgccgcgctgaggagagtcataccgcaaatttagtgggtgatgttggtgtgtacacacaggaacagacactctcagtcggattagagccgcacgcgcggcacacgagcttgtttattatctcttagtgtgtgggaagatagccgcgcacagacctcctactatttgtggtggtggcaccagcgaggatatgtctcctctcttgtgggagtaaaccaccacatcgtggttgtggcgccgcactgagttttggcgagcttaaccatccgtccgataggggggaagccgcgccgccggagccgctcacaataaaagaatgaggaggggtgtttctaagaaaagaatggtcttctcttggagagggtgggagataaaggagggcgccacaacagcaaaaaagcgagcataaaattcttcactgggggggtagcgacaaagacggaggggattgggcggtcgggaggttagtagatacatgctatgggaaagggactggtagtgtgtggcaattacgggggtatttagggggggagaatcagttcatgggagggtttttatctggagtgcggggctttncaaaagaaaggaaaataatcaggagataagttaattcagatgtacatattcagaaaacaatattgaagttaaagaatatgcgacttaaaaatcaatacagcgtccttttcgttcccaatctccatatcgggtaggttctgggcccctgggtccacctttttctttggtcactggattaacatcatctggaaatttttccagtggttctttctctaaatgggaatcctctggtgcatcaaaacgaccttctggtaacttcggcttcttaagggactgtttgacaagttcagactttcctccttgagaagaacttgttttcctcagagaatgacacagaaggggtgatcttgccgctctccacgccgtggccgagacccagctaagcaaccagggaagcctcgatggggtcatggcgccgactccccc

SEQ ID NO: 150686 - DNA, 618 bp, Homo Sapiens
aacagaagaaaaggcatacggcttttattttatcctgcatagcacggggaaactgcaggagaatgattacccaaactatatctctttagaaaactaaatgatcttcaccaaaatcataaagcccctcaggcaaaagaaaaaggatacagaatttaccgtgaaaatttttcaaatattcattcttttattcttgttatattgtgaataaactctcccccatactcatcagcattctgttttcaaaataattccatgctttactgcaatgcaagttggctttttcctactccacgaattcccttgaaggcctctctaacggaagttcttctttctcacatatctctgtggctcactggatgtcttagcttgagtttccagtggttctttctctaaatgggaatcctctggtgcatcaaaacgaccttctggtaacttcggcttcttaagggactgtttgacaagttcagactttcctccttgagaagaacttgttttcctcagagaatgacacagaaggggtgatcttgccgctctccacgccgtggccgagacccagctaagcaaccagggaagcctcgatggggtcatggcgccgactccccgagcctccgcgcaccc

SEQ ID NO: 150687 - DNA, 1108 bp, Homo Sapiens
  misc_feature (53)..(54): n is a, c, g, or t
  misc_feature (59)..(59): n is a, c, g, or t
  misc_feature (62)..(71): n is a, c, g, or t
  misc_feature (73)..(74): n is a, c, g, or t
  misc_feature (76)..(86): n is a, c, g, or t
  misc_feature (89)..(91): n is a, c, g, or t
  misc_feature (93)..(143): n is a, c, g, or t
  misc_feature (145)..(152): n is a, c, g, or t
  misc_feature (311)..(323): n is a, c, g, or t
cacaccaattttaaattacttttttggaaagctttcccaaagagaatggtttnnaaacnttnnnnnnnnnncnnannnnnnnnnnncannntnnnnnnnnnnnnnnnnnnnnnnnnnnnnnnnnnnnnnnnnnnnnnnnnnnncnnnnnnnnttgaaattaaatacccaactttataaatacggtctgatacaaaccagaaaatgaccctttgattatgaagctacttggtgttcaggcaaaaccagaaagaatcaagaagtcaatccatccaaagccagaaggttctcacttcctactttgtgttccacnnnnnnnnnnnnncaaaggaaatgaactggcatatacgaatacaatctcgatgacatcctgctagggaatggtaattttctgatgatatctgtgttcagaagggactgaaatttatacatttacctctttgaactcagaaagtatcagaggactgcaacataaaaccgccccatacaagagggccccggcctcgaagacaagggtcttgccccacgctcgcctccctcccagctttgccgggaacgccgtcccactcaggggttcaatgcagaaacaccctcctaagggaaaacgggacgccactccctacccaggagacgcccccacagggctggagcttctattcgaagcccatttctaaggacaccacacgcaggcctcagccaacctaagaggcaggatgatgccctctgtcctgagagaccactgaacacggcccaggggtcttctcatcaaaattcatttttttgcctctgattttccactagtcaagtctccaaatcccagtttctccaatggttcttgtagcatcaattttctctccatcctgcattctaaatattcttttgattcctttctgcacaaagcattttcaaaattattgttatgaagacacttcatgaatttctctttaaagcttttacattcacctaagtgatccagcgggaagctgcccttgtccgggggccgcggctggaagctcttggtcccgaaattcatggcggtcgacatgttggcgactccggagtctgcgagcgccttgcgagcgtacgcagggcggccggcggagcgccccc

SEQ ID NO: 150688 - DNA, 851 bp, Homo Sapiens
  misc_feature (97)..(264): n is a, c, g, or t
  misc_feature (277)..(292): n is a, c, g, or t
cgcatgtggctcatccttgaatcccagcacttgggaagcttagccaagccgatcacgaagttcaggagttcgagaccaagcctggcccactgggtcnnnnnnnnnnnnnnnnnnnnnnnnnnnnnnnnnnnnnnnnnnnnnnnnnnnnnnnnnnnnnnnnnnnnnnnnnnnnnnnnnnnnnnnnnnnnnnnnnnnnnnnnnnnnnnnnnnnnnnnnnnnnnnnnnnnnnnnnnnnnnnnnnnnnnnnnnnnnnnnnnnnnnnnnacactctgtcttnnnnnnnnnnnnnnnngcacaactctatttgttcacataaatttccttcaacatacattgcagctaagatgtgtacaagattttacatgtattttggaagaaatcacacagaagcagctgctttttcaataaacttggccagcttcacatcttttttggtcagttcaccacagtcatgtgaggtgagagttatctggaccttgttgtatacattgaaccattctgggtgatgattcatcttctctgcttgtagggcaactcgggacataaagccaaatgcctgattaaaattgtggaaggagaattctttgtagatggcatctctctcacttaattccgaccatcctgctgctttaaggtcaagtatagcttggttcctctcctctgcagtcaacctgtgagtacctgatgacatggccgctagccctaggctctggcctcgcagcgccgccaacaagcgccgcgtcgccccgagcgccccgagcaccgccgccattggccgtctgccgagggcatgccccgcgcgaacgcgtgggtcgacgatatcccgggaattccggaccagtaccagcctg

SEQ ID NO: 150689 - DNA, 1665 bp, Homo Sapiens
  misc_feature (325)..(325): n is a, c, g, or t
  misc_feature (1001)..(1021): n is a, c, g, or t
  misc_feature (1079)..(1089): n is a, c, g, or t
ggtggggtgttgggaacaccaaacccgccgccgctctttgtcctctcatctccccactcgtggcgggcgctcttatcgcggggcagaaagtaatatgtagctagttcgtagaccccgcgcaccggcgagacagaagagctagccagtctgcagacgtaaataccttaaagcggtcgacgattccgatgtataggatatataatggagtgaggactgccctacccttttatcccgcgccgccttctttcttatttcagtggcagcgcacgcgcgcgtgctgtagattcactctcggagggcgccaaccacaaatcaattgtctaanctccgccccgcgcgcggaggagcacaccggggcggggtggtgtggtgtgcgcccagccggcgggcgcgaggacacttccgtccgggcgtccctcccagtctttctgaggcccctgggtgggtggtaaggcgggggtgttgccccccatctttgcgcggggcgccgcacgatttcgttcccttctgttgtggggatatcgcgccagcgcccgcggtcggtgttcgcccctgtctgtattccttgtatagagaggccgcggtcctctccgttcagtcgtgtgaatccgtagagcccgcgcagggcgggggggtgcccgtgttccgtgccgactggtccatgcgcgaaccctcgttgtgaattacacccccccctcccgcgcccgttgtcttccgagaccgctccttgatgtacccccccggcaggtggttttttattatgtggggggaagtgtcctacgtcttagtttgtgtgttcaccggttctctcccttttggggagaacggggttgggcgcagtggcgccttgtatccccctcgggcgcccgcgcgcccacacccaaaagtttgtgaaaaacttttcttggggcggcggggccgcgcccacccgctccccatatgcaaattggcggtcgtggtggtgggattggaggtggtggctccggggttgtgtactctannnnnnnnnnnnnnnnnnnnnctttgttcttctttgtctgtctcgtgcgttttctgtgtccgtctgggtctgcgtttcnnnnnnnnnnnaaacggaggcttgtgttttattcaaggcttgtcagcctccctccttccccctgcgggtgaggtaggagggatagggttgggggagggaacaggggctaggaaggggcagactgcagctgccctttgtagacatattccagtgcagtggcaatggtgcgcatgtccagctcgatgctccgagcccagttctccacatccccaatttccttgagtgcctggttgaagttctccaccattccgatccactggcctgtctgcttggcaaattgggcagcctggacctgtagggtcttcacctcatggtccagctttctctggttcatgtaggcctgggccacacccacattgaggtgatccaccaaagcttctgtcaggcaggtcgctgcagtgatagcctctcgcctcctcttttcctgcagctccttgcgttcattctgcttggcctggtgttcttttaggaggcgggacagcatggtcacgtcgggctgggggctgggtacgccgggccccctccggctccggaagctggaacgctcacctcggctccccggggccatgtcacgtgaccgctgtccc

SEQ ID NO: 150690 - DNA, 914 bp, Homo Sapiens
  misc_feature (877)..(877): n is a, c, g, or t
gggattggccctgggagcctctcgtcctggcggcgggaaggagcgtctctggagggaggagggtgtggggaaccccccagagatgggcttcttggaggcctgaaaccaccggaacggaggtggggcacttgtttcctgagtccgggctggaaatctcggagttaccgattctgcggccgagtagtggagaaagagtgcctgggagtcaggagtcctgggcgctgccgctgacttcctggcgtccctgaaaaagaggaggcgagaggctatcactgcagcgacctgcctgacagaagctttggtggatcacctcaatgtgggtgtggcccaggcctacatgaaccagagaaagctggaccatgaggtgaagaccctacaggtccaggctgcccaatttgccaagcagacaggccagtggatcggaaatggtggagaacttcaaccaggcactcaaggaaattggggatgtggagaactgggctcggagcatcgagcctggacatgcgcaccattggcactgcactggaatatgtctaccaaggggcagctgcagtctgccccttcctagcccctgttccctccccccaaccctatccctcctacctcaaccgcagggggaaggagggaggctgaacagcccttgataaaacacaaaccctccgttaaaaacggacaccctataatccaaccacaacatggcgggccgcttcgggccctccaggaagctttctaaaacccattcgttttggccggccgggccccccctagggaaagtggaacactggggccaaaacctgtttttccttagggagaaacctgggggccctggacaaacgggccttgggaatttcccccaccccaatataaaaaaacggcnccgggaggggagtacaccgcgagactgtgtttctgac

SEQ ID NO: 150691 - DNA, 210 bp, Homo Sapiens
cagggatcatttctatagttcattcattactagagaagtttctctgaacatgcagggcaccgcaaaccatgaggaagaggcacagcattctcttctgagcctgaagccagctcttcttgcttcactgccatttgcccttcatgatcattctcttcgtaaatcagtaccagcggatgcatccagtcagccacgaggaaggcggaatccccc

SEQ ID NO: 150692 - DNA, 901 bp, Homo Sapiens
  misc_feature (109)..(354): n is a, c, g, or t
  misc_feature (372)..(672): n is a, c, g, or t
  misc_feature (790)..(807): n is a, c, g, or t
aacggtttacccccttagttgggtatccgcgtccccccaacgaagaccgaggcaacgagtcaatgagcgaggaagcggagaagcgcccaataaggcaaaccccttttcnnnnnnnnnnnnnnnnnnnnnnnnnnnnnnnnnnnnnnnnnnnnnnnnnnnnnnnnnnnnnnnnnnnnnnnnnnnnnnnnnnnnnnnnnnnnnnnnnnnnnnnnnnnnnnnnnnnnnnnnnnnnnnnnnnnnnnnnnnnnnnnnnnnnnnnnnnnnnnnnnnnnnnnnnnnnnnnnnnnnnnnnnnnnnnnnnnnnnnnnnnnnnnnnnnnnnnnnnnnnnnnnnnnnnnnnnnnnnnnnnnnnnnaagaattcggcacgaggnnnnnnnnnnnnnnnnnnnnnnnnnnnnnnnnnnnnnnnnnnnnnnnnnnnnnnnnnnnnnnnnnnnnnnnnnnnnnnnnnnnnnnnnnnnnnnnnnnnnnnnnnnnnnnnnnnnnnnnnnnnnnnnnnnnnnnnnnnnnnnnnnnnnnnnnnnnnnnnnnnnnnnnnnnnnnnnnnnnnnnnnnnnnnnnnnnnnnnnnnnnnnnnnnnnnnnnnnnnnnnnnnnnnnnnnnnnnnnnnnnnnnnnnnnnnnnnnnnnnnnnnnnnnnnnnnnnnnnnnnnnnnnnnnnnnnnnnnnnnnaaaacaaaattttgggggtggcagggcagggatgacaaaaaggaagaagagaatatacatatattgtacaaatcaaataattcaaattgaaatggatagaaggttttttaaaagttgnnnnnnnnnnnnnnnnnncataaataattattaggagctactgccagagacaatctgacagggctgaagatgattttctcagtagccagtttaggaggtggacatagcaccc

SEQ ID NO: 150693 - DNA, 1598 bp, Homo Sapiens
  misc_feature (115)..(134): n is a, c, g, or t
  misc_feature (187)..(246): n is a, c, g, or t
  misc_feature (253)..(331): n is a, c, g, or t
  misc_feature (1306)..(1306): n is a, c, g, or t
atggaaaacccacgcaatttgtgtccccccgggctttgctcctgtcactccgtgggggtgggccgggcggccgccccacaacaagaaagggttgttgtaaaaaatcttttttgtnnnnnnnnnnnnnnnnnnnnccccccaaaaaaattgtttttcttgttgtgtgtaattttgagggaaaaaggcnnnnnnnnnnnnnnnnnnnnnnnnnnnnnnnnnnnnnnnnnnnnnnnnnnnnnnnnnnnncgtttcnnnnnnnnnnnnnnnnnnnnnnnnnnnnnnnnnnnnnnnnnnnnnnnnnnnnnnnnnnnnnnnnnnnnnnnnnnnnnnngaggataaatttgagtttattttaggaaaaaaaatgcttaaagcacaaattacagagaggaggagctgaaatccttcaaaggcctgagcttctactcctttcccttaagattcctccaaagcaccagctccataaaatccttcagctccccagacccacaccaagaaccccacatgttaattggatcagccaaatctacaagcagataagtcctaaggagaatgccgaagcgtttttcttcttcctcaagcctagcatgagtaagcccccaaattgctagtctggcagaatggcagactctgcctccagatccaaatgatcacctagacaccccctcaggctcctgggcctgggaccacagctacgcagccgcccccactcctctcagagccgagtggagtagcctgccaccgcaatgttctccccgttgacgtagctggcatctggagagcacaggaaggacacgattcctgcacagtcctctgactccccaatcctctgcagctgatgatgttccttgaagttcttccagagagactcattcccatgaaacactttgctgaagtcagttttgataattcctggaaccacgcagtttacccggatgtccttgggggccagctccaatgccagtgttctagtgagacccagcagcgctgtcttgctgacattgtagacacccagcgccactactggattataagctgcaatggaagagaccaggatgacagcacccctcctgttctccatgtagggcagcaactggctcagcagcagggctggggacttcacgttcacacttaggatcttgtcccagatctgctcactggtccccagagtgctccctaccagaggggttgacccctgcgctgcacaccaggaagtcgacgcccccacagttgctccagggccttggccaccagctgctcccggtcctcagccttccccacgtggcacacaatgcccgccacactncagcccctccccctgccagcttggccatggcccggtccacgttctgctgcttccggctgctgatgaccacgtgggccccgtcccgggccagacgtcgggcgatggcaaagccgatcccactggtggaccccgtgaccacggctacccggttagccaggacgcccttcctgtctatcccggtgctgctcatcctcacagaaagcctagcacagggatgaaaccagccctggtagccccgggcaactgctgacagcatagtggttggtgtctgagatgcttcctgctgaatcag

SEQ ID NO: 150694 - DNA, 518 bp, Homo Sapiens
  misc_feature (119)..(119): n is a, c, g, or t
  misc_feature (217)..(217): n is a, c, g, or t
ggctgggggacttcacgttttcaccacttaaggatctttgtcccagattctgcttccaactggtcccccagagtgcttcccttacccagagggggttgaccccctgccgcttgccacanccaggaagttcgacgccccccaccagttgctccagggccttggccacccagctgtttcccggtcttcagccttcccccacgttggcacacaatgcccngccacacttcagcccctccccttgccagcttggccatggcccggtccacgttctgctgcttccggctgctgatgaccacgtgggccccgtcccgggccagacgtcgggcgatggcaaagccgatcccactggtggaccccgtgaccacggctacccggttagccaggacgcccttcctgtctatcccggtgctgctcatcctcacagaaagcctagcacagggatgaaaccagccctggtagccccgggcaactgctgacagcatagtggttggtgtctgagatgcttcctgctgaatcag

SEQ ID NO: 150695 - DNA, 747 bp, Homo Sapiens
atgacccactgcccccagtccccattttctttaaaaggcctgaacatttccttcctcgtgtcagtcctgaacaattcacattttcagggctctgctcacaggcctgtgacttagcctgcctgcctatgaaaccattagcaaattggaaatacctcttgcaccagtcagaagggggattggtttctcttatatgcacatacattgggtctactgcacaaattacagggctccaagtgtcttatgagagcaggacttgggctgaccatgtctctctgccctcacccatgctctgctctgatttcagatcctaagtgtgaacgtgaagtccccagccctgctgctgagccagttgctgccctacatggagaacaggaggggtgctgtcatcctggtctcttccattgcagcttataatccagtagtggcgctgggtgtctacaatgtcagcaagacagcgctgctgggtctcactagaacactggcattggagctggcccccaaggacatccgggtaaactgcgtggttccaggaattatcaaaactgacttcagcaaagtgtttcatgggaatgagtctctctggaagaactcaaggaacatcatcagctgcaaaggattggggagtcagaggactggtgcaagaatcgtgtccttccttgtgctctccagatgccagctacggtcaacggggaagaacattgcgggtggcaaggctactcccactcgggttctgtaaaaggattgggg

SEQ ID NO: 150696 - DNA, 924 bp, Homo Sapiens
  misc_feature (133)..(141): n is a, c, g, or t
  misc_feature (253)..(264): n is a, c, g, or t
gccgaattagacactgtggcccaaccgcggccctcgggcgcgcccacaaaaatatttgtcgtcttattcgcggaaaaggctttccggcgtttgaggggtccttcccccgccggttttggagattgggggattnnnnnnnnngggtataaaatgggcggctcttcctaagaaagaacccgcccccccctatttttggcgggggtatattgtggtgttttccaacaggcggaggaggctcctcccggaggtttannnnnnnnnnnnggtggggcgggtttttttttatcacaggtgcggtgggaggaaaaatcgcccaaaggcccctctgagtcccagtggacccccagggatttcttcccttagaggaaaacccacgcttaaggggcccagggtttccatttttccctagccggggccccccgcccggccaccctcacgcgaatgggtgttgggaaaagctttctccgaggggccgaagagccggcccgaacaggtttgggggggacccccccaggcccttgccttgcgaggggcccctttattttttatatgagattaataaaggatgttttgccaaaagatccgcgtcggctccatgccctgccgcagccacccgcagcctgtttccgctcagcaaacgctttacttgcacaagctcttcatagcaggcctctgcaaaccagcgggcgccggggagaagggctgcttcttctctagagttggcggcgagggagcccgcttcgagggggcggaggctttcgtggctggcccagtatccatctccgcgcgtgccgcctccgtcaccgcctgccgggtccccatttcttccgggcctgcccccgctcctcgcctgcccctcccctccaccagccagtgtcgccccatctgtctgtcctccgggcacttgtcccgcccctcactccc

SEQ ID NO: 150697 - DNA, 245 bp, Homo Sapiens
tttcacatgtagaaaagaggctttattaagaaggctttgaagtcaaaaaataaaactcttgatacaatttttttaacccttaaatcagctcagcaaatatataatcagtaatttagctgtgtaagattaaaggtccattactttatttaaaataaaatatattttagttcttaaaatttattccataaagtacatatttccctataaattccctacatatacacaagaggtaaaaagtaaaagtg

SEQ ID NO: 150698 - DNA, 179 bp, Homo Sapiens
accttttattttgaacttaatatgtctgtaactctgagattaaacaacaagttcgtggctcttaatgttttcctcatagaatgtgactgttgaagaacatgcatcgaaagttgctttcgaaagtacaacgctttattgaatcttaataaattgcaatttttttcttggctgttcaaaaa

SEQ ID NO: 150699 - DNA, 804 bp, Homo Sapiens
  misc_feature (189)..(189): n is a, c, g, or t
  misc_feature (194)..(194): n is a, c, g, or t
  misc_feature (224)..(224): n is a, c, g, or t
gttttctatttggggaggaattcccaacgccctagtccagtgcccagggttcttccttggaaaaccagctatgggccaagttccactttacctaacggggccgcgggcgcccaaaaggaatggtttaggaaaggtttcttcgagggcccgagggcggcccgacattttccttcttttttcctttggtgngtgtntccagaatatggcgggcagctggacttaanacggaaccggtagtgtccccgggtatgtgtttccttcttgacagggatggaaatctgtggttctggtgaggggcgaggctctgaaggttttgaaactggtggtggaggacccacgtctttgggaatttcaacatgtttccaatcttctccttcttctactatcaaaccaattagtgaacctagccgtatatttttacttccttcttcaaccacgattttggccaagattccatcatcacttgcatctaaggtaaccacagctttgtcagtctcaatttcacataatgcatctccagcactcaccgcttcaccttcctttttcagccatttcacaatgtttccttcttccattgtaggagacagtgatggcattagtatcttaatgggatcaccccgaagccactgcgtgctgtgaaaccatctccaattagctccgcggcttacggaccacccaagagcccccttcaccagccctacgcttcggcggccggggaagcccacaagataacgcagcagccgcggatcacagcccagcctccaggaggccgccatcttgacggccttctcactggctgccccc

SEQ ID NO: 150700 - DNA, 323 bp, Homo Sapiens
acaaggtttttttccatgttgtgtttcagttaggcggattttaaaatattttattttaaaataaatgtcaatgaacaagagggacagaaaacaccagtggttgctagggggcaggagaagagaggaacagaggaacagaggggaatgtcctgggtggcagaactgtcctatcgattggttacaaaaccatgcatttgtcaaaattcacagactagacactaaaaagggtgattttactgaatgtaaattataaactttttcatttttaaaaaagagataatgaaggccaggcatggtggctcacgcctgtaatcccggcggca

SEQ ID NO: 150701 - DNA, 554 bp, Homo Sapiens; identical to SEQ ID NO: 9782

SEQ ID NO: 150702 - DNA, 1161 bp, Homo Sapiens
  misc_feature (501)..(509): n is a, c, g, or t
  misc_feature (546)..(554): n is a, c, g, or t
  misc_feature (622)..(630): n is a, c, g, or t
  misc_feature (751)..(763): n is a, c, g, or t
  misc_feature (773)..(843): n is a, c, g, or t
  misc_feature (876)..(886): n is a, c, g, or t
  misc_feature (956)..(990): n is a, c, g, or t
  misc_feature (998)..(1112): n is a, c, g, or t
ggggcgcgcgcgggtgttttgtccttctctcggggtgggaggaaatataactataatgggcaccacacataagggcgcgcgcagaggtgtatggtctgtgggatggcacacgctgtcgcgggtacgtttaggcggtgatgtcgtccggagtaaacgccgggtggagagataataacgggggtgtcgcaagcctctgttgtcggggcgcggcgaatatatatggggtggagtgtatatatagtgtcaacactccaccggtttcgttttgagcgcggatacaagtggtggcggagcggaagtagacgaggacggggtgtacaataatggtatgggtgtttaaggtgatatgtcatagggggggagaggacagcgccctctgtcggtggtataaggggtccgcccacgacaggaataacggcggcccacgaataagaaccccgcccgcgcgcgggggcggatgtgttgcaaaaaagaaattgcgcgtgggggaggccccccgcnnnnnnnnnttttttttatttgtgcggggagataaaccggaaagannnnnnnnntttaggggatcggagtttcctcgggggggagggcggatgtggtgtgccgcggtttccggggtctcgannnnnnnnncccgggcgcccacacaaaagatgttcgaggagatttttccgggcgcgagacgggggtcgcgagcaccgcggtggggggaagcgttgttttcggaagcggttggcgtaggcgttgggctttnnnnnnnnnnnnntgtgttgtgnnnnnnnnnnnnnnnnnnnnnnnnnnnnnnnnnnnnnnnnnnnnnnnnnnnnnnnnnnnnnnnnnnnnnnncggcagagctagctgaggttttattttggaccnnnnnnnnnnngcaattgaattgttttgtagctggaggcatgggcaaggggggttgttgctttgagggaagttacgcttannnnnnnnnnnnnnnnnnnnnnnnnnnnnnnnnnnctggagannnnnnnnnnnnnnnnnnnnnnnnnnnnnnnnnnnnnnnnnnnnnnnnnnnnnnnnnnnnnnnnnnnnnnnnnnnnnnnnnnnnnnnnnnnnnnnnnnnnnnnnnnnnnnnnnnnccggccgtaatggccgaattcccgggcatatgtccggtaccgtcgactg

SEQ ID NO: 150703 - DNA, 433 bp, Homo Sapiens
  misc_feature (51)..(51): n is a, c, g, or t
  misc_feature (81)..(81): n is a, c, g, or t
  misc_feature (313)..(368): n is a, c, g, or t
gaacgatctggctgtcagtcagtgggagccaatagatgcagggagctgccntggtctttcggaaaaggtcatccagcagcntggcaggtggttcctcctgggctttctctttcttctcactcttcttttctttagacttcgcacgttccttgcggcggcggtcacgggaccttgatcgggaacggggcccttctcgaactttgtcccgatcccattcacgctctgatcgagtccgctcccgccgctccatttcccgttcccgttctgcccactgttcccgcactgcccgttcctgctcccgctgctctgcccnnnnnnnnnnnnnnnnnnnnnnnnnnnnnnnnnnnnnnnnnnnnnnnnnnnnnnnnattccctgctcctctgtcttagtttcagagggacggtccacccaagaggcctcggtgataatccc

SEQ ID NO: 150704 - DNA, 900 bp, Homo Sapiens
gtaattcaaaatgaagcgatcacaggacaaaaaaaattacagaatagtggacagagaaaatatagaaattcacaataacctggagaaaggaccagggctatcccgccttcgtatccacgagctgcatctggacattggcaggcattccacctccataacctcccttggactgcatttggttctgaatggagctaactgaattcattccactgaacaggtctcctgatccaacatgagctgtatgcacaaagtttgtgggctctccaatcatacttctgtcaatccgccgtcgccttttaggctgaggctgttctgcaatacagcagttgaaacacaaccagaattcactcatgcttacagtccacagtaaatgagcaccaatgaaggttccaaatctcaactcgggaagttccaaaaatacgctcctcaatacgatgatgtccagtgatgccaagatgaaattttattatttcaccgtgtttttgttcctggaagtcaagtatcttacacagtcgatttaataaagaaaaatttggattgtttcctttctttgcttctggttctacagagactcctttctgaaccacgacgaaggtataaaaattgttgtcttgacccagggactataacagatagtcactcctcagcaatggagtaacacattcagctacttctgggttaagaacattccatattatgcatacagatgaccgcagattcactgtcagtagttattccttgcagatttcttctcatttgggttccaggtttcactcaaaaattcacacactcaaatctggccctatcgtcgcctttgtctcagccgcccgctccggccgcagcccctctcagcgccggctccgcggctcctgccgccccaacgcctgcagctgcgctccc

SEQ ID NO: 150705 - DNA, 1042 bp, Homo Sapiens
ggggccgagagagatcccccgccaaaatagagcacaggtgttggccctacccccggtttataggcagtttcagcgtcgtcttctacagcttccttggctctttgtgcctataatggccgaagaactgggcacatggcatgggccaatacagaagatttactaggcctggaagtttgtccctcgctaagtcaagcgaactgactccaggctttctccgttgtagacaattgccgaatgggcatttctgctccacgctcatgtctgagtatccagatcgagttcttccagcagaactgtctaccctatcatgggcgccaaagggctatcacgtgaccactcgccaccagccctaggatgccataccagccatgacagcagccacacagagcctggtctgcgacaaaaaggccttcgtgtcgacaatgaagaggccccagctttgggtccgaggctccgctccatggcctccattggtgacaatgctaggcctactagtacggtggacagagtcccgagtgacacccctgacaatgttggaaactctgaatgactgttaatttcatgtaagtacataatcgtcactatgttgtcatgttctatcattctttcttcttttgtttagagacaaggtttcccgtctgtaacccaggctggcagtgcagatggaacttgcatgagcatcaatgtacgtcctgtgcacatcgttcagcactgtccaatgctagctgtgaccatcaggggcgcaggagttagtcgctcaggcggctcaaaggtcttgacggtggagaacaccatccccagggattcccgacgcggtgatgccatcaaagcgttaattctgagatgggcctgcccgggtgcggactctgccgcagcaagagaagggttaactgccccgggccttcgccgtgggggcggggcctcggggagggtcacagcccgggactgagacccgaggttaaccgcccggggtgggctccacgggggcggggcatgctctccgcggctgctgccggtatagagcggtaactgcccaggaccc

SEQ ID NO: 150706 - DNA, 221 bp, Homo Sapiens; identical to SEQ ID NO: 5014

SEQ ID NO: 150707 - DNA, 798 bp, Homo Sapiens
gcctttgcccacccaggcgatgctctgcgtggctccatctgggttgtgctgaggacgccaggcttggggatgcaggacggctttgccaacgcccatagattccctccgaatcctctcgtcttcagttcctcatcccggatgatggttgggatgatccccagctccttttccaactttgttaatctcctcgaggaaggtgtcggtgttcatctcattgcagggtgtgtccacgatgcgggctgctagccgcacgccgtctgtggcattcgctaagcactgcaatgtggacacctccaccggcccgttgtcttgtcccaccaggaaaaactccacggtgaccgtcttcttctccaagcgccgagaggcacctgagcggtgggtgaacagcgggaaggcccgggccagggcacaggcggaagcaaagacctccggctgctcgcagaccatcacaatgcagcgatgcgctccgggcggcaggcaggtccgcaccagccgcgtgatgaagtgggcggccgaggggctgttgtgccggctcaccctgcagggcagggcagccacggtggcgtagttcaggtagaggggacagctgtccgtggggttggggttgagcgtgctcagggcagcctgccagagctcctcggtgacccggggctgcagcttcccgcggacgtggctccagggcacgcggtgcaggtggtgcagctgcccgagcagcagcaggggccggctctgtgggtccgagtcccccgcgctcgcctggaactgcagccccacgttcgccatcttcctgccggcccg

SEQ ID NO: 150708 - DNA, 513 bp, Homo Sapiens
ggattgaccagtagcctttcggagggcttaaagacggaactggccaaagacttggttgtggagcccaagattcccgtgaacctggatggccatcacccgtctccccgacccggaacagtgttggacagctacatatcatggactacaatgagactcatcatgaacacagctaaggaatgatggtcaatcagtgttaacttgcatatttttggcacagaacaggaggtgtgaatgcacgtttcaaagctttcctgtttccaggagtctgagtgcaagttcatgtgtggaaatgggacggaggtcctttggacagctgactgaatgcagaacggtttttggatctagcattgaaatgcctcttgaccttcccctccacccgccctaaccccctctcatttacctcgcagtgtgttctaatccaagggccagttggtgttcctcagtagctttactttcttccttcccccccaaatggttgcgtcctttgaacctgtgcaatatgaggccaaattt

SEQ ID NO: 150709 - DNA, 1177 bp, Homo Sapiens
  misc_feature (934)..(952): n is a, c, g, or t
  misc_feature (1077)..(1077): n is a, c, g, or t
agcgcgctacggtcgcgggcaactcgcagaagcccagcccccaggacccaggaccagtggcgcagccggcagccccggatcctgatctgcttgggcagctcctgcagaacctggaacagtgaatgggtaggggacactgggcgtgcagaaggcggggggcagtgtggaacatgccttcaccacctccagcttctgctgccggaggctgcacccacctgtgcccatggcctgcacgggcccatcacttcctagcgccttcgacattctaggtgcagcaggccaggacaagctcttgtatctgaagcacaaactgaagaccccacgcccaggctgccaggggcaggacctcctgcatgccatggttctcctgaagctgggccaggaaactgaggccaggatctctctagaggcattgaaggccgatgcggtggcccggctggtggcccgccagtgggctggcgtggacagcaccgaggacccagaggagcccccagatgtgtcctgggctgtggcccgcttgtaccacctgctggctgaggagaagctgtgccccgcctcgctgcgggacgtgggctaccaggaagccgtccgcaccctcagctccagggacgaccaccgggctggggggaacttcaggatgagggcccgaaacccggtgtgggcggcgacattggctgggggatcccacggagaattcggacccctcccagccaaacctggccctggcccccgccccatccctcgcgcttttggccctcggccaacccgggagtccttccactcccccacctcgatgggccttcccgacactacggcgccacgtactcgcgtctttggtgagcccgttccggatactctctgccgttccatgagtcgaccccccccacggagcccgcgtacactcaccctcgcgccacaccgcccgtcagtccgnnnnnnnnnnnnnnnnnnngcactcgtcggcccaaaggccgccggaccttcgccgctcggccccactacccccatgtcgcgcacttcaccgccacgtcgagcgcgccctcaccatcgctcgtgcgccgaccatcttttgaaccngcgtcgccccgccgcgcgccccttccttctctcgcctctccttgtactttcccgccgccgctactatcgcgattcgtccccactcgcacctactccggta

SEQ ID NO: 150710 - DNA, 459 bp, Homo Sapiens
tttgtattaaattatttattaggtttacattaagttatatattaagaaatgtatattttagtattaaatcatcctttctaaaacttgatgttttttcacttgtcaggtcttatttttatgcccttcaatatggttttcttgttaaatttattaagtataattttgaacaggtaatacattaatatggttcaaagcttactaaaaagtatttaaaataacatagcagtgttccccttccattgctgtccctgaattgcccagttctgctcccttccagaaataggttatgtgtagaagagcaaatatatatatacctatttgttgcaattgtaaatggaatgtttttcttttgatactgtttctagttgattattgctagaatacagaaaaaacaattgatttttgtacagttatcttttattcagacacttatccatgctaataggcttctactatagc

SEQ ID NO: 150711 - DNA, 909 bp, Homo Sapiens
cgggcggaggtcgcagccggaagcggaagaggcgctcggagcggggagtggggcctagctgcagccggagcctgggagacgatgcatcactgtaagcgataccgctcccctgaaccagacccgtacctgagctaccgatggaagaggaggaggtcctacagtcgggaacatgaagggagactgcgatacccgtcccgaagggagcctcccccacgaagatctcggtccagaagccatgaccgcctgccctaccagaggaggtaccgggagcgccgtgacagcgatacataccggtgtgaagagcggagcccatcctttggagaggactactatggaccttcacgttctcgtcatcgtcggcgatcgcgggagagggggccataccggacccgcaagcatgcccaccactgccacaaacgccgcaccaggtcttgtagcagcgcctcctcgagaagccaacagagcagtaagcgcagcagccggagtgtggaagatgacaaggagggtcacctggtgtgccggatcggcgattggctccaagagcgatatgagattgtggggaacctgggtgaaggcacctttggcaaggtggtggagtgcttggaccatgccagagggaagtctcaggttgccctgaagatcatccgcaacgtgggcaagtaccgggaggctgcccggctagaaatcaacgtgctcaaaaaaatcaaggagaaggacaaagaaaacaagttcctgtgtgtcttgatgtctgactggttcaacttccacggtcacatgtgcatcgccctttgagctcctgggcaagaacaccctttgagttcctgaaggagaataacttccagccttacccccttacacatgtacaggcacatgggcctacccagctctgactacgcccgttatgatttt

SEQ ID NO: 150712 - DNA, 1337 bp, Homo Sapiens
gagcgaggcctgggtggcgaattcggcacgaggcacttcaagaggcccagggagctagaggacgctcaggcggggtctgggaccataggccggtctggtgtccgtgtggagggccccctgaagatccgaggccaggtggtggatgtggaacaggggatcatctgcgagaacatccccatcgtcacgccctcaggagaggtggtggtggccagcctcaacatcagggtggaggaaggcatgcatctgctcatcacaggccccaatggctgcggcaagagctccctgttccggatcctgggtgggctctggcccacgtacggtggtgtgctctacaagcccccaccccagcgcatgttctacatcccgcagaggccctacatgtctgtgggctccctgcgtgaccaggtgatctacccggactcagtggaggacatgcaaaggaagggctactcggagcaggacctggaagccatcctggacgtcgtgcacctgcaccacatcctgcagcgggagggaggttgggaggctatgtgtgactggaaggacgtcctgtcgggtggcgagaagcagagaatcggcatggcccgcatgttctaccacaggcccaagtacgccctcctggatgaatgcaccagcgccgtgagcatcgacgtggaaggcaagatcttccaggcggccaaggacgcgggcattgcccctggtctccatcacccaccgggccttcctgtggaaataccacacacacttgctacagttcgatggggagggcggctggaagttcgagaagctggactcagctgcccgcctgagcctgacggaggagaagcagcggctggagcagcagctggcgggcattcccaagatgcagcggcgcctccaggagctctgccagatcctgggcgaggccgtggccccagcgcatgtgccggcacctagcccgcaaggccctggtggcctccagggtgcctccacctgacacaaccgtccccggcccctgccccgcccccaagctcggatcacatgaaggagacagcagcacccacccatgcacgcaccccgcccctgcatgcctggcccctcctcctagaaaacccttcccgccctcgggaaagtagatgtggagggtgggcgcctgcgtaaccctcgccctgtccctccaatcctgggggcgctgttccacggggattgggccctgtccagggcagggagtcctccaccttcctccccggcaggaacccgtggtatccggggcccagtcgctgggaaagaccgaagcgaggtcttgcccccgggaaccctgttagggccacagccccctgggaccggcaagtgggcgt

SEQ ID NO: 150713 - DNA, 219 bp, Homo Sapiens
  misc_feature (77)..(85): n is a, c, g, or t
tattccagggtcaaagcactgacatctgcattatttagaagcggctttcaaaactttttttgccatcactcacagtnnnnnnnnntacattttatattgcaactcaagtctataaattctttcattccttcaacatattgaacacctactatatgccaaatatattttatgtggaatacagtagtgaacgaagtaaaagaggaagaaaggaaaggagga

SEQ ID NO: 150714 - DNA, 905 bp, Homo Sapiens
  misc_feature (341)..(352): n is a, c, g, or t
actattagaccaacttttactatacagtatttcacataaatcatgttttacatttttttctaattacatacagaaaaattctccaatcaacacaagaatggcagaggaaaaaagatgcattatgcttggcagatgcaaattaaaacacacagacagaaagaagcagtaaaatgtcaaataaatcacacccactctaagtatcaatgaatagctgatatgcattgttgggagaatcatttctgaatgagtttgtgaacaagttgtgcttcttattaattgtgcacttaaaaaatgaccactaaagaataatttaacttgttattaatgttctccagatattnnnnnnnnnnnnttataccattaacgtgattgccaagcacctaattttggaaaggcttcataatgtatgttttctttttctccctcagcaaaagtgttaatcccccaaattaagttaaagcttattgttgaaaaataaattcgtagcgaaaatgatgatacgatgcaatgctgaggtggagagtcacagcccattgtaatgtggaccccatcttttattgatgtgatcaaaagtatgagaaatccactgttgctcaagaactttgtatctttccttacaaatgtagagaggtttgcctcgcctaagatcccggtcttcctctccatgagcatccaaatacacggaaccccagaggcagaagcggtgacctcgaatgatgataattaccgatgcattgatcaaaaggaaaatacctgttcctgcaccacagttctgagagtgcagtacacattcacagtaactttgttgcttgcagcaaagtcctttcaggcatacaaaagtaccacacacaaggcaaacagcaggatctttaggaaccttggtgcagacactacaggtttttccc

SEQ ID NO: 150715 - DNA, 897 bp, Homo Sapiens
  misc_feature (200)..(200): n is a, c, g, or t
  misc_feature (514)..(569): n is a, c, g, or t
gacctcacgggtataagaggatgctcaaatgagggaggtccaagtttaactgctaagggcaaccccacgggatggtgcattatcccacacttcttcttagtaaaatggcgttcaaccctgctgcggtgaatgccttcttcttctgtggaaggtcccttcccaagatatgcactgcttcttagggttaaatccccacaggncaggagtctcctttcctcgttgtaatcttgctatatcccctcggtagagagacttgtactcccagttcgcaggatctggtttcttatctgttctgaaggtttctcccgtcacagcctgaatgtcctcaagccaacaaagcgatgtccagtatcagctgcagcattatttccttgattcggttcctcagattcctttttactgcctccaacgcctctggaaggtttgtccttttcagaatcggtgtctgtctcagacctgctgctactcgacggcccatgcttcctctttgttttcttatgatgctgatgcttcnnnnnnnnnnnnnnnnnnnnnnnnnnnnnnnnnnnnnnnnnnnnnnnnnnnnnnnntagtgtcactttcatctgaagactctgatttcagatgactccttgtcagcggtaacccttcagaaacatgggctggagctgcttcagtttgttggctcagggacgttatggatccaacacaaaagcttgggttgctcagccagtctaactctttcctggagctcccgccatcgggagcctcactaagccccgcaaaggctgggaacagcgccatgaccacaggccgtacctccgttcttctctatagggatggcgcgacgcgtggtcgacgatatcccggattccgaccgtaccagcctgctttttgtacccactgttcatattcaca

SEQ ID NO: 150716 - DNA, 416 bp, Homo Sapiens
  misc_feature (68)..(126): n is a, c, g, or t
gctgcaaactgctcggctggagctctaggctctgagctggctttaaagttgctcccttttccgcgcgnnnnnnnnnnnnnnnnnnnnnnnnnnnnnnnnnnnnnnnnnnnnnnnnnnnnnnnnnnnctcgctccggcgtgcgcgtgtgtggtggttatttatttattttctgagcacgcctcccggttcttcttttattcttgggggaagggggatggggaggagaagcgcacacacgagcacccaccccggcacggagacccagcaccgcggaatggagccccacgcgcgcacacacggccaggattaagaccgatcacatggggaaggccgggggcgagggaggagaggcagggccgccgatgtcagtgccaccagccgcaccttggcgtaccccggcggcggagaggcggccc

SEQ ID NO: 150717 - DNA, 995 bp, Homo Sapiens; identical to SEQ ID NO: 10060
  misc_feature (232)..(346): n is a, c, g, or t
  misc_feature (374)..(388): n is a, c, g, or t
  misc_feature (405)..(422): n is a, c, g, or t
  misc_feature (546)..(554): n is a, c, g, or t

SEQ ID NO: 150718 - DNA, 1529 bp, Homo Sapiens
  misc_feature (59)..(59): n is a, c, g, or t
  misc_feature (637)..(748): n is a, c, g, or t
  misc_feature (923)..(983): n is a, c, g, or t
agtatcacctgcgtgcactaggcaaacaccgaggacaagtacggcgtgcgaacgcgcantgtggcgtaacaggatatggagaagggcgcataagtcacggtcgacgacagtgcgggaggagggactatgggcgggcgatagattttcgaggctccgcgcatgaggtgtgggcgtcatttcacgcgcgtgttgttgtgtgcgctagacgagccaacggctcacgcacggatgtggcgcgtgttgcgcggtcgcacgaggtttcaagtccggtgcgaggcggtgatcacgcgaagacacgcgtagcgccgaattaccgaccccagcaatgtcggtgatcaaacgaccagcgattcgcagtccccgcgtcgctataagggcgagcggggacggccagcgggcgtccgggcgtaacgcatgacaacgggcgtcggcgagcgctagtcgtgcggggggcggtgctggcgggttctgaacggaaggcggcgtcaaaaactgttgtgcagcccgctagcttctcggggacactgcgaggataggctgggcggcggcgtttgttctatctcgagtgcggccccactatgcctgccgctagtctacgtgggtcggcataacgagggcgccacaggttaggcggctnnnnnnnnnnnnnnnnnnnnnnnnnnnnnnnnnnnnnnnnnnnnnnnnnnnnnnnnnnnnnnnnnnnnnnnnnnnnnnnnnnnnnnnnnnnnnnnnnnnnnnnnnnnnnnnngagtaagcttttatctaacaaggaatcgctgcagcggtggtgttttctccgagtgatccgcatgtacggagggtgtcaaggctggtccgggggaggacggtaggggctggcagagcaaactgggcgggcgctggaggcattgttcaggtggctgctggttcgcgatagttcatannnnnnnnnnnnnnnnnnnnnnnnnnnnnnnnnnnnnnnnnnnnnnnnnnnnnnnnnnnnnttttatcctttaatctctttaattcacacatctgtcttttgtataaaaaggtgttttggtgaacccacgttgctacaccaatgacattccacagtattaacactagaatgactgaagtcacattcatgaaatatacaggaaatatcaatggttcatgaactgattactcttctggcaagttagggttgggtctcatattatcaaactaattacgatttttaatgcctactaaaactcatacttaataggaagacaatctataattaaaactgtcccttgttaggtggagagcaaagacttattcacactgaatctcccatgccttgtatagcactaggcacagaatggcattcagtgttttgagaatgaatgaatggtctgcctcttgtctttgataacagtgaatatcatgctaggaaaacaggggcatgtaacttttacttatcaaactctacgagttgcactgagaatactcaatcatgagcattaatttgagaacagttaggaatgaaagtggagtctctggggcacttgcctctgttcatg

SEQ ID NO: 150719 - DNA, 1087 bp, Homo Sapiens
  misc_feature (51)..(53): n is a, c, g, or t
  misc_feature (58)..(58): n is a, c, g, or t
  misc_feature (62)..(62): n is a, c, g, or t
  misc_feature (103)..(103): n is a, c, g, or t
cgagacgattaaaagggggtttccttcggccccaataactcgccccccgtnnnccgcntttnaaaaagtcacgggggggttctcctggcaaacgtccctcctncccacttgggccccagggcctaaatttccatcccatccccccaaggaaagccaaaacccacttgggtgggggggtaaaccctttttttagggcttggtaggggttgggattcacaaggaagataggctgccccctttggttaatttttccaccatgctttttggagctccaatgttcccccttaaaaggaacatatgtatcttcttttcttgaagcccacaggagtatcttgcacaggagttaagtctatgccattcagatcctttacactaactgtaatatagggatcgatgcactgcccagcatctttcaaaccaattttctcaattctgatagtgagtaatgtcattcctggttccgatggcaaccttggtaataaagtaccgggaactctagcaggaaaagaatcaggagaccctgctccagcaccaccctcttcttcatcttcttcaaattccaaattctcttcttcaccaggtgccaaaattcttcttaatgggacaggctgaacatcaaatgggaattctttattatatgtaagaatattctttaggattggttctagcttcttcaggtcctccagtttaaattcttcttgagactgtgtggactgtaaagctgcacttcgcaattccaagcatgttgcaattttgcctatggttttcttttgttcttctgtgaattcagaattattgtgttgagcttgggcctccttttgtagatgtcttgctaatatctgatactcgtctatcgcctccaccagctggccccaagagtcgaagtcggcgcctctcctaaaactggcgccccagcgctgcagcagactccgggtcacctccgacatggccggtccccaccccgtcccctcccgcccctaccccagcaaggccgggttctagggcgccatcctcccccggcctggccccgacattaacagggccaggaggaaccgctacggccaccaccgccacccgccgaggaccc

SEQ ID NO: 150720 - DNA, 1014 bp, Homo Sapiens
  misc_feature (759)..(759): n is a, c, g, or t
  misc_feature (918)..(918): n is a, c, g, or t
cactcactgctattgccctgtattttgcaatccaggacttcaataaagttgtgtttaaaaagcagaaactcctcctagaactggaccagtatgccccagatgtggccgaactcatccggacccctatggaaatgcgttacatccctttgaaagtggccctgttctatctcttaaatccttacacgattttgtcttgtgttgccaagtctacctgtgccatcaacaacaccctcattgctttcttcattttgactacgataaaaggcagtgctttcctcagtgctatttttcttgccttagcgacataccagtctctgtacccactcaccttgtttgtcccaggactcctctatctcctccagcggcagtacatacctgtgaaaatgaagagcaaagccttctggatcttttcttgggagtatgccatgatgtatgtgggaagcctagtggtaatcatttgcctctccttcttccttctcagctcttgggatttcatccccgcagtctatggctttatactttctgttccagatctcactccaaacattggtcttttctggtacttctttgcagagatgtttgagcacttcagcctcttctttgtatgtgtgtttcagatcaacgtcttcttctacaccatccccttagccataaagctaaaggagcaccccatcttcttcatgtttatccagatcgctgtcatcgccatctttaagtcctacccgacagtggggggacgtggcgctctacatggccttncttccccgtgtgggaccatctctacagattcctgagaaacatctttgtccctcactgcatcatcatcgtctggtccctgctctttcctgtcctgtggcacctctggatttatgcaggaagtgcaactctattttcttttatgcatcacactgacttcancggtgggcagatctgctcatctctgattacttctatgccttcccggcggcggggatactacctcaccatgggctctactttgacgcccaggaatgg

SEQ ID NO: 150721 - DNA, 316 bp, Homo Sapiens
acaggttcgtttttgcgccgtttattttcgtgggtaaagtagatgattttattctagtaactggctacaagagaaacaggggaattgataccattcctgggcagcgccaaacagcctgggctggaaatgcagctgaggacagaatgatattcacaaacacgggcaggaggctgggaaagctcacagccccacaggacggcggggcagacctggagccaccaggcattactgcacatggatctggcatgtcttccaggtgcttgggaaacacgagcattagtttgtgtacaaattagtcataggcatgtgaagaccc

SEQ ID NO: 150722 - DNA, 409 bp, Homo Sapiens
  misc_feature (32)..(32): n is a, c, g, or t
acaagcccagtaattacctcagccttccatcngtagagtctttttcttttcctaaactactactcatggtgactcaagcctggacaaaaactacatgaactccttttattttccagtaattgaattcaaagatgaagagacaaagatcctacacaatcaaaaaagtactggcttgaagaagtaatcagcatggagtaacatccatctgttacatgttggatctaaaagcactatgcccatttctgatcattcattccaactggtaaaatagtgctggtcaatcaatgattcattagagttccgtcaggagccccgactccgccatcctcctcgctcgccctccttcctcctcttcctggcccagggccgtttgctgggtgaaggggcatccccaccatcctcggccccc

SEQ ID NO: 150723 - DNA, 367 bp, Homo Sapiens
cttgttttccttttattgctctccatgtgggacaggtcatgctttatcaacatgtaccattttctacaaatgccgcccttcctctttaaattgcttggatgggcagatcgattttgattagcaacactgcagcagaaacaaggtgcatctctggaaggactgggtggttttctcgttattgttgctggtttgggtcacatcggatgctattttaaattctgtgttttattccacgatgggtcttgaatcctttccctattcctaggtttgaaatatgtttcctccctttaaaaaaaagaaggggggcagtattgtgttgaaccaaatgtttttctaccttctcctgtgatctgaatcaggtttcccc

SEQ ID NO: 150724 - DNA, 1245 bp, Homo Sapiens
  misc_feature (102)..(102): n is a, c, g, or t
cccgtccgctattctcgtgcacgcctgcgggccgacaataagcaccacgatcctgcgcgcgctccgtgcccgctctatcgtgtgtgttgtatcggtctagcngttcccgccgcgcgacgtctcagtcgtgcgcgctcgactcatacacgttagcggcccgttctctcgtggaggcgtctgttctctccaccgattctccgctcgcccaatgaccaacccgtcgtccatatacggaacacatcctccaccacgtccgtgtcaccgctgtcgcatcgcgaggttccggtcgagggcgcgcggcggagggcccagacatgccatgctcctctattacaccaggagccctacgccttttgcgtgggccctcgcccccgttggcgtacgaagaggccccaccccgagaagcaacgaccccgccccgcgtggcgcgcctcccctctcccgcaggcagtttcccttctttccaccgaacagcgcccctctcctccgtgttggagcccgccccggcggggcgttttcttttttctcctggggcccccgcaaggtcccgcccggccccctcgctgttgcttcgggccccgcaagtgctttcgcctcctgtaaaagcaccacgctggcgcgcgcgcaccgtggtcccccttttccccgtgcgggggcgcccgccgcgcccaccaccgaaaagtgtttttacaaacgttttttgagggcgcccgagcgcggaccccccacacaccccatttgtctccctcctgccgccgttcatcctcccggtcacgggggggacatgccaacggtgcggggccggggcggttgggtagatgtggactcactgcgtcgtagcgtctccgttgtcataaactaaaatgcctttatttcttcagtaaataagaaaatgaaaagcaaacaaaaatccctgtatcctctgctggtacatttcagaaatgtcaccatttcaaacataaggaaataattttcttgatacataaatactagaagcccaagaaaatatgaaggggaaattatctatagtcatatgctaaatatctctgtaatcaaagataaagatgcttaatttatctgcaatcctattataatttaccttgagttaatatccttggggaaaagaatcctttaaggaattctattcagtaaaacactacattaggataatatgaacaacatattgttttatttttaaaaatagttttagagatagggtcttgctctgtcaccctggctggagta

SEQ ID NO: 150725 - DNA, 518 bp, Homo Sapiens
tttattgttctattgctactcttaaatgtagagaggaaggccaaaggttgtagtgaagattgtagtgaagactctcttcaatttgagtttgaagctacccaaattatcattataatggtttggttttagagctcaatcctatacatacttatacaaaaacaaagtaatttatttgcttattattgcattttatagaacctggcaaagatattacaagaatgtaaaaatacaggccaatttctttcattaacatagatgagaacaaaatctaaacaatacgttatcaaaataaatccagtattgcatacaacaaataataatggtgtatttcagcaagttgtggtaacaaattgaagtaaatcaatgtactaagccacattaacagaacaaaaatgatacacaattgtctcaataatttacagaaaagacataggtagaatacgagttttcattttatacaaaaacttgtagtaaattaacagatcagaacttcctaaatttgatcccctgcatcaatc

SEQ ID NO: 150726 - DNA, 572 bp, Homo Sapiens
ccttgaaaaccccaacttttattcttgaaagacagctggattaactggcaaaagccagtttgttgaaatttcaagatggtataaaaatgcttccaggatatagtcagcatattcacgttcacttcagttccattcacagatggatttcagcttccaccgggtgcactgcttgaatcactcatccatcatttgccaactctgattgtgaggtactgatacaatggatcaagttcttaaaaattttaaaagaataaatgatgctggaattctggacctgaggatctttagtatttgaacaaatccacagattaaactgaaggtaaattaagacttcagttttggttatttccaacttttctgtgaggatgtatatccattaaagctcaggcttatagccacactgttacttttgtaggtaatcttccagttttatggtttaaaatccagccaaccagtggctgtaacagccgaattagccataattcactggctcacacagtggagatctggctctcattcataccaaagcatttcttggtaatgacctccatatttagagatcaggggaacaa

SEQ ID NO: 150727 - DNA, 461 bp, Homo Sapiens
ttttttttgagtactgaaacctttattcccattttactggaaacaaagaacatgaacaatttactagtcagaaaaaaagtgttttataacccaaaacaaatatttgccaagagctgtaaattgcttaaatcgcttaaactggagatttcagtgagatttttagcagtagattactaagctccttagttatagaacattcaatgcataggaaagtgtttttcctacaaagcataactgaaatgtagtttaactaatggtttacaattcagtcaaataccaaagctgcaaaccatttagggagtcatcaattacatattttgtacactttcaaaaagcttacagctgggatgggttgtttattttcaaagcatgactgctttaaaatgatcatattctttagcctgccacctaggaagcattaagcatttacttgcagaatgaacaaacgagcacgttgtccc

SEQ ID NO: 150728 - DNA, 429 bp, Homo Sapiens
tagaagaaaccactttcttttcaatgggctcctttttctttctcaaacttttggttttaggagaaatgtcattttgagatggctcctctttcttttttgcctttttggatttaggagaattcatgtcaacttcagaaggctctgctttctttttaacttgtttagctttggggaaaacagtttcttcctcttctgctatctcttcagtcttatcagattttggcttctcttttttctctttctcctcggtttgctttcgcagtgtctccccttttttcattgcggtgtctgattccaaaccagcgtcactacggagttttcccggcatcttcagcgcaggttgcccaggccgaccggtcttctcaaccgcgtggagaggaagaggtagttccccaccctgggtccacccggctctcgtcacttcccccc

SEQ ID NO: 150729 - DNA, 745 bp, Homo Sapiens
  misc_feature (158)..(252): n is a, c, g, or t
  misc_feature (257)..(258): n is a, c, g, or t
  misc_feature (261)..(341): n is a, c, g, or t
  misc_feature (344)..(392): n is a, c, g, or t
  misc_feature (396)..(397): n is a, c, g, or t
  misc_feature (399)..(403): n is a, c, g, or t
ataaacccccggggccgcccgcgcggtgtttttggtggggggggaccccgcaaatttatttccggcgggtttccttttggaaaaaaaagagaaaagggcttcttttcttccttggggggcgcggggcggaaaaagaagggggtttaaagaattttttnnnnnnnnnnnnnnnnnnnnnnnnnnnnnnnnnnnnnnnnnnnnnnnnnnnnnnnnnnnnnnnnnnnnnnnnnnnnnnnnnnnnnnnnnnnnnnnttttnnggnnnnnnnnnnnnnnnnnnnnnnnnnnnnnnnnnnnnnnnnnnnnnnnnnnnnnnnnnnnnnnnnnnnnnnnnnnnnnnnnnggnnnnnnnnnnnnnnnnnnnnnnnnnnnnnnnnnnnnnnnnnnnnnnnnntttnntnnnnngttttaaagtactgcattttattacataaaagcacaatcaacaaaatgataattaattttaaaatgtttttttctcactatactgcaaaagaatgttagtctgaacatgtacctcaagtagcacttaatattctaagttaatcacaaagagcatctctacattttcctcatgcatcttgtattttaattttcttactcttccacagaaaggggcataaataatgcccacctataaaaaagaatctctcatatctctgattcagcaacaacagatcacttgctttcacatgtgaatataataggaatgaagaaaaacatgaatttgagagttaaattacatcc

SEQ ID NO: 150730 - DNA, 604 bp, Homo Sapiens
ttttgccaactggtgagtctccgtgaccgctggcctctgccctggggtctcctccttgcccccagggttcacatccttctccagcaacatgagtcgaaaggtcgccactttttcctgaatttgctgttcctcgtacccctgctcttccatcatctcctccagctcgaggcatcgcagctcgacgcgccgcttgcgctcgtggtccaggatgtcaggattaggccgcttcaccagggcagcctccaggcgccgcagttcctcctctcccttgtagtcaggccgctcaccccggcggccccgcaccagggacaggttgcgctggacgtagccgttggtgccgctgccccggggcgtcggcagcccgatcccgttgtacatggccccgtgcccggggggggcaccaccgctcccgccgcctccgcccgccgcctccgagggggagaggtcttgccgccgccgctgctcgagctcccgagtccctcgggcctggggccgccgcctcgcctcgccggtccgcccgcctcagccgacgccgacgcctcctcgcttcctcaggggccgcaacgggctccgactgcgccactcgcaccccgcctgggccccc

SEQ ID NO: 150731 - DNA, 196 bp, Homo Sapiens
tttcgtatcataaatacaagttttatttaaactttttttgtaattcaagtaaaaaaacagctgttttttaactactgttacataaaaagtggaaagtgaggcaatccatcttttcggcaataatcttctcttcttataataatgccatcttctttgaaagtccagataattccaggccaggcacggtggctcacgt

SEQ ID NO: 150732 - DNA, 187 bp, Homo Sapiens
ggaactggtattctggtgaaatactttactattttgtaaaaagttttacaaaaaattacaaattaaaagtatcaaccctctgagttcaaagcagcattttgaaaatgaactggtagttaatcctgtaaccacccttagagttgtaagtggcccttgggaatagggatggatgggttccacctgttcc

SEQ ID NO: 150733 - DNA, 222 bp, Homo Sapiens
  misc_feature (45)..(98): n is a, c, g, or t
cttaacaggtcctgaaatgcagttttctttagatcggtccatgannnnnnnnnnnnnnnnnnnnnnnnnnnnnnnnnnnnnnnnnnnnnnnnnnnnnnttcactgaagtttcttatcaaatatccccgcactctggcctgggcaatggagtgagaccccgtcggctcccacctgcgacccaaggacccaagtcttccaagagctcagccgttagaattcccc

SEQ ID NO: 150734 - DNA, 496 bp, Homo Sapiens
ttttgacattttgtcagctggtttaggctggggagcagtactgactgcagatccggaaggcggaggagctccagatcgctgccattctgttgcttctgcagccagcctccgaatgtactgctcattcactgacaataagatgttctctggtttaatgtcagtgtggatgatacggcacttggtatgtaaataatcaagaccctgtaacacttgctgaataatttttttgacacaaggcagtggaagcccctgataattggatttgatgatccacttgagcagatgatgccccaaaacttcaaatcccatgcagatatgtgttccattaactcctgatattttaaagtcatctagtagttgaacaaccatttctctatttggatcattagggtctgaattgcgaactgacttcagcaaccggatttcatctagtgctgtttcagtgtaatgttcagcacttttaactactttcattgccacaaatttcttcccctcc

SEQ ID NO: 150735 - DNA, 1047 bp, Homo Sapiens
  misc_feature (311)..(364): n is a, c, g, or t
  misc_feature (404)..(405): n is a, c, g, or t
  misc_feature (410)..(412): n is a, c, g, or t
  misc_feature (419)..(628): n is a, c, g, or t
  misc_feature (767)..(779): n is a, c, g, or t
acaggacctcgtttgcagggtgggcgtgggtcaggacttgggtggtttttgttgttcttcaaatgcagaggtgtgtagctgaccccatttgcagagctgatgacccaggctctgggctttctccagcctgttgatgcaaccctggctcaaatgtctgttgtagtgagctctgaggcgagcagtgaggacgggatagaagtgccctcgctgccaccagccaggccgcatggcttgcacgctgaccccatgctctcagacaccgaggagaatgcatggggtcttcctcctacccccaggccacaaggctggannnnnnnnnnnnnnnnnnnnnnnnnnnnnnnnnnnnnnnnnnnnnnnnnnnnnncagacgaagtttcactctctgtgcctaggctggagtgcanngccgnnncaaaaannnnnnnnnnnnnnnnnnnnnnnnnnnnnnnnnnnnnnnnnnnnnnnnnnnnnnnnnnnnnnnnnnnnnnnnnnnnnnnnnnnnnnnnnnnnnnnnnnnnnnnnnnnnnnnnnnnnnnnnnnnnnnnnnnnnnnnnnnnnnnnnnnnnnnnnnnnnnnnnnnnnnnnnnnnnnnnnnnnnnnnnnnnnnnnnnnnnnnnnnnnnnnnnnngtgcgccatcttcccctctcagtgtgcccgcttgcgtcgctgagccctactttacctcgttcgcccctccggttctatgtgcgtatgtgctgcacaccctccctggcctggcacccccgccattattccccgaaatagnnnnnnnnnnnnnagtcgtcctgtatattcccccatcccgcgccctacgtagataacaacctacccacccctacacccacccgctcttccctctttcccacccacccgacgctcctctcctcgtcctaccacccccttcctcctcgttccactcataaaatcccactactccgcctataataccctcgcacctgccacgcggcgtcgatcacctcgtacccgttagccgcgcccatatccgtccgatgttcacacacgcacctcacgctctcctcacactg

SEQ ID NO: 150736 - DNA, 699 bp, Homo Sapiens
cgagatgtttatgtttatttcttgatctggatactgattacacaggcagacactatgaaaattgactatacactataaatgccattacacgcaacagaaaattacaatttagcaaatttagttcaaaacagaaaaaccagttctactttctcattcaagttaccataaattgctacttaccaacaattttatcaactgtatcatgatcatcaaaagttacaaaagcaaatcctctcttttttccactctgcctgtcttccataacttctatggtttcaatcttgccatacttttcaaagtagtctctcaaattatattcttctgtatcttctttaataccaccaacaaaaattttcttcactgttagatgggcaccaggctttacagaatcctctctagaaacagctctctttggttccactacacgcccatcaaccttgtgtggtcgagcacacattgctgcatccacctcttcaacacaagaataagtcacaaaaccaaagcccctggaacgttttgtttgggggtctctcattaccacacaatctgtgagtgtgccccatttctcaaaatgttctcgtaaactatcatctgtagtttcaaagctcagaccaccaataaacagttttctcaactgctctggttcctttggatcatggccctccattttgagaccggactcgcctcttccaactcccc

SEQ ID NO: 150737 - DNA, 198 bp, Homo Sapiens
attccactttcttctgcctgctttattttatcctttatactttttgtatcctcagtccaatcaagttgacactcaatattaaccatcacaaccacattctgggccattcaaataaaaaaatagattaagaaatgtaaaaatactgaaattatttgtaatgtttttctgatcaccatggaattaagctagaaatgatca

SEQ ID NO: 150738 - DNA, 470 bp, Homo Sapiens
  misc_feature (283)..(380): n is a, c, g, or t
tcataattaaatcacatttattaactgaagcaaattcacttgagctttttataggattctaggaaatagattccttacatataatgaggacgtgcatctttaggtcttttcatatttttcttccctgtaacagtcctatgtttggtcttttctcgtcaggttcattcccttgacactaacagagaacactgtaattctaaagtaaaatgatagctggggatccatggattccaaggccagtacctccccattgtgtggatcccacagatatgaagtcagaaannnnnnnnnnnnnnnnnnnnnnnnnnnnnnnnnnnnnnnnnnnnnnnnnnnnnnnnnnnnnnnnnnnnnnnnnnnnnnnnnnnnnnnnnnnnnnnnnnagaacacagagctcagatatgtatgcaggattccagtccgtgctgaatactcttccagtatgagtactcttcctactcctaaaggtgtcc

SEQ ID NO: 150739 - DNA, 445 bp, Homo Sapiens
ccagttctttcttttttattctgcagttttctatcagtgtcgggtcccccactccagccagtggctgtggggaagggaagacatctctagggacacgactacagaccaggcagtgagcctagcaaccatacatcgaaggtgtcgccagcctcagtgccggtgggcgtctgcaccaggaatagctaaagccgacgacatctagccacctcgagcgccagggaagacgcttcgcgtaaaaccgcggcctcaggcggactcccgctccagctccgcgctgctggtggcatttccggggacccaaagtgggtggcctgggggcaaaggaacagaggccgaagaacttggggtatgttccactagagcacctaagggacggagtgggaggttacatcagatatgcgacctcgacacattccaaaagtggcagccccgtgggctaccccca

SEQ ID NO: 150740 - DNA, 855 bp, Homo Sapiens
gcttggaatggcgccacgcggcccgggggaccaaaagggaggagccccagaaaattctgccccacgggaggggaggaaggaaaacccaggggggggcatttggccccctccctttttttccgggagcccaaatgtcttcctttggggattggggacaaccccgggggccgcaggtggctaggagcaccaccaacatcccatggacccaggaaggacactgctgatgaagacccggtgagccaaacagacctgttcccgctgctggcgcccgcgctgctccgaggccgcctgctgctccagcagctcccgcagctgctcctcctcccggcgagcggccactcgctccccagccagctcaccccgcagcaaggccacctccacctccatctcgatcctcagctccttcctctggcgctgtagctccttcactcgctgctccatcagggccacacgagtcaatgcctccagctgctgtccttgcaggcgccgcgccgcccctcgcaccccttcccgcgaagaggtggatgcgggaggtgtggccgccatagctatcggaggcgtagcctcgggcgcgtcgcggctgctctcagtgctgctgccttctcccacttcttcttcctctgcctgctgctcagctcccccgcggctcgaaggttccgccaggacttcggatgcctcctgttcccgggactcctcgggatggccctggggctggacctccacgtcgcattccgggaccagcggcggcggggtcccctcctcggggctgcttcgcgtccccatggccgctgggactcccagggatccaggagtcggggctctccttctctgaacaagccaggagtcggagtcccc

SEQ ID NO: 150741 - DNA, 1387 bp, Homo Sapiens
ggggttacgcgcgggcgcactgcgggggccaaggaaggaagaaatgtggtcgcggttggtgtggctgggccttcgggcccctctgggcgggcgccagggcttcacctccaaggcggatcctcagggcagtggccggatcacggctgcggtgatcgagcacctggagcgtctagcgcttgtggacttcggcagccgcgaggcagtggcgcgactggagaaagctatcgccttcgccgaccggctacgcgccgtggacacagacggggtggagcccatggaatcggtcctggaggacagatgtctatacctgagatccgacaatgtggtagaaggcaactgtgctgatgaattactacaaaactcccatcgcgtcgtggaggagtactttgtggcccccccaggtaatatctctttgccaaagctggatgaacaagagccattcccacacagctgagtagctcattctggaaagggggtactctgtgaacatgtggaagcataatgacagtatttttttactgtgaatactaatgttcctgcttttttcagtcccctgaaaaaatggatgctcaagcatttcttaataacagattcttctgaagacagaattgggaaagatctggccccaacaaggcagtgagttcctgatgctaactgaggtgaaagaaaagcaaaagtcagcttccaaggaattcacttaacaggcctgttcagtatggaagacattatttatctgcctttaactccccccaaaggaccataccaactgcatgaaagtgaacttttctatctacgtaactggtagacggagcatcttgatcactatgtgacaaccttggctgtcatttttagttgccatttgcattgatttgagcagccctatctttaccgaacatacctgaatttgttcctgggctcccactttcttcccagaagagggctaacttcctactaaggtctgaagagtgttgaaagtagactagagcttgggaactcctaacctagaactatctgtcatcccacaaagtgattatatgccaaagggatactagtcatacctagtgtttctctttctgaaaagagaacttatcctaaaattagccctgagcctgggaacaacaggaagtcctctccgcccccaataatgattatttaattgagatgagtccaggatacaactcagataccaaggataatggacttattagggataaatgggtgggggcaggggtaatcgtgaaacagcactggaagctggacggggatcaaggagagacaacctccgtagcggagacatttgcactaaaattggttcagagcgtgccaacgagaggggaagcaaagagagccgaaaagccaagggaacgaccaacaggcagcagaaggc

SEQ ID NO: 150742 - DNA, 866 bp, Homo Sapiens
  misc_feature (55)..(95): n is a, c, g, or t
  misc_feature (131)..(141): n is a, c, g, or t
  misc_feature (198)..(236): n is a, c, g, or t
agaggaacaggtgtaaccacaatctcatagcgggggggtgtttggttagttcgcnnnnnnnnnnnnnnnnnnnnnnnnnnnnnnnnnnnnnnnnnccaagatgtagaaacatgaaaggatgaaattaagtnnnnnnnnnnnatagtgaacggaatggattgaacgggggtagaagccggggaaacaataagggaatannnnnnnnnnnnnnnnnnnnnnnnnnnnnnnnnnnnnnncaaaggaaggttaatgggtaggagagagcggggagagagggcaaagggggagaagaggccttactattgtgagggaagtgaggggagggcattcgttttgcggatggggtttcggggtggaagagcagtttccatggcaaccagacgggggcggcagcgcacttggtaagaggtcgagcttgacgcgtgggatggggtaaggcgagaatctgccttggcggcttcggctccggctgcggccaccgacagggactcgacgtctgtcggcccgaacgctgggtcgcgctggtggccgaggtcccggctgattcggatccagcctagtaaccaggaagctatctccggagaccattgcccaagccatggccgacgggttgagatctccttgggaggatcggtgggccatcctgttggcttgatcgccggcggacagcgacaccgagttctgggccatcttcaaacaccgcctgcagtgtttgctagacgtatgtcgatcaaactgggccctcggcggcgccgcaggtcactccagcccgcgtcagacgcaaccgttaccaaccccagtagccatttttcacgcaacggcggaaggagcagccgccggaaacgggcgcttgtcccgcgcgcccc

SEQ ID NO: 150743 - DNA, 788 bp, Homo Sapiens
  misc_feature (315)..(315): n is a, c, g, or t
ggggggccacaagaaacaggggggcaaaggttttggcctccccttatggcgccagggtgggcttggaaagtcggggtcccacatttttctgcattttcacctttttcccttggaggttttaagaaatctccagagcctggcttcagaaggagttacttctctgtgttcccaggcgactccgaatctttccctgccaccactagacttggaacctgctgacttggcccaagatggggggttctcttccggtgtcccaaagatgttagaagccatcttgttcttcctcacaggctgttctgctggctcatcaaagcntaatgaaaaattggacccaccacctggaggccgcaaaaccttgctgggcagacagggacaccccggcgggccaccacgaggaaaagagcctgcagaccagccggatcagtgctcagatttgctcgcagcgcccaaggccggggccagcacacgcccgagccagaagcgggagcgcatggccctcatgtgggacaatgggcccagggccctgcaggctccttgggctcctgggagaccaagcccaccatcctggacccgaccagtgtcgccgcgggtggctgaaagaagatcctcccgcacactctcaccgactccaacctgccgtacggcaaagggccgccacccacagtccccctcagctgtcgttaccggggagaaatgaatagaagggacgactggggcggggccacaagccgaggcagtcctgccgcacaaagcggcgcccactccttactctgccaccctcccccccc

SEQ ID NO: 150744 - DNA, 823 bp, Homo Sapiens
  misc_feature (60)..(110): n is a, c, g, or t
  misc_feature (202)..(202): n is a, c, g, or t
aaaggaggggggtgggttttacagggcagaccctttccatgaaatttcccgggggtggannnnnnnnnnnnnnnnnnnnnnnnnnnnnnnnnnnnnnnnnnnnnnnnnnnaacacccttggtagggggttaggttagaggataggccggggcaggttccttcttttattcccctgggggctcttccatgggacccatagcgntttcaccacgacagcggtttttatcaatgagaaacttggtaaagttccatttgatggcatttccccagcatgcccctgcctttgggctggactttcatccatttccacagtgggtgggcatcgtccccatttacacagatcttgctgtacatgtcaaacttgacgttgtagccggctgcaaactccttgatttcttgattacttcctggctcctgcctcccaaactggttgcaggggaaggccaggattcgtaaaccacactcagcatatcgggcatgcagatcgactagctgagtgtagtttacgtcagttttgcctcattgcgaggccacgttggtgacgatgcacacgaaacccctgtacttatccaggcagaccatgtgcccgtcgatgtccttggctgagaattcgtgcatggagcgcgcacagcgccaatcatcgcgggatgcacacatggtgcctgccagaccaggcgcagccagagccccgcacagcagtgctggcttaagtaagcggctcagacggccccagctcatctcggcggccggagccagcggctcctcccctcacgcagccgaccaatggacgcgcgaggccgagtatggcttgcccgccctcccc

SEQ ID NO: 150745 - DNA, 810 bp, Homo Sapiens
  misc_feature (190)..(205): n is a, c, g, or t
  misc_feature (587)..(619): n is a, c, g, or t
cgggccggggggcttttttggtggggggaagaagtcccgaccgggtggtcccggagcccggggttttctctagggaaaccggctaggggcccaagttcccttaccctaaagggggccggggcccccaaaacgggagggtttagaaaggttttttgggggcccgagggcggccgaccagggaataaaggcnnnnnnnnnnnnnnnntggattaagctggaaaattttacttttattttgaaatggtgctgcaggtgggtctggtgagttccacatatgtcccctgctaggataatggtgtccaccccatcccccttcagcagctgaagggcccccggaggagaccagggatttttgggaggagtgtggagctccggatcctgtgcctggcaggccttcatgaggctacaggtcctcgcccccagcttctggaccacatagaagccacctcatgagccaggaggacagcgggagccagcgaacgggttgtcttctctccacatgcctctgtctccttcagtttggatttcttcgagtacgcttggaaagttttcctggaggtccgcagccgggtggggggcgccatggnnnnnnnnnnnnnnnnnnnnnnnnnnnnnnnnnggtggccacatgaccctggaacagggcactgcaaaaggatgggctgttggtcagaggacttccctacccaggtggcttttattccctcccgcttctgcacgccacgtccattcctctctggtactgggaagcctgccttctcacttccgaggtgctctgtgtcagccctcagcctggtcaacggtctcccc

SEQ ID NO: 150746 - DNA, 836 bp, Homo Sapiens
  misc_feature (117)..(260): n is a, c, g, or t
  misc_feature (267)..(276): n is a, c, g, or t
  misc_feature (366)..(416): n is a, c, g, or t
aggaaagagagaggtgggggaaaataaaaaggggaaggaggggaagaaatgggtgagggttatgccgggggtatgggttgaaagaaggttggggagggggggagaaagaggattatnnnnnnnnnnnnnnnnnnnnnnnnnnnnnnnnnnnnnnnnnnnnnnnnnnnnnnnnnnnnnnnnnnnnnnnnnnnnnnnnnnnnnnnnnnnnnnnnnnnnnnnnnnnnnnnnnnnnnnnnnnnnnnnnnnnnnnnnnnnnnnnncaataannnnnnnnnnagaaaggtagggttgggggtaaagagatgagaggaaaggttgaaggaagggtgagggtagcaagaggggaaagagcagggtgatggatannnnnnnnnnnnnnnnnnnnnnnnnnnnnnnnnnnnnnnnnnnnnnnnnnntcaggaagtccccttggagcaggcaggtgcagcttgttggggggcagggtatgatgggggtgcaagcacaggtcatgcaaagagtaggagagggtggccgatcttactgttgaaggtgggcgggagctttttattgggaatgtttggtatttatgtacgtaatctgccgtattattgggagtaacatgtctggtataatcacgggtctctccaatttgttcgttccactgaacgtaacccctaccgacaagctccaccttcacgacggggtccacgagggtactgttgagggtgaggaccacctgcccgtctatgatagagccggccaggtagaccgcatcttggggcagcactacctcgatggacttcaccacagacatgggagattgggcgggggagactcatcctccccatcccccc

SEQ ID NO: 150747 - DNA, 715 bp, Homo Sapiens
gcggaagtaaaaaaccaattatttttgaaggatgggggggtgaaaatggtgggtcttgggctttttcccaataggggaccaaaccacccagggccaatccccggtaagactctgtttcatgtttagcttctacccagttgtcccatgccacatcccggatccatctgctggcaatatttattgcttgaccagtcttttgaaataaataatacttgtataatgaatttataacgatggtatgcaaattctttgactgctgccaatattcgatctgccaattcaagtgacaaatgaggggctttgtcatcatatttgacatctttaagactgtcctttaatatctgctggattttagtttctaccaaatgtgcttgaaatttcttcagtggctccattctgtatgaattagcaaactttaattttgccagggcacttttccattctttgcctacatcagcaattgagtcatcaaacggaggttccacgtactgaacatcatgaaaagactctctcagtctttctcttaagatctgtgcatatgactccttctcgaacatgctaggcttcctttctctcttagacaccggggattgatgcgtttggccggtgggcgtcttcgccattcggcctcgccgctccatcttgatcggctcaccgggacgcctccgccctccgccctccgccctccgccgtgtaactgcccaacggccctccc

SEQ ID NO: 150748 - DNA, 972 bp, Homo Sapiens
  misc_feature (644)..(667): n is a, c, g, or t
  misc_feature (932)..(932): n is a, c, g, or t
gggctgcctggtggcttggccagtttgacatcatggcgtgcgcccgcggcaccgtggcgccgccagtccgagcctccatcgatgtgagtctcgtggtggtagtccatggtggcggagcaagcaacatctcagccaaccggaaagagctggtgcgcgagggcatcgccagagcggcaaccgagggctacaaaatcctcaaggcgggagggagcgcggtagatgctgtggaaggagccgtgactgtcctgtaaaacgacccagagttccacgcaggttatgggtctgtcctgactgtaaaccccgatatttacatggacgctactatcctgccatgggaaccgccctgtctgcctgtgccgtgtctgccccgtgctctatccccatttccgtttaacccgcaccggctgttattccctacgccccctatttgttttccgaccgcactccttgtataccccccccagataacctccacttcctccggtcccatttcccccgccctactaattaccctcccctctcccaccattggtttcattttatcgtggcgcccaccacacccataatttttcccactttttcttttcccactctttctccctcctgcaccccctccaaattaacccttttgtcttccccttttnnnnnnnnnnnnnnnnnnnnnnnntttaactttttcgcgtacccccatcacacccccttccgtcttttatatcgcgagatctgtcaaaacccagtgtgttgactccgcgtgttacttcgccggtgttttcctccgtcccgccctggtttcccttcttttacccccctcgttgtattgtatttctctccacactcccccctttgttttcttcatcgtcccggatacctaacatatatatgctccggccatactatcctcgtttaccacaacttcttgcctttcccataantttctttccacaccattatattgcgcgcgttccacctcaa

SEQ ID NO: 150749 - DNA, 590 bp, Homo Sapiens
ggggcccacacttcatggttttcggttgtgaatgcctggtctgcccagaaagctgtgcacgatgattgagcccttcttaggcacctggaaactgatctccagcgaaaactttgagaattacgtgagagaactgggagtggaatgtgagccccggaaagtcgcatgtttaataaagccaagcgttagtattagtttcaatggggaaaggatggacatccaagcaggaagtgcatgcaggaacacggagatctctttcaagttgggggaagaatttgaagagaccactgcagacaaccgaaaagtgaagagccttataacctttgaaggtgggtcaatgatccaggtccaaaaatggcttggcaaacagacaacaattaaaagaaaaattgtggatggaaaaatggtagtggagtgcaccatgaacaatgttgtcagcactaggatctacgaaagggtgtagcagaagggtagacaccagcaagaacttggccaccacaaagaacttgccgctcaagaaagccagccccagggacagtgatttaagacatcaccagcattaagttttgctcaataaaagcactaattgaaaa

SEQ ID NO: 150750 - DNA, 787 bp, Homo Sapiens
  misc_feature (111)..(111): n is a, c, g, or t
aacccgttattggccccattttccctttcccaaagggggccccgcgcgcccaaaagagaatttttttataaaaagttttttagggggcccaaggcggccccaacagggaanggtttttggctcccgtaagggtcccaaggggaaggggggttttttcccgggtccaagctttattgggcagggtggttgggttcagtactcggatcttgtggctcctttgccagttcagggctcaggccttgacatggaatggtggtgtggcttcacatgatgttgcttgggcaggtgactattccttggggcaagtgacttccttgggctccaggcagaatggacaggcctgggggaggcttagtgatggtgcctcctacatttcctgcacctgcatctcctcctctttcgggatcttctgcagcctctgcgatgccgcctcctgtggcggcaggagtgtctcctccgccttctgcatgaccgacgcctcttgtggatcctatgtagcctcttacgagagcagcgcctgtgtctgtggtggtggtggcccctgtgtgtcctcccatagtcctctacgcgctctgggctcagcccttgcccctgcccctgctcctcgcgttcatggtcttgtccaggcccctggtgcggaccctcactggggctcctcattcggtagcgaaccatggtgccaggagatcaggaggttctggattgaggctgcagctgacctggattggaggaggagggacgaaagcctgcccacctgctcttggtggtgatgatggtctggtgtccc

SEQ ID NO: 150751 - DNA, 1071 bp, Homo Sapiens
gaaaaggtgggcgaatttggggaaaccccagggtccgtttaaggggaattgccagagtgtgtccacccttttttctgggaggagacccttcggtcttagaggggttcatgtggggtttcacaaagtgtgggataccactttgtcccaaggacacaagggattctgaggaagcccttttccctttatcccatggaagcccttaaccagcgtggtaacaggatgcactctcttaagattcttcaagatggatcgcgccagatcagtcacagacagcccgatagcccaagaggtatagcccttcatgttaaggacctcatagccgccttccaccacctgcttgtgaacatttttccagtgttccttatctgagtcagttcctattgctgggttcagtgacttcagagttacgccagcaacgtttacaccactccatatgggcacattggagtcccccattttctcccaagaacccagccgtggcgagtttgtagggttgacccccagtttctccgcgatcaggtaacgaaaacgtgctgagtttaggttgcagccacttccgatcacacggcctacagggaagccgcttatcttccaaaccacgtatgtcaaaatatccactgggttagtgacgataattattttacagtccggactgttttggacaatgcccggaacaatggctttcatgatagcgacattacgttggagcaggtcaaggcgagtttctccagacaccattcttgcaccagctgtgataataaccagtttggagttggcagatacattgtaatcttttccaaagacgatttttggagtgctaaggaaaagactgccgtgcagaagatccagtgcctctcccctcagtttgttcgtatcagcgtcaacaagggcaagttcatcagccaaacccttcagtaaaatactaatagcacacgccatgcccacatttccaactccgaccacagtaatcttacaccgggaaagtttatcttccggaactaggttctgaatcagctgctccttgacggtggacatgttgagccttactgctgactccgcagcacaggtccc

SEQ ID NO: 150752 - DNA, 552 bp, Homo Sapiens
ctcgacaagattattttttatttatgggtgggttattttgcgatgagttttcaacatttattgacaggtggcattgttccttagcaggctcctgtttttcatcggacggtggcatttttcaagatgtggcgagatgctcttgaagtctggtaaaattctcacgcaggagttttgatggacttgctattctgtgcatctagtattttttacaccttatggtgtatgagcggcggcgacggcagcatcttcgcctcctccgccggcagcatcgcctcctccgtctgcgacatcttcgcctgcgacggcggcatctgctcctgcttttgctgcggcagcatcggtatgtggccatggtgctggcttggccgggagctggctcagagcaggggacaccacctgggtcgagccagccaacctgtgagcaggtggaattttgtgggctgtggcctgggagccagcaccctcttcctcttatagatactagtggcccctaggaattatgaagtcaaagaggaccaggacctcacagaccatggccagtgaggacctccc

SEQ ID NO: 150753 - DNA, 561 bp, Homo Sapiens
cctagcatggacaagattttcagccatttttgccacatatacatttttaaggaaaaaagatttttctctgtaagaaagttctggttatgttgttttaaaggtgacttgtcaggagttgagacttccctgccggattctattttgaaagtaaatggtcttccctccttgttccgattctgcgttcccatcgtcagacaactttggagtattagaaaccactgtatatatgtggaaagccaggtcagccagacctgttagaattggtgtgcactcacctgagagatctggcaggttggatatatttatgtgtatttctccacagtgcttgctttgccctgttggtaaggattttaaataaccatgctcaaaagagctgttctaatctgcgttttgcatgttaagtgttaatatcaaacattctttacgtgctcgaggtattgcttttaacattctactttgccagtttcttcattagattaattgacatgtattatttaaatgaccagtgatgctttgtgcaattatgaatgttgaagattaaagtacatagttactaaaaaa

SEQ ID NO: 150754 - DNA, 855 bp, Homo Sapiens
  misc_feature (95)..(96): n is a, c, g, or t
  misc_feature (129)..(129): n is a, c, g, or t
  misc_feature (137)..(137): n is a, c, g, or t
  misc_feature (309)..(309): n is a, c, g, or t
  misc_feature (316)..(317): n is a, c, g, or t
  misc_feature (319)..(322): n is a, c, g, or t
agtgtttcccccctcgcccccggggggggcgcctcgcgttttatttctgggcgtgaaggagaatatcccgcatgacaaaaatattttcttttttnncccggggggtctggcctggggcaaaacaccacntatagggnccccttgtttcctttgtcccctttcttggggcccgcccccgcccaaagggaaaggtttttaaaaaagcttcttgaggggggcggaggccgcccgcacaaggaaaagtgtggttgcgcgggcgcgattgtagtggggcgggcggctaaccccgttgtcggtggtgttgtgtanatttttnntnnnngctcctgggagaggctttactcaaacacggggaaggtcgcctggggatcccgcggccacccacccacagttcagcggtactcggaaaccagcgccgagataacgtggctcaggaacttgtccagcgacgcctgcagcgcggggctgaagtctccggggtagtgccgggcgagggttaccagcaggcagtggcccaggagctggaagctggccgggtccactcgcagctggcacgcgtgcaggtggctcagcgcggacagcgcgtggggtaggtcgtccaggcgctccacggcgaggctcagcgcgtccgccaccttctggccgtgggctctgacttgtgaggagccggggctcaggtccaggtgggagaagtaggtcttcgtggcggggaaagccaggaaggtcctttccagggcctctgtcgtgtagacgccgacgttgctgcccagcttcttccacagggcgcgcaccagcgcccggtcctccgcggacagcgccatccccgcgctggaacccgccgcgccctgcgacccc

SEQ ID NO: 150755 - DNA, 308 bp, Homo Sapiens
tttgatattattatatacagaagctaatgtttattgaacgtaacagtatatttcatgtagtttcccataattttttcatgtactaactcatgtaattctttgttttttagagatctgaagtgattttacctttacttccttcactttaagccaatcatgaaatttcagtgatttctggggtgagggcgaaaggtggtgttacgaatcatcggggctgtggcccagttgcctcacggaggtgcaggtaggctggggcctcactagggcagctggaggagcacggactgccctgccggcaggcaggtgat

SEQ ID NO: 150756 - DNA, 415 bp, Homo Sapiens
tttgcttttttttggggggagggtagggtagggaaatataaggggaaaaataaattaggctagattaaagctttggctatttcctgcttttatacacagacgcggctctcgcgacctcccctccggggccccgataaatacagtatactgcgatttaaattaagggcgcgggcggagttagaaggaccccaggagccgagaggctccacgaataaataaaaaccgtaaaaaaccaagcccggagaaaggggaaagcggggtggggcgcatccttataggagagaagaggcgtgtagcgaataaagtgacagccccccaccctggacccgcaggctcaggagtccacgcggggagaggggatggagaactctcctcgcttcgtcctctctcccggggaatccctaaccccgcactg

SEQ ID NO: 150757 - DNA, 348 bp, Homo Sapiens
tttttacggtagggggcaggggttacctttaatgctccattttgtgccaaatcccccatgatgccctgtccctgagtatccctgcccaccctccccccagtgcagggtgggcacagggctccaccccctggggtacaaaggaataagttaagtgtcccccccctccctccttccccaataaatagagtgaacattctgcccagggcctcccccaccttgtggcatggcgggctggggcagggcctggggcgctacattcatggctgcccaggcgggcggtggtgggcaggccttagtgggagccgtgggccccgcacaggggcactgtgctgtcttggttctgccccc

SEQ ID NO: 150758 - DNA, 505 bp, Homo Sapiens
agcctggccagtgtctgacctttattaagaggtgaggtggggagagggcccgccagggtgcccactccctcttggtgacccccccatctggagttaaggctccaagcagcaagtgacagaggagggtgcctggctccagcagcctgggcttggcggcgactcccccaaaaacaccccagctgggtgggtgcctgggggcctaggtgaggctggtgttggagctgctggtagcactgcctcgcttttgcaggcagcgcacagcactggggacctgcaggcctgtcgtcacctggaagctgccacaccataccgtgaaagcaggcagcagcggctgtgtgaacctggtcttgaaagtgtgcagcacttgtttggtgcgggcattgtagaaggacaggaggccttggtggaagtcacagtgcacacccaggcagtcgggcacgggggcgtccagcaccttgaccttgttggcgtgcttggccgtgaagctgacatgcagccaattgtt

SEQ ID NO: 150759 - DNA, 377 bp, Homo Sapiens
gggctggaatgtttctttttcagctggttcatcttcttcaattaaggaagcttttgtatacttcgccaaattaagattttgaataaatgcttccaattcaccttgctgaaggtcatcgattgctccttttttgcctccatctatcacttcctcattctcatccaaagtagccagcataaggtaatcttgcttggtgcctccgagccgtaacacttcctccagggagaacccattctcggcttcactagtattatcctcatcctcctcgtccggatcttctactgcctcctcggggcgccaaggccgcttggcatggaactccaaaggctccttgactgcggccatggcgggcaaagcatacgcgcgtgaaactcccc

SEQ ID NO: 150760 - DNA, 960 bp, Homo Sapiens
  misc_feature (444)..(453): n is a, c, g, or t
  misc_feature (483)..(483): n is a, c, g, or t
  misc_feature (510)..(524): n is a, c, g, or t
  misc_feature (553)..(553): n is a, c, g, or t
  misc_feature (555)..(555): n is a, c, g, or t
gggtttttctgttcattttattgcagtattaaatgcttaagcttattaggaccataattcactttaaatataattgtatagaatatatttgcgtcgatcaaataattgcttcagatgaattcttagactcttgataatatcacacctaatttaacttgattttacaagctgtacaatccagttttagttttctattgtgataataacttttttcaaaccagtttacacatcttaatgaaataacattctctgactgcacttgacttcagtactctcttgcctgcctgtttttgacctctgcctgagttggattagatgtttttcttactgtcacttctaaatagaaaatgacagtgttataaaaaaggggaaggataaaaaccctttgaccatcccccttgtggtctccaaaagtcccccaggccatctcaaaacaaatgggcnnnnnnnnnnggcgatgaacaggtattttggttctccccnacccaacacaagggactttcccagggnnnnnnnnnnnnnnnggttcccagggggggcgcccttgcccctntncgcgcccaagaacgacctcgccgctcgagtacaggatcacgtacttctcttggtttttgtgccccggcccctttggtagccccctaccgcaacaaaggctttgttcctcacaaaccctatttcccgctttgcggcggccgacgcggcggcccccagttaacggtccgaaggcgataacgattggggtgcccgcagatctgggtttcccccccagacgagcacccactgtggttcctgtaaactaaggccgccctttgggacttcttcctcgccaacacacataaataatttctcggggcggcaacaacccgaagaggcgttcttttgaacacaaattcgccgcacagtggaccggcttcgccggcggcccgcccacgtgcgagctctgttccacccgcgcgcgtc

SEQ ID NO: 150761 - DNA, 680 bp, Homo Sapiens
cttcccaccaaaaagactaaagaaaataatttttctacttcacgattcctttccttaactgtaaattgatgacactgtacttgatactttaaaaacccagtcaaagcaaaccaatgacttgatcctaccaactctaaggaaactaagggtatacaccctaagttatccaaacacaactgaggttgaggtcattaaaccggtaagtatacgccctatactaactcacagctgaaagtgtacatggagcaaaaaacaaagaatacatatcccaagcgaatattttgtctggtgacacatcaggaagccacaagctccacttcatttaaaaaattatttgggtatcagcggtgtggcaaacattcaaaattctccttcaaacagttggaagaaaacatgtaatacattccagagcaaagatgaatcaaaaagtatctttttgctcaggaaaagaatttcttcattcaattacagcataattcattgaacggggaagtcatgagtctcttatgagacttcctgaacagtttataaatacaacaagaacatttattcaataaataagtggttcctaaagtctttactgatgatctccaggattgtccatcgctatggtccaggccagctccactttctctgacaggctttagctgccagtggaatgggatgtttcctgtctttcc

SEQ ID NO: 150762 - DNA, 1743 bp, Homo Sapiens
  misc_feature (621)..(804): n is a, c, g, or t
tattaccacttgatggaggcatcatgctctgttcgcaatccgtgtgcatcaggtaccagtaaccaagtggtacctgagaaatatcctcatgtcacatagatctccactatgcccttggtcacaggaggctgtccagaaggaaattaggacgttatcaaggactgaagctatagtatacatactatccaccaacctttcttgatgaggcttaagggcttatttagaggagtataaccttacacaagtaaagatgacaaatttatgaacggggctctgttttcatgatgagagagtacgtgcagtcccgtattcacgggaaaatctcgttggggcttctctcgcggggctctgtttccgtgatgaaagagtaagtgcaatcccgtattcaccggaaaatctcgctggggcttctctccgtgagaatattcacatgctcaagtgaggggaccatggctggaatcatttccacataggaattatcagcactaattgtattttaaaagttttgtaaaagaaatttctcctagcgtaagtgctcacaagattcataaaaatggaggaattgctgcaggcagtaattgaggaatgactgcatgattattttcaacctcagcaacagtnnnnnnnnnnnnnnnnnnnnnnnnnnnnnnnnnnnnnnnnnnnnnnnnnnnnnnnnnnnnnnnnnnnnnnnnnnnnnnnnnnnnnnnnnnnnnnnnnnnnnnnnnnnnnnnnnnnnnnnnnnnnnnnnnnnnnnnnnnnnnnnnnnnnnnnnnnnnnnnnnnnnnnnnnnnnnnnnnnnnnnnncgtgctgtagaccaagggtcggccaagtttttctggaaaggggcagatgacaggaagtatttcagacttcattggccacaaattttctccatcaaacattcttcttccttaaagatggaaccactattgttagctggcaaggccatacaaagacaagcagctggccgtggtttgcggcccattcatgaccttccacgttccttacttcactgatttctctctttagtgtgatttccgtcatgaggaatcaagtgagactaggaagggtttccccagccactgtgtttacagagatgctccctagtgtgctcattattactcatgggcccagaagggctagaagtggtctgaagtcattttgacattaaatgccacggcttggattttgacattaaatgccaagctgccattaagtcctcctgtgtttgttaagagctgaatgtaccctgaaggcttctccatgctacagacgtacattttcacccccggcgtgagttctcacaaacctcctatgggatgagaacgcctcgtcttcccagtttttacaggaactggacttctcccaagttccgtggattcttttgcacccagtaaggtgcgagctcacagaggcttcctcttacacccacgaggtctgtttccggtctgaatcatcctgtgtctctaaagcaggcgcgctcactggagccttttccacacggatgacacaaagagcttctctccccggtgagttttcacgtggctcctgagggatgagtggtcgctgaaggctttcccgcagacaaggcattcgtagggcttctccccggtgtggatccgcctgtgcacattcaggttggagcctatgctgaaggccttcccacagtgatcgcattcgtacggtttctcccccgtgtggcttcgcatgtgcgtcttcagcgttgactggttcctgaaggc

SEQ ID NO: 150763 - DNA, 415 bp, Homo Sapiens
tttttttggattacatgaatttttattgtaccattttttatggtggcaaataagcaaactgtgagtaaacgagggcagctgaataaatttacagtatacaatattagagaatattatgttgcaattgctcatcttactctgaccatcataatcattctttttgctgggtccaggaccatggctaactcatggcacaaaaagctagtcctggtttggtctgaatttgagtcctagttattctggtgacttcaaggctacccaagcacatgggcaaaacacttaaaaaatatgaaagattatttaagtaaagcaaaatgaggaacagaagaagacagtttagattcatgtacacatacatatattttatttgggtatattacctcagaaaatcaacaactgtcattttcaatcttcc

SEQ ID NO: 150764 - DNA, 366 bp, Homo Sapiens
gcaaagatgtggatcaaatggaactcatacatcgctagtgggaaaataaaatggcacaactactttggtaaacagttggaagtacatgatattaaacatatactgacatatgaccatctgaccaatcaggtatttgctcaagacaaatgaaaacatatgtctacacaaagacttatattttaaggttaacagcagttttattcataataacccaaaactggaaacaatgcaatatccatcagcaggtaaatgaagagtgtggtacatacatacaatggaataactatgcaccaatagatacaacctactaatacatgcaacaacatagatgaacctcaaaaacattacactgagcaaaagcagaca

SEQ ID NO: 150765 - DNA, 1401 bp, Homo Sapiens
  misc_feature (118)..(126): n is a, c, g, or t
  misc_feature (612)..(613): n is a, c, g, or t
  misc_feature (748)..(824): n is a, c, g, or t
  misc_feature (872)..(890): n is a, c, g, or t
  misc_feature (892)..(895): n is a, c, g, or t
  misc_feature (897)..(900): n is a, c, g, or t
  misc_feature (902)..(902): n is a, c, g, or t
  misc_feature (907)..(1044): n is a, c, g, or t
  misc_feature (1051)..(1097): n is a, c, g, or t
  misc_feature (1132)..(1132): n is a, c, g, or t
  misc_feature (1141)..(1141): n is a, c, g, or t
  misc_feature (1353)..(1353): n is a, c, g, or t
cttcattgttagaaaccaaagtcttctctgctggctggggctgagagagggtctgggttatctccttctgatcttcaaaacaagagagagaccttgaatacactgactcttccacccnnnnnnnnnctgggaaaggagagcaagaggtcccgagtcccctcctagtctttcatcctgaatttgcacagaggaaagcgggtgcccggcatggccatcctgatgttgctggcgggatccccatgcaccttgtccttctccactgatactggcagctcggctcctggacccaagatcccttgagtggaattctgcagtgcaagagcccttcgtgggagctgtcccatgtttccatggtccccagtctcccctccacttggtggggtcaccaactactcaccagaagggggcttaccaagaaagccctaaaaagctgttgacttatctgcgcttgttccaactcttatgcccccaacctgccctaccaccaccacgcgctcagcctgatgtgtttacatggtactgtatgtatgggagagcagactgcaccctccagccacaacagatgaaagccagtgagcctactaaccgtgccatcttgcaaactacactttnnaaaaaaactcattgctttgtattgtagtaaccaatatgtgcagtatacgtttgatgtatatgaacatactttccctatttctgttctttgaaaatgtcagaaatatttttttctttctcattttatgttgaactnnnnnnnnnnnnnnnnnnnnnnnnnnnnnnnnnnnnnnnnnnnnnnnnnnnnnnnnnnnnnnnnnnnnnnnnnnnnncttgtcgccgcctcgctcaaacttcaacatctgcgcagaatgagtaannnnnnnnnnnnnnnnnnncnnnncnnnncnccccnnnnnnnnnnnnnnnnnnnnnnnnnnnnnnnnnnnnnnnnnnnnnnnnnnnnnnnnnnnnnnnnnnnnnnnnnnnnnnnnnnnnnnnnnnnnnnnnnnnnnnnnnnnnnnnnnnnnnnnnnnnnnnnnnnnnnnnnnnccgaatnnnnnnnnnnnnnnnnnnnnnnnnnnnnnnnnnnnnnnnnnnnnnnngcgcacgaaacaccgatagagacgccgggggcaancaccccaangccccacccacattctccccccttacttacttatctccaccccgcgccccattgttgataccacgcccatggtaaatcgaccattagcgagcccccccttgtgatacccccacaaacgatattccccacccgtatactaaccgcgctatctgtcacccgcatacgataatactcccaagcaccgcaatccccactgcgacatcactcatganctctcacccaatatattatccatccttcggcctctttgtcacactcat

SEQ ID NO: 150766 - DNA, 843 bp, Homo Sapiens
  misc_feature (137)..(137): n is a, c, g, or t
  misc_feature (686)..(709): n is a, c, g, or t
ccttggaaaacaggtaagggcccatgttcacatttccgtatgggccccgcgccccccaagggaataggtttagaaaagtttttggagggcccaagggggccggaaaaggaaaaatcgtggtatggtggggttcctangcgggcttaaaagccccacattttttaagtcaccagctttgtaggtcaggagtggctcagctaggtttttttgtttagggtcttctttagttggaaatgaagggattggccggcgggggctcttatctggaggctggggaagaacttatttcccagttccttcaggggtgctgccagattccagtgccttgcggctggggtctgagggttccgattccctgccggttgtctctcagctcttagaggccgctcatggctgtggtccccgtgtcctcaaagccagctatggaggatctccctggtgtcaaatctctgtcatgctgtgaatctgactttctccagaaaaagatgggcacacaggccagatgggcagcaattggtttgcccatcactgcgtgccttgcgcccagccctggccagggccaagaaaagtaaatacaagccaggaagggagtggggagtgtgactccctgggactcatggcagattcctggatgagggttggtggagtcagagctggtgatccccaaagaggagaggaggcaggannnnnnnnnnnnnnnnnnnnnnnncctttagcttttttaggcatcttggcctcgaggcagaagggatgtggggtataggcaggtgcctggatgaaccaggaggctgagggaccccagcagctggctccaggtcagcctcaccggctagcattagaagc

SEQ ID NO: 150767 - DNA, 827 bp, Homo Sapiens
ggcttcacaactctgggccgagaacctgtttctcttcattgtccccttggtggcacgttcatgggggttatttttacaatgtgcacaaaaggattacagggaaaaccagttacagggaggactaccacctattaaaagtatttttctggaaacagctggcgattaccctccaaaagtttaattaccattattgaaaacgcgtattggaactgccttggataatcttgggaagagggaaagaaaataaagccccaaggtaaaaaatacttttaagacgtggacagaaaaatataggatcacgtaatattttgatggtaactgacttatttagatttatgtattcacaagtttacctctgagtttatttgcataccatagtttactgggtgttcctatttaaatctatttgttctcatattttcaaattgagtcatacttgctgattaaaataaacttaaggacatcattattccttattaaattaccagaggagtgctttttaatatgcctaggttttgtatgtttaaaatactgtacctaatgcattcccacatcgctattgataaggattttcgcttgttgatgattttaaaaggagctcagaggtcttccagagatttaattctgacgcagtcatctcgaccccaccattcaattaagacccctagcgaaagtactttcttacatgttaaagctgagaattaggaaatacaatagcattaagagaaaataagtagaatttgattttcgaattttaaattattcaagactactcacggaatctcaaagccaggcgttgaaatcatcggcagcaacatcaggcatgt

SEQ ID NO: 150768 - DNA, 522 bp, Homo Sapiens
  misc_feature (151)..(274): n is a, c, g, or t
ggggggggatttccaagcccttgttccttgccccgggttttcctttgggaaaccagctttgggccccgtttcccttaacccttggggcgcccgggcccccaaaagaaagggttttgaaaacttttttagggggcgaggggggccccaaaannnnnnnnnnnnnnnnnnnnnnnnnnnnnnnnnnnnnnnnnnnnnnnnnnnnnnnnnnnnnnnnnnnnnnnnnnnnnnnnnnnnnnnnnnnnnnnnnnnnnnnnnnnnnnnnnnnnnnnnnnnntaaagtttcgagatctccataatgggatttattactgcagggggacaaaatagggatagggagattcttcagggttgtaaatcgcagtgcgggcgcagcaaacacggaagctgcgcggctgcctagaggcctccgcagagccgggaatcagcggcgccgacaaggagatacggcccgctcggctcggatcagcccgggcgctcccgaagcccgccgccccatccgggctcactctgacgcacgatccc

SEQ ID NO: 150769 - DNA, 853 bp, Homo Sapiens
tttggttaggaaccagatccagttttagggtaggccctttccacgggggccttagtttcccctgaatcaaaaaccacctcccagggggttcggaaggaatagagggattggtttttctattggaaaagattcccttgtccgggaggtccagtttctcaagaggaatttgcggtaaatccttccaaaataaatttcgggagcgtccatcactattggggtccattccagaggaacaatatttcctggttctgagcaggttctactgtttgtggtgatgtaagtttccttttcaatgcatatagctgacatgtgagatagtaacattcttttctcagctgtaggatgatatctgggcttctttcactttggatttttcatttccaaagctaaaactaacattttgttgttgtcttgtaatttttcagcagtgtagaagtgttggtgattatttggcatggtgcagctataaaagacctgcgtttgccaatctctgccaagtttttattccttttctctttcattcgcttctttatgtcttcaagactatcttgaaaggactttttcaggcatctttccttggccatcttttgccttaaaacctacttcttcctctttcagggactccaggaaggccggggggaggtggggctggcggaagtggacgcggcgaccctcctgccgcaggcgcgtccagaacgataccttggccactacttctgcaacagctatcttcctcctcctcacatttcaaggctcttcgaagctctccagccacggctagccccgcgcactgggccctccaggaccgtaccaccgtccgccgtcgcctggaactaccgccgccacattcccc

SEQ ID NO: 150770 - DNA, 364 bp, Homo Sapiens
tattctttgtcttgttcctcagttttttcttggcaacagtcacgttgatcttgcaaccttcaaaggtggtaatctccttgagggccctctgaacatcttccagcattgaaaaagtgacatagccaaagcctcgacatgccttactccctttttcagtcaccacgcagcactgcttcaccggccccacctgactgaacagttcctccagctgctcactgcgggccgagggcgggaggcggcccacaaataaggtcaggccggccatgagaccgggaaacccaaagcgcgtgaggacgcgagcaaactaggccggcgcacgcgagccgaaacgctggctttggtaggacaaccaagctcacacccc

SEQ ID NO: 150771 - DNA, 979 bp, Homo Sapiens
ggcgtgtggattcaaacatgtttattgagcgaatcattaggacacaaaataggctgagaaagatgttccaaaaatccaggagactatgggctatttccattaaacacagaggtgctgcccttctccactccaaacagaacaggaaaaaggcaaggggactgggccacagtgcattagggaggacagggtctctcggcttctctaccccagagggaaaggttaggttagaaaaacaatgcccaactctttcccctcagagcccagggctgaagcctgggggaatgcttcattttgctccttttctctttgccttttccaaatggtcacattcttgaggtagggagtggagctggggaggggcccagagtcctgtcagaaatcctcaatatccagctctgtagaatctaagaggtccagcccgcgctcactggtggaagagtagctacttgcttgcatgtctgtatcctgccgttcttcatttgactcatcctggatttctaactcttcttcctcgtcctcttccataaggctgagtcgcatcagctggttgcccaggccaggaccttgaagggttgtgtggagtctggaaatattgtggacccaagaaccttgaccctctcggtgcctgcgacgggctgactgccctgggcaaaatccaactctgagccatcttcttcctccatctctttcaacccccacaggggctgcctgctcttcacagctgtggaggtgagggtgggcgtgggcgggatgctgttcagctgcagactttcttcctgggacgaggagacgtcctctctgttaggcttggcaggcccttcaacgcgcctcctcttggagctggggaggacctgagggctggtctctgctgtgttctccacagggctgagggagtggcagtaggtggtgactgggccccagggatggcccccggccgtaatggccgaattcccgggcatatgtccggtaccgtcgactg

SEQ ID NO: 150772 - DNA, 819 bp, Homo Sapiens
  misc_feature (673)..(673): n is a, c, g, or t
  misc_feature (771)..(771): n is a, c, g, or t
ctggaagtgccagggagcactggaggccacccagtcatgggggacaccttcatccgtcacatcgccctgctgggctttgagaagcgcttcgtacccagccagcactatgtgtacatgttcctggtgaaatggcaggacctgtcggagaaggtggtctaccggcgcttcaccgagatctacgagttccataaaaccttaaaagaaatgttccctattgaggcaggggcgatcaatccagagaacaggatcatcccccacctcccagctcccaagtggtttgacgggcagcgggccgccgagaaccgccagggcacacttaccgagtactgcggcacgctcatgagcctgcccaccaagatctcccgctgtccccacctcctcgacttcttcaaggtgcgccctgatgacctcaagctccccacggacaaccagacaaaaaagccagagacatacttgatgcccaaagatggcaagagtaccgcgacagacatcaccgggccccatcatcctgcagacgtaccgcgccattgccaactacgagaagacctcgggctccgagatggctctgtccacgggggacgtggtggaggtcgtggaagaaaagcgagagcggttgggtggttctgtcagatgaaagcaaagcgaagctggatcccagcgtccttcctcgagnccctggacagtcctgacgagacggaagaccctgagcccaactatgcaagtgagccctacgtccccatcaagggcctacactgctgtgggaaggggacnaagggctccctgctccagggtgaaacctcgttgaagtccattcccaag

SEQ ID NO: 150773 - DNA, 1084 bp, Homo Sapiens
gggtgcgggaaaaggttaaactgaagggggccaagggcccccaggcgtgttgccttggcagaccatccagggaatgtggaaggaacccagggggccccaggaccccctgatgtgtcccaatggttcagatttgggaaaagtttccccttccatccacactgggcaatgagggtccccaggcatggcatgcacccatgctcacagaaatcacagcttctgagccccatttcataatgaacagaacggtcccatacccatgcagacaggacacgcagacatgccccgccccggcctgccatgcacagatgcccacagccaccacagggtgcacactaagacagaaggcgacccacagtgtggggaggacatttagggcccctaacagagccggagtcctcccaggggccaggctgcctgagccttggcagggggcttgtggctgtgggttcctgagcaccaggggaaggagccccgtaaggtgggaggtctgaccgctctcgctcttctctacgacctccaccacgtcccccgtggacagagccatctcggagcccgaggtcttctcgtagttggcaatggcgcggtacgtctgcaggatgatggggccggtgatgtctgtcgcggtactcttgccatctttgggcatcaagtatgtctctggcttttttgtctggttgtccgtggggagcttgaggtcatcagggcgcaccttgaagaagtcgaggaggtggggacagcgggagatcttggtgggcaggctcatgagcgtgctgcagtactcggtaagtgtgccctggcggttctcggcggcccgctgcccgtcaaaccacttgggagctgggaggtgggggatgatcctgttctctggattgatcgcccctgcctcaatagggaacatttcttttaaggttttatggaactcgtagatctcggtgaagcgccggtagaccaccttctccgacaggtcctgccatttcaccaggaacatgtacacatagtgctggctgggtacgaagcgcttctcaaagcccagcagggcgatgtgacggatgaaggtgtcccccatgatcccgggaatccgacc

SEQ ID NO: 150774 - DNA, 1361 bp, Homo Sapiens
ggcagacaggatgcactttcaattagatcaggccggtaaagtacctggggcaaggaaaacctcctcgggtttcaagttcatttctccaattacttcatgggcaatcttaacaaaagtatccccaaggatttttcttttctcttcaggactggtggtcatatgtaaggtttggctaattctgtgcgggggggttctatcttcatctgatattggtagggttgttgttccattgtagaaggaatgagcagcatttatcactttgacctgaattccaagctttttgagggcctcttcaacagactggctttctcgttttctcataaagccattatcaatgtgcacagcaatgacttgttcttggttcaaagcacgatttagcaaagctgtacaaactgttgagtctactccaccattgagtaaaaccaaaagttttgacgtgcctactctctctttgatctctcgaatacactcaagttctctgttctggacggtgaaggttcccactgccatccagctattatcataaaaggaaattcttcagtattactttttcccattttgtgtaagcccaacttcagggtggaactgtgctccatataactttttagattcatttgctatgcctgctactatgtttccagaacgtgccacaaccttgaatccatcagctactttgtctacactatctccatgtgtaagcaaaacaacttcttccttctgaaggcccctgaataatgaacatgtattatccacactaatgttgaaaactccatcttctctgacactttttttgtgcacagtacctccaaataccttattcatcatctgcataccatagcaaattccaagaacaggcttgccaatagtgaatattgctggatcaaaccagggagcatcttcagcatacacagaattaggtcctccagagatgataatagcacggaatccttgttcctttatagcaaatgctggtgtttccaaggggaaaatttcagactgcacgaacagttccctcactcttcggtctatgactttcccgtactgagcaccagcatccagaatgacaacagctccttcatagtggtggtggccatccttaaggtctcctccagcattctccagcttggagtctccgttgcacagagccatcggggccagggccggagccgcggcggtgacggcgacagtacgagacggggcgggagggtgccggaagggtcggcgccgcgggctgaggttgagaaggaggcctggtcgaggagcagccggcagcggagaggagccagccgccagaaaagcgccgaatggagcaacagcagcggagcgcgggccccagcgccgcgggagagaagaccagcccc

SEQ ID NO: 150775 - DNA, 809 bp, Homo Sapiens
  misc_feature (572)..(593): n is a, c, g, or t
  misc_feature (620)..(645): n is a, c, g, or t
ggacccaagctcgggacttgttgggtgatccccaggaaattatggtagacgtggatccatgttagttcccattccagaaaacttagggttaggaacctttccaaggaaagggttccaacggggtttcttcaagacttttaccctaaaccccatccaccggaatttttctagggccccccagagagttagaaaattaaataattgtgtggctctatgtgtggtgattaagtgctacagtcaatagttcttggcagtccaatatgtagttatatgccccctttgaagaaaaaccttacatttgccaaatcccaaactcttaaaattgagaaaggggttatttgtgtgacccaaacaactcacacggaaagattcctctcaacatgaaaatcccctgctacatgaggtaatttgtttacatacctttaattccctaacaaaggaaaagagagaaaagaaactggaagctaaagcattgagagcttttgccaactgaagacgaagcagaaaataaacttttcaaaacaaaacttttccaggcatatctttcaccatcacatatatagaatgatggnnnnnnnnnnnnnnnnnnnnnnttcctgcaattatacatcttttctttnnnnnnnnnnnnnnnnnnnnnnnnnntgagcttagcgcctgagagatgcggggtagacagcttcacacagggcagctgctaccgcatctctttttacccgaactttcggagaattgtgttgtacttatttatgcacagaagacacccgtttgctactagggacatttttcttcctaagatttgcagaacc

SEQ ID NO: 150776 - DNA, 863 bp, Homo Sapiens
  misc_feature (150)..(150): n is a, c, g, or t
tctccagcagccagcaaaaggcaaaggacttccaaccccaggcttaggccagattcccatccggccctcccaacaggtgtcccggggcttaggggtggcgaggacccaggtgctgtctggaggcagcggggaagccctttgctacttgcnccaggctcattgtggcagtggcggggagactccagtcactcagttccccgtagtctgtgaggtcctgagccgccacttggacgtagtacctggctcggggccgcacagccttgaggatgaaggacgtggcttcaatgggccccacccggtggaagcgcgcagctccctgacgcttgtaacggatccagtacttcagtgagaagatctctgggaagggccaggacccgggaggctcccactgcacctgtagctggcgctcagcgagggggcttaggcgcacgccttctggagggtcgggcttgatgatgtgctctgttatgaaaggcacgaagctgctgctggagccccaggggtggacggcggtgacattgagcacgtagggagccatggagaacagctggacatccgtgatggtgcagctggtggacgttggcgtctgctgcaggcagggccagctgtggccccgggcagccatgccgagcctgtacgtggcaatgaaggacacggggctggtggagtttggagcaggcggcagggtccaggagcaatccacggcgatcgggtaccgagaggctcggcattgcacccggggcagtgtcagagctgctgggggccctttccttccactgcagggcgggcagctggcccagaggacaagggccaggagaagctgcggggtcatggctgcggccagctctgctctcaggagtccc

SEQ ID NO: 150777 - DNA, 880 bp, Homo Sapiens
  misc_feature (136)..(136): n is a, c, g, or t
  misc_feature (443)..(567): n is a, c, g, or t
accgtggcggggaggaaattcccaaggcccctttatgttactgtcccccagggttttttctttgggggaaacccaggtttagtggccccctggttccccttttaccttaactgggggcccccccgccgccccaaanaggaagtgggttgttaggaaaggtttttttggaggggcccgaagggcggcccgaaccaagggtttgtttttgtcttgtggtcgtgtattttattcccacttccggtaatggattatgtggttttatttttccatggccacttccatttccacagaaaggttttcaggtattcttgcaaaagagacacccttggaaatatttaaaatactatctgacccagaagcagaatcagggtaagctagcagaaaggcgtatgagccaaagggatctacccagctttcaaagctgaccacggccgtgcgcagtnnnnnnnnnnnnnnnnnnnnnnnnnnnnnnnnnnnnnnnnnnnnnnnnnnnnnnnnnnnnnnnnnnnnnnnnnnnnnnnnnnnnnnnnnnnnnnnnnnnnnnnnnnnnnnnnnnnnnnnnnnnnngcaagccagagactagggacatggctgaggatcgctcccgcccctcggaggccagaaaccgagggtcactcccgctctctagaggcccgaggccccgggccgctcccgcccacctccgcggacgagcgccgccccttcgaccccattccctgaggtctggacgttcaggccctctcggtctgggagatcccggagaaccacccacggggctttaaaaaatgttggtgccaaacacctctccgaaatagggcccgccctatctcggtcggggagcgcgggacctccgtggccacccagcgccaccgtccgcccc

SEQ ID NO: 150778 - DNA, 878 bp, Homo Sapiens
tgggggttgcgtgggtgtggccgttggttggccgtgtcccggttgtctcggggcacggtctttgtggtgccctgtgtaggagttggctggttcgcggggcgcctttctctgactggttggggcctcatgtcgtgcgtctgccagtaaatggaagccatgttataccagtacccacgaggaagtgttcttctgtaggccttcactgaatgaggtgaccctatgtcattctatactcctttcctaaccggtttagataaatatgtgaagattgggtcttctttaggtagcagaggtgcagaaagattaactctctccctgtacacctctcaagtgctgaaaagcatgtatactatatggaagttctagaattttagtacaatcaggttgctctgggtctggagggacaggagattctgtgtctatataatcttcaggactgatgtctttgctctccaaagttatgtatgtgccatcatatagatccaggtcccctaagggcaccttggctttgatgcagtctgggtcttctttattatgtctctgttccagtcctgtgtctctgtcctcattctcttctatgtgaattttttgagcaactaattgtttctctaattctttgaggtagttaactgttgcttcttgtctcattaatatgactaggtcatgaggatgcttcaagttcattggtgaatccacctgctgctggattttcccgtcctccgtgacgacccagtgcgtggtggcgaaggcccctcgtgccgccacactcagcaaggcggaaaggctgaggagccagcctgggccggagcaaggcggcagctcgtaccggccacgaacccctactgccgccgccatcttgcccccccggccgggccccc

SEQ ID NO: 150779 - DNA, 504 bp, Homo Sapiens
atagtctctttaaagtaagttacagaagattttgttgctggtggtgattctttttctgtctcagaaaacagtaataatacatgtattgtgtatagatatattaacgacactaaaacattaactttcttacttacacaatgtatataatccagcctataaacgctgttgcttatgtcagtttatatttcgtttttcatcagtttagataaaactttccagcatctcttcctgggaaaggagactagtctatccatatttctccccagcactgaactatgcaatttgcatcaatgtaagtgtaattttaaagcgtcttctagataaaaacaaattagtcaggtattttccaagataaaaatatcttctgtttacacagagcccgctggctcagcccgctggctctttaagtgactgatgacttaccttctgtaggccttcatgaatgaggtgacctatgtcatctatactccttcctaaccgtttagataaatatgtgaagattgg

SEQ ID NO: 150780 - DNA, 1275 bp, Homo Sapiens
agccgtttcgtttcccgtggggaacggggccgagtccaagaaccccaggatgttcttgaaaccaggaaaaaggtaaaggtttatgtccccttctggctccggcagctcccccatggcaccagcagcactttgctcggctcgattttggggttccctctgcttttcatccaggtactccagctgtcggatgtaatactggcactcggattccactttttttcaagttgatatcagagaggactccctgtattatcaatatagcatcctccagaagctgaacatcagggtgctcttttggagtgtgtttaagaatttcttttaacagtaaagggtatttgactaggcgacttcgagggatatctaggaaactccaaagatctagttttcgactgaagggagactcgagacatcgctggaggaagtcttggactcttggatcctgtttcttttgatcaagaagagctttggctgccagctggttactacagtaacctctgtaggcattcaagcgcggtaaccagctcacgagaatgtgaccaatctgctccactgttccatcaggcttgtttgcttctcctattcttgtcaacagatcttcatgcaagaggtatgtaagagtccagatcaccaaatatatgtgtgagttcctcttctgccatgatggacaactttaacatggggtcatggtaggcctttcttgcaagtttgagatcctcaatttaaatcctgttcacctcgggacatttcatatattgcctcctgccgtctgatctccctggtggtgagagactccttcatggtgatgtccagcatctctgaccacagtgcactgctccttctcttggcgggtattgggactgcttgacctgctagaaaacttctgggcagaggctggggatctgtggtcaccacgaagggtaaatgactgtattgtttgacctaaacgtctgacagctccatttcttacaggagagattaaatttgccaaggacgtgacacgagccagaggtcagaactcgttttattgcttggctcctcttgttctctgaaggactggttattgacatctaggactcgtatggtccttttaataggtaggagacctccagtctcatcatgtgccaccatgcttcccaagtactccctcaaacctttccaatcaatccacaccgagtcagcgctgtagcgacgctacgcagaggcacacgggcttttcttcccagagctcggccaccctcggcagccacgtgcccatgcctctcgccgcggtggagc

SEQ ID NO: 150781 - DNA, 680 bp, Homo Sapiens
  misc_feature (134)..(328): n is a, c, g, or t
cacataagacttccggtttattttttattgtggtgaagtcctgggggaatctctttgtcaaccacaggctggaatttcagttcccgcaatgttagctcgattgcaatcttcaagtttcttggtttggaacaatnnnnnnnnnnnnnnnnnnnnnnnnnnnnnnnnnnnnnnnnnnnnnnnnnnnnnnnnnnnnnnnnnnnnnnnnnnnnnnnnnnnnnnnnnnnnnnnnnnnnnnnnnnnnnnnnnnnnnnnnnnnnnnnnnnnnnnnnnnnnnnnnnnnnnnnnnnnnnnnnnnnnnnnnnnnnnnnnnnnnnnnnnnnnnnnnnnnaatagattcattttatacattaagctcctaatcgatttacaatccaggtgtgctgagtgaggtatggagctctattttttccagaagtttacccaattgtcacaacatgaaaacatcttaaaacaattcagggcaaaccacacatttctgccaatcagatacaaccccatgggctgctaccttgaaacctcttgctttggtgagcacgaagttcacatccgctgggaaagtgggaaagggggttgaccgaagagccttgctcttgggaagaaatctgcagtgacctttctactggtgtccctgtccaacatcagccacaaaagaaaaagactggcaggcctcggtggctcac

SEQ ID NO: 150782 - DNA, 924 bp, Homo Sapiens
  misc_feature (99)..(99): n is a, c, g, or t
  misc_feature (101)..(103): n is a, c, g, or t
  misc_feature (107)..(107): n is a, c, g, or t
  misc_feature (109)..(110): n is a, c, g, or t
  misc_feature (112)..(113): n is a, c, g, or t
  misc_feature (115)..(115): n is a, c, g, or t
  misc_feature (117)..(410): n is a, c, g, or t
gggacccatgttccaccttacctacgtgggccccgcgcgcccaaaacgaatgggtctagaaaagctctcggagggcccgagggcggccgaacatgtttntnnntttntnntnntntnnnnnnnnnnnnnnnnnnnnnnnnnnnnnnnnnnnnnnnnnnnnnnnnnnnnnnnnnnnnnnnnnnnnnnnnnnnnnnnnnnnnnnnnnnnnnnnnnnnnnnnnnnnnnnnnnnnnnnnnnnnnnnnnnnnnnnnnnnnnnnnnnnnnnnnnnnnnnnnnnnnnnnnnnnnnnnnnnnnnnnnnnnnnnnnnnnnnnnnnnnnnnnnnnnnnnnnnnnnnnnnnnnnnnnnnnnnnnnnnnnnnnnnnnnnnnnnnnnnnnnnnnnnnnnnnnnnnnnnnnnnnnnnnnnnnnntaaaagtcattttaatttgtaagatatgtttactgttttagagagacagaggctaacttttcattttcaaggactgctgaacaatcatccatgagttcttgaagttgaataacaggaaactgtacttgtttttcaaaccatttggctactgtaagaagctgctggtcacaaaacgcacgtccaataaactgcagtcctattggcaacccttggtttgagagtgcaacagggatactcactgctggcaatcctgccatatttacagcttgtgtaaaaatatcatcctgggcacttcgggttctgttgtcctctttgatgaactccaagtatggtactgcctcactcaaggtggtgggagttagcaagacatctactccagagttaaaagcatttacaaagtcattagcaatgaggcgtctcactttctgtgctttgacaaaataattttcatagttttcttttaataagaaaaagtttcctgagagaattcttcctctcaccacatcattaaacc

SEQ ID NO: 150783 - DNA, 1016 bp, Homo Sapiens
  misc_feature (98)..(98): n is a, c, g, or t
  misc_feature (108)..(108): n is a, c, g, or t
  misc_feature (532)..(551): n is a, c, g, or t
acatcataggggcagtttggctgccctttccctgtctggagactcccatctgattaaccccaagatttgtaaatatccacagggtcagttttgatgtngagagattgntcatccataattcccttcacgactggggccaagatctgtctcagggcattctggccacgggcaccacggttgaaacttacaaccattttaataaccgtaggatttcctgtcacaatctcttgaatctgatctaccttcgacttgatttcctcttggagtgctgtcttaaagagccgcaggagcaggtactcctctcgctggttggacgcgtagttgtagagtgtgaagattacagagtccatgaacttggtggacttgttctggggcatctgaaaaatgagcttggccagataggtgggattggtttgcaataaataaaacaggtgctggtaagcttccaacttctctctcttctccttgctcaaagccttgagacctcccttctgtttatttatcatcatcatatcagacaactgttccttannnnnnnnnnnnnnnnnnnnactgtgggaaaccacatcctgcaacgtaatcttatttttcactagcagtccaattttgatatccatgagattgaggtcattctccagctgctggttagaacgaatgagggtgataacctcttcccgcatcttcataaggtcaagctcctcctgaaaatcctggtcactttggtccagcaggtggacaaattttcggaccacaaccataggaggatcctcagcattgatgagagtcttgtagtcatcccgagctttgtttgcccgaataaaagcctggattttgataatgtcatttatatggtcccggaagtactgcaggcgatctcgatagcgctttcgagcttggtgcatccttgccagggactgaatctttacaacttcatctttgtgggagcgcaggtaagctaaccgatcttgatatgccttcttctgcttgtatcctctccactgtgactgaatgcaggt

SEQ ID NO: 150784 - DNA, 412 bp, Homo Sapiens
  misc_feature (380)..(380): n is a, c, g, or t
ccactttagtccactttttcaagacaatgctatttcctgagacgtagtacctttttctgctaactccattctttgatggatacttgtgtgtcagtcaatgctgagtatcctcctatggttgtggtccgaaaatttgtccacctgctggaccaaagtgaccaggattttcaggaggcgcttgaccttatgaagatgcgtgaagagtttatcaccctcattcgttctaaccagtagctgttgaatgacctcaatctcatggatatcaaaattggactgttagtgaaaaataagattacgttgcaggtatggcccagtgccagcgggggccttggaacggttcatcctgctttgtaacccctgcattcccctttctgactggnggggagggtggaggctgactttctcctcagct

SEQ ID NO: 150785 - DNA, 898 bp, Homo Sapiens
cctgcttttaagtataattaagtaatagtaattgctgcatctggtttctgaaccgtactgcagacaaaatctgcttttagaggcaaggcggatttctgacaaaagtaactgatcctttgggatggcataaattcactttggggactagcctttttcttcctctgagggtccttcgttcttcaatttattcaattcatcaatcaaaagtgttctcttcccagttgcaaattagaagaagtctttctgcttcagcttcttctagggacccttttccatgttcttcatcaacacagcagttaagagcctggctagcttgatagatcactgtctgttgcatatttatttcgttattgagttcctgcattttctgtttgatattaacttgacaaggaaaggcattatttttttcatccagttttgaagtaacatcttccttccgaacaatcacctgctttattgatggacgttctgtttctttgaatctttgagatctatatgcatcaatgctgtaaagaagatcacgatcttcagaaccaaggctatcaccagattcagctcgagggacacgagttctttggaattttcctggttttggactttcatcacttctgctggtgtctttcaattccagtctaggtgtggacactaaactctctggacttaccacaccaactgtttgtgccaatggtgcaagtaaagacattgaggagatattcagtgcatcttcctgttcttcgctgctttctgctaatgcttgatccatctcctcttggctcttctccatatctagttcaccttcctctaggacatcactgaagaggtcattaattactttcgaactattgatatcatcatcatccacactcatctcaatttcacgtatcacttcaattttccc

SEQ ID NO: 150786 - DNA, 1119 bp, Homo Sapiens
  misc_feature (101)..(101): n is a, c, g, or t
  misc_feature (794)..(924): n is a, c, g, or t
agcttctgctgcttttagacgttctggtggcacatatctgtcagtagttttccacatgtaataatattcaatgatgctagtcaatgattcccaaggaaganaatctgcccgtatgtcattgaagtctttgccatatttttccagtgcctcttcaaataagctagcttcagaggctgaccattcctccatttcatctctgcataaaacaggtcctccgagtggtactaagacactaatggcactgctcaaatcatagctgtgtctatacaatgtatccatagcgtgaaacaaggtgatgtcttgggaagttgcagcagcacttatatgcaaactaggctgcctcacagacttgctgcaatccagggctctggcgaatgtcccaacagcacgtgctacaactaaaaactggtcaatctgtcgatccgtaagtgggctatttggatcccaaactttaacttccaattttgattgttccctctcatctgattctccttctaacagcatttctggaatgtctgcttgatatctaggtcccactctgatttcacctttgtcagctaatagtgttttcaatgaggggtcatagaccaatgagtagaagaaggtatcctccttatcaagatatgacaatactgattctgtctcattcagaagggcaacactgcactttcccctgatatgtgttgcgggcagagattcatactggcgtgacaaaaagagttccctatgtttcaactgatgtttctgcttatcggtcaagtcagcctcaactgttgtttcagattcttcctcannnnnnnnnnnnnnnnnnnnnnnnnnnnnnnnnnnnnnnnnnnnnnnnnnnnnnnnnnnnnnnnnnnnnnnnnnnnnnnnnnnnnnnnnnnnnnnnnnnnnnnnnnnnnnnnnnnnnnnnnnnnnnnnnnntagcatgcttatctgcgagcattataagtgtgttggaaatatcacgtcgtctataaaagcatactacttttgcttccacgttgccacttgcagtcttgttgagttcttctatccttcttattaggtatgggttgctggaggaattctcaaagtagacataatctccgacccggtacatgttggccgccatgtccg

SEQ ID NO: 150787 - DNA, 949 bp, Homo Sapiens
ccggcaactgcttcggatggcgggacacggagccgcgaggagacagctgaggcccgcggagaccagggggtgaagcctggagaccctcttgccctggcctagctgcaggcccccgggatgctttgggcatgtcctctggagccccacagaagagcagcccaatggccagtggagctgaggagaccccaggcttcctggacacgctcctgcaagacttcccagccctgctgaacccagaggaccctctgccatggaaggccccagggacggtgctcagccaggaggaggtggagggcgagctggctgagctggccatgggctttctgggcagcaggaaggccccgccaccacttgctgctgctctggcccacgaagcagtttcacagctgctacagacagacctttccgaattcaggaagttgcccagggaggaagaagaagaggaggaggacgatgacgaggaggaaaaggcccctgtgaccttgctggatgcccaaagcctggcacagagtttctttaaccgcctttgggaagtcgccggccagtggcagaagcaggtgccattggctgcccgggcctcacagcggcagtggctggtctccatccacgccatccggaacactcgccgcaagatggaggaccggcacgtgtccctcccttccttcaaccagctcttcggcttgtctgaccctgtgaaccgcgcctactttgctgtgtttgatggtcacggaggcgtggatgctgcgaaggtacgccggttgtcccacgtgcacaccaacgctgcccgccagcccggagctggccacagaccctgagggagccctcagagaagccttccggcgcacgaccagatgtttctcagggaagccagcgagagcggctgcaagcgggacacaggttgattgcgctcattgccgagccaacctgagagtccctggccgcggatcca

SEQ ID NO: 150788 - DNA, 982 bp, Homo Sapiens
  misc_feature (44)..(327): n is a, c, g, or t
  misc_feature (360)..(360): n is a, c, g, or t
gggtaggaacattttggcatttatttcaattaacaatacttccnnnnnnnnnnnnnnnnnnnnnnnnnnnnnnnnnnnnnnnnnnnnnnnnnnnnnnnnnnnnnnnnnnnnnnnnnnnnnnnnnnnnnnnnnnnnnnnnnnnnnnnnnnnnnnnnnnnnnnnnnnnnnnnnnnnnnnnnnnnnnnnnnnnnnnnnnnnnnnnnnnnnnnnnnnnnnnnnnnnnnnnnnnnnnnnnnnnnnnnnnnnnnnnnnnnnnnnnnnnnnnnnnnnnnnnnnnnnnnnnnnnnnnnnnnnnnnnnnnnnnnnnnnnnnnnnnnnnnnnnnnnngcaaactaacaaagaaaaacaatacttcctggnggttttggtgtgcagagggctttgttggaagtgtgactcaatcttgcctgccttctgggagctctagaattgttcccaacccagtccatggcttctagccacccctacaggggctgtttcatgtacttctctctctgactctgtcttgtccgactctcttgagaaatttctcaacgattgctcatgcctgtcagtatcagtgcttccatcgttccctctttgattcacttctctttcctttctatttactcccaaaatgggagtcattcatcctgatgtcctcaattgctgctgatatgctggtgattcccaatacatagctccaaaccccacctcccccagactttaaatctgtattgggattaccaactggacatctctatggacaggtttcggataaaatccactcctctggccaaccaagtatggtccctcctgaaatccctcccccggggtactttcctccccaatctaacttaagggtcacccagcttagaaacattttatggagacttacattccctttccttcccaaattcttaaccgcccatttccttatccccttttcccccccacacctcctggtccttggaattttggcgccctcccctccttcccctcc

SEQ ID NO: 150789 - DNA, 959 bp, Homo Sapiens
  misc_feature (336)..(356): n is a, c, g, or t
gggaccgggccatccagaaatggattggcaagcctgccgaagagccttcgggttcttggccataggatcccctctcaagttgctcacaggcttgcttgggctccagttggccaggccttggggaacagcacctgctccatgctgtcttcagagcctgaggctcaccacaagcggcaatccaggctttgcacctgggcctcgcccaccacgcgcccgttgtagatgaaggtgagcagcagtgagtagtctggctctggaggaagcagaaactccagggacctctgatccccttgaaagggggcctcagttgtgtctgtaacttcctgtggctcaggnnnnnnnnnnnnnnnnnnnnncccaatgtctgaatggactgctcccccactggccccctcctcctcattattgagggagtcctggagcacagagggactgagtgtgcagttctgcatggcatcctcttcctccttcctctcagaggacacagaactgtgctgtcgctttgatggtactttctgagtccctggctggccagagacgattcctggtggcagcaactgatacaccttgtagggctcagcaacatccatgcggcccctctcaggaacctccttaaattcagaactcttgttgagtgcacagcgcaggcgagtcttccagacagctggacctcctgtgtccccctccttatactttcccttaaatattgcccaggccttgaagaaggcagcatcctggtcctcccggaagtcctgcttgcctgcatgtttccagggaatccggaacatggtcttagctgtatcatcccagcacactccgggaaactgcccactctccacttgctccaccacccagttccggagttttcgggtgcagcgtgccctgcctgatgccatcctgagttgctgtccaggctgtcgcagggctcagacgacctcaatcccgggaattccggaccg

SEQ ID NO: 150790 - DNA, 792 bp, Homo Sapiens
  misc_feature (578)..(578): n is a, c, g, or t
ggggagcagggactgtaactacagtaggaggcaactttgctggtgtcattcctgctcggattgactttgtgctccctcccatccacagctatggtagccagtatttccccagcagctctctagtggggaagagtggctagaaccaggccattctcagtcgaatttaggaagaccaagactcatgttcctgacaggacggtcattccctcatggcatcactgactcagttctaattcctcccctcctgtttcattttggtttgaacaacctgtgcctgcagctgtttcttccaccttcctggagctcacaattggagcttcatgttcagtcttgagctcctaatgtttccagacagggcaggggataggagagccataatctatgaaagctgtgaaacaaaccctgggttatatagatctcagatggtctcatctgaaggctttgcccacttcccagtgagcagagggtttggggaacaaagaggtagctgaagagtggtggtttttccctgtatcctgattttcagaaagggctttagtctctgagctgtggctagtagctggctggctgaccagggngacgggggtctaatagggtgtctgaccataggacacctctcgtgtttggccttccctttcttgtgtgtttgtgtgtgcgtgtgcatgtacacacacaaatctgtatccccaggagtgcctcctgcagtcactgggggctcttccgtggtgcaccatcccatgagagcagatcagagggctgtggtcaggactttctcccgagctggccttcctt

SEQ ID NO: 150791 - DNA, 1049 bp, Homo Sapiens
  misc_feature (822)..(832): n is a, c, g, or t
agcccatctgcacccaggcgctcactgaaacagtgtgttgctccacaccaccttgttttgcttgttggcgcgctctcagggttccgaccaatccaagagccttgcagaaagcattaacgtgcttttctctttggcagagtttttctttgctctgatcttggagacatccctctgcctagtggaaacataaggaatacagaaagaatgcaaggagatagaccaacgtgagattctccttcatgcactcaagagaacgatgttgcaggaagagctagtctttcaggctgggctggtgacctgagaaagaatgtccagcttttcttctccacttggcatatcaagagccaggcgtggaagactaaaacaggaaatgtttataaaaactgttcagcggttcgccaacaagaagtggtaaagtagcaaaaatggggatggagatgccaggaggaaagatgccaggggtaaagtgggaaaatgggaacctgaagccaggaggtcaagccaagccaacaggtgtcctgtttttcaatgaggaggtggggcacaggatggatggaaactttccacagtcacagaactaataagtggtgctgaggactcaaacccggggaagcccactctagaacccatgctggtcatccatatccccaaggccctggtcagaacacagctaagcagatggcttgggtcatcaggacgtccattacatccaaaggaagacagcctgtgacgtttcaaaagcaaaagtcccctaccagccagtgaagctacctgatttctcagtatcttacgcccagtgacacgatctaccctcaaaacttnnnnnnnnnnngggaaacataaacacataacagcagcagcaataattaaaggatgagatgagaacaattaagaaaaaaggaaaggtctcctgtgactgttttatttttagggaaacagagaggaagaagaatgatttttcttttgatgactctatatccaactctgagggttgattaaagaaatgaccttgaaccacagcaaagaaaaataaaagacaatttccagtg

SEQ ID NO: 150792 - DNA, 804 bp, Homo Sapiens
  misc_feature (14)..(14): n is a, c, g, or t
ctggtatgtttggnacgtctccaagagccagcttgaacaacaaacttggttgctgggcactaagatctgctgtccatcagtggtctgtgcatactgtagaatggtagtacccggctgagtggctgctgcattggtcatggttaatgtttgcaggccctgtaccccatcggtaccattgttagccagctgtattgctcctccctgggtaatggcaatatactgtccactgctagtttggtaaattggagttggcaccgttacagtggtgatggcaggtgctgaagtctcctcttcagacttctcttcttcaatccttggcactcctggtgcatcagaagataagtcattcaaaattttcctagtaggaaggcctccttgaaagaatttcccttcgcttttgggaatcagttacactatccactgactcctgtgaatcttcactttctgcaatagttgaaatcttaactgtttggacttgtggagactgaataactgatgggtggggcgcctgaattgactccctggacttgaactgtcttgccccttggggagctgtactagagttacggtgggagcagattatgttgcatgagctgctggcatagataccggtggtacaagctcctccgtcactgctttcgttcacggcccggatctcgctggagttttattctctcccccacgtaacacaccgcgtcaaactacacctccgccgcgtcactcaccaacactccgcttctcccagccgcccgggccacaggcagcagcagccgccgccgactgaggagccgcagccaggggccc

SEQ ID NO: 150793 - DNA, 813 bp, Homo Sapiens
tggtggtgaagatgttgctacaggcagtcccgggcacgacacagtcagagtccaacgcctgccaaccactcatggaagtgagcaaccacatgtggcttctcctcactctgtgccagggaactcaccccaggaaccaggtggtcagaaagccaaagaggacagcgtcgttggcctcgcggtcgtaccacggcactccgatgttgcaggtatcccagagctctcccttccagcgctccagggcccaagctgaggcacccacgtccaggagcaccaccagagggcctccctcgatcagccagcgcccgaaatacaccttgcagcccttgctgttcatggaatccagtgtcctcttcagggccggggtgggggcctccagcagttccacctgggtcctcacgccctgctccgtgtacggccccaccaggaagtagttgtcgccccattcgtcccctgtcaccttcgccttcgtctgcagcaccgtgtagatgccacccaccttgttagccacctcccaggccacttcgaagagcactgcgttctccaggtcgaattcatcctcccagtcctccagtcctggcagtgaggacatggacaaagtgcggtttaaaggcatggctggcgcaggaaggggggctccggggatctccaggtagggaccccggaggtgtctagggaatgcaccaggtagggtgcggggccgagtagctggtgcccgacgggaagcttgcaagacgctcggcttcctattgcaagaccgcacccctgccccgaagcgttgggacctaggcagaaggaggccgcagcgtcactccc

SEQ ID NO: 150794 - DNA, 1215 bp, Homo Sapiens
  misc_feature (138)..(261): n is a, c, g, or t
ttcccaggaaattcccttggtaaggcccttcccccggtctggccgttgacctttttccaaaccccgtaggttttctaaatcctggtgggctaatcctgttgggtccccacaaaaagcagggctaatcccccaggaaannnnnnnnnnnnnnnnnnnnnnnnnnnnnnnnnnnnnnnnnnnnnnnnnnnnnnnnnnnnnnnnnnnnnnnnnnnnnnnnnnnnnnnnnnnnnnnnnnnnnnnnnnnnnnnnnnnnnnnnnnnntctcactgtcggcaaattttgcaatggcagtttcatagagatgcctgtccctttgggaaaaaagcttataacaggttgtttttttggctgcagttggaaacctgcatctattaggcagaggtgggggctttgtttctttacccccaattggaagttttctatggagtaaaggcgggtatgtgtgccacctgattccctttccccatgtgtatctggttagggtcggccacgtgagatcccgcaagcattttagaaggtgggaggggaggtgggagctggctacaggccaggcgttggcgtggttccgtgagtgtgctccagccaggcccaaagcttctcctgcccagagggaccgtttcctccagcgtgggtcgggtgcttctgcgcccggaaagagcgccagctcctccttcgggtgacccagggagcggggctgcaggcaaaggcgcaggcggccaaaaaggtgccaaccgggtcctgtggctttcagttgtctctgcccacccaattcacaccatctttccccctcagccgcctgtcctgggacttcaggctcagcaccaaacgcagcaaaagtaggtgcacagagagcggggtcagctcacgcagcccgagcagaatggctgtgctgccgccccaggcccgcggccaccgctgtgtgtgtggcaggagtcagccccccagcgtggggccccgaagcccgcggtccttccacggggagggccaggcccgcagggcgcagacgatgggggacaggctgcgccagcgctcgcctgaggccccgcacacaaacctcaggcccatgggtccgctccgcggggcaggcgtcgtgggcccaaggaggccaggccaggagtctcggcctcggggttacgcggcggcgggcagctcttccgctccgctcagggtgctgctaacccacagccgagcagcgacccgcaggaccggcgagaa

SEQ ID NO: 150795 - DNA, 1480 bp, Homo Sapiens
  misc_feature (144)..(144): n is a, c, g, or t
tcttgggccagctgaaaactttaggttccaggtttgggaccctttctgctttcaacagatgggcccttccctggggacttggctggggtttttcttctgcaccttcttttaggtgggcggctctccatcctcagattcttcttntgatgactcatctcatcttcatccctcatctctagaatcatctggctctttcttcggaaacagaactctggggctgggataatagggaaaacagagctggaaggtgccactgaaccctttcccagagatctgttccatccacccattcttttcgcatttctgcagggtttttttcagcaaatgcatttgatagttagaattggttcctgggtgattctctaggacatacttcttcagagcagtggtagagcaggtcttcggctcattcatggcagcaatggcagacaagattgcatattccatcaggcttccaccaagcaggggtttctcccctgatttcttcagctggaatgtccccgaagcacctttgccagttatctgttctaactggcccctctctactgctctctgcagagcgttcttcaacagctgaggcctgatgtccactctaagcttaggataatactgagacacatatttcctgatgagactgtaggaagcttctttaggttcacaaaggcgagtaaaggccagtgggaggacatcctccaattttacttgtggttctggatccactgcagagctcctattctttctgtttctggatttctgaggtgtttttcttgatttctgaaccacaacaaaacttccagaagcaccttttcctttaacctgtttgatgactcctctatttaattctcttttcagtgcttgtttaaggagataaccccttctctccagctccagagaaggatacttatggatgatgtattttcgaatagcaaccactgatgcaccactcttctggaagcatgccttaatggcctcagttaagattgcatccatcttgggacgtggggaagaagccatcggtgtttgtttctgggccctggctagctggctggcagaaagggtagcccaggaaggaattgtttttttcactttcttctccttttctttagactgatctttctcatcctttttggtttcctcagaagacttattttcttccttctcttcattctcaggttccccctttggctgctctgcctcactcgaagtagcaggtggagtttcattctcttgttcttctacagtggagacagattcctctgaacttatgtctggttctggcttttcttcctccccttcagcaagcttgcttttgggaggagtttcccgggtagaattcacagttcgacgaatcggcatggtgctatcttctaccttctctgcgttcggccggtcctggcgcccgcgtcccgcacggcctctcggcgccgctcccgccgccgctagtcgcctccgccaccgctgtcctccagtcccagccccc

SEQ ID NO: 150796 - DNA, 809 bp, Homo Sapiens
  misc_feature (136)..(136): n is a, c, g, or t
aaccccttcccccaaatttccccaattggcatggaaatgtaaaaattttggcccccattccagttcggaggcttttgtccttgcccttgcccaaaaaaggtgggtttatcttccctttctggcttactttttactnttgggaaaaatgttaatgaccaccttggcccacctttcagggaaacaactggaggggccattccaagggtttatgtactctttgatcccttcctgtgccacgcacaagcatttcttggccttggtgagtttctatctcttttctgacagcctggagagtgttgagagccatatataagctactattctcactatgtgtgagcttaagtttcatatcttggtttctcctgtggtttaccttcaaggtaacatatattgtcctattttggggcatggtctggtcttctggatttttcttaggtgaatggaatctttgagcctgggtattagttgtggctcttgggtctcctctagactccatcctcattagagaagtactgcaattattctgttgctctttagagaccggagaaaaatagtgctcgattttcatattacatttttcattgactgagtgcttccgtgacctctgcttcttacagctcatgatggcttgaagatgaacggatggttcagctgaaacactaatttcaaattttcaaattatagcagtatcttcaaagcacagggatactttttaaacagcagagaactgcgcgcctcgccagcactcggcctggaatccagcgctcaacgcagttcccgctcgtatttgaggaagcaaaggctccccc

SEQ ID NO: 150797 - DNA, 801 bp, Homo Sapiens
  misc_feature (427)..(427): n is a, c, g, or t
ttcagtgcctgtttgtaacacggaatgatcgttctcttgtaaaagtggtccgactagcatcaaaagtacaggtcactccacattccttctcccgcttctgcttgcgctctaaacaggctgcaaaagcacagcctactgcatggctcaacctttcacctgtgtccttgacagccatgaagcagtgacagatccagcgacgagtggtgccatcacggcatatgtaagaaaaggctctatcaaagttcctgtctggggcacagaaagaaactttctctatcgtctggtcaactatgaggtccttagttttttcatccacactctgagtccatctgctgagacccacagaactgctttaactgctttctttccagtagctttcaatctttttacagcatcttcacagatgtgcattcctcttgattcatcnacttctacatggccaaggtacttaaccgggaagctacattttccggtgcgaacgccttcttcatctgtctgccactgatgtggacgactggcctctggaacataaacatccttctttctcctaaaactttgccgtaatttgttcattttaatattttacagacttgtcctaagtgaggcgtctgaggattgctggcccaccaatattccaatctatggatatagatcaagatcttgaattgtaacagtggctgcactggcactcttccccggaagaagttgcttaagcctcaaatctgccgctgcccccgaccaactcaagcgccactgcctctacctcggccgccagtggccaccaagcgccaccacctcccc

SEQ ID NO: 150798 - DNA, 1318 bp, Homo Sapiens
  misc_feature (486)..(486): n is a, c, g, or t
gccagctactttgcatatttataactgtttaataaactattcaaaattagcatctaaaataattatactttggacacacgaaggcatatatttggtgagaacattgtaattttcattttgtaaactatatattctatattcaagtaataacacagcattgcctatacagaactgaggcctgcgctgagacccaaaacttgtcttttcctaaatgcaccactacgaagagctaataagaggtctgtccagatgctaagacccaggtacttcgaaatcgtccatcctgcgctttacaggtctccagggcagttagaactttattctttcagaggtggaggggcctgacagaggctttgaaacctattgtgcaactcctcccagggcacatcttgggactcagttccaacccaaatgcctttctgaaggtcatagtgcaaacgttgaccccagtctgttagcagacccagatagacaggaggacagcgnctgggtgggcggctagtcactaaagtcaaaagcccggctgggagggcgcgacaaagggcagcaaagacttccgaattccccagaagccagtggactagcacttggctcccctctccaggtgatttgtggatgccgggttccaactcttcttggggccgacgagacaaaggcggctgcaacagcgccaccgctatcaccttcaggaagttgttctgaggcaagcgctcccacaggctgctgagaaacctggcgggacgctccgcttcggccttccccacctcctgcagacgctccagcagcagctccgcctgggtcttcatcagagagtcctcctggagatttgggttctctctatagccattgaagcgcagcatgtgcaccgcagaccgccggcgggcaaggcgggccaggctctcttggagtgtctcctcatcggcgtcccggacgcccgggccgggaaagagttgctgcaccaggtggtaacgagctgcatccccgagggcccggttctccagcaggcgcagagagagcaggacgtcacagtgaccgagggcctggaagttcgctaatcccggaactggaccccgcccaaagccgccctcttgcctccactggttgtgcagccgccgctccagagccgtgcgaatggggccatgccgaccaaagcgccgatggatgtggcgcaggtagcgcgcccactgcaaggcccggcgcacggtggcggggtcccaggtgctgacgtaggtagtgcttgagaccgccagaagctcggaaaagcgatccaggtgctgcagaagggattccatgaggtgcgcgaaggccctacttcccc

SEQ ID NO: 150799 - DNA, 797 bp, Homo Sapiens
  misc_feature (405)..(663): n is a, c, g, or t
  misc_feature (673)..(673): n is a, c, g, or t
  misc_feature (676)..(676): n is a, c, g, or t
tatacggctgcgagaagacgacagaaggggaggatggttaactcctgccgcatcctttttcttgtgttcacgtggcattctctaacccagggcagtggttccttcccaggccatgcacagaggctgggtgcctgccagacccacggagggttcgcgaaggaaggggcatcctccttcttgagctgcaagctttagctgaggcagtaagtcacacagtagttagttcagcctgggctggcacataagtccccagtgtccctgttgagaggggaaagttgcctgctggttgaaaaactggcttttcctttctcgctgcctaatttcactctcagagtgaggcaggtaactggggctccactgggtcactctgagagggttgtggctctggttcttattaaaccaggnnnnnnnnnnnnnnnnnnnnnnnnnnnnnnnnnnnnnnnnnnnnnnnnnnnnnnnnnnnnnnnnnnnnnnnnnnnnnnnnnnnnnnnnnnnnnnnnnnnnnnnnnnnnnnnnnnnnnnnnnnnnnnnnnnnnnnnnnnnnnnnnnnnnnnnnnnnnnnnnnnnnnnnnnnnnnnnnnnnnnnnnnnnnnnnnnnnnnnnnnnnnnnnnnnnnnnnnnnnnnnnnnnnnnnnnnnnnnnnnnnnnnnnnnnnnnnnnnnngtctcctaanggnacaaaatatttccccaaaacatttgttcattgtcgggccgccttcgggcccttcgaaaaaacttttctaaaaccatttcgttttgggcgggccggccccccgtagggtaaagggaaacctg

SEQ ID NO: 150800 - DNA, 337 bp, Homo Sapiens
  misc_feature (56)..(56): n is a, c, g, or t
gttggttgcccgccccgcttttaaaaggttttaaaaatagtttatggaaaaaatanaatttagtgtatgattgatctaagtatgagaaatagcaagggcaaaaatagcaaatatttttgtaggggagaaggaatctgaatgtgtatggaatattaaggagaataagaaattaatttaccagggggctgtgggggggggtgggagaacatgaggaaaaatagctaatacatgctggacttaataccgaggtgatgtgttgataggtgcagcaaaccaccgaggcacacgtttccctatgtaacaaacctgcatatcctgcacatggatcctggaactt

SEQ ID NO: 150801 - DNA, 839 bp, Homo Sapiens
agcccaccggcgcttccccagggagcccctcgggaagggaccccaaactttccaaccaaaagggggtgttggcccagggggctgctggccccagaagccttcccaggatgagaggagatgctgctttgggtttcccagcgggccctggcgagcaggggcccattgcctggatgccacgttctgggtgcaacacagcccagcgtggtcccccccagcacccgttggggccccccctgctccacagtcaccagggagatggagccagactccaggaacccacaacggatggtgaaggacgagagctcggtggcctccatccgaacttgtactcacacctccggggtccctgcagtgacacgcagggtcagcagcacccagggcagggccagggtccggtgccccatggccccctccagtccaggttctgggggctgcagggccggcacctgtgcctctgttctcatcgcaggaagtcttcatgttgtcagcagccaaacagccacttccttctctcctctcacaccttccccagaggtggtgagcacaaagtggctgattcccttcttaaagtgacagtgagggcctgctcagtccccaaggctgtgcttccaggtaacaaggcagggcggcacaggtgggtgagaacccagccctggctaggccccatactgggctctgccccaggcgctgtctcctcgtcataggtgatggcaactggcttctggctgctcgggcccaaagcacagccaccagtgcctcttccctttcacttccaacgcaccaagattgtgtcagcaaacagcagtcctctgccctagtaactgaagactctcagtccc

SEQ ID NO: 150802 - DNA, 539 bp, Homo Sapiens
tttctgtgcagtcaaatgcatttattttgtagcttaagcaagacaggtggtgaacaaattcataatgaaaatgccacccagaggttaacagcttgccatgcatgcaactgtgtgcgcaaaatcaagttgttttaataccagtgtgcagctttgattcctccatgaaattaaagctgtgttgctcacttgtttacataactcaggccaccctgaatatctgctagtggggaatttacaacccactgaccatctcagctcaaagccagatgactatcacctacacatctgccaaggtaatagcatggcaaatagtatttttcttgttctgtagccaatggcacagatacaccaacacagagatacccagaaggcacctcctctcattcagctgacaagcttcctaacatttcttggggacaagagtaccatacatgtactacgaattggtacttattctgaggcaggggatggctgtctccaggttagagcatgggtggttggaagttctcagaagagctgtttcagcacaacccaccacc

SEQ ID NO: 150803 - DNA, 1064 bp, Homo Sapiens; identical to SEQ ID NO: 64015
  misc_feature (1023)..(1023): n is a, c, g, or t

SEQ ID NO: 150804 - DNA, 850 bp, Homo Sapiens
gaccactgtccaggggttcaggaggtcctgcttcagggggattcgctgtgttctccacaagttcacggagctgagtgggtgtgcaacatgaaatactagtgctgtgagggccagaaggggacagaaagagggctgaaggaccatcatccaggtgagaaaagccgaggcaccaggtatagctggccacctggaagaagctctgccaaatggaatcctccttggcaggagtggtagtgctaaggcgagcagagtgggctacaggcaggtcctgcaggccctgggtagagctcatcctctgtctgtccattcctcccagaccccagcgtggtggagaagacacaggcatagtaaacgaaggtgaacagaaacacaacatccccattgtaggctggccaggctcaggccctggggtgaaaggagacaggtgctgccaagaccatacatcagtcatctggcagcagctcgagaagcatgtcctccacgccgtcaatcttgatgtggtacactaagcgccagaaactggagtctgaggatcggtatcgtccatcagggtagagctgccacatgataggcagcaggcttgggcctatctgggtgggggtcataggcctccccaggacgacgtcttcccgacgcaagagcacccgtaactgtaacctatcctttatctcgatggttaagggcagccaggcgtgctgcttctcgtccaaatacacgaacttctcccaggcccacaggcggtccgggtggtcggtgactgcctccccgagtgtcgggcactcggccatggcgtcctcgggccgcctaagaagcaagagccagagcctctcaaggccgctcgctggtcccc

SEQ ID NO: 150805 - DNA, 1330 bp, Homo Sapiens
  misc_feature (67)..(127): n is a, c, g, or t
tggacgcggaagaactggcccagcggaggttcccgcttctgaagcgtgggaggcggaagagactgcnnnnnnnnnnnnnnnnnnnnnnnnnnnnnnnnnnnnnnnnnnnnnnnnnnnnnnnnnnnnnagcagctcagtcctgcagtgagagtcttgggagtccatagctaagcaccaggagctgaacactgcccgctgtgcctgcctgcaagtctgacatggctcaggagaaaatggagctggaccttgagcctgacacatcttatgggggaaccctgaggagatccagcagcgctcccctaatccatgggctcagtgacctttcacaggttttccaaccttacacacttagaactcggaggaatagtacaacaattatgagccgtcacagcctgttgctgtcatcctcacctaatcgtattcctagtagcagactgcatcagatcaaaagggaagaaggcctggatatggtgaacagagaaactgcacatgaaagggaaatgcaaacggcaatgcagataagccaatcatgggatgagagcttgagcctgagtgacagtgattttgacaagccggagaaattatattctcctaagagaattgacttccctccagtttctcccgcaccttcacccaccaggggattcggaaagatgttcgtgagcagcagtggattgccaccaagtccagttcccagtcccagacgatttttcaagcaggagaagtcagagtccagtccaagtgcattagaccccgtgttcttggtcctcttaaaagaaaaggtgaaatggagacagaaagtcagcccaagagactcttccaaggcactaccaatatgttatctccagatgccgcgcaactgtctgatctcagttcatgttcagatattttggatggcagtagtagcagcagtggcttatcctcagacccgctggctaaaggcagcgctaccgcagagtctccagtagcatgctccaattcatgctcttcgttcatcttgatggatgatctctcacccaagtgacttaaccatttctgattcaacgttttaactgctgtttcctacataaaatgtttagtggggaacgcagagaactttgatccataatgaggattaaagttttacagatttcacacattctgatgctattattactctttggcatctctcttctccaaagttcaattttcgtgagcctagtgaccttactagtatctggtttagctgatctcattttggatttagtgattaaatctcaaatgctgattttgattgcttagaggaatcttttttcttagtgcctcaaaaaaacacctattttgagtctat

SEQ ID NO: 150806 - DNA, 1047 bp, Homo Sapiens
ggttatgttctatctctggtatccaagtattggcctaatgacaattgcacttgtgcgccccgtatcacatttacccaagcttgcattcgggtatgttcccatgccctatctcctggctcttttcatgctccttgcttccctagcaccgggcatcacgtgaaggatccttctacgtctgatgcaaatatgccgtttgcggcccgtggtcccatgcaaaccgtccttcgccggacaatccctgcacaacgattctccgagtggcccatgagacaagcgcttggccgtaagcccttccaggcaggctcatgtcccacaccataagtgtctgctttcaccctggctcccagaagcgcaaggcggccattcaggcattctggtctctgatgggggcctatgaagagctcggcggaggccggcaggagaagaccgccctccttccagccacttggttcgctgcgtgggaggacggagctcagcatggactcttgcaggagtcctgtagcccatccactcggctcacgatggcatccacctgttccggcaactctacagtctccactggtcccggcaggacgtgcaacccggtcctccagcccgttgaaccgcaccacctcccgggcctgttgtccagatggcgctggcctctaccgcgtacacgcgcccgggccccggcctgggcacagaagatgctcagaatgccggtgcccgcagcccacgtccagtaccgtcttgcactcgcagtgctgcccagttccgaaggatacccaggcaggtaggcatcaggtgcggacgcaggtccgcgatcatctcctcgtggaccgataacgtccgagtagcacatcgtagtacagctggtcccgttcccgcattagtcctccggggtcgctccagggccggctcccgctccgcgccatcttcctcttcagttccctcccctccttcgcgcgcgcccccgactcaagctttcttttcttggggctgcgacatcttggccgctctgcccggctcccggcgggcgtaccgcggcacggcgcgggctccaggaaa

SEQ ID NO: 150807 - DNA, 1071 bp, Homo Sapiens
  misc_feature (83)..(83): n is a, c, g, or t
  misc_feature (112)..(175): n is a, c, g, or t
  misc_feature (240)..(299): n is a, c, g, or t
  misc_feature (715)..(757): n is a, c, g, or t
  misc_feature (781)..(800): n is a, c, g, or t
  misc_feature (902)..(902): n is a, c, g, or t
  misc_feature (907)..(907): n is a, c, g, or t
  misc_feature (911)..(912): n is a, c, g, or t
tccgccaatacgcggcgcgtcaacgcgccctggccgctctttcccctctccttccctcgcccgcggccccgtcgtgcccagancccaccccgcacgcgtgcgacgcgtctcnnnnnnnnnnnnnnnnnnnnnnnnnnnnnnnnnnnnnnnnnnnnnnnnnnnnnnnnnnnnnnnngcccaccaccccgacggcacggcagcgctccggggcgccggcgtgcgacggagttctctcgcctnnnnnnnnnnnnnnnnnnnnnnnnnnnnnnnnnnnnnnnnnnnnnnnnnnnnnnnnnnnntgtccagtcccgcgacggcgccgccgcctagaccgccgttcccacgccacacgtgcgcactcgtcccgtcatcgcctcgtcctcacgccgctggcgcggtccgacgctctgagccggacaacagcgtgcgggccatgcactccgccagcgctcaggcgcgtgtggccgccacgtgccatcgtgttacgctcctctgccccgaccgtcgtcccgcctccacctcccgccgccatcaagtggctcactcgcgccggcgctcccccgccgccgcggccgtggctgcagcccggcggccgcgccgcgcgtcgtccggcggcgaacttagccgccgcccgccccaccgcacagggaccgcgccctcccgcgaggcacgcgtgcgccctccgcgcccggcgtcgcgcgggcacacctagtgnnnnnnnnnnnnnnnnnnnnnnnnnnnnnnnnnnnnnnnnnnntctcccgcggcgtcgacccgcccnnnnnnnnnnnnnnnnnnnnagagaaggccgccgccggcggcggggccccccttgcccattccagtggggatttatggggataaatgggcagttttttcttccaccaaccaccattccggantggtntttnnccatcccagtcatcttccgggtgtgagctgcagccacagcccatggtccctgcccagcccgggagccctctggccccattcacatggtcctcctggcctaacctggctgcctggacagtctcagctcccttcgccgtcgtagccaccacctgtctcccc

SEQ ID NO: 150808 - DNA, 1149 bp, Homo Sapiens
  misc_feature (75)..(85): n is a, c, g, or t
  misc_feature (123)..(157): n is a, c, g, or t
  misc_feature (298)..(349): n is a, c, g, or t
agaggagccccccacgggggtttcttgggaggaaatataaaaaaattgcccccccctttggggggccgcgggggnnnnnnnnnnntttttgggggccccctgtggaaaaattatatgaagagnnnnnnnnnnnnnnnnnnnnnnnnnnnnnnnnnnnttgagggcgccctttttcgcgccccaaaaaaattttccgtcccctcgaaacaaaagggttcggggattttttcccccagggtttccccaaaaagcttcatgggccccacccggggggggcccccaagaaaaccgcgatatnnnnnnnnnnnnnnnnnnnnnnnnnnnnnnnnnnnnnnnnnnnnnnnnnnnnattttttgtgggaagaggaagaagcattcccccttccgtttggtccacctggtggctccctttgggagggccccttgtacagggagttctgggaagggagaaccccctgggcttagtattccagatgccccacccagggccaacctgcttgatgaagaaggacgcgggccacggtggcggtgaagctgagccagccttgacgatggcccacgtagcggtcaatgctgatgcaaagaagtaggagcatgccactgaaggaagctcatcttgtagatggcaaagatgagcttgcaaaagtggacaccgaagacccaggacttggccgcgctgtaggcccagaagggaagggtcaggaggaagaggatgtctgccaccgccaggttgagcaggtaggtatcggtcatggtcttgagcctcttgaaatagatataggtcaacacgaccagcccattgcccagtaggcccacgaaacaaatgatggagtacatgatagggaggaaccaggctttaaagttccgcacgtccttcttggagcacaaagactcgaacaaagtgtagtccactgtggtgttgtctccgatgtaatcgtccgtgacctcatcttgacacaggcatacctggaaaatgacaaggagagccaccaccagcacgcttttcattggtttccccaggtccatgacgctctctgggcggtaaaaccacacaggaaggctgtgcccggcctcgcatcccgggaatcacggtccatgacaacaaagaaaaatataataaagaggcgcaaagcgaaggtggagccgccg

SEQ ID NO: 150809 - DNA, 876 bp, Homo Sapiens
ttcgccgacggggcacaagcccggggttttttgggggaagccccgccatttcgaaaaaaagggtcttccagttcgtgtttttccccatgttgggtccagactttatggttacccaagggcccccccctcgtgttggttccctccccttggccaagggtcctccctgcgttcttccggtccggtcccgccctggccaggccccggtagtttgcccttttgggccggcctgatgaagcccttctgtttccccccagtaggggcttcccggactttgcggccagctctcttcctggccccctggcagatccttcggcactctgtcccagctgcgttatcttgaggcggaggtgctgccctcaggctggtggttagtgacttccagaaccctggttcgtctgctggaggctgttgagacacctgcagatagcgcactcccaggcagatggcggtcactcctaacagcaggcaggtgaggagcaggccgagcaggaggtatcgcaggcaggttgtgcggcaggggagaatccgcccgacagctggtgacgtcacggctctccaggacgcagttggctgctccgacttgaccgctgctttgtcccctagtacagaagaagccaagcttgagggcacccctaggactgcgggcacttgaacattctcgtaggtgatttccccatcatcatcagcccctgggtcctgtcctaaccggctggagatgctcttcttcaggggagccttcacaaacctcagatctgcataggtgatggcctcagccatggtcctgagcagctctgcccccactcgtcttccctgtcatccactgtcctcccttgcccctctcgtctctgtccgtttacaactaggctctgtgttccc

SEQ ID NO: 150810 - DNA, 801 bp, Homo Sapiens
ccaattcccccaagggttttttctcccattcgggagggtccgggggttccttccagggcatccttcttttcaggctgggaggaagttttctatggcagagttcatccatgccccttccatcttccccggtcactgattatttagaagacaggagaatcacagaaaggggcaggggctttgcagtaacctcttaatccagtcgggatcttctgggagctggatgccgggcaatgctgtcatggagcaaacaccttctatatatcaaactctggcaggactggtaggttaagaagcaccggagccaaatgtggccattggaacagactgcctgtttgcgatctgtgaatggcaagatctctttacacaaactacagtgctcagggaaagtctgtttgttcatcttctttgagatatgtccaatcagcacccgtgcagttctgtcatcatactcttcatcagacattaaaaagttacagagtccgcgggtggggatgctagtgttttctgtgatccaggtgtgcagatacacttctcctaagactcgcttcatgtgttccctggtcaagtgcatctccacagcttcgattttcccttggatttccaggagtttctcttccattggctcacggcctccagcatctccagtcgtggggagcgagtcatcagtgggctcctctacatctccttccttgctcctctcctgcaggccttgcttcaccacctgtttggaagaagtgccttcttcctgctgttcatcgtcagcattgcccatcccaggcgaatccactagtaagatttttg

SEQ ID NO: 150811 - DNA, 1262 bp, Homo Sapiens
  misc_feature (913)..(952): n is a, c, g, or t
gggcgcatgagcattagtgactataacccaggtggtaaaaaagcaggctggtacggtcggaattcccgggatatcgtcgacccacgcgttcggagaatggccctgcacaccctttaccaagtaagacgaaaaccacagagaggcttctgtctcattcctccgtggctgtggacgcagcccctccaaaccaaggtgggctggcgacctgcagcgacgtgcgacacccagcttccctcaccagctcaggctcttctggttctccatccagcagcataaagatgtcaagttcaaccagtagtttgacttcgagcagcagtttttcagatggcttcaaggtccaaggaccagatactagaattaaagacaaggttgtaacccacgttcagagcggtacagctgagcacagagcccgcaacacgccgttcatgggcatcatggataagactgcgaggttccaacagcagagcaatcctccaagccgcagctggcactgtccggcaccagaggggctgctgacaaacacgtcttctgcagctggcctgcagtctgctaacactgagaagccctctctcatgcaagtgggaggatataataaccaagccaaaacctgttctgtttctaccctgagtgcaagtgtccacaatggggcacaagtgaaggagctagaagaaagcaagtgccaaattccagtccactctcaagagaacaggataactaagactgtttctcatctgtaccaggaaagtatctccaaacagcagcctcattattagtaatgaaagcccacagggagccacctcactgtaggcaaaccaaagcgatcatttatagagtccacatgtgtgaaccttaagaaagccccatttgtggaatttggaaacgtgtgttgactcctggtggtaaattaaatagnnnnnnnnnnnnnnnnnnnnnnnnnnnnnnnnnnnnnnnnctttggggtggatctgatgccattgatatatctaaaatgtgggataaaacttctttaatagctagaaatccccataaataagaatgctaaacagaattgaaaattatatcaactttaaaattttaagaccagcccagaaagacattaaatgactcctcacttatgaaaattgttttggcttttgccactttccctccttggcctttgctatatgggtaaaatcacagaaccttactttagagaataaatatggcctaattggtccagaagtaacagggtttaactccttgaccaaaggaatggaacatcc

SEQ ID NO: 150812 - DNA, 979 bp, Homo Sapiens
  misc_feature (964)..(964): n is a, c, g, or t
gggtccctgccctggccaaggaggaggctgaaagagccctgagctgtgccctctccattccactgctgtggcagggtcagaaatcttggatagagaaaaccttttgcaaacgggaatgtatctttgtaattcctagcatgaaagactctaacaggtgttgctgtggccagttcaccaaccagcatatcccccctctgccaagtgcaacacccagcacaaatgaagaggaaaaaccaaccggtgggagacctccaccctgagaaatggtcctgttgccaaggaccacccacaagctacccaacagattcctatgggagttctttgaattcccaggcggcggccggatatttcccaataaaaggcccgtgggtgcagaaaaggggcattcagtacagtggctgcccactcaggatcacaggcttttccatttgggcgggccagatcattcccggaccccctaacctggcaaaataacctgggctccatctccttcactgggattgtggggcttcaatccttcgctagaatattttcatttgaaaaaacccagaaagatatatcctggaggccccctgggttttttagcccactgagaggctttggtaacatgggcacaacccaccttttaaagaaacccatcccaccgggtccccggttaaagtccccattaccaaagcgcctccctgaaattccccccaattgcccgtggcttcttggggcacaccaaccccgtgggcaataatacccaccctgctcctttggccttcccactaccttttctaagttaaaagagcgagagacacaaaaagtcccacagttgttttacttagaaatacacctactcggggacaccgcttgcccaggcccccctacctatatcgaaacgtcgcattctatacaaacgcgccgtatttgtaggaaaatcacacacttttctccaccgctcggaagagggactctctgnttccaacacagttct

SEQ ID NO: 150813 - DNA, 942 bp, Homo Sapiens
aatggaagggaagagggcaacagcgcgccgcggaaggtccgaagtggatgaaattagggaaataggaccgaagtctgaaggggtggcaagggctacccgatgcacttggtgaaagtgcgtgccacaggtgctcgcgggcggcaagcaagcaggcccctaatgtggcgtaccggcttggtccactgtctggccatccggtcatgctctgctctgttggtcatgtactgtgtggcgatgctgcccaccagaggtcaagcagggttgcaatctgtaagaagtgagccagatggagaggagacctttagaaatagttaaagccggactccagttgtcctgttaagatggtccagacagatcaccaccttggctgttaatattacagtgatagattcttgttcggaaggtaaccttagggggtttaaacggatagtctggtgaaaaggtaatgtcaagaaagagcacccctcgttcatagacagatcctgggggtcccaatatagttgacctgccattgcataaatgttgtctcctttgggtccagcactacagttgggaggagggtccaatgtgatttctgcaagttccttctgaattcttttagcactagttgacaatttagcagcggttttgctggatatttttccctcctttttcttgggctgaacttgttctctttctggttcttgctgaacactttcacgttgatctccatcggaacttcctccactagtgcttggactgtcatcaactctttgtgcctcagtggacattttagatccctcagcgccgccgctgccgccgcccccggccgttccagctccggctcctgaggctgctgcccgcggctgtcgctgtggctgcccctgagtcctggaaagtgaagccaccacctccgggagccgccgccgcccggccgtccgcgcgcgcacccgcgagtgcgcg

SEQ ID NO: 150814 - DNA, 661 bp, Homo Sapiens
ggtgatttgcatcatggtcatgctgcatgggcatcagtgggatgctgttaaacaccagaggagccaacctatcagaatcccagcagcaaaggaaaactcagattttagaggctttttacaataaagtagcgtaactctaggtcatgattgatttcaaatgcctgccatgaatgattgtaagtaattatgtaggatccatcaaagcagtattgtaggcttttgaattgtcccagtggatccgggaccccatttcactgtctctcttgatcgtgttaatgatgcaatcagagttcaagacaggccccatgaagtctgactgcactgggatggagaaatgaatttcttcccactgaaggaaactctttctcattcgcagccaagacgggagtgccactgttcctctcttcactcctgagatactgcttctggaagcgggtgtcacttcctctctagtacctcttctcttctctgaagtgtgtgactatctcctagtgtttaaatttggcagttactcgccatgtatgtcagcatagaaaaggaaatgtttttaccttatctcctgtatgtatgatagaacttaaaagaaatgtgcatttgttttcatagccccagcagagaaaatcctcttcatagattaaatgtgctgctgtggacaggaggg

SEQ ID NO: 150815 - DNA, 901 bp, Homo Sapiens
ttttttttgccaggcatatcacctttattactactaatatttgaacatgatgattttcatggcgccaacatattagaaaaacaaaacaaaaacaatgcttcacatccacacgaatctggtcccccattgaacagggaacaagctatcctcacaatttctgcctctatcttgcgtagtcctgggaagatatctggatgcagggggttactccatgcaaaatctccataagccttcacaaggagctcagtgagcttctcctccccactgtacactgttccagaggctctcccctcttgccagaaggcgtccatagagctgtactccttaagtttctccaaaacagcagatgagctcagaccctgggagggtaaagctttcacatactctttgtccactttcaggaatgacatgttcttgctaatatcatccttggtcttgttcaacttgtcttgaatcttacgaccaataatgggcatcttcctggtgagcttaaaacatttctttttaaaccttgaccataaactctctggctggaagacaaactcatatccccagactatcagcagggtccacacgacactccatgcaattagctgccagggctcatacttggtgcaatgtccatttacataattcttggcttttgtggagtatacttccaaaatctctaagtagggctcaaaggccttcaacatcagaaggtctgtgctaggcatcttcctcttccagcctcctctccgcgctcccctttttcagactcggaaccagcttccagtctccttccctcgagcacccggccggctccacctcctgcgtctccctcagcacgcgacggactcgcaggccgcgagacccaggctcccctgttgccgccgccgccgccgagattggaggcccgccc

SEQ ID NO: 150816 - DNA, 928 bp, Homo Sapiens
  misc_feature (125)..(125): n is a, c, g, or t
gtttaaaagcgatctggtctaagcagaatcccttccatacccaggcgtgatactaccacccatgacattcttcccattcaaaatctccatgagatgaagaagaccgcccaccagctgctgtttcncccatcatcttcacaatcctgtaagaaggtctgtttatcctcacaatatattctgtaggcatagatgttgtgggtggcactagctattttcttattctcatacaatttggaaagaaccattttcacctgtttgggacaaaccactggagccaagtgtgcctgaaaagtacttcttcggtctgtaataggaatgccatgatcaatcggaggtaattcttctacttctacttctgtccgagtttcactgatatcaaaatccaatgctttaaccgaactttccggctgacatgctaaaatgagatcatcttcacattcaacatcttcctcttcagttttcttctttacatctgggcctggttctgtcatctgagatttttgtataagaacatctcttattttctccacccacaggtaaagaatactttcaccgatattctgaatatatatttcctcaaggctatttgataaatccgcacgttcttgccctttaagccaaggagcattcaactggtagataggtggagctgtacctgggtattcattcggcagcatcacctgcaagcaaagtgtccatttggggtcatctatatcgtcgctaattctaatacaaaatattttggcacagtcatcaatgacacaccactcctcgccataaatggctgccattgcttcaatttcctcattctgcctctggtcgctccctgcgtccccctcagccatgtggcccctgacctgccctgcagccgccgcctgccaggtccggagcctcgtgcggaattcgccacccaggcctcgctaccttg

SEQ ID NO: 150817 - DNA, 1280 bp, Homo Sapiens
  misc_feature (49)..(49): n is a, c, g, or t
  misc_feature (147)..(147): n is a, c, g, or t
  misc_feature (231)..(231): n is a, c, g, or t
  misc_feature (533)..(533): n is a, c, g, or t
  misc_feature (574)..(574): n is a, c, g, or t
  misc_feature (741)..(741): n is a, c, g, or t
acgtgtgggggtcgcgcgggcgatcggagtatgaacgaagagtgggtgncgtgaggaagaaacacgctattccgcgcatctaggcgcaagggacgcgacgcacccacatcctcagatagctcgggtccggaggcgatgcagatcatntttcacgcgccgggctgagcgccgaggagtatctggccgcggagatatagaggagcgtgcgggccgcccacgcggcacagaagnacgcacctgcgctcttcgtatcttgttgcggacgctgataaacggagcatgggctgtcgcaaatatgcgcgcatctggaggtgtctcgccctattatgacaccaccaagggggagagggccgcacgtgcgctgcgcccaaaggtcagccaacaggggggctgcggcgtgcaaaacgagagcgggctgttcctttataaatatcgcccgatgtgaagagccgcgaccaggcgggtggcccacctagcgtctatgtaccacggtgattgtccccgccgtatgacgccaccgcgcacagactctngcgtggagtcgtgtggcgagagaggagatttgtgtgagccncctcctggcacaccccgaaattgttggtgataaaacttggggatctccccgcggcgatggtcgctccctcaagagcgcttcttatgagtaccctccttgccgccagaacaataaggggggttaatgaccgggtagcggcacacacaaggcacagggaacaagaaggngcgtggggaaggtaggagattcgcttatttgtagcaacgccttaatgggacccagagggaaaatgcggattactttgcgaaggagggaaacctcaagcgcgttgccccaaaccagagggccatcgcggagaagggcagtgggagggagggtggatggtgggaccacttaggaaattcgccggggttctgacggcggtggctgccagggggcgcgcatcttgtgggtcttgcctgctaggaaggtgaactgagtgtgtccctggcgctctggcaaaatccatggaatgggcccgcagtgagaattccagcttcgcctcttactagctggatagcctagggagccgcgagacctccctgggcgtcagcccccggtacagtggagccaacgggagaaacggcctcacgggattgatgcggggattgagcggggcacgggcggcggacaaacgcgggtcattatactcatctcccccagagcatgcgtcccagcgccacccgcttcctcgctccgcgcccggcctagaccttccgaccccccc

SEQ ID NO: 150818 - DNA, 1125 bp, Homo Sapiens
ccgtgtttgtttgaggggcccgcggaaagcgcgggaaaccagggaggggtcacgtcacacggtatgatggttaaaagttggggcccttgggatcttggggggttttgggagtccttttcccttttggggacttaagggtctattggcagaaaaagggctttggggccttccaagggggggtttaaagttgggttccctcaaatttttggttcctcaagaatgaatggccggcctttatgtccctggatgtttgaaataagggtcctttcccgggaagatgcccaatatttgcaaccagggagatggcgatgaagacgcccgcccacaatgtaaatgttcccgcgggagccagctttccagcgcctggaatgcagccttttgtgaagatggactcatcccacttgctcttcaggtgaatcttgacatcatatccacactgtgtgttcacaactttttgcgcaggatctggcacgcagcaggagaaggggaccccgcacttctctcggctgtagctggcaccgctgcaattgaagtagacgttgaggtcccagtcttcagggccatatgcgccacagcactggttagctttctgaagggagtcgatgaggttttgcagatcgatatcgtcccggtaggacttgatgttgctctcgaagaactcccggaaccggtccctcacccagtcctggaacaggaaggccagcacggccacagccagctccaggaagaagatgagcacgatggtgccacagaaaaagttgagcaagcagatattctcccgcagagcccccacgcagccggcgaaccccagggtgaacatcaccacgcccaccatcaggaccagcaccacagggtcgattccatgcatccgggtcactttggtgaggtcggacagcacacccttttcgctccatgcccacagcccgactccaaggaagacaactccagccaaccagaagatgatgttgtagctgaaaaggaggtacttgtaccagcagctgaccttggcgttagagtatctataatagtgcatcttctgagaagcagaatcttgttaacaatgcaaacagcggcggagcggcccggctcggccgagatctctggagttccggaccggtccagccg

SEQ ID NO: 150819 - DNA, 820 bp, Homo Sapiens
ggggggaatcacaatgggcggggggtgtgggccaccctttggcggggccagggttttttccctttccaaccaaagcttttggaaatgcgggttcggtaattatgtggaaggtggtagggtggtggctcgtgggagggctggcttcatcccttgggcagccgtctctttcagggtgggcttcccagcccatttcagtaaagccagggctgctgtggtacacttcctctattgctgcgctgtttcccagcagcggctcctcagccagcagggacagcatcagccctttgacgcagtgagtgtagagattcatcctcacgagccccatgcaggactctgctggtgtcagcctggagctgattccatctgcagaggggccagcaccctgacagtttgctgagcctgaactgcattccagaccaggggctgcgtggctttcacagaccccatcaacatcctcatccaggccttgttcccccgtgggaagcttgtttcctctctgtcctggatctaagcgaggcaataacaagggcctgcgggtccttctggggagagggtctgctctgggaatgggggcttggctgctatggccaggatggtcttcgagctgctcttgggctccatgctgggtcagcatctcaggagcagagggagggcgcaagctgctgatggctgtgtcctcaggaggcgtgggttccaggctgctggaggcgctgagagatgccttgcagtaaggagccctgccatctggaacaggcacatgtaggaaggcaaaatgacctgaggccatttccacttcctgagcctctggaatgtggattcc

SEQ ID NO: 150820 - DNA, 949 bp, Homo Sapiens
tcagttcccaaagtaagagacaatgccttaatccagagggcattcaacgggtccaatcggcccttttcctcagctttctgggtttgtattggccccgtccccttgcaacccccagtgctggaggatattgctgaagaccctgaaggatgctaggcagggtttcatccaggtcacttgtagtaacctggcctgctggtgtaaagatgtttcctatcatcttctgaagcagtggtgagttgccttttccaaagagcacgcagaggtccaggatctttggaatgtcaaagaggaagttattgtagaggatttctccaaacgcagaaggggaaatgaagtgatctttcggattccttgtgacgtggacatgccggacggaaggtgagttacacaccttcgatggaggcgcttctgcatgtcaacaactctcaggggtctgaggccaccccctcgtcgaatttcgcgggggacatagcgcaggtaggagtccaggcacttctgtagagtctcgtcaaagatcacctggcaccagaatttatcgtgaggcaaggccaggagccagtcgaggtcattggctacgaaggtggcgcgttccaggtactcctccactagggcgggaatgttgtctttagggggcggtttgtataacacaaaataccggtctgccttctgctcggggtgcagcgctggtgaagtcctcagctttcctgtcttcgggtccttgtgggtgatctggagttggtccaggggcagagctggcattgtgctgcgtgaccctcctcacagtcagtgagtggcagatccaaggtctcctgtcttgctgtccagtgttcttttcacaatatcacttggcctgttccagctctaggatcccagcagatcagacacacatggtctctgcatacacgaggtggcctcggcaggctccaccaccaggctctgtgccgccgcc

SEQ ID NO: 150821 - DNA, 907 bp, Homo Sapiens
  misc_feature (588)..(656): n is a, c, g, or t
cacgagtattttgtcttctttagagcgggggcgttcaagggaggtctctcccccaagtgtgggagaaggtttgccgttcccgaaaccgtggccaggaacgttaaggggcccctttttgccccttggattttgaaaaagttcctgaaacttgccttgtggggccacccctgccaccttgttcaaggtcttcttcaaaggcaggtggaccggccatgagggatggttgtcaaaagtcgggtgcaggttcccacctcagccaggttacatccccttccttggtttccttctttgccgccaatttattgatgggcgtattctgtacagattggaccatgacagccatttctgtatgttgtggacgatcaacggggggggccacgtcggtgcagagggtaatgatgggcatctgctgtgagccggaagtagccatctaccagggacacaaaggacaaggcctcctcgtgggaagagagcttcagttccattttcttgttgtcctgcttgttaatgctgaccacagactcctttattacaatgtgagtgatttcagggaagtaagaaaaattgttccactcttcccggatcttnnnnnnnnnnnnnnnnnnnnnnnnnnnnnnnnnnnnnnnnnnnnnnnnnnnnnnnnnnnnnnnnnnnnnaacagaaacaacatttggtttatgcctccactggattccaagattcccagtcaccatcacttcgtagtagagaacgtttccaccgtcattcgaatgaaaccaattcatctcattttctgatgaaatcagtaacatggaagtctcaaatatttcagcaccgtaatgttttgtcaaagtttccaaggtagccaagtatttcaccttcaggtcatgcgtggacacgctgctgtcacaaatggtcttgttgttcc

SEQ ID NO: 150822 - DNA, 470 bp, Homo Sapiens
taaatgggtagattttcacaatgtatacaccaaaagaggacatcttttccgtgagtcagggaatatttaaagagatatcaaaagtccctattttcatgagttccacatcacatattttgtgctttctttgaatagccaaaaaattttcttggggaaaatacgagagtaaaaccatagctaaggagctataagaatttggaatggcttcttgaaatcatgccgctccaagtatgtcataacctcgatcactcaaaaatacataactcccaaaccaagaatttctgagggcaaaagcacaccagcgtgtataggaaaggcaggggaagggatggaagggagagaaagagggaacaatgtagatttcctgttttataccaggaaaactaggccaaactcaatttaaatgaatagctccaaagcagtgcagtcagaaaaagttctcagtgtgacatagacttcagggaaacacc

SEQ ID NO: 150823 - DNA, 871 bp, Homo Sapiens
  misc_feature (662)..(662): n is a, c, g, or t
ctgagagggaaacgcccgcaaaggctggtttttaagcgggagcatctcttcactcgcagcaagtgcgcgtgcgctgcctctcagcccaaattggaaacatggccgtactgtcgctgtgggcgggccggctgcgggtgcagcgcctactggcctggagtgccgcgtgggagagcaagggatggccgcttccattcagcactgccacccagagaactgctggtgaggactgccgttctgaggaccctcctgatgagcttgggccccctcttgctgaacgagccttaagggtaaaagctgttaaactggagaaagaagtccaagatttaacagtgagataccagagagctatagctgattgtgaaaacataaggaggcgaacccagagatgtgtggaagacgccaagatatttggaatccagagtttctgtaaggacttggtggaggtggctgacattttggagaagactacagagtgcatttctgaagaatcggagcctgaggaccaaaagctcactctggagcaaggtcttccgagggttgttgcttttagaagcaaagctgaaaagtgtgtttggcaagcatggcctggagaaactgacacccattggtgacaaatatgacccccatgagcatgaactcatctgtcatgtgccagctggtgnttggggtgcagccttggcaccgtggcattagtaagaccagatggctacgaacgttcatgggccgcaccattaggcttggcccgaattggaagttggcagtggaagttctcaaagaagactgttgaagaggccctcaggacactggatggtctcccagaagcgcagtcacctatgtttccttttatttattaactaaggttggtattcta

SEQ ID NO: 150824 - DNA, 734 bp, Homo Sapiens
  misc_feature (48)..(60): n is a, c, g, or t
  misc_feature (508)..(614): n is a, c, g, or t
cctcattgatatttttggtgaatgtagccacccccaaccccaccctgnnnnnnnnnnnnnaacagaaaacaactcagtttgatatttcctcatatttagaatcagtttatgtgtttttgcccataatgacttgatatccatctgccccctcattgatagtggtaaattttgatcacttggtcaaggtgtccaacttctctgtatatccccctacctggaacttataaccagtatatgtagactttcagaccatgccaatctcttgcctatgaaagtgtccccgttaaaattagcatgcattgatgtttcttacctgcactgatcttttactatgtttgcaaaatgattttccaattctagcgccttctccagctttacaggttgcacttggtaatctactataagccagaagcccttccttcccaatttattcatttaattttcattatacactcatggactgttgttttgctttgttttgttttgaaacagtgtctcactctgtcannnnnnnnnnnnnnnnnnnnnnnnnnnnnnnnnnnnnnnnnnnnnnnnnnnnnnnnnnnnnnnnnnnnnnnnnnnnnnnnnnnnnnnnnnnnnnnnnnnnnnnnnnnttcagtgtgatctttacctaggggagggacagagctgggctggtggagcccatgggtgctgcctgatggtgctgtggggtgggtgctcatgtgccaagtcctgcttggcagtggagactg

SEQ ID NO: 150825 - DNA, 1269 bp, Homo Sapiens
tattgagagacagctgtgcgatggaggacgggggaagaaaggcttgttccgctcctggaggatagtgtcgctctgactcagatgagtgctctatcgggcagcccggaggtgcgcagtactcagagaccaaccggggattacgagaaactgtcgcgagttattctggaggcatggtctcttactccttggaacgtcttgcgcgtgctagacgatacggtggaaatgctgagtgggtctacgaaggagagagagggtcatcggaccgcacgcagcgggggcacggtgcagcaggatgtcccctcacacatgggggggatgtctacttcgggcacaaaataaagatatgcgggggaagagatcaatcgggatgcttgggcgcgttgcattgggcgaagggctatcgcgtataactaagaagacggggcggggtgtcgtgataggggtgtattgatgtgaagggcgggcgggggtccgttcaccacgatagtcggtgggtggggagtagttaggaacttgtcctatcaactcagatcgtatagtgccgtggcggtaatctgacataaaacttaggcgtggccagatataggtgagcgttattgccgcgtagcacccctagagcggtcgttctccatagacgagatgtcggagggcggcacaattcgtagacgtgtgcacaaagtgcttgcacctcggttagacccaccgcaaggggtaaccaacgaaaggtatgtccgccagtccacggaatagtaagtgtggggttgccagtgacgccatccaattgtcagggaggcagggcgttcgccgtgaagacgcccgccgggggcaggtcactggggcggggggacagggaggttgttcatcgaaagggcaggtgatgcatgtcgggtcatttagcacctggtccatgagatacggcgagaccgccaggtccagggaaaggtctccctttaaaaccacgtggagctctgctgtctctgggcagtctcacgtggacagacaatgctcagaaggtggcgaaggggctggagggagataccaccgacggctgcaggggaggggcacgcacacacacaggcacgcacatgcttgcccatgaacaccccccgggcacacacacacccttgcacactccccaccctccctccaccccagacacatcagcacagcggtccaggctctggctcactccccgggaggcttctgtggccagggttcccatggcgggtctggtggcaacagcttggagaaaagcctcccgggaccccc

SEQ ID NO: 150826 - DNA, 816 bp, Homo Sapiens
gaccaaagctcttaaagctttccctgcagctccatgagctatggaaagaagaatctagaaagaagcccatgtgtaaggtatcaggtttgatataaatgggggtcagtagatctttttctcagaccctcccaggctgaaggaggcccaccctattccagcatctggagagcaaaagctgccggggcagcacagaccctgccctctttacacctcgctaatgtccaggagtccgcacttgtatgggaccaactcccaaggagtacctgagagttctccctgtctggccctgttccaagacataaagatcaggagaaactgatttgtgtgtggacaaaaatagagaagcaagaaaaattcaatgtaactaaagctgcccaccacctgacagccatctagaatgtacctgagccctgtgccagccatgaccacctctgtcatctcagcctcactgtcctgacacccccactgctagctagatcagagagagatgcagagagggccgggccccagggctttgagtctctctcctaagtgcaatcgatgaagcaggaggaatccaggctctgcctgccctggcagcagggtgcctcttcctagtctgtaggaggagggtttccccgaagaggccgaggcagagggagaggaggggaagagtctgtcagagaagaaccacaggagaggttgaccacggcagccttgagctcaaagagggacctcaagtcctaggcacagtggggtttttagtcactcacaaggggattgcggtcatcttgttgactgtgacccttgagtttcttcttaaagatggaaattgcc

SEQ ID NO: 150827 - DNA, 1352 bp, Homo Sapiens
  misc_feature (78)..(86): n is a, c, g, or t
  misc_feature (1164)..(1202): n is a, c, g, or t
tagcctttggaataaaagtggaaagttccctttaagtctttttaaactgaaatgtgcgtttccctttttcattcacannnnnnnnnattcagggcagaattgtcctccaggccatcccaatgaaggcaaaaaggtttgatctttcccagaaatcttctttttctcttaggctatttccagtactatgaaaaaacaaccgctgtgtccgttcccttaaactttctatatgagctgagaggttaaagcatatggctcgatgttttatcgcatcccagtgtttgtgcatcgaagaaatcatgtggccgtggtaatgagcgtcgtcttttgttctttaatttcctccttttgttcattccagctttagaaggagattcttctttggcctttggctggctagaaacttttgaggagttctgctgactgaagtgtgtgggtacatgacgagctagccctccctgagaagcaaagctggcattgcagccaccaacaacacacttgaaaggtttgtctccactgtgtgtcagcatatgcctttgtaaccaactttgactggtagatggagtgttatatactttacaacctttccataagcaaacaaatacccctcctcgctgaccatctacatgtatggaacggatgtgatctgccagatctgggctagagttgaagcaagcctggcactggtcccaacaacaattataggcaatatttttgcttgaagaagtagtgcttccttgtccattcatcattgctggagttgaacgcccactggaaattgtgctgtctacatccattatagtactgcttatgctgtcctccgagtccatgcggctcaggggttccccatccgacgacatctcccaaggctgccccgccggcccccggaggtcgcgttgcttccgcctcccccagtcccgtagccctcgtcgccgccgctggagactacgctgctactactgctgccgcccccgccgccgccctggctgccccgcggtcccttgggctcctccaggccctccttgccgtccccatccccgctgctgctgctggcggcgccggggctcaacgagcgggtctcgtcgctgctgctcccgccgctgctgcccaccaggctctcggcgctactctcctcctcacccccgccgctgctgctgctctcatctnnnnnnnnnnnnnnnnnnnnnnnnnnnnnnnnnnnnnnnccggcctggctggcgctctcggggctcggctccgacatcgtctctgcctcgccgccccccactcctccgccgccgcctccgccgcccccaccgctgccgccgttcagcagcagcgccgccaccgcctcggcctccgcctcctcttccccc

SEQ ID NO: 150828 - DNA, 1249 bp, Homo Sapiens
  misc_feature (783)..(876): n is a, c, g, or t
ccccactcagaggcggtcttttttcattctggcccccagaaaaaatatgaaaatacttccccagtacacagagtaaaccgaggaagccactcaacagtatcagccctgaggttctggtctcacccaggggtagagatcagcatttcctgttcctcttccagggcactcaggctgggtgaaggtaccagaatgccaggaaataactttaaaagtcaatcaagaatttttgttgtagtcacggttagtaccaattccttgcaacaactgcctgggaaattctgatgtttcccccctccttggtacccctttaaatccattcagttaatttgaagactcaatataaattcaattcattaaaaaataatcgataatttaatgggctgaagactgcacgtggttcttagagcctacagtggctgacagagtattgggtattaacgttaacggatcctgtgatgtggcggtgagctgcagctgtgatccaggaagtctttgaccagggcttagaatttgactgcactttgtttttaacagggagcctacgtgaagaagagagcacacaattttaaaagttgattttatattctctgagttttttttcttgcttcaaacaaaactctaggaaaatgccataagctgaaaagaacatgaccttcctcagacatctcttctctccctttccaaacacaactaggagtcatttttttattggtgctatgccattaagaggtcttcctgcttacgctttcctcagagcggattgttggctgggcgcagtggctnnnnnnnnnnnnnnnnnnnnnnnnnnnnnnnnnnnnnnnnnnnnnnnnnnnnnnnnnnnnnnnnnnnnnnnnnnnnnnnnnnnnnnnnnnnnnntttgctgcagatttctttccccattctccagctatgaagtgcaggaaacaaaatttctgcagacacagaacccctatcagtgaggacagaattctgaatgctctgaggcagccaactttctggggttatccactaagtgaggcgtccacttcagctgccgtagcccatccagggttagttctggctgacgtaaatcaagctgctcagaaggtcgatcctggaacactggtggagcgcctgggccagcttccccaccgtggctccctttatgccttccctcatcacccacttttggagcatctggtaaaccttttctttcagtccatctcgctcatagtcatggtcaatttcatcaatctgagactgtgtgacc

SEQ ID NO: 150829 - DNA, 1006 bp, Homo Sapiens
gcctgggtggcgttctcacacgaggagagagggaagcgatctgcggccgggcgggctcggcgctcggagacccggtggagcccaaagtttccgcgcagcccctgggtggcggcagcgccggcggcgcggggcgcccgggacagtcttgagcgccggcctcgccccgcggggacccgcgcccgccgccggccacgccgagtgtcgcccgcagccacgcggaggcggcggggagccgcgcgcggcaggacaaggtggagcagacacctcgcagtcaacaagacccggcaggaccaggactccccgcacagtctgaccgacttgcgaatcaccaggaggatgatgtggacctggaagccctggtgaacgatatgaatgcatccctggagagcctgtactcggcctgcagcatgcagtcagacacggtgcccctcctgcagaatggccagcatgcccgcagccagcctcgggcttcaggccctcctcggtccatccagccacaggtgtcctcaaggcagagggtgcagcgctcccagcctgtgcacatccctcgctgtcaggcgcccttcaggaggaagaccaggagtttagaacctcttctctggcggccatccccaatccttttcctgaactctgtggtcctgggagcccccctgtgctcccgccgggttctttacctccgagccaggccgccgcaaagcaggatgttaaagtcttttagtgagatgggacaagcaaagtggtggagattctagcagacatgacagccagagacctgtgcccatttgctggtttacaaaagtcactggtgtggatgacaacagcttggacactagtgggagcaccaccccgcacctaaggattagagaggtggcttgggaggacaatggacctggctgggcccacgttggaagagtaccatgggccaggtgagaggaaaatttctatttcaggaacgaattacgccaaaatacgagtttcttttaaacatcccctggaattccttcct

SEQ ID NO: 150830 - DNA, 848 bp, Homo Sapiens
  misc_feature (12)..(12): n is a, c, g, or t
  misc_feature (58)..(58): n is a, c, g, or t
  misc_feature (76)..(76): n is a, c, g, or t
  misc_feature (151)..(151): n is a, c, g, or t
cggctgttctgntgccacccgacttggggtttcgcaccagatcattctttgagctgtnctgggagcccttgagggncctgcatggcttgaagggctggcttgaaccctttcttgcttgttctgaaggctggctttgagcccttcctcaacntttttcccttccccagggacagcagtgacatggagctactttcttgcccagcacacagggaggctaggagtcctcagctggatcttaagccctcgaggccagggtgaggagccccttctgccctatccttaaggttcaagggccctttggagggggaggagaaacttaaggtaccatagaatgttctggaatgttgtaagtgccaattagggaatgtgaagggcctttcaggcagaatttcagaggagtatcttggggctgatgtcctttgtaatggccctccaaaagttccagagcaggggaggggctgacctgcagcccaaagcccctgttggcctggctgcctgccactgagggccacccgcagattctgcagctccacggctcccttcatcccagtgtagccttggccaccggttcccgcagggcaccaagcattttgctccactgcccagccttccgagttccccacttcaccctgcaagtgtggccctggcttccctggctccacacaggtgccctgctgagagctgcctccctggcttcagcactgacctttcacccggtgctgtggggtctcctcctcctgctgaggggtggacacagccgtccctgggaagggggttttgagcccatgtttggggatggcaggcatgggcgttggttcagagtcttgcacttcctggttgtcactccc

SEQ ID NO: 150831 - DNA, 845 bp, Homo Sapiens
gaggaaaggcctccctttccgaagccttggaggtgcttcccttcccattagtaaggaaatgtatgttgggttttaagttacaaaccaatggttccagtcccagttttttccgtcggtgggcccttttttcatcatgtaaccctggttttaccccatctaatataagttcattaaaggctccattattgcccatagacacagtctgccggtccatgcctttggtaggctgtccatttccaataagctcaataagttcccatgcagaaaagcccatttttactgtcatcaaagttgattttataatgttcaaattgttcttgctgccatcctcctcccatagcttctgtaagcttcttaagcaggtattcaatctcttgtgacacaataattaatggatacttgtcctcagataaaaagttgaaaataacccatattttaaatgcatcttcttctgtaatgagcaggggattctttgtgaggttttttttgacacagagggtccaacacatcctattgaattcaatcttgtcaaagttgtcttggacctcttccaaaatgaacctgtttaaataaggcatgtagccctggttggacactggaccctcatcatcatccctgaagtgctcttcaagggcaactgggtcatgaggaaccttcagcaccgtgcacaggttatgggaaaggaccttgagctgggacttggagaccttgccgctgtggtcctggtcgagtgcggtgaaggcgtgccagatggctttgagcagctcctccttcaagctccccatggccgcggccctgctgccccgccaacccctcctgcccagccagcccctccgcgcctcccc

SEQ ID NO: 150832 - DNA, 1036 bp, Homo Sapiens
gtagcgaggcctgggtggcgaattcggcacgaggcttctctttccagtgggtaggagcttttggcagtgtttactttacctagatggcttatataatccagtaagagatgcaaagataaaattgctgcggttgttacagaagcatggcggcctccagactgacccattggttgccctttagattttgtaaggatgcggtgctggggaggtggtgcttccctaccccctagaaatgctgccttccaactaccactctcccagatgtgacccttgcgattatttcctctgaggtttgaggatgaagataagttggagggaaagagagtaactaataggggatgaaatatagcagaagctagaagaaagcggtgaggtgagagagatgcatctgcacgtttttttcaacagcaccaggtgattcagcatattcctaattacctttcactattcgtgtatataagatcgtttacttgcataatatatcatcaatttgacatattcttaaaactagagggtgtgagaagcacagcaataggaagtctctccacaaactaggggaacacaaatggggtcattcacgtgcctggactgtcactatgtggctgtcacgtgaagtgctggtgttgatttccatttcagccagtgggtagctgataagccagtgccagcatccagcatgagcagatgtcggggagactgggaagtctccagcgttactgctctccttcccttcatgataagccagtgccagcatccagcgtgagcagacgtcggggagactgggaagtctccgatgttactgcctgccttcctttcatgtgaggggctgcacttggcttttcttgtgatctggtagtggacgaggtcttccaaggaagtgctttgcacacttttcttgctccttttttacgggctttgtctttggcgccaagcaatgaaaattaagcccctttggggaatatgaacctttcagaaatattctacctttgccctcattttggaactcacctggtgggcctttataaaaaatgggaca

SEQ ID NO: 150833 - DNA, 1165 bp, Homo Sapiens
ccgtccatagatcacatattaagcattttgtagagtctctaccatgtgttcggaatgtacaggtaggtgcagcaagagagaatcagaagtctaggtttgttagttcaaaaacaggtcctgaagtgacagttgagtccatggcaatgtccagggagtcagaaagtcttcacgcacgattgggtggtgttggctggtgaaaacctcaggagtccctgatggattggtttacttcaagctgttagctctccaagcaggcaaaaatgtaaactaagcacctggcatctctccaaggacacagaggggctccttcagtgtttgggtaatagaggccacctgcacaagcctagccgtgcacatgtgacgaggtgcatgccatcaccagcatcatgaagcggacactcttgccaaacaattgacccaaatggctggggggttcaaaattccagtgcttccccaaacaaggccacaagtctgctctgagggtgagagaaaatcgatcagagtagctgctaggagtaaggaaggatacaggataacaaaacctgtggggacctagcacagggggaacagagttaaacctggtgcttttcgctttgggtcagtgataaagggcagtgattgcagagattgcaagaattagggaaatcctgaaatttgtgaaggagataaaaacaggactgaagcagatgtcgatgggaaccaagaggttagtgattgaaaagttagtgcattttcactgtagttagttgctgcagtgaacttttccaccttggattgtggggcaggcagaataaattatcaaggcaataaaggatcttattttaaaggattcttttggtagttcctagcacacagggtcaaaggagaatagagaagtgtgactcagagcagggttcatttccaggtccttgctgtagataggatgatgccattcacactctgagaaatctcttcccatcgctctccgaaggaagtctaaaccagatggtaacttagcttagctgcgcggccagagggctccgcgagatcgaagaaccagaagagcagcatgaggagccccgccgggcggcgaggggtcgcccagcctgtcctcatcctgagctggcgcaagccttccggccgggtcctcgggcgcaggcggctcccgccccgcctgctgagcccc

SEQ ID NO: 150834 - DNA, 1098 bp, Homo Sapiens
  misc_feature (1098)..(1098): n is a, c, g, or t
gggagagtgggcctcgcacgggccacaggcaccacgtcacgtgaaactgggagccagggcgaggaatgtgcgcccagaggagtggatcatgcgagggcgcgaggagcggggcagagacgagatccaaggggaccgagagatgtgttgaggccaccacagttggagcttgggatctttcccgggtttgagtgtgtggtgtggttaaatgtttgccacacagagagaaagagggctagtgggtgggaaaggacagactcacagacgtgagcaggacaggaagggacttcagagtggagctgagaagagggtagggagagacaggctcaggagaggggagggtggggatgtggaaagccatttcttagagttcaggcatgttcttggtcagcctcaggttcctcttctttaccctcgtcctgccgggcactttccttaggtttggtttcatctacagcttctatgttctcttcagcttggctgctctccccagtctccgttggaggctgggctgttgccttggcagcagcatcctctgcggcaggggtggtggcagcagcagcagtgacagcagcaggcacatcggcttgtttaggctcctccttggctggggcatcttcagccttggaggacggcgagttatcagtggaagctttagtggcactttctgtctcagctgagccggccttctcctctgaggatgcaggagcctggggggctgcctgctctgtggcagcatcaccctcccccttcttctcctcggaaggagtttctcctgctttgccgggctcatcaggcttggagccagtggctggggctgcttcggcagtagtggtgccttctcccttcttctccaccccatcggcaacaggggcttcatccttcttattagcttcagcctcagcagcttggacatcatccttcttctctcctttgagctttttccttgttatgtgtccacggaagctagcctgaattttggttgcggccttatgagctttatcttctggtttgataccatcttgttcaatcttttggtcgtcatcatttttttcaacctgtttggttcttctcatacagcacagcatggttgtctcgtcn

SEQ ID NO: 150835 - DNA, 425 bp, Homo Sapiens
ctcttctgaacttgtaacctacattaactgggatattaataatctcttttaatcttaatgctcttatgaaatgacataaaaagaagaaatgcattgcactgttgtatgaacagataagccaaaatactaattctctccttttccccccatcctatcttgttttctttctcagaagctgtagatgaaaccaaacctaaggaaagtgcccggcaggacgagggtaaagaagaggaacctgaggctgaccaagaacatgcctgaactctaagaaatggctttccacatccccaccctcccctctcctgagcctgtctctccctaccctcttctcagctccactctgaagtcccttcctgtcctgctcacgtctgtgagtctgtcctttcccacccactagccctctttctctctgtgtggcaaacatt

SEQ ID NO: 150836 - DNA, 1028 bp, Homo Sapiens
cagcatccgccgcctgcaccgcgcgtgcggcccgccccggcctgaccccgccgccgaacccggcgccagccatggagcccgaagccccccgtcgccgccacacccatcagcgcggctacctgctgacacggaaccctcacctcaacaaggacttggcctttaccctggaagagagacagcaattgaacattcatggattgttgccaccttccttcaacagtcaggagatccaggttcttagagtagtaaaaaatttcgagcatctgaactctgactttgacaggtatcttctcttaatggatctccaagatagaaatgaaaaactcttttatagagtgctgacatctgacattgagaaattcatgcctattgtttatactcccactgtgggtctggcttgccaacaatatagtttggtgtttcggaagccaagaggtctctttattactatccacgatcgagggcatattgcttcagttctcaatgcatggccagaagatgtcatcaatgccattgtggtgactgatggagagcgtattcttggcttgggagaccttggctgtaatggaatgggcatccctgtgggtaaattggctctatatacagcttgcggagggatgaatcctcgagaatgtctgcctgtcattctggatgtgggaaccgaaaatgaggagttagcttaaagattcactctacattggactacggcagagaagagtaagaggttctgaatatgatgattttttggacgaattcatggaggcagtttcttccaagtatggcatgaattgccttattcagtttgaagattttgccaatgtgaatgcatttcgtctcctggacaagtatcgaaaccagtattgcacattcaatgaagatattccaggaaacagcatctgttgccattgcaaggctccttgcagcttcttcgaaataaccagaaaccaactggtttgatcaaaaatactatttccagggggcctggggaggctggccctagggattgcccccctgattggggagggccc

SEQ ID NO: 150837 - DNA, 1136 bp, Homo Sapiens
ttccatacgcgctgccgacgcggccaggactatatctgtatcggaccgacagcagggtcgggttcgagcgtctcatccttctagaatccagttggcactgcccgtgagttcgctccgcggccggaagattggtcgaggtccccccgcctcccgcttgcaggcagtggaccaccctgtcggccccagattccagcccaaggggctcgcctgtggtctccctggggctgggtttttggcagagcacgttaaagggcctgaaggccctgtgggacagaaatggggggaaagggagtgggatccccaagatgcccctcataggcagcgtggtcaacagtgttgagctgaggggcaagcctggtatggttgggctcaggcagaacctgaggctgtagggggcctgctgtgtccgcagccccctctgcaactcagaagtccaggcctctgctccaacgccagcgacccctgtgaggcgcaggggtggaggcctgtgtggctcaggttgccaaggcacccgccaggccttcagtcagagtccgagtcggaattctcttcttctgtcttgtgggtctgtggtctcatctgcagagtccccttgtttgaggaatttggccacgtcgttaaagatcaggtagaaatcagttgcaaacacgatggtagcaaagaagccaaacaccccagcggctttggaagccccatccgagtacttggcgatggccgtgatggagatagcaaagtagatgagggccgcggtgacacagcgcaggaagtccatcatgggccagcacaagccctgccacttgtcattcagctgcatggcatcagcaaagaggaagtacaaggccagcaggaactccagcagaggcgctgtgaggaaggcagatgctgaggacgccacatagcagataaaagtgatgaatgagagacccgactcggccagcaggaggcggcctttgagagagcagaggaaagcccgcgccggcagcagggcgcggagcccggggaccgcgggcacgggacgggagccgccggcaggctcgggtccaggtcgggatcggggtctgggggccacatggcggcggcggcggtagggccggggctcggcctggctcccctcttctcgcgcccgtaggaagcga

SEQ ID NO: 150838 - DNA, 819 bp, Homo Sapiens
  misc_feature (437)..(437): n is a, c, g, or t
gccatgtttctgactgtctccattaaacttaaatggattcctatgagttagggcatgggagcacagcagtagtccagcagatgcggcggcagcacggggatgtacacgtgctgccagtacatggggtagagcatcgccgcagacccgtggatgcaggcagtcagagtgctgagtttggttgcaaatgatgagtatccggcgttcgtacagcatactggcgtacagatgcaacatgttgttaacatccacagccacaaaatattctgtcagatttctattctcaggtatgctgggaagttctctggtatcaggcacagtaatataagaatgcacgctgagatggacagacactcctggttcagggatgggaagtttgtgcagagtttcaagaagctcattccactgattttcctgtctttttgtcgtgtaatctgccnaggatgttaagcagcttataaaatacctcgaaccaggggagatagcttaagatacagaagcagctcttcgctcctgaagataagcggcagaacccgaatctctgtttgctgtcaatgtcagtgagcacgaatgtgaagttctggccaacttggctaactgtgaggctgtccacatagaaggggaaacaaaacttggtcaaagtctgtagaacttcctggtcactgtagtcctccgggaattgcctctgcacctcaggatctgaaagagtgccacctgtcctgggataggccacttcaacatatacttcaaatgtggtctctggattctgcttgatcctggagcccatggtccccaggcctcctcatgggcccgcgggccccc

SEQ ID NO: 150839 - DNA, 806 bp, Homo Sapiens
gggagtgtttattaggggtacatgtgaagccgtccagaagtgtcagagtctttgtagctttgaaagtcacctaggttatttgggcatgctctcctgagtcctctgctagttaagctctctgaaaagaaggtggcagacccggtttgctgatcgccccagggatcaggaggctgatcccaaagttgtcagatggagagtaaatacaaggagatactcttgctaacaggcctggataacatcactgatgaggaactggataggtttaagttctttctttcagacgagtttaatattgccacaggcaaactacatactgcaaacagaatacaagtagctaccttgatgattcaaaatgctggggcggtgtctgcagtgatgaagaccattcgtatttttcagaagttgaattatatgcttttggcaaaacgtcttcaggaggagaaggagaaagttgataagcaatacaaatcggtaacaaaaccaaagccactaagtcaagctgaaatgagtcctgctgcatctgcagccatcagaaatgatgtcgcaaagcaacgtgctgcaccaaaagtctctcctcatgttaagcctgaacagaaacagatggtggcccagcaggaatctatcagaggaggggtttcagaagcgctgtttgcccgttatggtactgaaaagcaaagaagcccttcccggtttgaaaaccccaagaaggcaagccaggaagaggttttcatggctaacgggggcctacaggaaaagggaattccttcctttggaaaaaggtttttttataaccccggcttggaaat

SEQ ID NO: 150840 - DNA, 955 bp, Homo Sapiens
  misc_feature (310)..(310): n is a, c, g, or t
ggggcggccgcgcgctgctaacgctgcgctccctccgctccagcgcgcgcgcgtcgagattcttggtcgcgggcagtcccgcgagcggccgccgcacgcggccaccaccgcggtgccggacctctacaggcagcggctgcgcgcggacatcacccgtcacgcaacggccttcctgcgcgacgcccacgtgaacctctgcagcggctgtgcgtcagcgccaccgggggcctgcacgttcgcacgagaccgcgccacaagacacagagtgttgggcggtttgtggcgtcgcacccctcgccgtcggggggcnatcgatattccgacacgcccccagtgtgcgtccgcaaccaactttacgggcgccccgacccgctgcccgcgcgcgctccgaccgcacgcgcgccagcaaggcggtgcgcacgaagccgaacgagcgacggacagcaagtatgaccgggcgcccgtcccgagagagcgcgtcgaccgtgcttgcggcggttgccagacggccgtccccgagcgtgcggtcacacggcgtagccgagtccccggtggctccgcggcccccactcagccggccgcgcttcgctcgcgctcgcgcttcgaccccccctctgatctgtgcttgcagccgtccaggagctggccatggccacacagcagtcagtttcagggtggctggatccgcagctgttttcacagtttagcagactcatagtaacttgcttctcccttgctcgttgtagtgcgcggggagggcgaaccaggagggcagggctcccccaccaaccgcacgactccgctcagccaaggcgctggtagaggacggacacagacactgcgcgccgagacgaggctgcttggacggcaaactctggatccagtgggagccttcgccaccttcgctggccgcccgcaggccaagccccagctgcggacgccactgcttccgcca

SEQ ID NO: 150841 - DNA, 883 bp, Homo Sapiens
ttttttttcaacttcagcattcaattttattatagtaccatctccctcaacaaacaagatcagcagccagtgtgggatggtgctcaatggggctccacttcccactagagtgtaagctgcttccacgcatgctactgcgtgctccgagccatcgcagcggagtctcttctcacccagctttgatggtggggcgactcccgtgtctgcagctgtggtccaaagggtgtctgtgctggatacagaagttggccgtgacattgggcacataccatctgcagcatctctttcttcttgcagccctcttttgagcaacggtatgtaaaaatcttctctttcttcttcccagggtgagagtcacagtctctgtcaatgtgatcaccaaccaccacgtctggtatctggcccttttttactgggatgggggtattacagagtgggcatactgggacgtgaacatccttctggaatgcaaacggacacttatgtgcagcgtatggaaaatgatctttacagaaatcttgtttacatgcatcacattttactggaagaaaatctagctgctttgcaagtcttttctgaaccatgcttccccaaatcaggaaactccattatgagaacagtgctcaaaacgcagatggcggagttaagtgtcacctggctctcgtcggggacccaggcagctgaggtgagcagcagatggaagagacgtaaactcaggtgtcctcctccgtagtcggctccgggtagctaagcagaaagaacctcgacactggcaccgagacgccgtcggaggcacacccacacccacaccggaacgcaacatctccctgcccgcggcctacggggatttatccgcagcccccggatctgagagccgtctccc

SEQ ID NO: 150842 - DNA, 960 bp, Homo Sapiens
tgggcgtttgaatatcctcccattttattttcctggcatcctggttgagcattttctaaattgttctggattttttctcccactagtttctccggctagcagaaaggctcatcaagtttgggcacgagtctcggttaagtttcctgattgtaaatggtatattccaggggctggtctcattttatctcccttctgatagtgagctagtttttccttttcttcctttagagtatgtaatctctcttcaatgtattttaacaactcgttgattttttcccgtttgccttctgtttctttcattaagggagatgctttcttcctttcgttcgtcatacactctagtaccagctacttctcttaatagctttaatctctgagaatctggtgctgttgccatctggttgatctttccttgtttaacaatataataaggattgcttcgagaaaaaccagcgctttcaaggaggttcatcacatcatttttcgtgaccatcttcttgtctaagaaatactgatcctttttggcaccaataactcttcgaagtgaaacttcctctttatcgattggtaaccggttgtctgaattatcaaaaataatctccacaaaagcagaaataacacgaggaccagtaccttcatgcaataaagccaaccgctgttctggacgaagatgactaaactcatcactgagaacaaactgaattgcataaaaaaagttactttttccagatccatttctgcccacaatcacattatgttttgaactgaagggatctacaattgtttgatctctgtaacttcgaaaaccctggataatcacctgctttatgtacatgattccgggcccctggcctggaaggagacctgccccggagcagcaaccgcacggccgcagggtcaggtgaggcgcctacgcgacccctcccccaaagcgccgctcgctcccctcagccaaacccc

SEQ ID NO: 150843 - DNA, 1458 bp, Homo Sapiens
  misc_feature (833)..(841): n is a, c, g, or t
  misc_feature (981)..(1002): n is a, c, g, or t
  misc_feature (1008)..(1103): n is a, c, g, or t
  misc_feature (1105)..(1116): n is a, c, g, or t
attgttaattgtaattaatgttaattctaactggtaatgatagctagcaataaaaaacacacagagagtaattacaatcagctcattttcttattgtcaccatctgtcaaatctcacagaatggaaggcaaaaaaagacaacttcctattgtgaaccttgattgttcattaaatttacaatatatacttagtggaatgccaaaagatgttctggttttacaagcttaaccaccagtcttttgattgcattttaaaagtgcatatttacttgttttttaagggtctaaatctgatgaagatggtaaggcccacaaggagatggctttattgataagtttgtgtgctgttcttagaattatctataatgtataagagggttaattttccaccactcccactgaatgtcatagagtttcagtggaaaatgaattttattttattttataacttcaacctaaacctattataatctagacatccaacaacatctgattgtctgctggagactttcattgcatgcccattaatcttaaatggagacttaattgcatgcccattaatcttaaatgattgacattaatatctagttgttcttcattcatactctcactggaatttagtctatagtttagagattattttccttgtgtccagtcctaaaaagactagattttcatacttcagaagcagaaagggtgagatttgatcattaaggcctcttccaacattaaaatatccataattgactgccttcctaaaatctgactgatgtatcattccattaagtcgtttattgggacaaatcttttacagaacaccagctataagactgnnnnnnnnnccacataggcccattaattctagaggttaatatataaaaggtgagctcaatgtttacacagatgtgacttaacagatacaaagaataggaaatagagcttgtcaatataacagaggtagtgatttgtgagtaccaacttnnnnnnnnnnnnnnnnnnnnnnctttgnnnnnnnnnnnnnnnnnnnnnnnnnnnnnnnnnnnnnnnnnnnnnnnnnnnnnnnnnnnnnnnnnnnnnnnnnnnnnnnnnnnnnnnnnnnnnnnngnnnnnnnnnnnnttgccaagaggagagaatacttatgttaagtgttcttatcgcaaaaagtaacataaatagagccagaggaaacttaaaaaaaattcagcattaactattaataaatgaaatgagaaatcatgggaacctaacacttttgtcctgatcaccacctcccatcatttaataaaggattataaggtaaaattgacaaaagggcagaggagtaaaggctggtggaataagttgtaggtaaattacccaaatagagccatctgggtcattagctgttagtgttgcctcagtttgcctgaaatgattatatgacaaggaggctgaaaataatttgaagagcaaagaccc

SEQ ID NO: 150844 - DNA, 1063 bp, Homo Sapiens
  misc_feature (679)..(679): n is a, c, g, or t
cgcgctctgcggagaagcggcccacagccccagccgctcgccgtcgcccaagaagcccctcagccgggacaaggacggcgagggccgcgcaaggcactctgaggccgaggccacccgcgcccggcgccgctcccgcagctactcgcccatccgcaagcggcgccgggactcgccaagcttcatggagccgcggcgcatcaccagcgcccgcaagcgtcctattccatactaccggcccagcccctcttcctcctccagctgcttgagcagcgactactcgacccggagccacagccgcagccccagccccggccacagccacgggagctacagcagtcgcagccatgggacccgcagccggacacgcagcccctcgaggacccccagtcccagctaccacagccggagcagctctgagagcgggggcttctgagcccagacagactcagcttggtgcccccctggcactgggagaggcgaggggcgggccccaggaccccagtggggagggggctatatctccttgcccccaaggctacaaagaggtctcagggccagtgcacgggcagatgggaccggggaagactttgagggtgggcatccagtggacaaggagaagccagatgtgctgcttctacgggtgtcctctcccacctcctgtccacccactgtgcccggngaacaaagagccgttacgaacacaggaatctccccatcccccttcctgctgatgccaactcaccaggcttgggactgctgccggtggatggtaccagagtccatgatctgctctgtcacttcaccttagctcagtgcagccagggacaccttgcaaggtgccagccctgggagtcctctcttcgcactacacaggtccctccactcctctcttatcactgggcagacgaagaggtggtacagcacatgggtttgggagctagaccgaaaggaaaaacagcctaccccttggtgcacccccatccaagctgggggaactggcatctttttgagctggctgcaaggaggaccctggcctgagggcttggttgccttggccccacac

SEQ ID NO: 150845 - DNA, 564 bp, Homo Sapiens
atgagccaccgcgcccggcggaacttttgcaattttcaaaacatgtttttttccaagtaaaccaatcaattcgaactcaaggttccatatcatcattagcttgatctgaaagattaagaactagttcttacatcattttctgcaggccatgaccttaaacgcctactagaatggctataatcacaacagaaaacaatgatgacccatttccaatctatagtcctggatcaaatgcaactgagcaattctggcccagaaattatacttcacagacaatgcaatgaaacgcagccaggataaatgctggaattgccccactctgagtgtgatctcactaaagccctcaactatctttccacaaagccctggggagaggcagggtcaatattgcacatctgtcttcaaggatgaagacacagccccttaactggcagggcccatcactctggctgaacagagctcaagactgtttgtccactggctattcattccctgggtccctgctctgcccatcctgtggctctgtggaaagtggcagctgtccctgactcgctgctaagctcc

SEQ ID NO: 150846 - DNA, 596 bp, Homo Sapiens
  misc_feature (109)..(160): n is a, c, g, or t
cataggtataaactttatcttactcctacatatgaaaatggatgtgttacagggatattgatctcggggacttttttttgtttctttgtaaaaaacaaggtctcactcnnnnnnnnnnnnnnnnnnnnnnnnnnnnnnnnnnnnnnnnnnnnnnnnnnnnaactcctgagctgaagcaatcttcctgccccagcctttcaagcagttgggactacaggtacctaacaccacacttggccatctcaaggacattttatgacaaagaggagagtgctgtgcacacagaaggagctcaaccaatgttggttagattggaagaaatggtgctccctgcccccagcccctcaccgtgatggcgtctatcttgaagagggctttggcctgggtgctggtgtaggcgttgaagcggtacgtgatttggttgaggttgtcgatggagtaggcctggacccgcacaatctcagtacccagtgccagattctccaggatggcagcctcgtatgaggcattggagaactgcacggcctcgtccagctcgttgagcagagtgatgtagacgctgcagaagccctggttgaagggcggggcctggtccc

SEQ ID NO: 150847 - DNA, 787 bp, Homo Sapiens
  misc_feature (52)..(52): n is a, c, g, or t
tttttggtagaaaggcacacggctttttaatagcagcaagttcaggtgcatntgcttcgaggggctaccaagccatcataccattgtggcaaagggggcatgaggatgaggagaaagcacccaatgtgagggcatcctcggtgtccacaggtgagcatagggcaggaggggaagcttccaacacatctggatggcgacacccctgggcatggcagacataagatgtgagccccttggtgacacagtcagaggctctttgagaggagggggaggcaaggttggtagtggtgcttcagggcactctggccatccaaatgccacatgctttggtccttctagctgaatggagaggaggcatgttccatctccaagcccgaagcattgattcaccatctttaacttggagattccagactcagtcctggtcaaacatgccctaggagggcaactggctcagctatgccattcctctgcctccagacctgaaggaatctttctagagggagcagtgcaagccaggaggccacagagggaaaaggtttagggccagtggtcacatagctaggtgcctgccgccagtgtctcagcttccagagcttcccagctgctccaggagggccctgacctcgccctccactcgcagcagctgggccttgcgccaaggattaagggtggcaccccggctatcttccagatcccgcagtaggagctcaaggtgtcgctgaacccgggcccgatcccagctattgaggttccgctggacttcactgaggatcagaccagtacc

SEQ ID NO: 150848 - DNA, 1053 bp, Homo Sapiens
  misc_feature (286)..(286): n is a, c, g, or t
  misc_feature (324)..(324): n is a, c, g, or t
ctccccttgggtgggtttccggtttaattttcaagcccaaattttttggcatggaaaccttcccgtgtaattcccttcaatagtttttccccaaatttcggcttgggtccaatgttaaatccaaattttcccgcaaggaattttttccttaaaagctgatactatgtttcccatacactggtattgccactagattttggaagctgccacgttatgatatgagtcggaaaattccatcgtggagggattaaatgacaaaactcttttcagattcccaacgcttganccggatgcaggggtgaaagctgacatcatccagaagcntaggggtcatgaaagaaaggggagagatcaggcattccagatagtttaatgcaagcatcaatgaccccctgaatttctgcaaagacctgtagatcctgatttattctataattgggtctatttcttcaacaacatccaaaataggcttcattggtttgtgtactttacccctgcccgacgccatggtatgttggacagctgcccggtggggagtgtgtccccaacattactactgcctgtaatagagttgacaacagagcgtagaattgttggtggtttaatcaattctttcaaaatgttagattcggtagccagtggaaatccattgtctaacatttcttctaagagttcatatactatgaccacattatccttaattgcagcctctgaacactcaccaaagtagtcctgaaaagtgtcagcaactcgatgtaggaactcaattacaaagagaggtggcacttcggtctgtatgacagatacaaagaagagcttatcccggtagatactgatgaggtagtggtgaggtgttgaaatgacaggtggtacattttcaacatcagcagctttctcttgagcttcaaagaaataatcacagacagactggctcacaacgctcttccagtgcttctctagaaatatgtcaccggaacagtttatgagaaatagactgtggatcattttcccaacacctgtgccagtcagtgattcggcgccggatcctctccc

SEQ ID NO: 150849 - DNA, 918 bp, Homo Sapiens
ttttcacgattaatagatttactactgtctggggattgagctaagctttctccagaactgcttctggtggcacaggagttcgctctaggcctttgcatgctaccagctgatcggtttccataaaatcccattcaactgtgattttggagtattgatcgaaagaatatgaagtccttcctaataatgtgcctttggtgaattttacccaaattagatggtccagaaaaagacttttggtttaacctcctctgtagatgacaccaaacatagtggatggctttgctaactttgatgtgaataaagaaacacttgttcaaacctccctttatcccatttttatcaaacattccttgagtaggaacacgtttttcaggatcaattattttatcatgtgaattttgagtattgttaggctcttcgacaccttgtgcacaaagctgatatttatttgctttcctccaattaaatgaatgagatgatggacaatcagagccattatttttgatgtaacttttgacattactattcttggaagttcctaataaattaacaggtgtcccatttggcattggctgcaatgtacttcttacagattttgttccatactttggcaacttggaacccaaaaatgtcttgatttgtgttttttcttccatgagctataaggtgcatttgttcttaaaagttgaaagaatcgtgcggaggtcgcgctgcctcctcggccgcggcccagctgcaggccgccctgcgacctgcgggcccgaggacggaaggtgagacgaagggccgcccgtcacatccccgccagccccgccgcccgagccgcagcaaccagcatcgcgtccgcggcttgagggagcgccggactccaaagccgccgcgccccctccctcggccggcgcacgcccggactccccc

SEQ ID NO: 150850 - DNA, 684 bp, Homo Sapiens
  misc_feature (76)..(119): n is a, c, g, or t
tttaatttttaataacaatttatttccctttaaaaagatcaaatgtttttctcataatatattattttacaacaannnnnnnnnnnnnnnnnnnnnnnnnnnnnnnnnnnnnnnnnnnntaaccagattttagctcaaagagtatagcctgggattaattttttaagatttgtttgtcaatttcaaaaattcagcagtggaataaagagcttaatacaggtatgcaaaaaggaagccctcgagatgttttcaccaggatgaaatgggattagctttgtagttcttataatcttcttcacagaagaatgcaatttcagtttcactggcgattccagctgctttcagagtgctgtcttctttcagcaggagtctttcgtcatcttccaaactcaacacaagttcatttgtctttgatttatgtgcttgatgaataatctttagtgcatcatatttataatttctgaatggtggtggcaggttggtccttaaagggatatcttgctttagaaatacgataaattcctttacagtttggtccaaattcactccgtgatacactacaggtttgaaattgcgatgttcaaaggaacggatgaggcgaactgtgatggtcacttctccaggagccatgtgaagaaattcctgttcccggcgtccccttcggctactcccggcgtttgcccc

SEQ ID NO: 150851 - DNA, 1107 bp, Homo Sapiens
ccgaaaaccagacctgataaagaaagttgcccttttcaagcctgcttccccccaaggtaagggaggagggttaagttttacatttccgcccactgaggcacaattccaaatgttctttacttttgggggaaacagtttgaaaatgtggaggccagcacaggcagccactcccaacaccagtggtaggttcaatgagtagtttcatcctctccccaccccagatgggttgcacacttaatttcatcctctgggacagtgaagattatcatccacaaggtccctgataataggccaggtgttcaagccaatgctggatttgacaccatctgctatggttttctggaggataaagattggggcatcagtttccctttcagcttggactggtagcagtcatctgcatttgagggttcagcagcatataccttcacactaggtttcagagccttaactgtaattgctattccagcaagcattcctcctccacctacaggtaccaccagtgcatccaccaaaggaacctggttcagcacttccagggcaattgtcccttgtccagctatcactgcaggttcctggttgggatgtaccatgatgccttctgtttcttctgtaactctttttgcaacattttctctggactcatcattaggttcacagtatacaattgacgctccgtaggcttgtattgcaagtttttttacagtctggagctgtctggggcaccacaatataagcaggaattccttccaatttggcagcataggtgagagcctggccatggtttccactgctgtgagtaacaacagctttcggcttcctttctaaagcatcaggaaccaagcttctgacggcattgagagcaccacgaatcttaaaagatcctgttttctggaagagttcacatttgaagaaaagattgcgccctgttagttgattcaaaatggagcttgttagcactggtgtgaggtggatagaatctcgaatgttgatatgagctttttcaacatcagcaaaggagatgcaatactgagcacacatggttctcagctcaccggcgccgcgcctccagctccagcctccgcgcgcctccccggccgcaccccc

SEQ ID NO: 150852 - DNA, 853 bp, Homo Sapiens
taggtttcccaaggaggtgaatttttttccctatacccctaaaggcctctttttgagaggtaaaggcttggggattttaccagggggtttcttgccaccccaacgccccggggggatattttcccctattttttaggttggacactggccattttcccacaaggttgggcccaaggctggtccttggaactccctgacctccaagcggatccaccccgcctcggggctcccaaaggtgtggggattacagggtgggagccacccaccccaggccccatattttcttttagacatgcaggcaatgttgtggtttgttgttaagatgtcttaatattcctcttcccaggctctgaaacctagtgtgaaggtatatgctgctgaaccctcaaatgcagatgactgctaccagtccaagctgaaggggaaactgatgcccaatctttatcctccagaaaccatagcagatggtgtcaaatccagcattggcttgaacacctggcctattatcagggaccttgtggatgatatcttcactgtcacagaggatgaaattaaggtgaggctccagcaagaaaagaaatagcaaagcatggtgtaacttcttaggcagaagaaacttcccttaggagtagcaagtgacccacgggaacctgactaggtaacttcatgacatgggagggtaccctagatgtattaatgacaaccctcttgacagaagcagagtcagaattaaagaaaagctttgggaagcgtgtgtacacagtgataagaaaattcaaactggacacgtattctcatctgaactttataggtaaaccaactagactcccctttcactaattcctactccccc

SEQ ID NO: 150853 - DNA, 714 bp, Homo Sapiens
  misc_feature (303)..(304): n is a, c, g, or t
gaaatgggtttttttctgggggtcccaaggggtaaaacttaaatggggctggaaattaaaaaaggcccgggggcatctttccacgcttctatttttttgagattcaggcgggcttcttctgagcttctttttctgctttcatccacatgaatggtgaacgcaggctgtttactgtttgctttccaaggaggaacggtgacatgctcatcatttacaggaagatccttaaggggtgcaacccgtctcgtcttcggcctctgctgctgcgctagaccccgcgggttcccggacttcagtaccgcnncagcgcggcccggggtccgcgggttgttggacgggcgctgccttttccgggttgatattctcctggtcctcttggagcgccgtctgctgcaatgctagcagcgccgagcccgcctcgcgggtcgcaggccccggcgcagagttgcccaacatcactgctcccgggagtggacggcgggatcagcctgcggcgccaagcagcgtgcactctgcccagccgaccactcgcaccgacccggccaaagaatagtcgtagccgccggtcgcagcccaggccagcctaccagcccgcccgctcgctcacccagctcaagaccacgcagggccgaggaggttgcgaaaggcgcaggcaggcactgcccagcgtggcgagccaaagacgcccagagatgcagcgagcagcccgccccc

SEQ ID NO: 150854 - DNA, 649 bp, Homo Sapiens
gtgtgagccaatgtgcccggccacattctgagttttgaaccactctttcatcaacaagcttttggactggactctgccacgtgacagtcagtaggaactgactccgtgctttacaccacgcgcagtcccagtgcttcatcactcaccggagttttgatgtaggtgtggggatcagggaactcaggaaaatggctggggatgtgcggcgggtggggtcggttctgccctgcagtgagggccttgggggtcactggctgattggtcaccggaggagcagtgatgaccatcctctgagaccgttttgcataagcagggagagtgtccatatttagacccatctctgcaagtgttaccacgatatcggacagtgtgggctgggtcctggctgtgtgctcacagtaagacttggcacttctcccaatttctgaaatgtagctctgcagcatctctgtcagcgtttccacggatgctttctcggcactctcaaaccctgcctctgtcagcaaggagctcacaaccacctgcagggttctcctccgggccagatgatagttatcggcagggttagtggactgtttacttcccgatctcgttccggagccaccggccccagctgtggccgccgcgtcggccatcttgttctggcccc

SEQ ID NO: 150855 - DNA, 812 bp, Homo Sapiens
  misc_feature (107)..(240): n is a, c, g, or t
gttcaaaagccaattttttgccccggcgcccaaaccgtttccgggaggcaaggggtgggatttaccagggcggccaggccaagcccggccccaagttaaatttttgnnnnnnnnnnnnnnnnnnnnnnnnnnnnnnnnnnnnnnnnnnnnnnnnnnnnnnnnnnnnnnnnnnnnnnnnnnnnnnnnnnnnnnnnnnnnnnnnnnnnnnnnnnnnnnnnnnnnnnnnnnnnnnnnnnnnnncaaaagcatcaggaaaagctgtccccctgcattaaattcagatcccatctctgccagaaggatagccctggccaaatcatacagctctcacccacctgtgactatgccccatgggagaaggacgtgtatatggaggctttctgctagactatgctagatgctttgatacacattatcccactcaatcctccaaacattccagggaagcaggtgatagtagcccagcttcatcaatgacaattctggttctgcagtgggatgtgatttgcccaaggtcatgcagcgctgagaagcaggcccagggctccatcagccctgccatgcaataggctttgttgagtgagcactggatgtaaattccgaatgagcttaaagcggccagacagagccagtgacaggagactctattaggcagatgaggaaagaatggagcttttcttcctcctaccgcccaagcctttcccatccttaactcctctgcacaacggggccctcactgtccttcccccaccttcttatcaaaggatgctggtgctgggagggggaaaagacagaaagaggattagtctccc

SEQ ID NO: 150856 - DNA, 1277 bp, Homo Sapiens
ttttatatctgctattatttatattaatcacatcctttccaattcaggtcagttcataggcctcaatcaatacaaattatttcaagaaaccatcctttgtgattaaagtaaatattgatactacatagcccaattatcatatggctaataggagaagcaaaactgtagagctagttttgaaacgtgacgttatatggctctatctctacaacattttacatggtagatctctgcccagcctcatccagagctaagtttctttttccttgctgctacttcattgtttaactctgaatctgatttgtccatgttgttgccagagtaggctggcatggaacctctgctcccctgttcagtgcctccatttggatgaagaatggtagaatttggctccttaggacgtttccattgcggtctggtgactatccaaaaaatgagggccccgaacaccaggatcagaaggccaagcgtatttacgaaaacaccttctggcgggaatgtactgtatgcaggatctctcagggaaaaaatcagtttctctgtcaatcccataaagtgctgttgcaatcactgttccaaaagatgacaattccagaataaacatgtatgggcatgagaaatgctcggagagaaagcggagcccatggaagcagaaagactgaaaaacctgaaagaagctgtaacaaatagcatatgacagctatcagtccaacccagctgtgcagactgtacatattggctatattgttaacattgtggttctcaaacacggccaccacagagataattgcaagaatggcagcaactgcatttaaccctgcatggatggatttcatcaggagcttgctgcatttccaggtccacggcagtctgtagacgatgatggcgatgccctggatgaagacgaagccggtgaccatgagcactgggtgccagttaaactctagtgcgctcccatcccagccaagcccctctcggtagtggaggacccagacgagggcgaagatcaccgacaggaagccgacgagcagtgccgaccccagcagcgccaggaagcgccagtagccctccatggccatcagcgccccatactccgcaccgcgggggccacaagaacttggagaggcggcggcagccctctgggtagtggccgggcggcgggaccggggcgtcgacttcttggggctgtctccgcctgcggggagggactttctgggctgctggcccggaatgtggggccttttgcgggtggggagctggccccaactcagaaatgg

SEQ ID NO: 150857 - DNA, 1011 bp, Homo Sapiens
  misc_feature (754)..(754): n is a, c, g, or t
  misc_feature (894)..(933): n is a, c, g, or t
gaagtggataggggataacttaaactattctttactctcctttcattgcctttgagagctagctcttgcacacactgactttggcttccctagcgcataggtaagggaattgcctttccctcttttgtgaatattctcatttctgaaaaattctaagtcatgagaagataagccctatcctttcttacaaggattggatttcttgggtgacactgtggtgtggtggaagccagcggcttctttcaggttcataaaggccatcataacaacttcaggcttcatggtgtggacagggatccaggagagctgagtggatgtgtgaagtttctgatagattctgtcatcattccaaaggaatgtagtttcctccagctcaatcatttgaagtaatacacattgccaaatctgactgtaacctgacattttagacctattggagaaataggaagaaagcccctccagtggaaggactggacttggaagaagttctgcaggaaggtgcatgcaattggatagctgttcatgagtgaaacgtggggaacattgctatgaaattgtaaggtttgcacttcatttttcgtagtttaaaaattgctctgttctggctgttgaaaacacttggtgtgaggtttgaatgaggattatataatcattctagtattcataggaaaatgattactgctctctatttgtaaaacaaaagaaataactttcggaaacagtattttagacatgaggaaattgtttgtattangcattttgatctaacagaatcagctaaggatagtggatcctggctttacacatttctttgaacaaaaccagctggcaacttgaagttgttactgtgtggcttccagatggctagaaggtgatcctacccacatcactggnnnnnnnnnnnnnnnnnnnnnnnnnnnnnnnnnnnnnnnngaaacagaatccttgctcctatcccaggctgggaatgcactgggcgtgatcttcggtttaatggaaacctcagccctc

SEQ ID NO: 150858 - DNA, 882 bp, Homo Sapiens
gcacctgtgcggggactggactttcctgttggggcgcaggctggagtcaaggcttgggggtcttggggtatggtcccagcagccagcaggtgcttggggtgagtgacatgacaacacacggcactggcagacaaagcagctgtgccagtctccgagttcctgggactctgccagatgggctgaggctgcagttccacattccaaccccagcagccccaagcctgggccagggcgtcttgagcgggcccggctggggtggggatggggtccgagggcctaggcgcaccaggctcctgctgtcagctgtccaagtagacaaagaggatgtcctcatctgtgccatagctggttctggcctcctcaaagttactgatgctggtgctgcacattcggtcggcataggctgggttgttgtagaagatgcagccagtggcccggttgtagccacgcagcacgatgaagtggccctggtagtcaggagtgcggcagaagcagtggtggccactgggggtgaagcagcagtacttgacagggctggagcacaggtcacagtgcagcacccccgagttcaccagcacgatggccacatggccctgagccaggtgcgcctggatgtccttcacactcactgtgcatttctccaccagcaccttgcaggcctttgcttgtgcaaacagctgattcacccgggtctcttctgtgtcaaagtgcttcctgtagaaggactggttcttgtagcccttgtcgacacccagggtctgggtacagaagcggtgcctcacgccaaagtggtgcatcaggtaggccaggtcgatggtccagatgctcctggtcagctgcagcttctgcagggctctctcaaactcactgtcgtccagctgg

SEQ ID NO: 150859 - DNA, 1183 bp, Homo Sapiens
ctgaggccctgctggcccctgggcgcaggcccagctcaggcccccaggatggacgtcgtggaccctgacattttcaatagagacccccgggaccactatgacctgctacagcggctgggtggcggcacgtatggggaagtctttaaggctcgagacaaggtgtcaggggacctggtggcactgaagatggtgaagatggagcctgatgatgatgtctccacccttcagaaggaaatcctcatattgaaaacttgccggcacgccaacatcgtggcctaccatgggagttatctctggttgcagaaactctggatctgcatggaattctgtggggctggttctctccaggacatctaccaagtgacaggctccctgtcagagctccagattagctatgtctgccgggaagtgctccagggactggcctatttgcactcacagaagaagatacacagggacatcaagggagctaacatcctcatcaatgatgctggggaggtcagattggctgactttggcatctcggcccagattggggctacactggccagacgcctctctttcattgggacaccctactggatggctccggaagtggcagctgtggccctgaagggaggatacaatgagctgtgtgacatctggtccctgggcatcacggccatcgaactggccgagctacagccaccgctctttgatgtgcaccctctcagagttctcttcctcatgaccaagagtggctaccaggcctccccgactgaagcgaacaaaggcaaatggtcggctgcccttccacaactttcatcaaagttcactctgactaaagagtcccaagaaacgacccagtgccaccaagatgctcagtcatcaacctggtatcccagcctgggctgaatcgaggcctgatcctggatcttcttgacaaactgaagaatcccgggaaaggaccctccattggggacattgaggatgaggagcccgagctaccccctgctatccctcggcggatcagatccacccaccgctccagctctctggggatcccagatgcagactgctgtcggcggcacatggagttcagggagctccgagggatggagaccagacccccagccaacacgctcgcctacagcctcctccagaactccggagcagcagccccagaagcaactgtcaaagccgt

SEQ ID NO: 150860 - DNA, 1112 bp, Homo Sapiens
ttttaggaaccccccaaaaggtgccaaagagtcccaaaaaaaccggatccccctttcccggggagtattggcaaaaagccctcgggggggaattagggttaagtccagggaactgattaattgtttgaaagacggatcgtttttctggttaggggggtccttccaatagattcggtattggcatcatgcagatcttttttcccaccagattttccagctttctcaaggggatgctttagatttatctttccctgcttgggtgggcttgggcccgattggtcgcatgagggctccagcaacacagcagtttagtagcaagccccccaagaattagaaaagcttcctctccatccaaagataccgaagaaaacctgattgaggggggccagagtacagaggaacacagggctgcctgccatggccagtccgttggccaatggtcgcctcttgtagaaatacttgccaatcatggtcagagctggattcaagttgaaggcaagcccaagacctccaatgactccaatacagacgtatagttgctgtacggtgttacagaaagaagctgcaatcaagccacagcctgacaagcagccaccaacaatcatgactatacgacttccatatttattcaccaggatactgctgataggacctccaccatacatgacagccaacattatggaggatatccatgacacttcgctggtggtggcatggaatataccttcaatctctttgaagaagacagtaattgatttgggaaatgcataagagaagccgatggaaatgaaagctccaattaccactgcccagccccagcctccatctgggggggtgtatccaactggacctccaactgctggtggcattttaagtgtagataaattccaaaatgcaggtcaaatccaaatatcgttatatgcgcggatcgcagcgccgagcgtgtgcgtgacgtggtggcgcaggctggagttccacggggcccagggtccggctcccgtccttcgctcgctgcctcgtttgcttgttccagtacccacgcagctagccagtcacgtcgcagctcaccacttggccgggccagcgaggctccatcccgggaattccggacc

SEQ ID NO: 150861 - DNA, 688 bp, Homo Sapiens
  misc_feature (631)..(631): n is a, c, g, or t
gtctctctcctcagcctctgttttcctctcctcttgctttgtaagttgcccttccaaggaagcagaaagcacgtctggcttcccagtgtctccggggaggaaagacagctctaccaggttcttctggtggttaaggcgtaggaccctggctgtgagcagcttcccttcagggaggtgtttgttataaagggctttcttggacgggctgtgctgggagacatgggagtaccgagccaaacccacaacggaggggccaaggcgaaagaacacaccgtgtggctggatggaccctacatagcccctcagaagctgcccttccttaatgtcctggatggagttaatctctggatcttctactttgcttttcgtctccgggtttgttctggatgatcgcagcgacaaagtcaatacgttgtctgcagtggacaggatgtaacatctgacaaccttctgggggacgaagtcttccaggggcgtctcggagtaggagtcactcatgtgaaatatactgactgttcctatcttcccaaaggggaaggagacggtcagcccctcgttgggagtcaccttcaccactcggcccatggccacttccccttcctcaagcttgtgaggacctgtgagggacagnacataagaaggtcttggaggaatctggccaaacacggtggcccctcaggcctggccc

SEQ ID NO: 150862 - DNA, 761 bp, Homo Sapiens
tcctcccctttggaaaaaagtttaccaatggggccctccatttccccgggacccaaaaacctggaatttttatcttggtcagtgcaaatctttattagaggttttcaaactacagaaatagccatcacccctcacaatacaaaaggatttctcaaaaaggaaaattattgtgttcagattatagaaactatgtttacattaaaaccacccttaacagttcaattgttaaagtatgaaaaagggaaaaattaaagctgtttgtgcaagaatcactataatgcttgtcacccctcccacttcccccaactctgcttaattcttgttaggttggtttagaaatataacaacgcgactttctttttattttccgctgtgattttactgttcttcaagccaagatggggcatccactccaggggttttcaatttgatatggaactgtttaagtgtctgttcaagctgcttctgattcccagcaaagtaagcggcaatggcattgtggaaaaggaccagctgattgtgcaatactttaaccttattttcttctagaaatttcaatttgacagaaacatcattgcgcattttatcatatttttccttatgtgcttggaagagatgctgtgactgctcaatctttggcagagtgtttgcgtcacgtggtccaagattcagttcttccaaatcagtgcgatatgcatcatattcaatcctggcactttcatactgtttcacagtcattaatgtatcttcaatggttttat

SEQ ID NO: 150863 - DNA, 1316 bp, Homo Sapiens
  misc_feature (94)..(103): n is a, c, g, or t
  misc_feature (226)..(226): n is a, c, g, or t
  misc_feature (332)..(340): n is a, c, g, or t
tggggtgcccgactaaagggtataacttatggaatcgcccttgggcgggttgtgcccctcgctgctgcacccgcaggagcaccccgcgctgatnnnnnnnnnncgcccggaaacggggtgccccgcgattgttttctttccctcgccgcacccggatagttatcataaaacgctgtcctccaagcgccccgtcctttcccctgtggaagggtggcgatctcccccnctgggagagccgcgagcgcaacccctctttctcctgtcctccgctcccacattcttccacaagggcgcccccccgctttttgacagtggcgcgcgaactagcaaannnnnnnnnagcgggcgccccccccgatttcagtaggggtcgtgagaaaaaactcgttctcctccacccatagcccccgcaggaaatatgagggtcttccgcccaggtgtattcttgtcgcgctcataagtacggtggcgcccaaaagtgcccggggtgtttgaacagtcgtccgggcgcgtggcgcccgcctcttccagttttttctgtggggggcgaggtgatatactttggggtaagagtttccgaggtgggacgcggatattgtgcattgtttgttcccgacaggccgaaggattgggccccatggctactgcccgcccaggcattggcgccccatggttacaaggttttccgcttggcaggggaccgcgaggccacccaggggctgggtcaggccgccccaatctggtccgtgaggtcctcccagcttcccgcgccgatcagcctcgatcacgattcctggaaaggcacctctcccaatgtccccgatcacgcaagtcttctggccctgatgcccttttcctccacaaactgagggtcactggggcagatgcagcggccattgaggtgcatggggggctgagtggccaccaagccttccaccacggcctccagctgccggcgcaagcaggagtgcagggtgttggcagccaagatggctgctgcaggaccgccgtgcccatcgaacagtgcccagtaatggcctgtcaggaactcctctgggcacagggtcagccactcttcttcagccccaaactcacatctccggatgcacagcttcccacaggcggcttgatcctcattgaattcagatttctctgcattgataatctcggcgtagcctgcattccagggtagcgtgcgtcctcgtgcggggctgcgcacgggccgggagtctgggcggcgcgaggcgtcggccgccccggggctggagctggagccgcgaaggaagcggggccgtcggtagggcacggggctggca

SEQ ID NO: 150864 - DNA, 820 bp, Homo Sapiens
tcgggcgttttacttttgcggggcccacgggcaaagaattgttctttccccaggcccctttaaggcccagtttggggggaaaacctttgttaggaaccagccaaagcctggaagaatgccttcctcaccccagggtaacatcttttcccgcatttttgagttgattccctgtttccggaaccatatgttgttcgtgtgttgcatttcctttctgagttagccaggaggacccaaaagacccctgcaatttgtgtgttttttacagggtgctttagatgacgtctcatttgagaagaacccatctggacatcttttgcaaactgtatttcgctctggggttccagcttgcaccactccaaatccaggagggcagctcctatgtttcaagcagaactctatctcaaggtagcgcccttccttgcattcgcacacgcggttgtgggtgcgattgcactcctgcttgacgtactgcagctccttgcacacggggctgcagtatagacactcgtcactggtgtgccagctgtctgtgtagtagtggtcagggcaaggggcgcacacggtcttccactttgctgtacagtgttgttttaggtaggtaccaggaggacatttgtcacacaacagctgatgagaggtttcttcgtcataatgaaggtactttggaggaaacgtttcctgggtggtccacttaatggagatgtccagaaacacgagcgcgcagcacagcaacttgttcattgtggtccccggaaacctcaggggcttggaggcggcggctgggcgagcgctccggtgcgtctccgcagcccgtgcgctc

SEQ ID NO: 150865 - DNA, 1270 bp, Homo Sapiens
  misc_feature (1031)..(1062): n is a, c, g, or t
  misc_feature (1064)..(1072): n is a, c, g, or t
  misc_feature (1079)..(1079): n is a, c, g, or t
  misc_feature (1142)..(1178): n is a, c, g, or t
  misc_feature (1240)..(1240): n is a, c, g, or t
gaggtatgaagtcgacggcgcgccgaattcggcacgaggcaattcctcagcttcccctctgcctccaacaggggacacttcgggaatgctgaactaatgagaactgccagggaatcttcaaactttccaacggaacttgtttgctctttgatttggtttaaacctgagctggttgtggagcctgggaaaggtggaagagagagaggtcctgagggccccagggctgcgggctggcgaaggaaatggtcacaccccccgcccaccccaggcgaggatcctggtgacatgctcctctccctggctccggggagaagggcttggggtgacctgaagggaaccatcctggtgccccacatcctctcctccgggacagtcaccgaaaacacaggttccaaagtctacctggtgcctgagagcccagggcccttcctccgttttaagggggaagcaacatttggaggggacggatgggctggtcagctggtctccttttcctactcatactataccttcctgtacctgggtggatggagcgggaggatggaggagacgggacatctttcacctcaggctcctggtagagaagacaggggattctactctgtgcctcctgactatgtctggctaagagattcgccttaaatgctccctgtcccatggagagggacccagcataggaaagccacatactcagcctggatgggtggagaggctgagggactcactggagggcaccaagccagcccacagccagggaagtggggagggggggcggaaacccatgcctcccagctgagcactgggaatgtcagcccagtaagtattggccagtcaggcgcctcgtggtcagagcagagccaccaggtcccactgccccgagccctgcacagccctccctcctgcctgggtgggggaggctggaggtcattggagaggctggactgctgccaccccgggtgctcccgctctgccatagcactgatcagtgaccatttacaggaatgtagcagcgatggaattacctggaacannnnnnnnnnnnnnnnnnnnnnnnnnnnnnnntnnnnnnnnncaactanaccaacacaaagtattctgtgtcaggtattgggctggacagggcagttgtgtgttggggcggnnnnnnnnnnnnnnnnnnnnnnnnnnnnnnnnnnnnnaaaaatggttaccatcctgctcaatcactctgttcttttataaagatttccaccttcaagtncttttctccttccccccctaactcaggcct

SEQ ID NO: 150866 - DNA, 827 bp, Homo Sapiens
gggggcctttgggaacccctgtccggaaggcggtatgaatgttcttaacgaaggggttttcttggttttaagagaccccgggacaccagctggaagccgttagtgggggaggaggggttgcctgctggctgtaattggtgtttaaatttcctgtttcctgcgtaggggctttccacaaatgcatttttcagccgggttggtgtgttcagcttttagagcttttttctggttggagggtcatacactgctcacatagaatcttaccattcttttcttgcttccagtgaggggtgaaatctgtgcggcactgggcacatacaaagggttcaacccgcagaagtgaggcacagcttttgccttggctgtcaatgacactctgtacgacttcttccaagcctaccatgtagatgaactcgctattggctgcactaggcaagaaatgaagtaagggagcaggaggtttagggggtgggatctccaggagtgtcttttccagctgtttgcgaagagccaatttggctgcagcctgtgagttggcagcatcagtcatggcgctggggctaggaagtggcgaggacactctgttcaccgtccctggctggatatgagaagcaaggttcatatagatggcagaggatgttgtacgctgacatggaacagaagaacttgactgcggttgataattgatggcgggattcatgttgggtgttgtggtgcgtacaaggccaggcttaggcgggccccgctgaccctgtagctgggctgggtttggtgcaataacacgttgagacatcaacatgtgtggaagggtggtattggtagctgcc

SEQ ID NO: 150867 - DNA, 1142 bp, Homo Sapiens
  misc_feature (139)..(182): n is a, c, g, or t
  misc_feature (853)..(888): n is a, c, g, or t
gttgtctgttttttcttgtccccaaacaaagatgctgcgattcgtgtgggaattactaacccccacgccgcggaaaaaaagggccccggggggagatctccccctttagcgatatccgcaggacgagagaaaaagtttnnnnnnnnnnnnnnnnnnnnnnnnnnnnnnnnnnnnnnnnnnnnaggccccctttttttctccgccacaggattctcgcgcccccagagttctccaacgccgtggggaatgtgggagggaaaaaattaaaaaagctcttttactgtggtggacgcgtgggtaaaaaaccccccaacctcggacagcgtgtttttggggagaggtttaccccccgtggtttctccctttattaaggagaaatgaaaaggcgttcgccggggaaaaaaggccccaagcgcaaaaaatttcgccagccaagggccccattggtgtttttttccaaggcgatcccctgggccaaaagcttaaggaagagaaacccccccaaaaaaggccctaattcccccatttaaaaggaggtttccccttaaaattaaaaaggaccaaaaggcagcccagttgcacaggaaaattggaggaagcttaaatggaaaaccaaaaaagcccaggctgccaaggaacccccttgagaccattaaaaggagggggttaggtctgtaaggattacggacccactgagatttaaaagacgggggttagtctgtaaggttatgggaggtgatgctcgaatgggatctagtctcgtagacgtcaaacgttaatattctcatatatccaaagtaatgcagagagtggtttatgtagagctttacattttacatagcagctttacatnnnnnnnnnnnnnnnnnnnnnnnnnnnnnnnnnnnnagatggcacagtggcctcgacgcccaggttttccactttcaaagaccctccctcacatctcattacctgataatgcaacacagtctttaatcggggcgaatttcggggtggaaaggactagatagtgctgataagcgtcatcatcccatatacacagcaccccaaggacagcaccctatcgcccacgcgtccaccagcccccgaaaatactggagacaaaagctgacgtcggcagagcgctcctagtccccccc

SEQ ID NO: 150868 - DNA, 1363 bp, Homo Sapiens
  misc_feature (1128)..(1128): n is a, c, g, or t
  misc_feature (1155)..(1155): n is a, c, g, or t
acccagatcctcatgcagcagaccctccgcaccgtggccttcttatgtgaaacatgtgtgtttgcatttcttggcctgtccatttttagttttcctcacaagtttgaaatttcctttgtcatctggtgcatagtgcttgtactatttggcagagcggtaaacattttccctctttcctacctcctgaatttcttccgggatcataaaatcacaccgaagatgatgttcatcatgtggtttagtggcctgcggggagccatcccctatgccctgagcctacacctggacctggagcccatggagaagcggcagctcatcggcaccaccaccatcgtcatcgtgctcttcaccatcctgctgctgggcggcagcaccatgcccctcattcgcctcatggacatcgaggacgccaaggcacaccgcaggaacaagaaggacgtcaacctcagcaagactgagaagatgggcaacactgtggagtcggagcacctgtcggagctcacggaggaggagtacgaggcccactacatcaggcggcaggaccttaagggcttcgtgtggctggacgccaagtacctgaaccccttcttcactcggaggctgacgcaggaggacctgcaccacgggcgcatccagatgaaaactctcaccaacaagtgggtacgaggaggtacgccagggcccctccggctccgaggacgacgagcaggagctgctctgacgccaggtgccaagggcttcaggcaggcaaggcccaggatgggcgttttgctgcgcacagacactcagcaggggcctccgcagagatgcgtgcatccagcagccccttcaaggacataagagggccggggcgaggtactggctgcagagtcgccttagtccagaacctgacaggcctctggagccaggcgacttcttgggaaactgtcatctcccgactcctccctgagccagcctccgctcagtgtggctcctcagcccacagaggggagggagcatggggccaggtgccagtcatctgtgaagctagggcgcctacccccccacccggaggacccctgcggccccctgcctagaggagcaccatctacaggtgtgccattccccagccactgccttcatgctgcnccccgccggactggcagagccaggggnccacccccctgccctttgagtcatcaagatgccctctgcagccacaaattctgaccctaagtgggcagggccccagaaaatcctggaaaaccctcccggctggcctttttgggaatacttcccgggggctcccctcagaggagaaaccggaaggtggacctttttggtcccttttaccctggattgggcccccttccgcaagtcctaa

SEQ ID NO: 150869 - DNA, 519 bp, Homo Sapiens
gcgctcacaacagagcccgacgcgcgcgggaatcaagcgggtggcaggatgtgtaggtccctggacacctccaagggtcgggtcacctccccaccccggaagaactccttgagctgggggctgttgttgagcgcaggtatgtgcacagtgaagcgaagcaggtcctctgccccctttcgccgctcctcgatcactgaggcttcaaaccggccaaacacctgggcccgggggaaagcagggaactcctcgaggcggcggaagaggttgcggtgggtgtaggccaggtctccatgcagcttgcggaagtcgctgtaccgcttccagaccaccacctctttgacatcctctgggtccttctttgagatgaactgcgcggttactttgtactcggtgtagcccttggggtgagtcctggggtccgacactgtgtagtgccgcaggaagtcatccttcgcctggcgggacatgaaaccgagctggagcggagcggagcgccggcctccacctcctcgccgtccc

SEQ ID NO: 150870 - DNA, 878 bp, Homo Sapiens
  misc_feature (552)..(552): n is a, c, g, or t
tgggcttcttgtctatgaaaggagttgtggagggccgggagggcatgggtgtggccttgactcggctgggaaccacccctgcagcgggggctgtcccactgagagtggtggttttcttcatggaactggtggaggtgctctttgggcgactcaagtcagctggtacagactttgcagtcatcttcttgacttctgcaggttttccctcagtcttaatggcagtgggcttcttgggcaggagcgtggaggggctcctactgcttgggccagttgaggcaacagcagcagctgttgtggtttttgcaacagtctgagtgctcttggacccagatctggaggctggggcagaagctggcttggatggtgaggcccgcttctcaggagcctttgcatctgcaatgggctttggcttcacgtcttttgaaggtaagatggaaggcctggcagaggcgacggcagggcgtttgggtggggcagctggcactaggcctgaagcaaggctcatgggttttttattcaacccaccaatggtggtgggagctggctgcttanggagagaagtgggctgcgttttggctctcgatgttgaagtctttgcacgttgagtggtggccaaaggctttgttttcttctctgggcttggagggagctcctgtttccgggggggtggggatgtcctttcctgtcccactcaccacaggccttgcttcttctgctcttgcctattaaatgaggttctctgaacaaaagcttgggaaggttggacccccctggaatggaaattccattttcgcctaaatattttggctcaccacaggaaaaacacccggccacttgagaaaagggtgttactatttttccccccatacaccagaggc

SEQ ID NO: 150871 - DNA, 812 bp, Homo Sapiens
  misc_feature (158)..(158): n is a, c, g, or t
  misc_feature (689)..(722): n is a, c, g, or t
aatatactttattttcattaaaaagaatgagctagatttctttatatcaacatagagagatcttaaggaaacataacgttggatgggaaaagtgagtttttccatgagaaatagtaaaatacttatgtaagtttgaaaaacaaagagaaaatacaganccatactatgtgaagttcattgtcacagctatgtgtgggagtgtgtgtgtaataaaataaaaagtcgaaactgggaatacacactaatatttctgataatagggttttttaggagaaaaatataggatggggagggaacaaagagaaaaataaagcattttctgtaaagttttatttatttcattaaaaataaataaagcaaattacaccaaatgttaacaatgatcaattttaagaaatgggtacatggatgagtatgtcatgcctatgtgggtgattggtactttttcagttaaataaataaatggcagttggaggagggacagagaaggacatggggagtgagaccaaacaaggatcatgatgagaccagaacttccctagaggagtggcccgttgtgagcctgagagatcccctgtagcgacactgagcagagctccctgtgcctctttccgtcctggcctcacgctgtctggttggctttcccgatccgtcgtccatctctgttgtcctgttgttgttgttgtggnnnnnnnnnnnnnnnnnnnnnnnnnnnnnnnnnnatgtgtccggatatcatttctctatagcgtcttatcagctgcataccatcagtgggttccactccattttaattcatcatggatatatca

SEQ ID NO: 150872 - DNA, 693 bp, Homo Sapiens
  misc_feature (107)..(107): n is a, c, g, or t
  misc_feature (129)..(250): n is a, c, g, or t
  misc_feature (265)..(383): n is a, c, g, or t
  misc_feature (524)..(639): n is a, c, g, or t
ttgtttttcctgggaagctttatgtttaatttgcacactaaaaagtaaaaagtcactctatctttattttgaatatattgtgatacaaagctctatggtttatattntggcagggcatggcagctcatnnnnnnnnnnnnnnnnnnnnnnnnnnnnnnnnnnnnnnnnnnnnnnnnnnnnnnnnnnnnnnnnnnnnnnnnnnnnnnnnnnnnnnnnnnnnnnnnnnnnnnnnnnnnnnnnnnnnnnnnnncatggtggcatgtgnnnnnnnnnnnnnnnnnnnnnnnnnnnnnnnnnnnnnnnnnnnnnnnnnnnnnnnnnnnnnnnnnnnnnnnnnnnnnnnnnnnnnnnnnnnnnnnnnnnnnnnnnnnnnnnnnnnnnnntacatttcaaaccaccaccaccaccaactctatggtttatgttttaaaattattagtcaaatgttcccacatcatttaatcagtatcccatccattcaccactaatttaaaatgtcatctggccaggtgcagtggctcatnnnnnnnnnnnnnnnnnnnnnnnnnnnnnnnnnnnnnnnnnnnnnnnnnnnnnnnnnnnnnnnnnnnnnnnnnnnnnnnnnnnnnnnnnnnnnnnnnnnnnnnnnnnnnnnnnnnntagctgggcatggtggcgcatgcctgtaatcccggctactcgggaggctgagcc

SEQ ID NO: 150873 - DNA, 839 bp, Homo Sapiens
  misc_feature (69)..(69): n is a, c, g, or t
  misc_feature (227)..(227): n is a, c, g, or t
  misc_feature (303)..(303): n is a, c, g, or t
ctaatgaggaaagttctcccaaactgcaaatccactttaggatttcaacacatgatcttcaaccatctntgcatcggggatcatagggtcaaactgaccagcaatgtcaaaatcacactggcagaactccctataacggccttggactatgttggggctctctcgccgccacacctttcccaccatgataacgtttcatcttcttcaccttattcatggccagatancgagcaaagggaacagtaaggtcatagcggagggacaacagctctccaccttgatccttcagatcatacatgagcncagagtcctctccatacttctcagtcagggtttccttcagctcaaatgctggggtgtccatcccctttgctccatgacgtttaaagcagctgataaccaaatcaagaattttctccctcacaaccatatgctgaggactaagatccctgggtcccctttggggtcttgataataaaatttggtttctcttgatgtgctttcagttgggatgttaacactgcctttgcaacctggctttggcaacgggaccgccccggtgcacgaagcgcagggcggtcgcaggagctggctgagcagcgaagcccaggccctcctgggaagaagtccgagcaggggcatcgcgcggcaggacgccggctttccgggacaggaacaaaaggcctgggaaggaggcgggtcagacaccaggaagggtggagggcactgcaaaggcggaacccgcgcaccagggaaaactcgggcgtttgcgcacctcactagtcacgaaggctgaggtgggatcctcccaagttcccttagtagccagcttcggcccc

SEQ ID NO: 150874 - DNA, 1184 bp, Homo Sapiens
  misc_feature (513)..(513): n is a, c, g, or t
  misc_feature (582)..(582): n is a, c, g, or t
  misc_feature (648)..(648): n is a, c, g, or t
gtaccttccaccagcaagacgttcaggagcaatatagcaagttctctccgtgatgtgtcaaagaaataattgaaatctgccgggttgtcttctggaagataagtgggcttaaaactggcaaaatcagttagaagaacccaattccaactggtgaccatcacattctcagtcttgatgtccccatgacgaactccagatttgtgtgcttggtccacagctgtcaggatctggaaagcaatccagcgcttctcaatgttattcaagaatggacgggtactgatgcgatcatagagattgtctcgcacatactgcctaaagagcatagctgctttctcagatgctttttctgatgctttctggaaaggtagacaattctgtgcagaattaagcctgattttcagttcctccagctcttgtttatagctggttaaaggcaatgtgggatcctgaattgcaaaaaccttcacaacgaccaggccttctcggtgcttggctcgagcaactttaaaaaanccgagtactcccccaggcttttatcatattcaaagtcatgaatatctgaaaaataactctctacagaanaggatctgggagggagcaatgccagcaagctgatttcccataatggcaagcacctctgtggtcttnagtaaggttaggatataataccctaggcctcgggaaagtgtcaaaatcgttcagaggctcacaacgaggtcatagtagactacttcggggacgggacgggaaaacgcgtcagcagcggggaagttgtttctacgaagggtctttcttcatagacaggagatgggctgttggtggaggggcgcagaaaagtcccgatcttcaggaaccccggtggtcctgggaggagaactgggaaagctctcggggtctcagcagagagaagaagccacgctaaagagtctccacaagtaccgcgggatttgacccctccagccccctaacctgccctgggggacatgcgttcccgggcctcgtcttcctctagcgcggatcgctacacccgtccgagccctcctcgagggcctcaccaccgggcggggggagatggaacccgggagagaagtgcagaccgccagtcccaagaaaacactacacttcagctactgcagccccagcaaacgccgaactcccgggaaagcaaccggtctgacctcccc

SEQ ID NO: 150875 - DNA, 803 bp, Homo Sapiens
  misc_feature (88)..(106): n is a, c, g, or t
  misc_feature (108)..(108): n is a, c, g, or t
  misc_feature (110)..(111): n is a, c, g, or t
  misc_feature (115)..(116): n is a, c, g, or t
  misc_feature (118)..(118): n is a, c, g, or t
  misc_feature (124)..(124): n is a, c, g, or t
  misc_feature (126)..(126): n is a, c, g, or t
  misc_feature (212)..(212): n is a, c, g, or t
aacgatgtgtcaggccaatctttattgatttaccctaatgttatgcataaagtttatctcttccccccaatcgttctcatcctccctnnnnnnnnnnnnnnnnnnntntnnggcnncncatacncncacataaagaagcaaagtcaccagctgagagcgaagtttggggtggaagttttgaggtttgagaaaaaagaagtctgaaagtctancctctttttgaaatgtgcctgtgatgaagagtgacaatcggcaaagcaaatctaataggatctctaaagagccttttcctgttgtttacaattgtggctaaagccctgcactagaaaacaacaaatgctaagatcctccctgcatcccctacccccgaccccctggggcacacacaaccctcctccaccacgttctaaaaagactggaaggacttggaaaaacattcctatgggatgaactagaaggtggcaggactgctatcatcagacctcatttacccaccgcttccagcttaaaaccagggatttcacaaaggaaaaatcatgagagtcatagttctgtggttttctcaaaaggagaaggaagggacgctcttccttcccacccctgagaacaggccaaatgagagcaagcccactggctggactgagggtgaccaaatgaatgtgacgatggcatctcatttcccaggtggacatgtgctgggcagcatgtgcctaggactgacccagaagacacacagcaccacacaacaggattgatgtgatgacaaggccaagacagaaggctgtgggaggaatgaggagacc

SEQ ID NO: 150876 - DNA, 807 bp, Homo Sapiens
  misc_feature (28)..(29): n is a, c, g, or t
tggttgagctttccttcaatttcccacnnttcattatgggtaaaagcttaaaagaagctgcagcttgtaccctgaggcccgtactacttcatcccttcagggcgctggtaccggtcagcctctcttccttctccctgctttgcttccttgcgttcagccgcaatatttttcttgcgatggtaattaaactgtgtgtcctctttcagccttcaccatttccttttttcgcttgtcatactcctgcgccagctccccagaacgactaatctcttcaaatagagctgtcctctctttgggggttcttcatggcaatagattccacagcaccctggaaaacgaggaagttacgagctttgatgagaatgcccaacttctctaattcctcactgtactcatgtagttggaccactttgttgttgatcttgtactcagaagaacctcctacaatgacacgggcaaaggtacggtcctcagcaccctcctcagagtagaccatgctgacaaaggcccggttggcagctggcttgcccacaggagctccatggatcaggtcccgcagggtctttacccgcaggttgctggttttttcacctagcacaaagctgatggcatccatgagatttgacttaccagagccattgggtccaatgatggcggtgaacctctgaaatggtccgataatctgtcgacccttgtacgacttaaagttctcaatctcaatcagtttcaggaaccccatgacggccgcggcgccggcagcagtaggacaggccgcgccgtacgcccgagaactgaggtagcccgccc

SEQ ID NO: 150877 - DNA, 903 bp, Homo Sapiens
aggcgcccacccggtggtggaagagaaaagtggcgagaaggtattaaaattcccctggaaaaggaaaagccccaccacccaatggcaagccaaggcctttacacaaaaggaataatttccccaagggaaaagtaatttccggccaatattttgggcccaaggaaaaagtttaagtttttttcccaagccaaatccattgggccaagcgggtcatgaaggattctggtttcggtgtactgcttcagagagataattcctcaatgaaaatgggggggctgttgggaaggcagaggtttccactgaaaggtttctaataaataatagttccatatgtagcaaattttgttttgttaatactagattcatattagtcatacaacccaggctgttgagctgctccagcttaggcacactgtcttctttttcttcaaatttacttgctagaagcaggcaggaaagcgcaactaaatgcagctgctggatagagatgtcatagcggtccataaacaggtccagtaaatagacagcaagatggcgggcagaagggcagagtgtgaagcgattgctcacaatggcaatcaagtcagcaaaataccgtctgagacttaactgaggggactggcctttataggagggcaacttcagctccttgtagcgaagcgcttggtgaatatcggcggccagctgtcctcgccaccactgcccctccagctccatgggacccggcggcgcgcccagcccgacgcggcaactcgagtccggaaccgcggccctcacagccccagccccgccgtcgtgcggcggacgccggccccgctcatgctgcggacagtgggccgctaagcgccggcctcagctagagcccagcgcctggacgctcgcgccgcccattgttaaaggccc

SEQ ID NO: 150878 - DNA, 927 bp, Homo Sapiens
cgatcttgggattacgaggccatttctgatttaaagacttgaacttcaatccgcgcagcaactgattctccagtcgaaggttagacagttcatgtgatttgcgcatcatcactagttgtttggggttttgctcagggcaggcagcatttggatgacacattgtcctttgaaagattcctcttgaccttcatggctagaatcctgagttactggcagcttcgtggtttggctcccaaaagaattttctttcaatggttttgatgggtggttacactggggttcaacagaactgacacttgatgtctgagagctctgaaagacaggtgtcttgcctttttcctttctgatttccaccctcccggtaggctccttctgtgaactattaagaaaatcaaacagcagctcatcatcaggttctgacttttttcttcgcacaaaatgggatgaaggcctaggaacagatgcattttcaacaggatgagaggcctctactggtgtccgagatcctactttcacatttgcagtgccagctaagatggtggctttttgatttcgaatgttatcagctgctgatgaaatatacgtagatttaggtccagtctgatatatcaaatctgtattttgctggtgaagttcagtatagtcagtatttttgctatatatgttgctggcattgtctttcctactgagagctgttgcagccccttgatcaactcggtttaaaagatcttctgcctttccagcaagatcaacaaaccaagacatgatggcagcaggataatcctattggcaaacctgaggactccggagaggctgcactacggcctagccgccgtcctgggccgcgccccctcggcggctggcccggagggggcccaagctgagtaaacctcctccccgacccgccggggccctgctaccgctccc

SEQ ID NO: 150879 - DNA, 304 bp, Homo Sapiens
actagattgtgacctgtcttttcttcattttattttatggagcttaaaaatgactactgaaagcgaaatgtggcacatgcatacaatggaatattagccttaagaaattctgacacatgctataacatggatgaactgtgagaacattatactcagtgaaataagcccgtcacaaaaggacaaatactgaatgattccacttatatgagatagggtagtcaggatcatagagacagaaagtagaatggtgggtgtcaggacaaaaggaaacgggaagttattgtttataataagtacagatttg

SEQ ID NO: 150880 - DNA, 917 bp, Homo Sapiens
  misc_feature (385)..(393): n is a, c, g, or t
cgataggcgatgacaagggcgggtgagaacggtaagggagggggatatttagcaaaacatgcgggctgagcaacagggaggaatatcacaagggagaaaggctgtccgcgacaaaagtagggaataaaagagagtgtgtgcgcgctggttgataaacaaaaagtgccgagtcgagtttgcccaatgaaagtatgaggagggggtctggcgagggcgcacggcccgtgaaagccgtgtttgccatcccgtgggtcttaaattggaggggcgggtggggaacccaaacggggcaaggggcaggagcaaggagctcgagcgtttagcgggaaaattcaaggcggggatccccttggagccctcggcccggaagtgggtccacccgcannnnnnnnncttcccccttgcaaagggggcacggcgtcgaggacttctcccctttccagaccccgggaagcgggttgtccctcaaaggggcagccgggcacacggagaggtcccggattagtcgggcccaggggggggccataagtccaacccaggaagggccttggccagccggggcccagcctgggcggccttccttgcccggggccccgtgggggctgtacctctccgtacacctggctctggctttctcatgtagacatggggaagctcggatgaggctgccagggaatagatgttgccgataaatggcagccccggcggccccggggggaagcccatcggccacctctgcttcagcagctggcggacccctagcgcgaagagcagcaggaagagcgcgcctccgagcgccgccgcgccctcttcagctctccaaagcttccacatcggcccgagctggaggtgcgaactccacagcagccctgagacccaggcactccctccagccctgccatactcccattggcccc

SEQ ID NO: 150881 - DNA, 1291 bp, Homo Sapiens
  misc_feature (798)..(798): n is a, c, g, or t
  misc_feature (1051)..(1051): n is a, c, g, or t
aaggtagcgaggcctgggtggcgaattcggcacgaggcctggacagggtttctgcttctcattttagtgtcttctattgctgtctacctaattatgtgtgaattgtgcagaattcagggaagcttataagttttcatgctcaattgtgaatagtttgttttcacagatagtatgtaaattaagcaaccaaaaatgaattccttatgcatcatctgggaacgagaaagctatagtgggatacagagtgttgctgacaccgggagatggtgtccagggagccacgtgacttccataaagtggacgcaccagtaggtgtgattgcacctcaagtgtagtctcagtgggcttcggtgaacagacgaatcaagggattcttgaatcgaaattatgcttttgagtatgtaatattatgagagagttaagagagaatatcctaaagagagtctgtgatcatactaattttcacctttaatgctaggaatggatatgatagacagtaaagagcatctatgataaggcttccttagtgtgaaagtaaacttaagtgcccaagtcatggagacttgaaaagggtaaacctgtttcacctcccaaatttatatattcaaagtatttacttaaaattcagaagccagaagttcatgtcatgattaccaggaagttcaggccagaatgaatccctagagaagccaggccaagcctggataattgcagctggatgaccctggcccgaaagtcacagttcagttgccttattcctagttcaggcttactatctagaacctcatgctagcttanggttgcatgtttacattgctgcagtgtctttactggaagcttagttggatcgaaatggacaccgagatggagatgcttctggctacatttcgcagaaccccaggagacctgcatttagaccactctgtccatttgtgtgcccacccccacccccagggtctaagtgtagactccaagaggagcagcccaaagcttggaggagaggtgtgtctggggcaccactggtgggtggtgctgctcttctttttgttgnagttaaatgcggtgtcttttaatggactctcaggcctcccagacagcctttgttcctttaggcagaagctcttcttcattgtgtacctccctggattcatgaggtgtgagatttggcctgcttgacttttgaatccagttttttcaagggactcttcatgtcagaagaatcatttcatgctgtccccctgggggaatgttcaccgcttcactttcaaaggcttaaatgtagccctccccg

SEQ ID NO: 150882 - DNA, 1468 bp, Homo Sapiens
  misc_feature (262)..(263): n is a, c, g, or t
  misc_feature (268)..(268): n is a, c, g, or t
  misc_feature (288)..(288): n is a, c, g, or t
gggaaagtggtctggaagacagggccttcaggtgggccttgttccccactgaagagtcccccctggaaagtggcttgacatgggttgggccccttgggctgccagttggaaggaacttgatgtcacttccacttgggccccattgatgggccctctcagcatagtctgctgctgcttggctgagcagatgaggcgggctgatgcctttcaatgacctgggctcttagaaatccaccctccttttcctcggggtttcttgctnncaggnaagatgttgggaactttctngttcttttctttggtgaccacagtcatggccatggtgccagaaagctgggcctccccactatggggcaggcgggacacctgcactgagcggaagacactcttgagggtgttcttcgaagctggcgtccctcttgtcgcctttccctcctccgctccccggggtggcccagccagtagtccacctggaggccaatcacgtccccatatgggctattagggctccccacgatggccagggcgctgctcatagatggggaggagggaggggtggccgtggcgtctcggctcaggcccgagctggagggtggtgatgtggagggcacagtaaggctgaccacaggagaatcgtccccatcgcctgctgtggagggagagtcttcaaccagacccaccttcaccacgccaatgaagggaataaacttctgataggagtcttcatcagggaacttatgccggcaagtcagcatggcttcggccacgggaagctggtgtgtcgtggctgccccgttgacgtactgcatcacccgccctgccacgtccagttgctctgacactggtggctccgagcgactgaacagatctctccaaccagaatccaggaaggaactactgtatttactgtcgactgaccccaagtatttggccacagggtgagaaccgagggggatgatgaggaagcgcatgtagccaagccagtcggaggtcttgttggccagggacttgacaaagaacctgaggatggagctcaggtagctctggcctcccacagcagccaccttcactggcctcggcatggaagagttgcagttgcagtagcgctggatccgggtgagcagggcggacagcacggcctggacctccacggtggagcaggtgcacaccacaggcttccgctggtcctggagcagctcagccacatactggccctgccagtcagtggtgttcaccagaatgacattttctgggagggctgcatctgacaccaggatctgattgagctggtcatacaccacctttcttggaatctgcgtgctgtggcccagatctggggagcgctcgctgtcggaactgttggtcctctcacttaggggcttggagagctgccgctccttcaggggcgtgctcctcttctgccggggtggtgcctcgtgccgaattcgccacccaggcctcgctcctt

SEQ ID NO: 150883 - DNA, 982 bp, Homo Sapiens
  misc_feature (11)..(11): n is a, c, g, or t
  misc_feature (45)..(45): n is a, c, g, or t
  misc_feature (115)..(115): n is a, c, g, or t
  misc_feature (123)..(123): n is a, c, g, or t
  misc_feature (137)..(138): n is a, c, g, or t
  misc_feature (141)..(141): n is a, c, g, or t
  misc_feature (148)..(149): n is a, c, g, or t
  misc_feature (157)..(157): n is a, c, g, or t
  misc_feature (189)..(189): n is a, c, g, or t
  misc_feature (198)..(198): n is a, c, g, or t
  misc_feature (206)..(207): n is a, c, g, or t
  misc_feature (215)..(215): n is a, c, g, or t
gaaacttgatncccaccaagggaaggagtttggaaagtcgggtgnaaggaaaggccctggggggctccagtcccagggggactatgggcacccagaagggcaaaacccaacacgnccttgggncctggagcagaggnnagnaagggannaagcgggnaaggaggagggggctgtgcaggggtggggctngaggggganggggaggnnaaggcgtnccctgtggcagtgtccttcgggacctgggcgagtgagaggcagaccctggtgccagggaaggggtgctgggcccgggcctgctggcctccccctgcccgcaggcggtgaggctggtggcagtgccaggagggaaagtggctgggagacagggcctcaggtggccttgctgccactgaagagtcccactggaaagtgcttgacatgggtgggccactgggctgccagctggaagaacttgatgtcactccactcgaccccatcgatggacactctcagcatagtctgctgctgcttggctgagcagatgaggcggctgatgccttcaatgacctggctcttagaatccacctccttttctcggggtttcttgctcaggaagatggtgggaactttcttgttcttttctttggtgaccacagtcatggccatggtgccagaaagctgggcctccccactatggggcaggcgggacacctgcactgagcggaagacactcttgagggtgttcttcgagctggcgtccctattgtcgccttccctcctccgctccccggggtggcccagccagtagtccacctggaggccaatcacgtccccatatgggctattagggctccccacgatggccagggcgctgctcatagatggggaggagggaggggtggccgtggcgtctcggctcaggcccgagctggagggtggtgatgtggagggcacagtaaggctgaccacaggagcctcgtgccgaattcgccacccaggcctc

SEQ ID NO: 150884 - DNA, 816 bp, Homo Sapiens
gggtggtgatcacaatggtgtttgcgtgagtcagtgcaggaacgccgctgtgcctgatgcagcccttcatcgactttcgtcaaagattcatggtcagcgaagcctaagggatggagcctatagagttgcctcttgaggaaaatagtgaacggactcagattcgccgagcgagggtctgtgctgacagagtaagtacttatgattgtggagagaaaatttcaagctggttgtcaacattgtgtggccgtccttgtcatttgatcaaacgtagtgtcagactctcaaaggaatgcaaagaagaaacatggaaaagatcaacttcctggtacaatgggccaccctttctctggtgaatgaggcacagtatctgctgatcaacacatccagtattttggaacttcaccggcaactaaacaccagtgatgagaatggaaaggaggaattattctcactgaaggatctcagcttgcgttttcgtggcaatattattatcaatggaaaaagggcttttgaagaagagaaatgggatgagatttcaattggctctttgcgtttccaggttttggggccttgtcacagatgccagatgatttgcatcgaccagcaaactgggcaacgaaaccagcatgttttccaaaaactttctgagagtcgtgaaacaaaggtgaactttggcatgtacctgatgcatgcatcattggatttatcctccccatgtttcctgtctgtaggatctcaggtgctccctgtgttgaaagagaatgtggaaggtcatgatttacctgcatctgagaaacaccaggatgttacctccta

SEQ ID NO: 150885 - DNA, 1462 bp, Homo Sapiens
  misc_feature (91)..(92): n is a, c, g, or t
  misc_feature (95)..(361): n is a, c, g, or t
  misc_feature (1220)..(1331): n is a, c, g, or t
  misc_feature (1335)..(1402): n is a, c, g, or t
ttgggcccccgggccaaacgaaaaggtgtagaaaagtttttcgagggccgaaggcggccgaaatgtagatgttggtataagtaacttgttnnagnnnnnnnnnnnnnnnnnnnnnnnnnnnnnnnnnnnnnnnnnnnnnnnnnnnnnnnnnnnnnnnnnnnnnnnnnnnnnnnnnnnnnnnnnnnnnnnnnnnnnnnnnnnnnnnnnnnnnnnnnnnnnnnnnnnnnnnnnnnnnnnnnnnnnnnnnnnnnnnnnnnnnnnnnnnnnnnnnnnnnnnnnnnnnnnnnnnnnnnnnnnnnnnnnnnnnnnnnnnnnnnnnnnnnnnnnnnnnnnnnnnnnnnnnnnnnnnnnnnnnnnnnnnacctagcccaatttagtgaattttaagaagcattttaaaaaaatgaaaactaaaacatagaggatatccgaggttctaagggtaagaatttctttatgaaaccctgcttggaacacagttgtaggcaaatggactgatttatgatggaaggcacgtttcttgctgcagatcatggtctgaagtttgaaagccaccagcctagagggttctgaaaacttctccttcctaacacagctgaaggaaaaggggtgtgtaggggcggaggcacagggacatctccaggtttggacttttccaacatgatttgcagaaggcacttgattctggaaagtagacctttggcatttcgaccctcacccacactcccacacccactctgcacagatcggtggtgcatccgaggcagggctgagttagaacaggacatcctagactcggcggcagtgactattattcagaaatggcacatcaagggccggcctgcccttcatcctgcaggggtacttgggcatgtggaggcccctttctccctggtgttgcaactggagaggagtcggttcctgaagaacagatgggagagtgctggggccaggtaccctgggagagaggagggaaatgaaatccggcacaggggctgcggggatcggggcagtcaggaggcggcagtgcggtgcaagggcccccccacgcggccagctgtggaacttccaccacgactccctgtcctctcctgagcccgcccatcacgtgtagaagctcagatgctgggcgccaggagggcggcttcctggctctgggcaccgtggttctgtcctaacgaggggcgctctttgggtgtaaaaacagatgttctggctgnnnnnnnnnnnnnnnnnnnnnnnnnnnnnnnnnnnnnnnnnnnnnnnnnnnnnnnnnnnnnnnnnnnnnnnnnnnnnnnnnnnnnnnnnnnnnnnnnnnnnnnnnnnnnnnncccnnnnnnnnnnnnnnnnnnnnnnnnnnnnnnnnnnnnnnnnnnnnnnnnnnnnnnnnnnnnnnnnnnnngaccgcgtatgcggccgcaagcttattcccttgtagtgagggttaattttagctaggcac

SEQ ID NO: 150886 - DNA, 897 bp, Homo Sapiens
ctcttcctgtttcttcttttcttctggctcccttttctctgccagcaattgtctgtaaactctccgagcaatctgacctctgagttgcttctggaaaactatggctgcctttttcaggtgcaaaaatctcctcctcagaaggaatgctctgtaattcttctgtattatcaccacacaataaaggacctttctgtattgttttcgtgctaagaagcccaagacatgggcccgaatcaccatggccgcgtggctcacttcctcttcccctccgcttctccaggtttctgtttccaaggattcttgaagaaagaaccttggtcttcccccagctgccactcgctgttggaggcatcatagagctgcagcaggctcgtgcacttccctcggacgtcctcaggcagagccagattcctcatcagcactttatacccttttgtaaaagtcctgaaagggtcttcggaccgcatacccagctttgcggattctcacagtctccagcatccctgagtaccgcagctggttcagcacaaccgcctggtcaaactggtctggcatcttctgcatgtttggcttgatacagcgaacaaagaaaggattagaggagcttagcgttgccattaaggaatgcagtgagtccttgaactgtgagctgactgtaggccgccgatgtttgcttccacatttcaaggtatcctggttgttgcggcttgaaacatgttcaaaaagatcgtagataaagtcaaatcggctttctcttagcaaattgagaaggtcatctcgaaatgtatctctgttcttctccaagatacctcggacatcatattgcacctctccagcatagtgcttcactccaaaattgttaactgcaactctgggcttcacataaaagtggttacc

SEQ ID NO: 150887 - DNA, 1000 bp, Homo Sapiens
ggtggcatgtttccatttcccacttgccccctgggaagggaccttttcccccccaaaatatcaagtttccaccatggtttcacaggcgcagtgatctgggtggcacaaactgttttggccacttacacggatggagtcatctctgcacagtgcaaggacacagccaacgagtgggtacgagatgactcttcccaatcaggtaaatgtgcacattgttccccaattttccttcaagcttgtcctgagtgactctgcaaaagcctctctttcctctttattaaagttgatccaggcttctattgcctctgttgggttctgagaacacggaactccatccgagatgatatctgtgagtaagcggtggggcaagtggagaaattcctctgtattctgcagctgggccaggtgggtcttggcacagtgcttggcagccgtatagagctcaggatcactgtgccgatctgccagccacatcacctgaaggcagtttcccacttgcactgtgcgggccaaaaaccgagagcattcctcaaagagagatgtcagctgatacatgtctgacacctcataaatttcctgcaactcctcagctcgaagtttcacagtcccatggtagatataatcaaccaggagctggaaaacagactcgctgacatcctgcagcacaatcacccggttgtgggcctccttcaggttggaagtgaacatggatcggaagaagcagctctgagctgagaggaccagccgatggagctgaaactcccggccttccaccgaaatggtgacatcagcaaagagctcctcctctagacacagtttcatgatgccttgagccacacggcctgaatgtgaccgatctttgaaagtgtagttcacaaagtagttctcatccatggatgctccaggctcctctggtgattccatgctagccaacttctctctctgccagctgtctgcgttccctcctttcatcccggagcccggaacctccgcttccggc

SEQ ID NO: 150888 - DNA, 935 bp, Homo Sapiens
aagattgcaaaacactttatttccatcacatatgtgccaagacttgtgttctgtatccagcgagtgtgttagatactaacatagtgtttcatttacatgtgtgtgaaacctgggtgaagagccagggtttctctcccccacccgcctcagagtgcttgtcctggaatcagagtgtaaaaccccctcttgaagcagacaccaaaactgaacttccacccggtcatgggccctgctcttcttgctgtctagcctagtccaaagagcaatgagggaactgcttaggaggggtctgagggtgatgagggcctgggggccacacaggggtgggtgctgtcaggtacaagcccatccctgcctgcaaataaccttgcacagggtccttcctcattctttcctcttcctttttgtttatgagatgaatggctcttctgctgtggctttaggggcagctggggaggcagggagctatttgggaacagcctggaaagctgaccctgcagaatctcccagaagccttggtgtggctatgggtacccaggctgtagaaatcccagatggtcctcttccagacctctccccaactccagctcacagtttcagcttcttggcactgaaaacactactaggggaagcaagagtccacttcaggtcttctgcttggcctctacccaccagggcttggactctggacctgccccagctaggattggggtttctgggactgcatggcctctggccctggagtcacgaagcagtggggagagcccttctctgctctgagcatgctaaccttctcacaccagcccacggtttccaggatttcagcccctaggatgcctgggccaggacaggagaaggaggagcagagggtggtgtttcgggctccaagaaagtcttcgtgaccttggacttgtcacttggcttccctgagcccc

SEQ ID NO: 150889 - DNA, 983 bp, Homo Sapiens
tttggagtccaactcaagaacttttttgcaaacaggcgggtgtgagggaagagagaggaaaggattgctttcaatcaccggcagcaagataaggagcagtccaggaaagttttcagaaggggatgacattgctattaagacttacgagctgaagggaattcagtagcttcagatagagcctttcagatcgaggaggtggcccgcgaaggggattccactgtcacaaaacataaaggctctgcacttccgttccccactcctcggagaaggagggtaaaacacgaaggctctgcacttccgttcccccactcctcggagaaggagggtgagaagagctgggccctcagaacccaggaccacataagaagttttttctgtttaagacagccttcttctccactatttgtctggtaaatacctcgtcttcaagccccagcctaaggacgcctcctccgggaagcccaccatgacttttccaggcagggttagttgtcctgtctgctgcactcctactaccctctgttctagagagttagggaaatttagaagttaggcaaacaggctctgccaccattctgcctgagttcaaatccttgctcagccactgcgttgctgagacatctgaagcaaggtactcccctctctgggcctcagttttaccatctgttaaacggcgtaacgatggcactgtcctcctgaagtcaccgtgaggatgaaacaaggcaatgtccctaaaccaagtgcctgccgtagtgtctgctcttgttactcataaccatgggctgctcttactggacggtgcttgtgaccgcaagaaccctaagggccagggctattcatctctgaatctctctctgcagtgtttagaggtgctgtccacaagtcaggtgttcaatttctatcttctgaaggactgaacaaaacatggcttttgtcttgtgcattccgtaaaaagctcaggagtttccttccggctgcctccc

SEQ ID NO: 150890 - DNA, 963 bp, Homo Sapiens
ttatcgatccaccacagtgaggagttgatggtgtcccagcacccataatcctcaaaatggatcctggcgatggtccacaccatggtgaatgtgctgggtacccccccagaagtacttccgctcagagaagaaggagacggcaagcagggtgtacaggtagaggccctccaccagcagccagaagaagttagccatgacacaatattggaaaaagaccatggctgccttacagcccaccgagccctcggagcactggtccgactccccgctgtcgaagagggccaagtctttgatgaagacagcggcagccctcaggatgaaggatatgaagaggtgcatgtggatgtagttccgcgtgcagtggagcttcctgaacaggctcaggatagctgtggcgaccagaagggtggcgagggacaggccgtagccgatggtgtagccggtcttcacagaaccgtagaacatggtctgctgctcatccaaactcgctgccttgtcatccaaaccacaggcaatggggtacgggccaggctccaggtgcgtccagccttcgtcggtgcagctgcggcttacattgcggccttgaatggaggagaagagcttgaagatgaggggacaggccaagacaactacctggccccgaggggtggctggccagcaggtgaggttgtcccacatcttgctgcagcctattgtctcattctccagctgggcctcctccaggcactgcttgtgctgcacctcgatcatctgcacatagtcacactcctcctgcagcctggccgcctggccgcccgccggcccaagggcccaggcgagggcgcctgccagcacgcatagccagcgggcgggcagcggacttggcgggcgcatggtctgccctgagcccgcggcgggcggccccgcgcgggcaaagagctggcgggcggcgcaacaggcgggcgatggccgggatcccgtaaa

SEQ ID NO: 150891 - DNA, 843 bp, Homo Sapiens
  misc_feature (78)..(93): n is a, c, g, or t
cgcggtccagcgagcgcgggcccgacgcacacagggcgcggcttcaggcccacgggcgtttcgcggtcgtgttccgtnnnnnnnnnnnnnnnncgcacccccgttgttagaccgggggaagaattaaggccaacggttttaacggtccgagggagcaacgtcgactgtgtttccgtgttacccccgctggggggcggaagacacgtcatttcccaccatggcgaagagaggccttgcgttccctccaccccggtagactacttctctcttaagtatcgagcagttgtgcctggactctggctatcgtgttctacatctccctaaaccaaggtacttgatcttcttgtatcattcccaaagattaattcactaattttctcagagcaaactgtaatgaaggcagggaatagggcctttacacttcagaagggcacaggctagctcctggagaggagtggagatctgggtccaggcacccctcggccccaccacttttcctcaaggcacagaaaaagccaaactcgaaatacgtcttgagtctacacgagtgtacatctccttgcctacaactccgtgagatcatcattgaagtacagaagtattgcaggtgtgtgaagtgtaccgtccatactgagatagtcaaattcttcctcctcatcccggatcccattctcttccagggtaaaatccatgttcaggttcttcccttcatatttccacgtgtagctggcagcatgtgagttataggggagatagcggtgtaggatttcccatatggactccagaacccccacctccagtgtgtgctcctgcgacgtgagcgtgttaatgatgcggatgccc

SEQ ID NO: 150892 - DNA, 762 bp, Homo Sapiens
  misc_feature (142)..(142): n is a, c, g, or t
gtggcccccgcccacccttaagggtggcgttctttcccccccagaggaccgccaccaggtatcccttggttccatttaaacacccagttgggttgaaccatagggccatttttgttttcccttggaataaatctttgaaaancgttaaattttgcaaaaattctatttcatgtttgtttaaaaaaagttatctttttaattttttgcagaaacctgaataaaatactgtgatacagcaatgcgacctctgccttgggcagagtgtaagtgacggtcctccaccccagcgcagcttgcagctctgtgtccaagcactgctgagcacagctcacttggaatgcaatttcacacgatgaacataccggcagctgatcagttatgtttgcttgttttctcttgaaaattcagattaacagctgattggcaggtgaaagagaatgagaaagaacttctggataggtcaaactctaggcagaagcctgctctgcagaaagtttttaatgctacggataggtcgaacatcattctggtgtttgcgccgctcaatgaaggaagtcagtctggacgtgtcgaggacgcccgtgcttctgccgttgccggcctgcagccactgctcctggagggccagcgcagccgagggacgcttggcggggtcctcctgcaggaggaagcacacgaactccttggccttctggctcactcctttaaagtagtcatctgggaagctaaagtctaagcggcaaatgttcaggcaggtctccc

SEQ ID NO: 150893 - DNA, 1146 bp, Homo Sapiens
  misc_feature (25)..(25): n is a, c, g, or t
gcccagggggggacctggtcttttncacccagcctttaaggggtggcctgtacccatcccagcaggggggccccaggggaacctgtaatccttttccgtagacatgattgagctggcatctggaccttcaggctcagggataggtagctctctagctgtggtctccaccccactctgtagttgttacctgtgcagctgtggttccagaaagcaccacaattgatacctctgcaggtgtcatacctgtagcctctggagttgacatctctgccagtgtggtacccatgacctctgaaaactggcactttctcaggtgtcatacctgtgctctctgcagttggcatctgcacaggtgcagtgcttatgacttcagtggttggcacctgcacagatgtggttccagagggctctgcagttggcgcctgaccagggtgtagtacccacaactttctgtagtaggcacttggccagctgtggtgttaggggcctctgcagttggcctgtgcccatctgtggtgcctggaactggggaggagccacaggaggtgagaggaatggcagcctgcaggaccacctgggcagtgactgggccaggctccaggtaagtatgagtgaccacaagtgcccgagagatcagggttccactactgtctccaaagtcccaggtgtaggagaggtcagcttcagccagatagccactggggtcatggagctggagggcaaaggtcagaggctgatttctcaggaagtgcttgttccctccatccaaggcccgcaactgggacacgctcacggagaaaggcacctggtcagtaatggtgaaggctgagctggaatgagcaagaggcacatagctccgggatccccggcgatggtagacagtcacttccatggtgtgtgtgcccagcattgccctgcctgtcccaatgctcagcccagacactgggccccctagaacttgccagtattggccccaggtcttccagacataaacaaagcttctcttctgagaccaagagccagatgggcaaggtccaccatcagggaagatgcaggcatcgtcagtttcctggggatacactggctgtcctccccacacctggctcccattgatgatgatcccgaaattccggaccggtccagccg

SEQ ID NO: 150894 - DNA, 1179 bp, Homo Sapiens
  misc_feature (139)..(156): n is a, c, g, or t
  misc_feature (161)..(271): n is a, c, g, or t
gtgggggggattcccaaccccttttttcttgggcccaggtttttcttttgggaaacaaaggtaaaggcccccgggttcacctttccctaaatggggccccggcccgccaaaagaaaagggtttgggaaaggtttttgtnnnnnnnnnnnnnnnnnnccaannnnnnnnnnnnnnnnnnnnnnnnnnnnnnnnnnnnnnnnnnnnnnnnnnnnnnnnnnnnnnnnnnnnnnnnnnnnnnnnnnnnnnnnnnnnnnnnnnnnnnnnnnnnnnngctttttaaaagtttttatttcaaaaaataaagctgcagttcatttcacataaatatctggggagggaaggggagtgggatggggtgggggcttggcccctacctcctcttctctttcacactgtattgtaaaagcaaaggggatggcttgccgaaccagcgggagagccatatctgcttcattgtcatgtgatcagggagaacttcattgtcaaaaaggagctgcacatgctgagggtttagcatcaagcggtgacacaggaccctccggagatggcgtacctcagctctaacagaacatcggacatacttgttctgcaggacgcttttattcttgtctttgccagaactcagccgctccaggcacaggttcaactgctcatcatagcgatagtagtgggctttagagtggtcaaagctgctgaaggggaggccgaggttgctcagtgctggctcttccccagtgggctgggtgacccggtccaaacctcgggactggtagaattcccgaatccgtttctcttcactgtcttgcaagccaggcaccagcttatacacgatgtcctgcatgacccggtccagtttgaggttgagcagtggctgtgtctcgtggatcttaatgttgcacatggggcagtacttgctagtttggaggtacttcacaatacaactcttgcagaaagtatgaagacactctgtgatggtggtggcatccacgaagtagccggcgcataggcagcaaacaatgtgttcattcaagtctttgatcttcactcgaacctcctcctcgttccgtagcgggtccatcttgtacactgactggagctggttccgaagcctcatcgcgatcgcaatctggcccccctgaggagacgccatcttaaaggctgatcccagccggccacccc

SEQ ID NO: 150895 - DNA, 589 bp, Homo Sapiens
aaaaattaatggaatttggatgccctggggcgggctgatttgcagcttgttctcccaccagctctccaggcacagtctccacagctaggacatttctggctttttctgcagaagcatttgggtgtgggtaaattaaatcagtgttatctctggctacaagacccttaggaaaatccccgggagttggagaggtcctgctgtcccacttgaccatgtcaagactgttacaatattcccatctcttctgctgaagctcctgtaaccagtaagtcatgagttgacgattgggagccttgagcaccgtgacggctcccgcgctgtgcacctggaagtgcgcgggcggctccgtgcccggctccgccgcctcgtcggggccctggtagctgaagcaggcgtccgcgatgtccaagtggccgaggggcagcgcgtcctgcggactcttgaaatagtaaaggtagcagcggcgcgcgtcgaacacgaaccagcggctgcggtagccacgcagggggcccttgcccgacagcttctgcagatagccacacagccgcgctggctcccgcgccggacccgccccgggctccgcggccgc

SEQ ID NO: 150896 - DNA, 337 bp, Homo Sapiens
  misc_feature (59)..(72): n is a, c, g, or t
  misc_feature (172)..(184): n is a, c, g, or t
gaggtctgtttgtgtttaatcagacaatatgcaaagtatttacaaccaattctggatannnnnnnnnnnnnngcaagtctgggccttggaatttcggagccccaggcccggcccagagccaggggtcccccaggcctttgcatagtcatctgaaatctacaaaacactgttnnnnnnnnnnnnnggacagtattaagacaccttacacaaagggccttaggcagttggagagggatttgagagctcgctggggtgagtgagcccagatttgactggaatggacgggagaagacttgggtaataaagacgtatgaaaggaaaagttgaaatttcatcc

SEQ ID NO: 150897 - DNA, 1166 bp, Homo Sapiens
cgtgccctatgttttgaacataatattgtagacgaagttttcacatgaggaagtcaccttggataaatcactggggcctctaccgcataggttaccatgctaattccagaagatcacatacgcttaaattggaaaatcacgggttttcggtccccataagatctcagggaccaaggagagatacttaaatcccgtttaaaccaaactccactgttgactggcgccaatccgcaacgttccccaatagtgagtaactggccaatgacactacaacagggcaccaagaaattagttatgagggcccattcacctgacctatggctaagaaaccttgtttccaacctggtgtttcatgaccagcaaatcaaaggcaattggttaaccctagagctgcactgaatggccagcctaagatagccccagctgctactcccagcacagcaatggaagtcttgtccatataccatccagtcatggctatcaaacgtagtgtacatacagaagctactaggaaggaatgctgatgatgagcaaaacatgccagtgctgagaaccaagaaggctagcatcattcgactcacgtgcaacccaaacttcttgcacacagccttgtaaaagtaaagttcacaaatacagctcacaaaagccagaagacatcgcaaaaagtaaaacacaagaatcttattagtttgtagaattcttgcatgaaatgcagctggccaggcatgaagcaacaggtaagcataggagcgaatggcatatgctggggaatattcccaagtctgaaacccttccccatagatgaggtagtgtgttggctcccagtagttgaatgtttcatcacagtcagagatgttgctcaggagagcagcacataaccttgctgaaagcagacacttgaaagcagtagatccttcaggtgcccagacttgtcctgctttgttcccagataactcggtccggtgctccgcgccgcccgcctctcggctgcccagcagctcccgcagcttgtccgcagccggggccgtatccccactgctggccccgctgcccttcaggcgctgccgagcccctcgactagccatggcaagcctggggaaaaaagaattcggcaccctatgaagtcggtgagcgcgcagacatagctttggctggcaaacggtccc

SEQ ID NO: 150898 - DNA, 867 bp, Homo Sapiens
tgagtcacagtcacaagattcttccaagacaccccacaagccaaagccaagactcccagaataatattgaaaatgtccatagtctataagaataaggcctggatacagcaagatgccataatgcattagcaatctttttcttagttgagatttcttttaagcaactacagtacaaaaccactgcaggtatgtaaatcagcagatcagcaattaaaactgttgtacgcatgaagagcttatgtgcctgactctcatatccacgtgatgtatggagagcaatccagtctggatttataaactttgccacatatgcacataggagactatgataagctgtaagaggtgggtaatccaatccccaatactgtaaattgttatcactgctgttaaaataccattgtttgaccggtaaattaaaagttatttcttgccagtgtctctgagcttcataatcaccaaacataggcggtttaccagcacctgaataagaattaagagacactgtccatcgtactgttagtcctattaaaaccactactgtcatcaagtaccatttctccatagttcttcaaatttagggaggggaagaaaacacagcaccagtgccagagtacttttaaaacgtggtcaatcacttcttttcttgttcagagaaatgttatcacttcttgaaatgttatcgattcttcgcaattaggagtttgagagaattttaatgatgcttggtttccaaatagtcaaaacttgattatgtctatgtagaagtatccccgccgcccgccggccgctgggattcgcgcctgccgtgggtcccaggaaggcgcatgcgcgctcgcccccgcggcggactgcccctccggccttccg

SEQ ID NO: 150899 - DNA, 923 bp, Homo Sapiens
ttcgggctcagtgttcttggccgccgtttcttcggttcggttctccgccttgagaagtcccagtttcttttcccccctgtgctggtacgcgtgtgaatcccacttcccccgtcctccttctgtgtgagggaaggcctgagtaacttcccatactgccaatcaaggatttggtctccgggtttcccatcggcgaactgaaactggtccgtgaagaagtggcaaagtaacataactcctgcagcggccaggtcggccttcgggaacctcgccatgccgccgccgccacctccctaccccacccgccagtccttcgccggtgctcgggggctcccgatgcaataggcgcgaccgggccaaacgctgcggatcggtctcggtaggacccggaggcctttgtaaatgtcgctgcgatttcacagtagggaaccgagaagaggaagaagcgaacgcgagtaggagcgcagcgctcttcggacctctgaggctctctttgcaacttgccacactcgcagccctcacccgacactgaacaacaaccgcggggaggagaggccacttgcagccgaggctcgcaaactgtcggttccactcgggcagcgccaacccggtgcccgcggacggtgacttccgagccccagcgatgcgctccactgggttcaaaacagatctaattccacagccagcgccgctgcctgccccagatccactagggctggtcggctctgcaggaactttcctctgtctagggatggccccggcaggaggtttaggtttgcgggaaggaggttgatgacgaaaccctcccgacaagttttgcttcttttcttcgcccgacgcagggcgcgcgtcctttctcgcagccggaggaatgggcagctccaaagagctgagccctgggaaggttagggctgcagcagtctccc

SEQ ID NO: 150900 - DNA, 840 bp, Homo Sapiens
gcccgccgcgcgtattctcgcctcgccgcagcccacgccctgcgctgccttgcccggcggcccccgcccggccgctccgggcccctgtgccccgcggagcgatgctgctgctggctgccgccttcctcgtggccttcgtgctgctgctgtacatggtgtctccgctcatctagccccaagcccctcgccctgcccggggcgcatgtggtggttacaggcaggttccagtggcatcgggaagtgcattgctatcgagtgctataaacaaggagcttttataactctggttgcacgaaatgaggataagctgctgcaggcaaagaaagaaattgaaatgcactctattaatgacaaacaggtggtgctttgcatatcagttgatgtatctcaagactataaccaagtagagaatgtcataaaacaagcacaggagaaactgggtccagtggacatgctggtaaattgtgcaggaatggcagtgtcaggaaaatttgaacgatcttgaagttagtacctttgaaaggttaatgagcatcaattacctgggcagcgtgtaccccagccgggccgtgatcaccaccatgaaggagcgtcgggtgggcaggatcgtgtttgtgtccctccacgcaagacagttgggattattccgtttcccagcctactctgcatcccagtttgccataaggcgattggcagaagctttgcccatggaggtgaaccctataatgtccacctcacagttgcttacccaccccacccgaccctcctgtgcttttgcccaacaaaccccaataaagccctttggagacccacttaatttccagagaccacatctggggg

SEQ ID NO: 150901 - DNA, 1053 bp, Homo Sapiens
  misc_feature (325)..(325): n is a, c, g, or t
gagctgcatgtactgctcgtcgcctcgccccccttctacctcgtggtccagcttcaggatgatttcgttttcaaactttttgaaatccccacttctttgatattcacacagcatcatgtcgaagaagattggtatggtggctttccggagctcagcctcagggataagtgtcatctctaatataggtcctaccatgcctgggatgaagcagattttgttctgaccaagcttgtaccacatatcacggatggagaagccgattagccgtctcatgtccccatactttattcaggattttgttttatttggcgtgtgagaactgctnccagctgcagagaatcctgggtgataaaagccactgccagatgaaaatagttgttccacagctggaactcaaagttcgtgtgttctaggaacttctggttcatggtttctgcaaacttgttgatagctctcaggaagaccctgttttgaaccatgctcatggccatccagtctccagggtacacgttctttccaatgaggtccttgaacatgatgaaggtctccatcaagaagtccacaagttcagagctggtctggaaggtctcaatgtagaaggagtagtgctggtcacccatctggtttaagatggctgtcatacatgccacaaagtgactaatcagaatgtgatcccggcccatggtgatgactgtccggttcactgtccgcagcagctggaccatgatctcttggatatggtggtaggtgaaggccgcatcctggtagctaaggacttccaagatgctgttgagcaattcaacgcagtacttcctctccaggacctggtgttgcatgtcatccttctgctccagcagctccttcagctctttggtgatgacaggaagcagaatgtcccggcattcttgctttttaaagaggttgctctggactatctcattcatagactgtactttctgcttctggagtttcacaggagggatgcaggtgtagaactcatacaggagttggctgagtaacttcgcatcaaagaccatttctacatcatgcccc

SEQ ID NO: 150902 - DNA, 841 bp, Homo Sapiens
ggtgttggttttctcgaacacattggccgaatattggatcttcagttggaggacaacaaatgggcctgcaattgtgacttattgcagttaaaaacttggttggagaacatgcctccacagtctataattggtgatgttgtctgcaacagccctccattttttaaaggaagtatactcagtagactaaagaaggaatctatttgccctactccaccagtgtatgaagaacatgaggatccttcaggatcattacatctggcagcaacatcttcaataaatgatagtcgcatgtcaactaagaccacgtccattctaaaactacccaccaaagcaccaggtttgataccttatattacaaagccatccactcaacttccaggaccttactgccctattccttgtaactgcaaagtcctatccccatcaggacttctaatacattgtcaggagcgcaacattgaaagcttatcagatctgagacctcctccgcaaaatcctagaaagctcattctagcgggaaatattattcacagtttaatgaagtctgatctagtggaatatttcactttggaaatgcttcacttgggaaacaatcgtattgaagttcttgaaaaaggatcgtttatgaacctaacgagattacaaaaactctatctaaatggtaaccccctggaccaattaagtaaaggcatgttcccttggtctccataatcttgaatactttattcttgaatacaatgccattaagggaaatactgccaggaaaccctttaattccaatggcctaaaactttaaggcccgggattttaaaataaccaaccctccctctcaaagttttta

SEQ ID NO: 150903 - DNA, 778 bp, Homo Sapiens
  misc_feature (139)..(156): n is a, c, g, or t
gaccccccaggggggtgcaaaaaccctttgccaagaaatgccgctttcaattttcttttgttccaaaaggtcaagttcttcatcagccttgccttccccacaagtttggaaatttaaaccccatgggtcgggaaaaggnnnnnnnnnnnnnnnnnnttttctgtctttatagctttcacaggcagctcctctcaggggtaccagtatgtgctaggctctcttcgtgacttctccagtctttgttggagaaacaagttgacccaggactgcactggatgataaattttcattctggaagggtctgtaaatctcgtttaaatcaggataggccatcagggttaatcctgctgaacaatgcttccagatgtgaccagccaaatgtcttctccagttcactgagtacacaatacatcactcttgtcactgggaccaggtttctaaaagcttcttgaaaatgttcatacatctgctcggagatgaaggagcggtctcggaggcccataaggaaaggaaatggccttgttattgcacttgcaatctccaccttgttttctctgaagaacctgaaaatgggctcagggcaaacctgctcctgcaggttctgaccctctacgttctggatctctgcgaccatcctgaagttgagattgctgtctccacttgccatctgcccctgctggccctgctgggccatgagcttggcctaggatcacacccgattcgattttcactgccccgttccttcctgcagctctgaggtgaagctgccaactgcccc

SEQ ID NO: 150904 - DNA, 891 bp, Homo Sapiens
gcttaaaaaactttgacctgtctgggagaaacattctgttggccctttcgggaaatgaaaaatgttgttagactcaaggtagagttcctccagggctggggcaccccgggacaccccgcagcacctcagcccacgttattcctgtttgattgaggacttaaaccttcagtacagaaagcgttccagttaatactgaaccggagggaaattttaggtttatgtttcactgacattaaggacttccaggtgtctgaggctgatcagcaatgtgtatcactgtcatcccagtgatgacaacaggttttttgacgaatctacctgttctgatattaggacatgcttcagcaactcctcctttttcaccagcacaacttactgcacagttcctcagagaaacttcttgcaacttgctcagctgactttgctgtttcataatagagtcaaaaccgatagtctccacaggtttatttccaattgtaacaatttgctcttttctatcttcctctggtccatcttctaacacatagcggttcttaattgcagtaagaaagtctgttccaaaatttaccttgttcggacgaataaaggatcctcctgtcgggtgcctgcatttaaaatacacagtcccttcgtggctcccatcatgctttcctctctcgggattgtcccattctactcctaaccagggtcctgccacgggagggacaacaccagcaaaacgtactgttgcatgttctccattaacttcaactcttcgaccaatgacatccgctgtcaaagtgtcactcattataatatatccagaatccaaaatatgagatctgcccgcggagactccaggtgttcccagcagcagcccctccagccaactgcccagcagcgaagcttgag

SEQ ID NO: 150905 - DNA, 876 bp, Homo Sapiens
  misc_feature (65)..(65): n is a, c, g, or t
  misc_feature (199)..(199): n is a, c, g, or t
  misc_feature (247)..(247): n is a, c, g, or t
ttttaaataagaattggtccaacctgaaggtacactctgaaaaagtgatccttctgggaggatanccatctcctttcccctttgtgggaagattccttctatggagaggcactgtttggtgtagagaccactgttttttctgacctttgggtttcccaagtattctttggtaaaattgctgctgggttttcatctgcanctgcctttccacttttctgcagttctttcaatattttcttcttcttcngggactgctctttctctgttctttttaagttcttctatcttatctttgttcagagggttcaccttgaattaactccagtgacttaagctgtgcttttccaatagcactaattctttgtcccagttcattcagcttgccttcagtctcctctactatgcactccaaaggctggtatgggtgaaaagatggcagtaggtcctgatctgctacctggagggaactggacttctgcttggatgtacctttttgcactcctaaaagggcaggagagttctcctgtgaagttctgtcaggttcctggggaggtacaaccatggcaagtgtatgcgttggcacacgtggcacctgagactgatcttgagaaggtggagggagctgagacacatctgtggtgggaactgacagaacattatttggataatccaacagataagaaactacattagtatggccaccctttgcagcttcaatgagcattgttgaaccatccttgagtcgatgagtagaatcagccccatgagccaagagaagctcaacaactgccaggtggcctcctgcacatgccagcgacactactgtatgatcattattggctgtagccctgttaacattggcacctttgctaatcc

SEQ ID NO: 150906 - DNA, 990 bp, Homo Sapiens
atgcttgatttctattttgtagttcgggcggcggttcgtcttgatagccgtacgtcaccttcatctcgtgccctgcaggccttgtgcatcgtgcttggacttgtcacaccacttaaatgtaactcccgcctgattccttgttttctttcggcaccgcttcttgcggtcgtctatgtctccctcatttcccgctactagaattcactttttgctgacgggtcaagttgttgagctgaccatggtccccgacatcccaccgactctccctcccgtccttcgctcttccccaccctctgcccgtcctgtcgccgtcgtcgcctccgcccccccggatagccgggcgtccgggagctcctcctccgcccccgccagtacgggcggcggcgctagcggcggatcgcctgtctccagaccgtggtcctcacgctcctggccgctcggggcgctgttgtccccgctgtcacggcgcttgctgggcgaagccgagggctctgccatggtcccctgcgtggattttgcgctttcggtgctgctctgggacgccgaggagctgcccagcatgcgcgaccccgggcggccggatccagagaggcgggtggcggcggctgctcagcgaagtcgcaaagcaggagccgcttccaaggcacgtggaacgtcaccggctcggccgcacgccgcttggccatgggcccagaggctcgggcggagcccgccaggcgcgggagaccgagtgccgatagctgcggggggcgaagagcgaggactgagcgcgtgagagagggacaggccgaagtcgggcgaggaggcgacaggacgctggagggggtagggcggggcagctcgcgcagggcctagggctggggctccggctcggaggcagctcccgcgctcagccctcgccgccgccgagatgcggcccggacgttgagaagcaaccgcgaagcggcggagattcgaacctgcgcacaacgtgcgcgcgcgcactctccc

SEQ ID NO: 150907 - DNA, 506 bp, Homo Sapiens
ccagggggcacacttgcagagctgggaagttgtgtcaacagctaaagggaaggtctgtgggtgggaggtggtgtcctgggggagggggtcataggttgtgggctggcctctgtctgggcctgaggagcctggcagagacaccacctggcatagcagctggcctcaaggggaatgagacattaaagaaaaagaccagtgtggtgacggtttctgtcagtttggcacaagagaaaaagaaaaggaatatgggaaagagaaagcaagactgggcaatgggtgcagaagatgggaccgagaagaggtgtgagaataggcgataagcgggagagagtgtgagcttggggagattccccctgggaccctggcgtatccacggcatctctgggatcagtgtcggaacctcacccgccctgaggtgtagttagtgggagtaggatggagcgggccaggcagcccctcaagaaggagcccaggacctcttgccatctgggcaatctcctaagccc

SEQ ID NO: 150908 - DNA, 895 bp, Homo Sapiens
gaccaggatggtacttgaacgtcccagggatgctgtcccatcccttccttcctcactcctactctttgaccctgatggccaaagccagagacgcaggccctaaaggtaaaaacgtcctctctgtattctctggcttttactccctagtgtctctgcataagtccctttgaggctgttagcctacccctccatctcttccattgacaaggaggatatgaatgatcttgacactgtcttatatgagggcggcgaaagccctgctctcaactgcatgtgagattacaaacatctcacttaattcttccctcgccccttggtccctggctgtggacatgttaaacatttgtgaaaactttggccacgtccccatgagtggcaaggcagggtaaatggctatgccaagtgaaagaagaccaaagacaaaaagaccatgtcattcagcagcttaaaacccctcaacagcttcacattgcccagagtaaggatcaacatacatgtaataggttctcaaaagccctacatcatctgggtacaagctccccctccaaccccactctgtactatctccccctacccccaaccccagctgggcactccagctctactggctgtatgtctctctcctaatttttctacttaccacagggcctttgcacacgctgttccctctgcctggtagacttatccatgctccttagggaagcctttcgtgggctctcctcccccaggttaggcccccctgggtatttacacttggggcatcatgtggctttcccctttgctgcatcattttgacattcatgtggggggattatttcatggcttttcccctttcccttcccctttcccccttaagtcgggctggaagtccctactggggggcaccgtaacaggc

SEQ ID NO: 150909 - DNA, 885 bp, Homo Sapiens
cgctcttgagcacatgccatggtctgccccatccatatcccctggccggcattctgggcctcttccccgcaactccaatccagcaatccaggatgccagccgcctgccttcgttcatccgcctgatcacctttggtcccgtgcccttcgcgagggagatgttccgcagtgcgatggagtgctcccagtcctggagcgcagtcctcggtgaccgcttgagcatggccagctccttgcttcactgcagctccatgcctacgtgcgccaggcgcagcggcgcgtgtcctcgctggcgttgctcaccagcacccgcaggtcctgcagccgcgtgcggtggaggccacgtcgtaggacaggctgtggttgaggccgcgcagcacgccgcccacgtcggccagctcctcgcccaggatgcccaccctgcgcgccagcccgtccagcaggcccgcgtggcgcctcagcagcagctggctactgttgctctccacctgcagctggtagagctccagctgcgccgtgtcgctctgctggcccgtgcggtcccgcagcagggccaccgcctgctcggtctgcaccgcctgcgcctgcagcccccacagcgcgccctccagccgctgcactgcgcccgccagcgccagcaacgagtctgactggttctgcagcgcgtcctgcaccttccacacctgctccgtcaggtccgcttgcagcggagcctgcagcagccgcagctgcaagtcccggaagctctcattcagccggttcacattgcgagtcagggccttcaggtcgtcaggggagctgcgcggcctggacactgctaagatgaagatgcccctcgtgccgaattcgccacccaggcctcgctaccttatacgcttatgtttat

SEQ ID NO: 150910 - DNA, 1332 bp, Homo Sapiens
cggcgcgcgcgcggcggaggacgaggaagagttgtggcgaggcagatcctgccccgtggcctgcggccgtctcgtaggtgtcccaccggccttccgggttccagcgccaggcctggtgcctgccccaggaggatgagcatttgcattgcctgcaccttatcgtgcccttccacctgctgaagcagctgtgcctgccgctcttgtgaactgcgaacttccccttacctcctctctctggctcgggagctggctcggccccaggaggctcccgggagcgcctgtcagtgcaatgccgccccatgtggtgctcaccttccggcgcctgggctgcgccttgccctcctgccggctggcgcctgcgagacacagaggaagtggtcttctgcacacagccccagtggcccgctcggacaggagcgccccggtgttcacccgtgccctggcctttggggacagaatcgccctggttgaccagcacggccgccacacgtacagggagctttattcccgcagccttcgcctgtcccaggagatctgcaggctctgcgggtgtgtcggcggggacctccgggaggagagggtctccttcctatgtgctaacgacgcctcctacgtcgtggcccagtgggcctcatggatgagcggcggtgtggcagtaccccatctacaggaagcatcccgcggcccagctggagtatgtcatctgcgactcccagagctctgtggtccttgccagccaggagtacctggagctcctgagcccggtggtcaggaagctgggggtcccgctgctgccgctcacaccagccatctacactggagcagtagaggaaccggcagaggtcccggtcccagagcagggatggaggaacaagggcgccatgatcatctacaccagtgggaccacggggaggcccaagggcgtgctgagcacgcaccaaaacatcagggctgtggtgaccgggctggtccacaagtgggcatggaccaaagacgacgtgatcctccacgtgctcccgctgcaccacgtccatggtgtggtcaacgcgctgtctgtcctctctgggtgggagccacctgtgttgatgatggcttgagttcagcctcagcaggttgggaaaagttcttacagttctgaaaaggccgcggatcaatgtctttatggcagggctaccaatattcaccaaagtgattggagtccctaccaacggcttttacccagcggaggcaggatttttgggtgacgttggaaaaaaatcgcggaggccgggacgtgcctgcccccccttggggaatgggaaatccggcccccgtggcgtgttgcccacccgc

SEQ ID NO: 150911 - DNA, 876 bp, Homo Sapiens
cagagtcaaaaaggtcgaagccaaaccgagttagcaaggtggccagttcaccagcaagtgccagagcaggagagggaaaacgtggtgtcactatggctttcacttaagattagttcttttggagcatttcgtgacacaagtctctcagttgccctgatcgattcctcaggtggtctccgtggtattctggaaaaagtgtcattcaaatccatgacaaactttgcccacgatgcccgcctggtccaaaggttatctgtaatgtcggcaaggagcagagatgagtcagtgtgaattgtttgcaaagtaacaagctgtggttgttccattctttagtgttctcctgacaactctggtatatacttcttctgcaaagtcgatgttctggaatctgtgttctgcaggaaatgtgtacttggtcagccactccaagagtggcaggtctatgctacttccagcaaaggaatactgagaggcatggatgtgtgtatcaaccagcccaggcatgaagaactcatggtggctcagttctcttatttcacacggcttgaagcaccattctttggccagtttttcctgttgagatgcttcttctaaaaacactattttgccgctgtcgctcacgccgaggaggtgatcccgcagcacctccatggggcaggtccaggtggagtggacgaacgtccctcggaagatgtgcggccaggggcggcatctgagcggcacacatgtcagcggcggagcgcagcgcgggtctgctggtcgaggaggggcgcacgcggcggagacgcagcgggactctctgcagcctgcgggcggccctcgtgccgaattcgccacccaggcctcgctaccttagtaccgttatagttactgccg

SEQ ID NO: 150912 - DNA, 926 bp, Homo Sapiens
ggtgaaatgaaatttggtggcacaaacgagagtaagggtggggcctggggggcggggcgaggtccacgggaaaggcaatggtggggtgacacatggggccacgggggtttcggtggccagtaggagcgcggtaggagggctttgccagccccccggaagggcgcggttggggcacggtggaagaagcgggttgccggccaggaaagagggttgtgaggttgcccagggtcgggaaaggtgtcatcaggcagtgcctgcagcgggttgtcctgcaggtagaggtacttgcagggcagccaggccgcggaacagccccgggcccagctcctgcaggccgcagcggtccaggtgcagcgtgtgtaggcggcccaggccgtggaatgtggcagggtccacagaccggagctgtgcattatcgctgaggtccagctgctccaggagggccaggccagtgaaggcagccgcatcaattcgggccagcacattcgagtgcagccacaggatggtgaggttgcggcaggcacggaagctggcagctggcacatgcgagatgcggttgccgtgcaggaagatgcgctggctggcagcagggatgcccacgggcacagcctgcaggccctgctgggggcagcttgtcgtcaccttgggctcattgtagcatacgcaggcacctgggcatggggctgccacctgccaggcctgcagccacagcacccatgccagcagccggctccctccagcggacgccctcttcatcgtaggggttgggcggggcgcgtcggggactgaaagtcgtttcggggcgggcgcccgtctccccgcggccgggtccgcatccaggcgccgccgctacggcccggtcccggcccggccgcgggacgaggctcggcgcgctccgctccgcccggctctggctgggctcgggc

SEQ ID NO: 150913 - DNA, 1284 bp, Homo Sapiens
gggtctcaccccaagggcatgcaccgcctcgggacccgggtcagggtaggcctgctcgaagccgggggtgcccctcgctgtacaagactgtgcgagtagcggcaggtccaggccagtcgggggcgacggcaggcggcggcaacagtagggcctctcgggggccgggtagaagcccatgaggcgggtactcagggcagctcttcgccgccgccgtactcctcgtagcgcgcccaggggctggtaggggtagatgacccccgccgaggccacggccgccgcaccccagcgcccacgccgccgcccgcagggccaggtagtacacgaaaccctggtcgtaggtccgcgacgcaggggtcgtagttctcgtactggctgacgaagggcgcctgcagggtaggggaactgctgcagggtaggagggctgctggcggtaggtgcatggcgaaggccgaagccgagaccgaggaggcaggagtccccgtgccgttgctgggagacggaggtgcgggccggggccatgtccgtgctgtccccgacggccacctcgcgccagttgtcgggcacctggccaaagccgaatgggtgccgcgcctggccgcgcacggtgtccgagcccacgcgccccggcaggggcagggacggcgcctgccgacgccgggggctcccgtggctgcgccgctgctgggcctggggcgcgccggccagcagcacccgggagctactctcggagcgctgaggtccggccggcacgtactctgagcccgagttgagcaagctgtacacctgcccgttgttctcccactggatcagctgccgccagcgggcggggtccgagccctgcccgggctgcgcctgctgcccgtgcaccagcacgcacaggcaggcgccccacaccagggcccccagctgccggctgcctcgggccagagccatggtgacccctctgcagaggcctggtggacagagaggctctcaggagtggccccctgggcgtgcttctcttcccacggcctcgaggacaggaaggctccttgcttgccccagctctagctttgtccatgctggccttgtcccgagcgggacggctcctccgatgacagcatttcaaggccaaggggtcagggcagggcaggggcggtgcccagggctgcacgaggctctccgcagggcaccgggcgggcaggaccagcctgtggcattacatgcacagcccccactgctgccagctcgctggcctcgtgccgaattcgccacccagcctcgctacattagaacgtataggta

SEQ ID NO: 150914 - DNA, 609 bp, Homo Sapiens
  misc_feature (26)..(26): n is a, c, g, or t
cctataatactgataaggaaccagantaggcagtagcaaatggcccagaaggtacacagcagccatttctgccctgggcccaacagagctgcatttagttatatctcggtagtaaaaatgtaaagtcccttcaaaaggggtaaacctccgattacaaaagatagtaataataaacaggaaaagcagcaactgaatgctgattctccctgttctagtttctattttattattcaactgtagtggaaatacctcaaagtgcgcaacacaaaacagcagattcctgcccctcacctgtgtgcatctgagttctcaccctgccaccttccccatccatcctgcctgccctctgtcctgctccactggctcctgccagacccctgggcccaaaggtgccctctccactgctggtcagtcagtgccccccttctgcttggccaggaaatgcttcagctcccgcagattctctgtcagcacctctacctcatccaggcggccgcactgcttggcatcaaagatgtatgccttgatgttatcgatctgtctgcaggaggaaatcttcctctatgggctcctcagcctctggcccactgtcactgtccatgccgcata

SEQ ID NO: 150915 - DNA, 590 bp, Homo Sapiens
  misc_feature (578)..(578): n is a, c, g, or t
gaaggagtgcccgttgtagccacccacagttgtcgctatcggaaagtggtttggaagattggctaacatccgggtgcgaggaatcatcagcagggaggccaagtttggggagcttgagaggaggtatggaccaagaggagggtttttttgagaatccagaggcttttattgtctgcgtcctttctcagctgaacccccgcccccagggcccccagcagggccctccgaggtggagcagcagctacaagcggaggctgagcacctgcggaaggagctggagggtctggcaggacagcttcaagcccaggtgcaagacaatgagggcttgagtcgcctgaaccgggagcaggaggagaggctgctggagctggagcgggcggccgagctctggggggagcaggcggaggcgcgcaggcaaatcctggagaccatgcagaacgaccgcactaccatcagccgcgcactctcccagaaccgggagctcaaggagcagctggctgagctgcagagcggatttgtaaagctgactaatgagaacatggagatccccagcgcactgcagtcggagcagcacgtcnagagggagctgg

SEQ ID NO: 150916 - DNA, 1016 bp, Homo Sapiens
  misc_feature (894)..(894): n is a, c, g, or t
gctgtgaccagagcaaccagagcctgccacccgactcaaccccaggctcactcgctcacccccctgggccctcctgcttccggccgggggcaccatggcctgccgctcctgcgtggttggcttcagcagcctcagcagctgtgaggtgaccccggtgggcagcccccggcctggaacctcaggatgggacagctgcagggcccccgggccgggcttcagctcccgcagcctcacaggctgctggtcggctggcactatctccaaggtgactgtgaaccccggcctgctggtgcccctggatgtcaagttggaccccgctgttcagcagctgaagaaccaggagaaggaggagatgaaggccctcaatgataaatttgcctccctaattggcaaggtgcaagccctggaacagcgcaaccagctgctggagacacgctggagcttcctgcagggccaggactcagccatcttcgacctcgggcatctctatgaggaatatcagggccggctgcaggaggaactgcgcaaagtgagccaggagcgggggcagctggaggccaacctgctgcaggtgctggagaaggttgaggagtttcgaatcaggtatgaggatgagatctccaagcgcacagacatggagttcacctttgttcagctgaagaaggacctggatgcagagtgtcttcatcggactgaactggaaaccaagttaaaaagcctggagagcttcgtggagttgatgaaaaccatctatgagcaggagctgaaggacctggcagcacaggtgaaggatgtgtcggtgaccgtcggcatggacagccgctgccacatcgacctgagcgggcatcgtggaagaggtgaaggccccagtatgacgccgtcgcggctcgcagncctggaagaagccgaggcatactctcggagccagccttggaaggagcaagccgcccgctcggcccgaattatgggagcagccctcagagcagccgcaaccgagatcgcgggatctcaatggg

SEQ ID NO: 150917 - DNA, 1029 bp, Homo Sapiens
tgtttggtcgggtccaactatcgccccctcgttcggcgccggcgcggggtggcgcccgccctcgaggggccccccggtgtgacagcgtctttcggcgggccgcgcccgccggggggcgccccgcccggctctgcgcggacgcctctttcggcaccccccggccggtccgaaggcgctcgtctgcccgccagtgcttcgagatgcgtcgccactggctagtgcagccgagagcgccagcgcggccagcctcagttagctcgacctgagccggaaccccccgctgcccactagggtactgttgtccagaaaaaggctgtggagctcgggacactggcgcccgcctgcagcaccagcgcgtcgtccagtgtgaaggacaagcgccgcaggtcgagtggcgtactggctgccgccccgcatacagcgtgcacagcctccaggacgtcgcggcccagcgtcgaagagcggtttttcgtccgcggcacatccaggcgcaggcctcgcagccccggggcacggcccgccagaaccatcagcagctcgatggccgcccggcaggcatcaggcttgcctcgatggctcaaaattccagccgtaggttgtgaatgtggtcgaggcaggcggacagataaggtggcagcatgccttccagctcacattcgcaactgatttttgtgtcagtgccacacggcagctgcaggtagcagcaggcaggccacaggccctgcagaccctggcaggcaggcaagcacaggtctcatcagggacaggtggcaggaagatgagtgccagcacctcctctggcagtccctctccaggctcggccatggcccagatccggctggggtgggaggatccgccactcccaatagctccggcctgctcggcggaccagatgggctttgcccggggccaggggactggcagcagaggacagcggacgggaagccctcgtgccgaattcgccacccagcctcgctaccttaggaccgttatagttactgcctctttacaaacctgctttttcaatga

SEQ ID NO: 150918 - DNA, 1127 bp, Homo Sapiens
ctttcctggtatttttgctgctccgtttttctcaccgcatgtctcctggttgtccggggtcacgtggtttggcccgtgtaccatggtgccctgtcagtctttctgtcttgggttctattcaggaatttgggttctgggattccgaattacttgttatgaccttggttgaagcctcatgttagtcgccggcattggtatgtctggagtggatagaggttctgcccgtctcggcatcgcagccgctgtaggcctagcgcgtatatgactttttgttgagctcttggtctgagaggatctggcgtcagtttcctggaatgtacttgtgtttccatggacgtcgcacccatgctctgtcctttcccacatcatgctttgattgccccgatgttctggatgtgcctcatatcctgaatcagggagatcctcaggggaggcatgagtgagctggcatcagacttcctacgttctgaatcaagaagtattcctgaggtactgaggcttcctgatgtgagttttctctgccggttgtcctgataatgtaacaggtgggaccataaggctgatttcccctgtttcacttgtagtccatgactccagatcctgttccaggagatcactaaggctggcaatgcagggtgttctcttccacccctgtgatgttcacctccccatgccctagctccacagcttctcggcccatcttttccaccagcatcctcttggtcttattgcggcattccttcagcaggccctctacaaacttcctattggtctgggcaatcactgatggagagaggttggaccgtttgggctggcggatagtgctgcccatagtcctggcttcctggatgtacttctccctctggtcattatctaaacgcaggtgttctgtgtgctgcttctgccgatctttccgcctccactgggcaggggcattccttttcgtccacttgttgctggctggcccagtggaaagtacatcagactgcagcttagggaagaagcccggctcatatttcccttgtccaatcttcatgtcaagtaaatgtgggtgaattgcagtatggtcaatttttgccagacgccctcgtgccgaattcggcgcgccgtcgacttcatactctctc

SEQ ID NO: 150919 - DNA, 596 bp, Homo Sapiens
  misc_feature (548)..(548): n is a, c, g, or t
gtaggtgaccccctttacctgctccacctcacagttcttcacctgcccaaagttgaggatccttccatccgatgggctaatcacgctgtgcaggccacagacaggccgggcctgcggcttcagcttgcgccggaagaactcgctgaggttgcggtagtgatgcaggtcctccacagcggcctctttcatgttcaccccaaacgtccagatgtacaggctgtagacgggcctgcgcagccagtgtggcagctccacctgattgaggcgaccccaggcccgtgacagcaagcgcgttggcactgacttgtacaaagccacctcccagtgaccagcaagtttgggtggaatctccaatcccagcttctccagctctcgctccctgtacttctcatactgccggtaccctgcatacccgccgcctgtcaccaacagaatgggcaggggacgcagcaggaacatggttcgggcaggggcagtgtggatttttctggcatctgtgcgaaaggctctaaaaggcagcttccgtaagggctgtagggattggctcnagggcagtgatctcatcacgggatggaggttgctccgccacggcgcga

SEQ ID NO: 150920 - DNA, 1048 bp, Homo Sapiens
atctgtccacaggatggccggctcctgccagagttcaacatggcggagcctcccttgatcttcgaatgcaaccacgcgtgctcctgctggaggaactgccgaaatcgcgtcgtacacaatggtctcagggcaaggctgcagctctaccggacgcgggacatgggctggggcgtgcggtccctgcaggacatcccaccaggcacctttgtctgcgagtatgttggggagctgatttcagactcagaagccgacgttcgagaggaagattcttacctctttgatctcgacaataaggacggggaggtttactgcatcgacgcgcggttctacgggaacgtcagccggttcatcaatcaccacctgcggagcccaacctggtgcccgtgcgctgtgttcatggtcccaccaaggacctgtcggttgccccggatcgccttcttcagcaacccgcctgatcgaggccgtgcgagcagactcgggtttgagtatgtgagagcgcttctgggacatcaaaggcaagctcttcagctggcgttgcggctcccccaagtgccggcactcgagcgcggcctggccagcgtcaggccagcgcggcccaggaggccaggaggacggttgcccgacaccagctccgcgggtgcgcgacccctatgagacgccgcggcagcggggcgctcgggagccaggagcgcgcgtcgcgattagaggacgaggaggagagattccgcacgccacgaaagggtacttcggggtgcgccgcggttctggacgggtcggaggtgaggctgatgacccctgggggggtgtggatgctcccagcacttccagacctgtggctcacgcgggccagtgcggctgggcgcacctttggtcgtcgcagaaacctggatcgctgggttacctcgggtctgtgcgtgcggcgagtcgtgtccgacccggccgtgccgggtgtgtccgcggcatttgtggcgcggcgttgatcccgcccattgggggcagcgccgggcctggtgagggggcccggagtgtgcttaacccttgtcgcgta

SEQ ID NO: 150921 - DNA, 934 bp, Homo Sapiens
ttttaccctgtcaattttggtttacttaaattactagatctacttttctcacgcactccccatgtgttctcaacccaacccacttccaccccatcggatagtatcgccccttttctccccgactcaaaccattcattaccccacagttccacttcttcccccatgatgacccgctggccaagctaactagttccacaccagtgttcttgaaacgaaggggaaggacgaaagacacgtacggtgcattcaataactttcagctggtcatccttggcaatgagcctgcagattgaagggtcctgtgacctgtagctcctggcccacagcatgcacaatggctttgatccgctccagggttttggcagtgatatcttgtgggggggtcaccagcgtcgcatcacctgactgcacacctgcattctccacatgctcagagatggcgatggctgccaccacgccatcagaggccacggcatccacgtcaatctccttagcctcctggatgaacttggagatgaccacgggatgctctttggagacggctgctgcgctgctcaggaagcgctccaggtctccatccgtgtaggccacattcatagcagcaccgctcagcacataggaggggcgcaccacacaggggtaccccacggtctggcagaattggcgagcagactcgaggtcactgagctccctccactgaggctggctgataccaatggtgtcaaggagccgggaaaacttgaaacggttctcagccgagtcaatggcttcaggggaggtgcccagcacccggcactgctgccgatgcaacgccatggccatgttgttgggcagctgtccacccatggataggatcacaccttcagggttctcgagccctcgtgccgaattcgccacccaggcctcgctaccttaaggaccgttatagttactg

SEQ ID NO: 150922 - DNA, 1105 bp, Homo Sapiens
aaacctaaactcagttgctcagaaaacccagggtttattttaaaacgaacgggccagtactataacggtctaaggtagcgaggctgggtggcgaattcggcacgaggcaaccccagaaggcatctatgagaggcctgtggactacctgcctgagagggatgtttacgagagcctctgtcgtggggagggtgtcaaactgacaccccgtagacagaagaggcttttctgtaggtaccaccatggcaacagggccccacagctgctcattgcccccttcaaagaggaggacgagtgggacagcccgcacatcgtcaggtattccgatgtcatgtttgatgaggaaatcgagaggatcaaggagatcgcaaaacctaaacttgcacgagccaccgttcgtgatcccaagacaggagtcctcactgtcgccagctaccgggtttccaaaagctcctggctagaggaagatgatgaccctgttgtggcccgagtaaatcgtcggatgcagcatatcacagggttaacagtaaagactgcagaattgttacaggttgcaaattatggcagtgggaggacagtatgaaccgcacttcgacttctctaggaatgatgagcgagatactttcaagcatttagggacggggaactcgtgtggttactttcttaaactacatgagtgaatgtagaagctggtggtgccaccgtcttccctgatctggggggccgcaatttggcctaagaagggtacagctgtgttctggtacaactcttgcggaggcggggaaggtgactacccgaacaagaaatctggctgcctgtgctgtgggcttgcaactgggtcttccactagtggtccctgacagcggcacggcgtcctggacctgtgctcacacgagttgacgacatcccttttggtgctccccttcggtcttagctgttaggtgaagacaccttgtgtgcctggagtcctaccgggcttgcgcaaatgttctgtccgagcgggacaccgggcgcgtgatgacccccactgctgaccgccacagcaaggatggaaatccgctgcggacgtgtgtaacccttgtgtgtctcgaccaatgattgattattg

SEQ ID NO: 150923 - DNA, 846 bp, Homo Sapiens
tggaaggttctctggggaccacgcccccctgtgaaggttctgcgggaatttctccccgcttggtgggccctaggtccccccgggaacagggggttgaagaagcacaaggcggcttccggtgccactggtccagctcttgaggggaccgggccttcagctggggcaacactgggcctccaagccgggccccgctgagccttgatgttgagggaggagctccagaacttcaatgcccagatgggagatggcctccagctctttgtgagtggctgcgtggtggatggctctggggagctgcagcgggaggagaaggatgtcccgggtgtggcagtaggcacagatgagctggactaggtctgggaacatgagctccgagccctccaaggagacgccgccagggctctccaggatgtagtggctggagacgaaggaggggccactggcttcaggcaaccgcatgcacagggcctggcactggcgggtgttagatttccgcacgaggaacgtccccgggggctcggtcctcagcatgtgcagtgcggccgctgcgttggcttgcagctgcagccacacgggccgggtgagcagcaggcgctcccgcaggctcacaacgcgccccggccgctgcggcccgcctgcctgcccgccgctggcattgggcacgtcatacagtgggtcctgggctggcttttctctcgccaggtgcccagtagtgaagctggacgggctgggggctccaggagagcccgcgcctgactctccagggctttccatggctgggagctccttcgcctcgtgccgaattcgccacccaggcctcgctaccttagaccgttatagtacatg

SEQ ID NO: 150924 - DNA, 1051 bp, Homo Sapiens
  misc_feature (14)..(14): n is a, c, g, or t
ccgcgcagtcggtngtggcaagcattgtaatatgaaccagtgtaaaaaaagcaggctgtacggtcggaattcccgggatatcgtcgacccacgcgtcgaactcttccaggagcacctggaggcaggccagcctgtgtggtgtcagggatccaaaggacattgcagggcaacctgtgggggacagaagctcttggggcacttggaggccaggtgcaggcgctgagccccctcggacctccccagcccagcagcctgggcagcacaacattctgggagggcttctcctggcctgagcttcgcccaaagtcagacgagggctctgtcctcctgctgcaccgagctttgggggatgaggacaccagcagggtggagaacctagctgccagtctgccacttccggagtactgcgccctccatggaaaactcaacctggcttcctacctcccaccgggccttgccctgcgtccactggagccccagctctgggcagcctatggtgtgagcccgcaccggggacacctggggaccaagaacctctgtgtggaggtggccgacctggtcagcatcctggtgcatgccgacacaccattgcctgcctggcaaccgggcacagaaagacttcctttcaggcctggacggggcaggggctctggtctccgggcagccaggtcagcactgtgttggcacgtgttccgggcacagggacgcccagcgcatccgcgctttctccagatggtgtgcccggcggggcaggcgccctggagcctggcgcccaggcagctgctacctggatgcagggctgcggcggcgcctgcgggaggagtgggcgcgtgagctgctggaccctgtccaggcccggagaggcgtgctggtgccttgaggggctcccccacaggtgcagggctggtgagcacagtcagggttccttcagaatttctctccctggaagacttgcctctctgtcagtctgcacaggaccagctccctgatgcactgttttccaatgggtggtggtccgcggagggcggggctccggggcaagggtttggcg

SEQ ID NO: 150925 - DNA, 880 bp, Homo Sapiens
  misc_feature (55)..(82): n is a, c, g, or t
  misc_feature (94)..(156): n is a, c, g, or t
gtcccccgggcccaaggttttcttcgggggtaaataaagggggccccacaataannnnnnnnnnnnnnnnnnnnnnnnnnnnttttttgggggnnnnnnnnnnnnnnnnnnnnnnnnnnnnnnnnnnnnnnnnnnnnnnnnnnnnnnnnnnnnnnntcctgacgcctgcggacgcctagaacagaccgcaccgcctcctcgcgcaggggtgcatagcccggacctggggcgctgactccatagggcaggggcaggagtggggcatacaaggctccactagtgtgtctcagaatcgggttcctcaggtaaatgagggcaacggcctctgggtccccgcaactttcctgtatgtccctgagcagtagctggtagggggtctcacaggggtgccttggaggcgatcacttcccgcaatgccaccccccagcgctcagcttttgcctggcgtggggagcagaggcggacactgtgtttccgaccagacacagtcactgaccacagacctgtctcgttacgcctgcgctctgggccggtcaccgagcacaggctggtgtgcacgaggctcccgagacgccgcgcccctttcccgctgttgctgaattagatccagggagtcccgcgtgagcacaaaccaggctcggcgcgggggcagccagggccgcgcccctcctccgcggggctcccggtacagccaacctttcacaacgatgtccgggtcgtcctccggcagccctttctccgggatgaggctccaagtctcctcccagctctgcagcctgttggagacaggcccgctcctcactggctgagtcagcgtcacttccaggggacccctcccgccgccctcgtgccgaattcggcgcgccgtcgacttcatacc

SEQ ID NO: 150926 - DNA, 996 bp, Homo Sapiens
cgtcgccgttgcaattttctcagtgcgcagtcgccttgcttcctttggtgtgtgtctggcccttctgtctgtcctgccttctttttctcttgtctgtttcggcccctgccgctgcttgacgtcttgtgcttccgctctcccggtgctcctccccttgagtgtgccgtatgtcttagtgcgcgccacagtgaccagtgtggctcgggctccatgcttagtcatcccttcgggccgttatccctcccggtttcttctggaacctcggggccactgttacatcgcgtcgcctcctcgccttgcccgctccagccttgtaccgcctcattatctcagccccatagcgttgctggtactctcggatctcgcctaacttgttcggtaggcagagaggaggctttccaagggctcccgcacaaacaggaacttaaagtagttgctgcagcgctgtagcgaatctcctcagcccgcaggtcggccagggaacaccaggttcacttgcggtggttccatcttgaggcggacgtccacgctgtccagtactcctgccagcaccttcatcacccgcttccagttagagcaggccaccttggggacgtagcagtagaggaagcggtaacggtcacttacgaggatgtggcgcagcagggtgcgccgctgccccaccggcaagtcccaggggtcccggggcatgcctggctgtccgcacaccgcccgcagggtcctgttccggacgtcctgccgcacttgcaagtcacgcgtccccagccctgagggacaggcccccaggcttgggggctttcccgcgccaggctgtgccctcgcggccgggcgggtgcaggggcaggggcttcatctcggccaggatgccccgctcgatcatgagcagcagcccgctggaggccacgatcaccgcacacactcagcatggacggcagcagcaggcctcgtgccgaattcgccacccaggcctcgctaccttaatacccttatagtact

SEQ ID NO: 150927 - DNA, 960 bp, Homo Sapiens
  misc_feature (29)..(29): n is a, c, g, or t
  misc_feature (200)..(200): n is a, c, g, or t
cggcttctttttgggcctggcaaagccancaggagccagggtgcccagggatgaagacagcgcccggctgggatgccgatgaccccggggccacggcaggctagtggccgagggacgagggggccacaggtggccctggcggttttggttctggcagcacggtgagggaaggcgctgcggaagctgtagcccatggtgtntggcgccaaggcagatgtacatgcccgcatcgtcctggcgggcacgggtgatgagcagcttatgaggtaggagccgtcgggccgcgaccacacgtcacccgtgggcagcaccacaaacttctggccgcccacatcgatggtggagttgtggcggccctcggcgccgtactccacgcgcttcagccactggatcaccggcttcacgtcgctgcgcaccttgcactggaaggacgtggtccccccgaagtccaccgtcgtgttcacggggtgcgtgcctgtgagcacgggcttggaacgggtccgctggatcacatccaccttgtaggtggcgttgatggcgcccgcgcggttcgacacgcggcaggtgtatttgccgctgtcctccggccgcaggttcttcaggctcagtgtccacttcttcttcctgggctcagcggcctctgggcgcgtcaaggcctggtcgtccttcatccacgtgatgtcgggccgagggtgcccgctggccacgcacttgagccgcacggagctacccacgggccgtgcgatcacccggcgcctcatcttggagggctgtgtgaagcgcggtcgtgcccactgctggctggcggggtcctcttgacccccagaggagctgtcgggccccaggctctccttccctgggctaatgtcatccagcacgacgagggtgtagttgacgctcaggctgccgaagccctcgtgccgaattcggcgcgcctcgacttcatactctctcgctcgt

SEQ ID NO: 150928 - DNA, 1894 bp, Homo Sapiens
cgcgcgaaaagacgctgactgcgggtcgggcccttcgggttccgttgtctgttgagctgttattcttcgctccgtcttggtttatggccttgggcccttggccccgtgttttcttctccctgtctcgtcggtcggtggtatccttgtcctctgcggcgacttgttcttcgtggttgttttgtgcctgttgccgtcgtttctgccgtctgggtttctcctctgtcccatgcgtcgggtgcggcagctctgcgtgggagctttcagtccgggtgccctgtgctgggcgatgtaagccagccgtgcttccgccgtgtctgtcagcccgcaggttcctgaccctgatggtcgggcttgggacctcctcgtcaagcatcgtcttccgtgcggtgcgggtcgtcatgcctcctccgtgcccttctgttaggcacttgtggttctcatgcaacctgagggatggtgaatggccccgcggctgatgagctcgtcatcagagtctgcatcatttggcgcccacctggttgccatcgtatggtgtcatcgtactcatcctcgtagtagacactgtggtagggcaggctctcgcctggctgcagtggcacctcctccaccaccacgctgtactgctcgtagcgctgccgctgtgccgccactgcacgcttgtcgttcagcaaactccgcgtgttttcctccttcctggtgctcttgcccttgtgcacccggctcaggtctactgagtccctgctgaacacatcaaactcgtcattctggaagacgttgtggcgagacgtcagcaggggtgtagggtctggtttcatttctctgtctaggttgcggtccagctggctgagggtgggggccagccgctcctccaggatattgttgatcacctgctctgggtcgtagtggtagtactccaggcaggccaggatgaagccctcaccaaggtctggcagcaggtccttcacttgggagatgagagagtccagttccaccccacacatggcagggcccacagccgcggctgctcccatgcactcctcttcctccgagttctccggatgtgatgatgcttgactgactgcctctgctgtcaccgtgaccccgttaggctccccattaggctcctcaatcaccgatgggtctttagcatctgtggctttccgtctgtccaccccttcccatgcactctcgactgcctggaggatgtaggcagtccgcgtctcgtccaagactgatgaggcctgctgcagcaagctgatgtcttcggccacggggaagagtgcatcatagtcccggaggaacctcttctcctgcagcaaggagctgaagatctgaaggaactcttcgatgaagcccctgaatgttgtcacagcgtgctttctaggatgggaaggaggcagatctggttcaggatgatgtggcataatctccattagcttcttcctggaatgggagagcctctgccacaggtcaccaagaagctgtgctatcttcggagcctcctcttcttaattgcagactccatttcgggaattgctgcttctgtagaaggaagctagtctgtaacaaaagtcgtgcttctggaaggtcgtggcaagccaaagggaagatactccagaaaggtccaaagtgtggtgcaggtatcacaaaggtagagaacaatgtcctttaattccaggagaggcatgtcactggggctcaatcggcccctctcctcaagcttctggggtgtgttattgggcccgtccccttgcaaaccacagtgctggaggatattgctgccgacctgaaggatggtaggcagggtttcatccagcgacgcgtggtcgacaatatcccgggatatacggaccgtacagcctgcttttttaccacgggtcttttacctattctg

SEQ ID NO: 150929 - DNA, 395 bp, Homo Sapiens
cgcttgtcgttcagcaaactccgcgatgttttcctccttcctggtgctcttgcccttgtgcacccggctcaggtctactgagtccttgctgaacacatcaaactcttcattctggaagacgttgtggcgagacgtcagcaggggtgtagggtctggtttcatttctctgctctgggtcgtagtggtagtactccaggcaggccaggatgaagccctcaccaaggtctggcagcaggtccttcacttgggagatgagagagtccagttccaccccacacatgagtcagggcctcacagccgcggactgctcccatgctactcctcttcctccgagttctccggatgtgatgatgcttgactgactgcctttagaaggtccaggtatgaccggggat

SEQ ID NO: 150930 - DNA, 1500 bp, Homo Sapiens
cgttagggttaaaggccacggaggatggtaggagttttgtttctgggctgccgctgaattttccacgtgtggaaaatcctttctaattgagaaatttggcaaaaggactaggattattgggggaaaaggttcatttgatcttaaagattcccaaagacacaacaggcctagtaccctaggaattttagtatatgtgggagacagaagtggagaaagcttaaaggaattacagcccatgcctccccaaatgattatgaaaagggagggcttgtccaagctacctctgggccttaaggatgagatgagggtaggagtagggggatacatgcacccagcctgttggagaatccaacatgaagactattgtcccttgagaacctaaggcaaaagtacaaggaggggaaatactgggtcctttacctgaaacaagatatgggcctcccctgcccctcagaccctacagctccttaggctccaggcctcaggcacaagagatagagaatcatatctgagccttttgcccttcccttagctccaaacaagggcaggggttgaaatgtgagtgggagagaagggatcatcagacacactgtttagcacctgaaccacatctcttcctaaaccagaaatcccaagagcagaaagaaataggagcaaagtgagagaggggttgtgcttccatcacattaaataggagacttcgtggggttgggcaagggttgtttcacatcaggacatcaatgactctggtcaaggtgaggggttataattagcaaagcttcatgtgctctgccctttctttattcatcctgcttccgtttcggctttttggggttccgggaccgactcttggccttgcaaaagagggcatataggtgcattccggtgaatcttgctggtgacatgacaagcaggccttcatagttggggcttgctgcctgaaggtggccgtctgcacgagtatcctgcttcctagccacttggagctgttggtcggcagcggctgcatgcggccagggactcagggatggggggctcctgaggttctgtctgccattctgctttctgcttctcaaagtaatccaaggaaagcttctcctcttcttcacacaagtcagggagcctctgcaggcccagagtcatgcgcagggcatccacatgttctttcagtggcttatactcatcatgcagcctccttgtagactctagcagcttgtttaggtcattctcagattgtttgatagtgttttccatcacattgatgtcagcgtggatcagtcggagttcctccacatgggccatcttctcctgtagcagaaggtccatctcctgcttgtattccttcaggtgcctttcctctgactcaagtgcctcaaactcagccttcaaacgagccttgatcttctccatctgcagggtcttgttcctgatctctttaatgctttccaatttgcacatgatttcttgctcatctgccatacttttcactgtcaatttcac

SEQ ID NO: 150931 - DNA, 1010 bp, Homo Sapiens
  misc_feature (866)..(882): n is a, c, g, or t
ttgactgtgctttccgtttcctggtgtgtcctctccctctggataattgtctgagcaagcgcactttagtttctcgtctttgatgtgcatctcatcctcagggagagacataaggtcatcattcggccgccctggaattccgccatccgcttcttttccccccggtcgtcttaggaccacactgccacctgcgaccaccacttccgcgtctttttctctggttaggttcgatgcttaccttcttggagagggtcaggggacaaccttgcaggggctttgtgagccatggtggaagagctgatgcaaatcatgggagccgaaatggggaaggtctgagctgatgattgctgtggtcacaagagagcctgagggggacgttgattaccttacccggaccccttgattgactccctgtcgtcttctccacctctgagaacaggagactccagcagtcatcagtcctgtagacggcacagggaccaccgtgatattctgggtaacggacgcttggctgtgtggggtcagctggtctgacttggactctgtgtccatactgatgcctgagggcagggacactgaggcaggcactgtcagcaaggtggggtagtgaggtggggccagaccacagcccttctctggcaacagctgatccttcatcttgttgatgaacattgtgttctcgatctgacctgagactgtggggatagaaggccagaagtacgggttagaattgaagtgagattcttccattctaccctctctctctcttcctcctgccgtcttattccttctcctttccagggctcctgaactttccggaagtggtgctgcagctcgtgctcccgcgaaccccagttcctccacgnnnnnnnnnnnnnnnnnaacaggctcagagaagagcttctgcggcctcgtgccgaattcgccacccaggcctcgctaccgttaggaccgttatagtactggccgtcgataaataacctgctttttgtacaactgacgtagagttt

SEQ ID NO: 150932 - DNA, 978 bp, Homo Sapiens
cgcatcaaacttggggcatcattcgcgctcttattgttcccactcgcgtcctccttggtatctgtaggtatccaggccttgtattacaccacacgggtgcgaatgtgtctcccttcacaagcgaactttccgaaataaatcagggagtcccccgcgttgttgggcccccctcccggccctcccagcaattggttttgtgccacaccagacccctccaagtcccccgctccattggagtctgcagggtatcgactccaggtcaaaagccctgtatgtgccgaccagtcatgacctcgggcagggagcttggatcctcggaaggtgatgggcacttcagggacacctgatactgtctgctccaccccgtcctctccgttggcccaggggtgccagggatggtgccctgctgaagttccgctttatccttggtgaatcaagtgctcacaggcagaagcgctttttgaggaggcccctgcagcaccgaccggacggatgtggcgcgtgcacctacatgcagcacgatcaagtgggatcacccacacaccagtcctgacatttatatggatgttcttgcgtcctggcctaccacacatgcctagcagatagagtgtcttgtgcgaggctcttgttctccccacgcttcgaatgttgacggcgtggcattgacgctgacctgcaccgaggctggccagttggtgttcatctgccggtcctcgtggtggtagcacttgaattgcagctccaggtcaggcctcattatcagggtcttgtagactgagtctcgcagctggaagacatggttgcttacagccaggttgtgctgcaggcggaagggctccaggaccaccccatcgcgcacagggaaggtcagccgcaactcgtcacaaggcccgcttccagagggcgatgagtgcaaggagttgcctcgtgccgaattcgccacccaggcctcgctacatataagccgcttatagtatg

SEQ ID NO: 150933 - DNA, 1175 bp, Homo Sapiens
cggaccaatcttttctgcgccggtttcttgttgggcgccgcattcacgttcttctggatgcctaattcttcgaggtgaacccagctctcctctctgcttttcttcgctcagccaggcacctggctggactaatggtctccaaggaccaggtcttgagtcatcacccgtctgggaaaccgatcatcaatcagcacgtcttgaaaggcgatcatcatccatggtgttctccaagggcccctgtcatcctctgcacacgcctgggaattctgtcatcatcggcgttcctccaaggtcctcgatcatcatccaccctcgcctgggaccccggtcatcatccatgcctcgcctgggaccccggtcatcatccatgcctcgcctgggaccccggtcatcatccatgcctcgcctgggaccccgatcatcatccaaccctcgcctgggaccccggtcatcatcagcattacgccaggatgatcgctcatcatcagcgcctcctcgcctcggcccccggtcatcatccatcccacgtcttggtcctctgtcctcatcagctgttcgccagcttcctctgtcctcatccagtgcctcgtctaggtggtctgtcatcactccgcatgacgccagtttcccctgtcttcatgggctattcgtctgggaggccgtgtcatcatctgtgttacgccaggaaggccggtcatgcgtgcgttgccccactgacgagagtacctatcttcctcaggaccacgtctagggcctctgtcatcatccatgccacgccggggaacccgatcatcgtctggtctaagagagggctctctatcttcatcatcccccagacgccgggtccgctcttcatctcgttctatgagacctgtcctcatctcgcccttctccacgtctccactccttctctggcgggcctcttctccactcagaatctgcttcaggtccttttctccaggtgccttctgaatctctatctccccaacgagagtcctttctagaaagggaactatcgccaagtcttctctcttcctctctacgccgttctcgttcttcaattgtccaactccctttggcgtttttttcctttccacttcttctaatttcttcacccgcctcgtgccgaattcgccacccaggcctcgctaccttagaaccgctatagttactgg

SEQ ID NO: 150934 - DNA, 505 bp, Homo Sapiens
ccggtcgtacagattgagtttcacatctgagggcagcagcgagacgtccggaggtcccacaggaaggagcatgggccacagcagccagcgccctgtcagctccagggcacggtgctggactcgcagcggctggcggttgaaggtaaagttcaccttgaaggtcagcccatccacaaagcggctcaggaggctcatggaaaagctcagcttgacacggtccaattccaccttgtgcacaaagcccttatatgtgatggggtcctcctggtgtgtctccgaggacaaaagggcaaacaggtggtcgccccgtagcactgaggggcggctctcagtcactccaggaacctccagcgtgagcagcctggggttctggtccacagggtcccaggtcatgggcaccgactccaggtcatagtgccggatatcatgctccatctgcagttcctccaggtgcagcagcagccgcagcttcacctcatagttcctccacttcagggtgtctcca

SEQ ID NO: 150935 - DNA, 849 bp, Homo Sapiens
cctggcttgctcaggtctcatgccctccgagaggcacctgactctttgcctgagttcacggtcagtgggcaggtccctggccgggctgggcattgacctgggccaaacccttgctcacaggtggctcctgacacaggtgcagatggggaacttgcgcttctccctgggtcacgtgcagtatgacggcgagagccctggggcttttcctgtggcagcccaggtgggcttgggggtgggcacctctcttctggctctgggtgtcatcatcattgtcctcatgtacaggaggaagagcaagcaggccctgagggactataagaaggttcagatccagctggagaatctggagagcagtgtgcgggaccgctgcaagaaggaattcacagacctcatgactgagatgaccgatctcaccagtgacctcctgggcagcggcatccccttcctcgactacaaggtgtatgcggagaggatcttcttccctgggcaccgcgagtcgcccttgcaccgggacctgggtgtgcctgagagcagacggcccactgtggagcaagggctggggcagctctctaacctgctcaacagcaagctcttcctcaccaagttcatccacacgctggagagccagcgcaccttttcagctcgggaccgtgcctacgtggcatctctgctcaccgtggcactgcatgggaagcttgagtatttcactgacatcctccgcactctgctcagtgacctggttgcccagtatgtggccaagaacccaagctgatgctgcgcaggacagagactgtggtggagaagctgctcaccaactggatgtccatctgtctgtataccttcgtgagg

SEQ ID NO: 150936 - DNA, 919 bp, Homo Sapiens
ttccactcggccggcacctccctcccatctgcctcctcagcaccccagggctcctccctccctccgccagcatctcccgcccgcgcccgcagtggcaccattggtgtagagcggccggcggaagggcgcccccttgtacacggctgcagccaggatgaggtactggaagctggacagagagaagaccaccgtgttctcgtagttgggcaggttgtctggtgcggccactgtcctgttcagaggcacgaaccatggctgggccagggtcaggaagtagccccctagctgcacgccggtcaccaggaccatctgcagcagcaggctgctgagcacgggcacgctgagcagcgcccccggtggccgtacccgtcccaggaccagcgctggccccgtgcggctcatgagcactgccactgtggtggtgatgaccaggtcgatggccaggaactgcaggtcacccaggttggtgttgatcgtgtagaggatcaggacggagatgaactgggtcaggctgtacagagccatgtacttgaagacgctgaatgaagtgtcaagggaacagcgcccctccctgatgaccatgggcacgcactcaatactggccatgctcgaggtgaagggtgagaccactgaggcttctgcctgggacagcgagatgccgacatcagccgccttcagggccccacagtcattggcgccgtctccgcacatgcccacgcagtactgaagcttctgtagctcgcacaccagctctgtcttctgctcaggggccatgcgggcaaagacagtgccctggaccaggaccttgggcagcagcttggggaagtgcttcacaatgataccaaaggtgggcccgctgagggccaggtgcctggatcgggggtctggctccacggtgtagcttgcagcctggtcagga

SEQ ID NO: 150937 - DNA, 917 bp, Homo Sapiens
cgcccccaacacctcaaggaaaactggtgtccatcaaaatccagatgctggatgacacccaggaggcatttgaagttccacaaagagctcctgggaaggtgctgctggatgcagtttgcaaccacctcaacctcgtggaaggtgactattttggcctcgagtttcctgatcacaaaaagatcacggtgtggctggatctcctaaaacccattgtgaaacagattagaaggccaaagcacgttgttgttaagtttgtggtgaaattctttccgcctgaccacacacaactccaagaagaactcacaaggtacctgttcgcgctgcaggtgaagcaggacttggctcaaggcaggttgacgtgtaatgacaccagcgcagctctcttgatttcacacattgtgcaatctgagattggggattttgatgaagccttggacagagagcacttagcaaaaaataaatacatacctcagcaagacgcactagaggacaaaatcgtggaatttcaccataaccacattggacaaacaccagcagaatcagatttccagctcctagagattgcccgtcggctagagatgtatggaatccggttgcacccggccaaggacagggaaggcacgaagatcaatctggccgttgccaacacgggaattctagtgtttcagggtttcactaagatcaatgccttcaactgggccaaggtgcggaagctgagcttcaagaggaagcgctttctcatcaagctccggccagatgccaatagtgcgtaccaggataccttggaattcctgatggccagtcgggatttctgcaagtccttctggaaaatctgtgttgaacatcatgccttctttagactttttgaagagccccaccaaagccaagcccgtcctctttagccgggggtcatcatt

SEQ ID NO: 150938 - DNA, 922 bp, Homo Sapiens
ggggccctccaggtgctattggttttcctggacccaaaggagaaggtgggattgtagggccacaggggccaccaggtcccaagggtgagccagggcttcaaggcttcccaggaaagccaggtttccttggtgaagtagggcctcctggcatgaggggtttgccaggtcccatagggcccaagggggaagctgggcaaaaaggtgtaccaggactccctggtgttccagggcttctcggacctaagggagagccaggaatcccaggggatcagggtttacagggccccccaggtatcccagggattgggggccctagtggccccattggaccacctgggattccaggccccaaaggggagccgggcctcccagggccccctgggttccctggtatagggaaacccggagtggcaggacttcatggccccccagggaagcctggtgcccttggtcctcaaggccagcctggccttccaggacccccaggccctccaggacctccaggacccccagctgtgatgccccctacaccaccaccccagggagagtatctgccagatatggggctgggaattgatggcgtgaaacccccccatgcctacggggctaagaaaggcaagaatggagggccagcctatgagatgcctgcatttaccgccgagctaaccgcacctttcccaccggtgggggccccagtgaagtttaacaaactgctgtataacggcagacagaactacaacccgcagacaggcatcttcacctgtgaggtccctggtgtctactactttgcataccacgttcactgcaaggggggcaacgtgtgggttgctctattcaagaacaacgagcccgtgatgtacacgtacgacgagtacaaaaagggcttcctggaccaggcatctgggactgcagtgctgctgct

SEQ ID NO: 150939 - DNA, 879 bp, Homo Sapiens
gggtgttggtttttggtgttttccgggtggactcaggttctttggattttgtggttctgttgtctggtgtggcctttgtgcgtcttttttgtgtctccttctgccctgctactactcctggtgtctccgtgcgtctctcgctctgttgcagccctggtgtgctacttgaggttctggtggcggccagatgtcggcctggtgctgccgtgttgtatctcagggctttcttcgggcctgctgtcggggtctctgtcgggtacctctctggtaggcccggtggcccccggcccggtcactctgttccacgtacttcttcttgggtaagttcgatgggtaatagtctgaggccttctgcttctgccgggtgatgtccgcggcacagacgatgtacatcagcagaaaggccagggagcccaccagcagctatcagcatcacgtactggcggaagaagttcactatcccatccaggaagcttgttgggggtctgatgggccccccagggttgtgggctggggccccatcgatgtggggctgagggccggggtccagggtggcgggaggctcggggaggaggccgacgagccctcggcctccccactacccgccacatcctccaggaacgtggccttcaggggcacagagcgggcgtcggtagcaggcacagaccccaggagcagcaacagaaggatgaggaggctgggggctgccgccgaaaccatggtgcccccaggaccagttccttggcgtacaggactgggtgctcccgccgaatggagcgagagtggggggcacctgggctggaagagagagtccgtgctggtgcccggggctgctctgggctggcgcctgcccgccctccctcctcccgtccctcctcc

SEQ ID NO: 150940 - DNA, 1601 bp, Homo Sapiens
ttcgatagaggtgtcgcgcgcctatgttaatcgcgtgttgtctcccagatataaatttgcgcggtggtggacattttgttgaggagggtgtgataatggtcacacacatgtccccctgaatgccttttgcacatgtggtgcggccaaagagccctcggaaaaagggctcccgggtttatacccggggtccgtggagacatttcggaagtcctcggctaatattagagtacaggcgggattctgggattccatgggtttacccccctaatccaacatgtgcattgtcttctgaacttcaagggtctcacaggcggtgttctgccacccatcttggccaattcatggtgatccagaagtaaactgcaagggatcagtccctaaacccaaataacagctgtaccagcagatcccaatggtatgaagcaaaccagcttcccgttgaaattctgtttcctctgcactgtagggcttggcttcctggcaggctgagcacggctcccacgaaagcccgccttgtccccagaacagggctggcagatgccaccaggggtgtgaacgtgagggatgccctcatcttagctcgaggatcccacattctgtaaaagacgtcagctttttggggtaggctggtctgaggggacatgtagggaatactcgctaatgagcgctggggcattcttgagcatctcatagaaggagtccagtgtcttacggtaaaggcttcgctgcaggacgaagggccggaagaggttgaggggctcggccctgagcacggcctcagggagtcccatggcctcaggcaccttgcggttgccgatgaagaagtggtggagcttcttctggagcaagctcttctccaggaagcacagcaactcgtgcagacgagcgtccagctgccccgccttccagtcggcggcctgccggaggagtaggaggtgcagtagggccgtcttcaggtggtagctgctgagcccgctgggaccggtcaggcggctctgcttggagagcaggaaggatgctatctgcaggcagctgaggtggcaggcgccctcgggcagtgcctttagtgtcgtcctgaggaagtgtcgctcatagacagcaaaggacaggagccagtctgtgctggaggctggggtgccctcagagggctccctgggaaggtgggagacaaagtacaggtccgagtcatcacactggatcacaggaatcaggttgaagggcatgaacttccctgaacggaacttgatcttcagggaccccgggctgtccagctggccaaaggccaggtcgaactcgtacttgtgggcgatgcccttccaggctctggtgagggccgtctggaaccacttcatgacctgcatcgtgtccaggtacagggaatctgtggcacacagcaggttctccatgtcgccgcagggaggcgccatgctgttcctgccgtgcaggagacacagcatgtcttccccgagcttggtcttgccgcagatgcagctcaatgtgtccccatcggcgcggaccaccttgatctggccgtagccctggcgatccaggcctcgtgccgaattcggcgcgccgtcgacttcatactcttccgcccttag

SEQ ID NO: 150941 - DNA, 727 bp, Homo Sapiens
  misc_feature (49)..(57): n is a, c, g, or t
  misc_feature (709)..(709): n is a, c, g, or t
tgtttttagaaacctgggatatgagtaatcaaggttgcaatcgttgtgnnnnnnnnngtttaaggtaaagaagtaaaaacatgtgatgtaactgcgcagatggtgctggtatgttgttggagaagtatgaaggaagttgctttacttttaggcatgttgtgccagcttctgcccatgcagcctgtgccagaatcttctgatggattattgacggtggagcaggtaaaagaaataggagattactttaaacaacaccttttgcagtccaggcacagaggagcatttgaattggcttatactggttttgtgaaactcactgaagtactaaacaggtgcccaaatgtgagtctgcaaaagctgccagaacagtggctatggagtgttttagaggaaattaaatgcagtgatccttcatctaaactctgtgctacaaggcgcagtgctggaattcctttctacatacaggcactgttggcatctgaaccaaagaaaggcagaatggatttgttgaaaatagcaatgaaagagttaatctctttggctgggcctacagatgacatacagagtacagtcccccaggttcatgctttaaatatccttagagcattgttcagagatacgcgcctgggagaaaatattattccttatgttgctgatggagctaaggctgcaattctgggttttacatcaccggtctgggcagtgcganattcatccacacttctct

SEQ ID NO: 150942 - DNA, 761 bp, Homo Sapiens
agtatgaagtcgacggcgcgccgattcggccgaggtgagccaccctcggagacccccgcgctggggacgggaggccggcgagcctcgggacctctgaaagccttgaggaggcgcggggacaccatggccgagcctctgaaggaggaagacggcgaggacggctctgcggagccccccgggcccgtgaaggccgaacccgcccacaccgctgcctctgtagcggccaagaacctggccctgcttaaagcccgctccttcgatgtgacctttgacgtgggcgacgagtacgagatcatcgagaccataggcaacggggcctatggagtggtgtcctccgcccgccgccgcctcaccggccagcaggtggccatcaagaagatccctaatgctttcgatgtggtgaccaatgccaagcggaccctcagggagctgaagatcctcaagcactttaaacacgacaacatcatcgccatcaaggacatcctgaggcccaccgtgccctatggcgaattcaaatctgtctacgtggtcctggacctgatggaaagcgacctgcaccagatcatccactcctcacagcccctcacactggaacacgtgcgctacttcctgtaccaactgctgcggggcctgaagtacatgcactcggctcaggtcatccaccgtgacctgaagccctccaacctattggtgaatgagaactgtgagctcaagattggtgactttggtatggctcgtggcctgtgcacctcgcccgctga

SEQ ID NO: 150943 - DNA, 1028 bp, Homo Sapiens
  misc_feature (869)..(955): n is a, c, g, or t
cctggttccaatttgggagcctccaccggatctgcgcggcccctgtccacgtcttagtctcagcagggaagggaagaggaaccgcgaggtttcgcctcggggcggctcgtctgcgagtgtgtgtcagcccctcggatcgcagcctgcgcttgtcccgggagacggcgcgtccggcgcggcggtcgggattctgggctgggattctgggcggcggcggcgctgccgtcgggcgggagctgagcgtcagggttcccgggcgcgggcgacagtggaaacgctggagggcagggagagggtgccagggcgcacccgcgcggggcggcggcgggggaagggattaaggaggctggtctccggggattcccccgccccgatcggggccgcggcgggcgcgggcggcctcacgccacctcctgcttgccctggcagcgacgcccgcagccatagagcgccgaaagcaggtagaggccgtggcagacgccgccgcagacggcggccgccaggaaggcgtggtaggcgcaggggagcgggtaatccttgaggttgcagtagctgtggcgctgcatctggtcgctcatgatgccggtggcggcgccgtagagcgcggccgccagcacatcgtgcgccacgttgaccatgagccagcgcgagcccagcacggggaccagctcgtgcttgcccagcagcgtgaggaagtagaggcccagggtgagcagccagaagagcacggacacgaagagcgcgaagtgcacggggccctggtacttgctggtggcgatagtgatccagaaggcagcgccggccagcagctgcagcagccgcaacacccccagcgggctgcgcaggaagggccgctgcaggcgcaccgnnnnnnnnnnnnnnnnnnnnnnnnnnnnnnnnnnnnnnnnnnnnnnnnnnnnnnnnnnnnnnnnnnnnnnnnnnnnnnnnnnnnnnnccccgagcagcggaatggcggcgccttgctcgcgggggcagcacggcccaggtgcccgctgcgcccgccgcgg

SEQ ID NO: 150944 - DNA, 721 bp, Homo Sapiens
gcccgccccccagggccccaagtgtccagggggtttttgggcgggggccggctccccggggcccaaaccctcgggcccagggtcccttgggccaataaccctttctcaggggcccaaaaatttgggtttccccgaatcattgaataacgggcaaagggaatggggcaaatggagattttgcaaaccacgaaggaggggttgtgggaggcgccccgttcccaggagcgggggttcacaacagcacaatttactctttgactgtggctcattgggctggtcctatcatctgtggttctaaaggtccaaaaaagggctatggaaaggacaggtgtgctggaaggaatgtggagaacgacctcaagatgggaggggggagactggccccatcaatccagctcagagcccgggaaaagtgcaggaacacagacaaataaccccaacacggcgaaggacacacctccgagaaccagaacggcagcgtccacacgacgagacgaccaggcgagaaacaccgcggaggacacggtgtcaacctcggaaggggcctcctatgctttccacaccaaattctcccacgggagaaaccctgccacaaggcccaggaaaccacagacccccaagccaaccatgcccagcacagacaccaaggaatgacagtgacgccggtgacgccaggaggacgcggccccgcctcgtgccgaatcggcgcgccgtcgacttc

SEQ ID NO: 150945 - DNA, 1994 bp, Homo Sapiens
tcatgccttggggtcacctcctcctctggctgctcctgaggcccttcctcctccagctcccgaggcagccagtcctccccgtctaggtctaggccctccagggtggccagcagttctcggacctcctccaggctcacgtcctcctggtcaccacctgtactgtctggggtccacagggtgtgggcgttgccagggagcactgggagggcctcggtagggtccacctcttcaaggcctgtgtccaacgtggctgtggccaggcgctctgtcccaaagacacactggaactgagcctccagcccctggagaaggtgctgcccttctgggcccaggagaaacctggcgctgcccgggtgctccaggcacaacacatggcagctaatgctgcccagcaggctccgcagaaactcctcagccgcctggcaggaagcctgggctccacagagccgaaagccagtcatatccggcccttcaagtggcaagagagcgacgtctcccaggcccgcaagaaggtcctcatggtagagctgcaggaagcgcatcgcccctggctccatcaatagcaccatctccaccaggccctcctgccctgccagcttcacacatcctgggctcacaggccctgccttctccagagaccccatggtgatctccatgggacccaccagcccctcttgctctggtgagtccatggcaatttccaccaggccctcctgccccagcaaccccttagaggtctccactgggcctgcagaccccacaggccccaggctcatgggcccctcctgttcctgcaaccccacaggcctcaggcttaccagcccctcatgttccagagaccccatgggcatcgagctgacttgctctgcctgtcccagagaccccatgggacctgtcctcagagaggtccctgactgccctggttcctggccagagcctgttgtcataatccctctaccctgcaccatgggacctgtcctcagagaggcccctgactgccctggttcctcgccagagcccattgtcacagtccctgcaccctgcagagccgtcaccaaccctccggtcctcaggagagcatgcttggtagccctaggcccctgggtggacgggtggtcccctccactggtgttctcagccagctcctcgggctccaggatgtcgtagtgggggacaaggctcagctctgagccctgcaaccggtgctcctgctgcaacactcgttctgccacttgccactgctggaaggaggcaacagtgcccaggggcccgggtaggcgttgcaggtcctccaggggccccccaccactgcggcgctcattctccaggtacaactccagcaacagcaggtccacagaggcaccatcccccaccacacgcaccgctcgggcctggggaacccgggccagggacaccaaggtcccctccaggcccagattctgggcctgctcctccaggacacggacatctgcctcagaaaggggcttgggcaactggaccagagcccggtctggccgggggctggccaaggcacagcaaggctgtactgggagccccgaggcccgcagcaaggcctggacatgctgctccaagcgctggggcgtggtgccagggggcagtccttggagcagcaggcgtgcaggggctcgtggtggagctggccgcaggctcagctgggcaccatgtagttcgtgatctgcctgggccaagaccctctcggcgtctgcaggctctctgaaggtgaggacgcccccacagcccagtctctgccagctcaacacaggtccccctccagagcgtcggcggttttcaaagtagagagtgagcagctcgtcgggcacggcagggggcagtccacggacctccactgccacccctgcctctgcctccgccattgcaaccattccccgtggccgctaggcagcctcaggccatgagctcagccaggactcctgtgcctgcccctcagcaagccatcccgggaattccggacc

SEQ ID NO: 150946 - DNA, 1013 bp, Homo Sapiens
caccttatattatcagctaggatttaaacaagagatttcgctacagaagtctacttctgtctgacggatatgccatcctgaaaaaggaaagaagctgaacttcaagttcctttcatttagccttggctctgcggccgtcacgatgttctggaagtttgacttgaacaccacgtcccatgttgacaagctgctggacaaggagcatgtgacgctgcaggagttaatggatgaagatgacatcttgcaggagtgtaaggctcagaaccagaagctgctggacttcctgtgcaggcagcagtgcatggaggagctggtgagcctcatcacacaggatccgcccctggacatggaggagaaggtccgcttcaaatatccaaacacagcctgtgagcttctgacttgtgatgtgccgcagatcagcgaccgcctcggtggggacgagagcctgctgagcctcctgtacgacttcttggaccatgagccgcctctcaatcctctgctcgccagttttttcagcaagaccattggcaatctcattgcaagaaaaaccgaacaggtgattacgtttttgaagaagaaggacaagttcatcagcctggtgttgaagcacatcggcacctcagcgcttatggacctgctgctgcgcctggtcagctgtgtggagccagccgggctccggcaggacgtcctgcactggctgaatgaagagaaggtcatccagaggcttgtggagttgatccacccgagccaggatgaagataggcagtcaaatgcttctcagactctctgtgacatagttaggctgggcagagaccagggcagtcagctgcaagaggctctggagccagacccgctcctcacagcgctggagtcgcacgactgtgtggagcagcttctgaagaacatgtttgatggagaccggacggagagctgcctcgtcagtgggactcaggtgttactcaccttgctggaaaccaggcgggttgggacagagggcttggtggactcctttt

SEQ ID NO: 150947 - DNA, 1150 bp, Homo Sapiens
  misc_feature (93)..(93): n is a, c, g, or t
actgtccagagagagttcgtcgttctcacagtctcgagtgtcaccatctggatcagcgtggagagggtctgctcagagctctgcagtgatgcntgttctgccagctaactagtcacaggagttgagagcattgactgctatctcatcttgctcgggtgatcaactccacaagcctctggatgacttctcttcattcagccagtgcaggacgtcctgccggagcccggctggctccacacagctgaccaggcgcagcagcaggtccataagcgctgaggtgccgatgtgcttcaacaccaggctgatgaacttgtccttcttcttcaaaaacgtaatcacctgttcggtttttcttgcaatgagattgccaatggtcttgctgaaaaaactggcgagcagaggattgagaggcggctcatggtccaagaagtcgtacaggaggctcagcaggctctcgtccccaccgaggcggtcgctgatctgcggcacatcacaagtcagaagctcacaggctgtgtttggatatttgaagcggaccttctcctccatgtccaggggcggatcctgtgtgatgaggctcaccagctcctccatgcactgctgcctgcacaggaagtccagcagcttctggttctgagccttacactcctgcaagatgtcatcttcatccattaactcctgcagcgtcacatgctccttgtccagcagcttgtcaacatgggacgtggtgttcaagtcaaacttccagaacatcgtgacggccgcagagcttctgtggaaatctcttgtttaaatcatgtattcaggcaaaacagaaaaacatttgtggtttttttcttggagtatatgcagctttaagaaaatttttttcattcagtggaagatttataatctctttacctgccctgcgggccgggcgtcgcggcagctcttcggaggcccgtgtggaggcccgagcggaggccagggcgctggtggaggcaaagcccgggcggcctcgggcgggccgcacacacatgggcccggccgagggcgcagcgcctacggacaccggcacggccggccggcggctcgagaccgactcggggccgcgggcggcactccgatcgctcctcgtgccgaattcggcgcgcggtcgacttcatactct

SEQ ID NO: 150948 - DNA, 1043 bp, Homo Sapiens
cagtggggccccacctcaccaggtaaacaacgttggctcaacgacccgagctggcatacagatggaccccaggatcagcccaacactccggcccacacccatcggctctgggcgggatcctcggggtaggcatcaacacaggcgcctcttctaccgaggcgggtacatttctcccatccagcacctggtacttgagtttcccatcctttaagagccgcagttgatactgacgctccagattgtctccataaatgtgccgagtctaccccatggcccaaggccttggtgaagccaggacccattttgccagaagttttgaagaactggtgggtgaagtgttgtgcaaagaaggcaaacatgaggttggtgccttgggggtcaggtatgaacttcctcctgagcaggaagcggcgggccaggagctgggcatctggcaactgcttcttccctttggttcccatgggtgtggggcaatctttaggcacagagggcagaatacgagtgtaatagctcacgttggagaaagactcccagctgatgtagtcatgtgctgagttgtaggtggggggactggggataaggttggagcgcactgtgagtaccaggcgcatgagcatctctcggatgaaggtggcattgacaaactcccagaaccagcgcccgtgagtgagcaggaagtgggtgaaagaggggctgggccgcagtgaattccggagccaggtccacaggccagggatggtgcagttggggccggaatagcccgtgcgggtgcagtcacactggtagcggtcaaggccgaagcggacacagatgccctggtgctggcatggatagtaacaacagggattcactggcgtgggcgcccctgggtccgcgagcaggacggggagcggcgggagcaggagcaggaacagcaagaaccggagcaagagactccggctcatggcgcggctgctggggtgcgggacgcagagtgcaggctcctgtgcgtgcgcccctcgtgccgaattcggcgcgccgtcgacttcatactctctccccct

SEQ ID NO: 150949 - DNA, 1112 bp, Homo Sapiens
ggacagggaggctggccggaggttcctgcagagggagcgtcaaggccctgtgctgctgtccctgggggccagaggggttgcccagcatgcccactggcaggagagagggaactgacccacttgctcctaccagcttctgaaggctccaaagtccggaggtgcagaaagccaggaccaagagacaggcagctcaccagggtggacaaatcgccagagatgtggtgcattgtcctgttttcacttttggcatgggtttatgctgagcctaccatgtatggggagatcctgtcccctaactatcctcaggcatatcccagtgaggtagagaaatcttgggacatagaagttcctgaagggtatgggattcacctctacttcacccatctggacattgagctgtcagagaactgtgcgtatgactcagtgcagataatctcaggagacactgaagaagggaggctctgtggacagaggagcagtaacaatccccactctccaattgtggaagagttccaagtcccatacaacaaactccaggtgatctttaagtcagacttttccaatgaagagcgttttacggggtttgctgcatactatgttgccacagacataaatgaatgcacagattttgtagatgtcccttgtagccacttctgcaacaatttcattggtggttacttctgctcctgccccccggaatatttcctccatgatgacatgaagaattgcggagttaattgcagtggggatgtattcactgcactgattggggagattgcaagtcccaattatcccaaaccatatccagagaactcaaggtgtgaataccagatccggttggagaaagggttccaagtggtggtgaccttgcggagagaagattttgatgtggaagcagctgactcagcgggaaactgccttgacagtttagtttttgttgcaggagatcggcaatttggtccttactgtggtcatggattccctgggcctctaaatattgaaaccaagagtaatgctcttgatatcatcttccaaactgatctaacagggcaaaaaaagggctggaaacttcgctatcatggagatccaatgccctgccctaaggaagacac

SEQ ID NO: 150950 - DNA, 840 bp, Homo Sapiens
  misc_feature (59)..(59): n is a, c, g, or t
  misc_feature (73)..(73): n is a, c, g, or t
  misc_feature (118)..(118): n is a, c, g, or t
cccactgcaataactcgcaaatcttcatgtcatcatgagaaaatatcgggggggcagangcagaagtacccanccatgaaatgttgcagaagtggctacaagggacatctacaaatcntgtgcattcatttatgtctgtggcaacatagtatgcagcaaaccccgtaaaatgctcttcattggaaaagtctgacttaaagatcacctggagtttgttgtatgggacttggaactcttccacaattggagagtggggattgttagtgctcctctgtccacagagcctcccttcttcagtgtctcctgagattatctgcactgagtcatacgcacagttctctgacagctcaatgtccagatgggtgaagtagaggtgaatcccatacccttcaggaacttctatgtcccaagatttctctacctcactgggatatgcctgaggatagttaggggacaggatctccccatacatggtaggctcagcataaacccatgccaaaagtgaaaacaggacaatgcaccacatctctggcgatttgtccaccctggtgagctgcctgtctcttggtcctggctttctgcacctccggactttggagcctaaggggtggcaggcctggctgtatttgtctgacaaacacaagcaccttctttggtggtgcggcgtcacctggggctcagtgtcaccttcagaagctggtaggagcaagtgggtcagttccctctctcctgccagtgggcatgctgggcaacccctctggcccccagggacagcagcacagggccttgacgctcccctcgtgccgaattcggcgcgcctcgacttcatactctctcccc

SEQ ID NO: 150951 - DNA, 797 bp, Homo Sapiens
  misc_feature (674)..(674): n is a, c, g, or t
  misc_feature (762)..(762): n is a, c, g, or t
cttgtttgagagagtatgaagtcgcggcgcgccgaattcggcacgaggggttcctgcagagggagcgtcaaggccctgtgctgctgtccctgggggccagaggggttgcccagcatgcccactggcaggagagagggaactgacccacttgctcctaccagcttctgaaggtgacactgagccccaggtgacgccgcaccaccaaagaaggtgcttgtgtttgtcagacaaatacagccaggcctgccaccccttaggctccaaagtccggaggtgcagaaagccaggaccaagagacaggcagctcaccagggtggacaaatcgccagagatgtggtgcattgtcctgttttcacttttggcatgggtttatgctgagcctaccatgtatggggagatcctgtcccctaactatcctcaggcatatcccagtgaggtagagaaatcttgggacatagaagttcctgaagggtatgggattcacctctacttcacccatctggacattgagctgtcagagaactgtgcgtatgactcagtgcagataatctcaggagacactgaagaagggaggctctgtggacagaggagcagtaacaatccccactctccaattgtggaagagttcaagtcccatacaacaaactcaggtgatctttagtcagacttttccnatgaagagcgtttacgggtttgctgctactatgttgcacagacataatgatgcacagatttgtaatgtcctgtagcactctgcacaancattgtgtactctgtctgccccgaatattctcatg

SEQ ID NO: 150952 - DNA, 858 bp, Homo Sapiens
gagtatgaagtcgaggcgcgccgattcggcacgaggtgcacactcgggtagggaatcttatgaacagaaccaggacagggaggctggccggaggttcctgcagagggagcgtcaaggccctgtgctgctgtccctgggggccagaggggttgcccagcatgcccactggcaggagagagggaactgacccacttgctcctaccagcttctgaaggtgacactgagccccaggtgacgccgcaccaccaaagaaggtgcttgtgtttgtcagacaaatacagccaggcctgccaccccttaggctccaaagtccggaggtgcagaaagccaggaccaagagacaggcagctcaccagggtggacaaatcgccagagatgtggtgcattgtcctgttttcacttttggcatgggtttatgctgagcctaccatgtatggggagatcctgtcccctaactatcctcaggcatatcccagtgaggtagagaaatcttgggacatagaagttcctgaagggtatgggattcacctctacttcacccatctggacattgagctgtcagagaactgtgcgtatgactcagtgcagataatctcaggagacactgaagaagggaggctctgtggacagaggagcagtaactatccccactctccattgtggaagagttcaagtcccatacacaaactcaggtgatctttagtcagattttccatgagagcatttacgggttgctgctacatgtgcacagactaatgatgccaatttgtaatgtcctgtacactcgcacattcatgtgtactcgcctgcccgatatctcagagactaaatcgatatgatggatgtctgctatggatg

SEQ ID NO: 150953 - DNA, 839 bp, Homo Sapiens
ggggcggaagagtatgaagtcgacggcgcgccgaattcggcacgaggcaggacagggaggctggccggaggttcctgcagagggagcgtcaaggccctgtgctgctgtccctgggggccagaggggttgcccagcatgcccactggcaggagagagggaactgacccacttgctcctaccagcttctgaaggtgacactgagccccaggtgacgccgcaccaccaaagaaggtgcttgtgtttgtcagacaaatacagccaggcctgccaccccttaggctccaaagtccggaggtgcagaaagccaggaccaagagacaggcagctcaccagggtggacaaatcgccagagatgtggtgcattgtcctgttttcacttttggcatgggtttatgctgagcctaccatgtatggggagatcctgtcccctaactatcctcaggcatatcccagtgaggtagagaaatcttgggacatagaagttcctgatgggtatgggattcacctctacttcacccaatctggacattgagctgtcagagaactgtgcgtatgactcagtgcagatattctcaggagacactgaataagggaggctctgtggacagaggagcagtaacaatccccactctcaattgtggaagattccaagtcccatacaacaactccggtgatcttaagtcagactttccatgagagcgtttcggggttgctgctactagtgcccagactaatgatgccagatttgaatgtcctgtacactcgcacattcatgtgtactcgcttgcccccgaattctcagagatgagatgcgatatgctggagttttgccgtgggat

SEQ ID NO: 150954 - DNA, 799 bp, Homo Sapiens
acacccaagaaaatgtgcagaagttggctacaagggacatctacaaaatctgtgcattcatttatgtctgtggcaacatagtatgcagcaaaccccgtaaaatgctcttcattggaaaagtctgacttaaagatcacctggagtttgttgtatgggacttggaactcttccacaattggagagtggggattgttactgctcctctgtccacagagcctcccttcttcagtgtctcctgagattatctgcactgagtcatacgcacagttctctgacagctcaatgtccagatgggtgaagtagaggtgaatcccatacccttcaggaacttctatgtcccaagatttctctacctcactgggatatgcctgaggatagttaggggacaggatctccccatacatggtaggctcagcataaacccatgccaaaagtgaaaacaggacaatgcaccacatctctggcgatttgtccaccctggtgagctgcctgtctcttggtcctggctttctgcacctccggactttggagcctaaggggtggcaggcctggctgtatttgtctgacaaacacaagcaccttctttggtggtgcggcgtcacctggggctcagtgtcaccttcagaagctggtaggagcaagtgggtcagttccctctctcctgccagtgggcatgctgggcaacccctctggcccccagggacagcagcacagggccttgacgctccctctgcaggaacctccggccagcctccctgtcccctcgtgccgaattcggcgcgccgtcgacttcatactc

SEQ ID NO: 150955 - DNA, 798 bp, Homo Sapiens
  misc_feature (95)..(95): n is a, c, g, or t
ccatgaatgtgcagaagtgctacaaggacattacaaatctgtgcatcattatgtctgtggaacatagatgcagcaaccccgtaaaagctctcatnggaaaagtctgacttaaagatcacctggagtttgttgtatgggacttggaactcttccacaattggagagtggggattgttactgctcctctgtccacagagcctcccttcttcagtgtctcctgagattatctgcactgagtcatacgcacagttctctgacagctcaatgtccagatgggtgaagtagaggtgaatcccatacccttcaggaacttctatgtcccaagatttctctacctcactgggatatgcctgaggatagttaggggacaggatctccccatacatggtaggctcagcataaacccatgccaaaagtgaaaacaggacaatgcaccacatctctggcgatttgtccaccctggtgagctgcctgtctcttggtcctggctttctgcacctccggactttggagcctaaggggtggcaggcctggctgtatttgtctgacaaacacaagcaccttctttggtggtgcggcgtcacctggggctcagtgtcaccttcagaagctggtaggagcaagtgggtcagttccctctctcctgccagtgggcatgctgggcaacccctctggcccccagggacagcagcacagggccttgacgctccctctgcaggaacctccggccagcctccctgtcctggttctcctcgtgccgaattcggcgcgccgtcgacttcatactcttccccccta

SEQ ID NO: 150956 - DNA, 917 bp, Homo Sapiens
  misc_feature (181)..(181): n is a, c, g, or t
tgaagtggtatgatgcatcccacagcaggatctccatgcatactcgcatctcagtctctgagaatatcggggcagagcagagtaccacatgaaatgtgcagagtgctacaggacattacaaatcgtgcatcattatgtctgtgcaacatagtatgcagcaaccccgtaaacgctcttcatnggaaaagtctgacttaagatcacctggagtttgttgtatgggacttggaactcttccacaattggagagtggggattgttactgctcctctgtccacagagcctcccttcttcagtgtctcctgagattatctgcactgagtcatacgcacagttctctgacagctcaatgtccagatgggtgaagtagaggtgaatcccatacccttcaggaacttctatgtcccaagatttctctacctcactgggatatgcctgaggatagttaggggacaggatctccccatacatggtaggctcagcataaacccatgccaaaagtgaaaacaggacaatgcaccacatctctggcgatttgtccaccctggtgagctgcctgtctcttggtcctggctttctgcacctccggactttggagcctaaggggtggcaggcctggctgtatttgtctgacaaacacaagcaccttctttggtggtgcggcgtcacctggggctcagtgtcaccttcagaagctggtaggagcaagtgggtcagttccctctctcctgccagtgggcatgctgggcaacccctctggcccccagggacagcagcacagggccttgacgctccctctgcaggaacctccggccagcctccctgtcctggttctgttcataagattccctacccgagtgtgcatgtctcctcgtgccgaattcggcgcgccgtcgacttcatactctctcccccct

SEQ ID NO: 150957 - DNA, 947 bp, Homo Sapiens
gcgagcatcgtcgacatatcagcatcgtgtaggtcatcattttcgagtcccactgacctctcacgattgatccactgatcttgaatgttggatatggactgcattcccatcatgcgtgatcatcccactgcatactcgcaattctcagtcatcatgagaaatattccgggggcagagcagagtaccaccaatgaaattgtgcagaagtggctacaagggacatctacaaaatctgtgcattcatttatgtctgtggcaacatagtatgcagcaaaccccgtaaaatgctcttcattggaaaagtctgacttaaagatcacctggagtttgttgtatgggacttggaactcttccacaattggagagtggggattgttactgctcctctgtccacagagcctcccttcttcagtgtctcctgagattatctgcactgagtcatacgcacagttctctgacagctcaatgtccagatgggtgaagtagaggtgaatcccatacccttcaggaacttctatgtcccaagatttctctacctcactgggatatgcctgaggatagttaggggacaggatctccccatacatggtaggctcagcataaacccatgccaaaagtgaaaacaggacaatgcaccacatctctggcgatttgtccaccctggtgagctgcctgtctcttggtcctggctttctgcacctccggactttggagcctaaggggtggcaggcctggctgtatttgtctgacaaacacaagcaccttctttggtggtgcggcgtcacctggggctcagtgtcaccttcagaagctggtaggagcaagtgggtcagttccctctctcctgccagtgggcatgctgggcaacccctctggcccccagggacagcagcacaggcctcgtgccgaattcggcgcgccgtcgacttcatactctctccccccta

SEQ ID NO: 150958 - DNA, 748 bp, Homo Sapiens
ttcggggcaggcgaagtaccccatgaatgtccgatgggtcaaggactttccaatttggcatcaatagttcgggcacctagtagcagcaacccgtaatgctcctcatgggaagtctgactaaagatcactggagttgtgtatgggactggaactcttcacaatggagagtgggatttttactgctcctctgtccacagagcctcccttcttcagtgtctcctgagattatctgcactgagtcatacgcacagttctctgacagctcaatgtccagatgggtgaagtagaggtgaatcccatacccttcaggaacttctatgtcccaagatttctctacctcactgggatatgcctgaggatagttaggggacaggatctccccatacatggtaggctcagcataaacccatgccaaaagtgaaaacaggacaatgcaccacatctctggcgatttgtccaccctggtgagctgcctgtctcttggtcctggctttctgcacctccggactttggagcctaaggggtggcaggcctggctgtatttgtctgacaaacacaagcaccttctttggtggtgcggcgtcacctggggctcagtgtcaccttcagaagctggtaggagcaagtgggtcagttccctctctcctgccagtgggcatgctgggcaacccctctggcccccagggacagcagcacagggccctcgtgccgaattcggcgcgccgtcacttcatactctccccccata

SEQ ID NO: 150959 - DNA, 1656 bp, Homo Sapiens
  misc_feature (48)..(58): n is a, c, g, or t
  misc_feature (81)..(140): n is a, c, g, or t
  misc_feature (207)..(207): n is a, c, g, or t
tccagggggctttctctttctgggaaaacgggttggcccaccacaggnnnnnnnnnnntggccttctggttttttccaaannnnnnnnnnnnnnnnnnnnnnnnnnnnnnnnnnnnnnnnnnnnnnnnnnnnnnnnnnnngggggccagctttcgaaggctgggcccagggggctggggctacttccttggttgctcctttgctgancccgggagggaggtatcacttgggcccccgagaggaggagcccgctggaggaggaggcaggggtggtgctggtgagggaggggcccaggagccttgcgggggtcaggggacttagggcagcctggggtgtgccatcctggagcctagcagccataggagaatcagatgtgaacttgtggacacgatcccgcacagagccagcccgctggaatgaggaaggtccgctggcaaggggggtggactctcggttctgggctggttggcgggggctgagcaccgacagggagcgttggcagggtcggggtccagccacgtctgctctcttggtgtcagaggggcctctggtggggctctgggcagcaggggtctctttggggccagacagaagcttgttgaccacctggccctcagtgctggggagcgttggagactcctgaggctcagggctggtggtcttgggtgggctggggggtggctctgggctgcctggaacctcagctgtaaggcactgggcctcggcaggctccaatggaggctcaggagaggcaggggtgggtgaactgctgggtgaggcaggtgagctggatgtgctcccaggtggggctcgcagcaggagtgtcactgtggtcacatcctggctggtgccttcaggggtgggggttggctttgaaacctctgcctgctgttcctgttcctctcgctctggcacctcacactgttccagcctgtgtgccgctagccccttgctgtcctctcttgagccactgttgggacgcccgctgtacaacctcccagccaaggtggcagcctcaatctcctgagcccgtacacggcggatggcagctcggatcagcttgcgctcctcatactcaccagcgcttcgcaacagtgcagtcaattcctccacatcgttcatggactccagctgccctgccagccgtgccagggcagcccgctgctcagcttcccgctgctgagagtgcagccagttctccttgttgtcctgccgctcggcacggaaacgcttggatgccagggcctcctcctcgcgctccagctcctgccgctgcagttcccggatggctgagcggatgcgccgccgctctgccagatctgctgtgacctccagcagcttccgaagggctccctcatccagcccagctaaggcctcgtccgccatctcgctggcccctagctccgtcggttcctttctggtgagatccccagtgcctgtggcacctgtcaccagctcagagaattctctcagtccagcccacccgtccggcgcaggctcggcttagctctttcgggacccgacagacggattagacacgcgcaggccggaggtgccgcgacccgctgtcccaggcccgctcagcaaccctcgtgccgaattcgccacccaggcctcgctacttaggtcggtagaggcaacctggccagtaccgg

SEQ ID NO: 150960 - DNA, 1506 bp, Homo Sapiens
ccactgcggaaaggggatggattcgaagttcattgcccacggctggtcaagggctcgcaggccaaagagtccgaactctggaattcgctgctcgaggaacctcgatggacttgcgggccttctccttgtaccacacgggcgtagcccccaagcccggtggtctgtctcctggccccttggccaggccgtccagctcattgatcacgatgaggggcaccaccaggatgtacttcctgctctccagcagccgcgccagactggccaggtggtcaatgaagccgttggtgtctggtacgaggaacaaaggtctgatttcgagctccatctgcctcatctgactgtggtcctccaggacagcctggatcttttcctggcgacgctgctgctcagctatcttcctggccagagccagcttcttggcccgaagctccctgatgtcatcctcgcctccgctgccttcagcctctgaatcttcctcaaagtcttcaatcaccacatcctcctcctcatcttccagtcgtgttccctcttggcttcccatttcctttcccatggtgtctgggacgggtgccactgacacatactttccacccttgaatgccagcagaggctcttcttgtccacaaagggcttccagaaaatacttcagcactgtgacccttttgcagtcagctgcaataaccttatccgaggttttctccacgtagcaggggtcctgaggggcagccagcaaggggacaaagcccgagagaagccgatcctcttccaggataagaagggtgaggtcatcatccgggtccttgtacagtggcacctcagactgattcactgcagtcagtatgttacagaaatcagccagcgtcgaccatacatccacagcaacatgcgagggcagatccagggatgtgggaggaggattccaggtgtccgggtagccgagcatccaatctgaccagactttgacactggggagcagctccttcaggtccgggacaaaggaagacaccttgatgtcgtcttggtcatcctggtcctcaggagaggacagctgagctttggcggactccttaagtaagcaggtgcagcggcggaccagtagagaaaacatggccaagcccagagctgcggcttgttcctggatcacagagcggcactcctccgagaagcagtctttcagctgggagttgtgtactgcaaacatattgatggtcataagctgcagcatgcgggtacttccaatgggagaggggctgtgctgcagtaacacctggaactccttgaggaccttctcagccactgcagggaatgtctccatcccaatccgggtaaacagcttcccatgggcatggagaaaactgaggatgaaccttttgttcagatcactgggactcaggctgcccagcccattctcttgctcagaatccttcccagactcagtgccctgggaagaccgtggatgggatggacctcgtgccgaattcggcgcgccgtcgactttcatactct

SEQ ID NO: 150961 - DNA, 899 bp, Homo Sapiens
tctctaattactggagcttcactctaacgcaccttatcctttacagcggtaacagcgctcctggcagccaggccaagaccgattgtagaaatagttttcttcacactggtcacagcgatttcccacaaagccttctctgcattcacagcgaccatcatctttgcactgaagtgaaagagatccctcaggatgacagtcacagggtttgcagccttcaggtccaaacccaaagtggttgacctcacagcgctcacagtgctgaccagtgatgccgggctggcactcacactggccggtgcggatgtcacactgcccattggtggagcccaaggcatggcagtcacacctctcacagccttgcccactctgcagattgtagaatccagggtcacaagcaccacagtcctggccagtcacgtgaggcaaacattcacactgccccgtcacggggttacagctgctctgctgcttcatggtcccatacagattgcaattgcaggctttgcatttgtctgctggattgggagccaggggatttccaaaaaatccgtctttgcaccggtcacaatagaagccagcagtgttatagatgcacttcaggcattctcccgtcaagcgattgcaatttccaactgcattgggatcgatgttgtcactgcactggcacaggcggcaaagtctcacagggccgtttctacccagggggtctccaaagtagccatcatcacagagctcacatctcttaccagtggtgccagtaggacagttggtgcacaccacctcctttgtcttgggaacaacagcacaacttgaacctccaggacacggacagggttggcaatcggaggaggtgcctgcagttgaatctccagtagtacccagtcactgcacttctcaca

SEQ ID NO: 150962 - DNA, 1071 bp, Homo Sapiens
tcacagggtgtcaggcttgaggtggagtcaggtatgcactgaaatccatccccataatatccgggttgacaacggcaggagaaggaaccaggagtattgtagcaggtagctgcagggtgacatctgttttctgagcattcatctacatcagtgcactggtgcccatcgccggcataaccaggcaggcaggcacagctgaacgtgctgcctccatggtgaacacaccgggcctgcccagcaggagcacaggtatgactgccatcctcacaggggttggcaggtggggtgatcaagatgcaagtatgccggtcatctgcaaactcataaccactccggcactcacacctgtagcttccaggcaagttgatacatacagagttggggccacagcgatgaaagccagttgcacattcattttcatccacacagttccgtccatctccctggtacccagatgcgcactcacaggtgtaatctacacctgtccctggatggcaccgtgctgttgtgtcacacatgtggctcccatcatagcaaggattcaccggagtggggtctgaatcttctttgaccgggccaatttgattggtcacagcaaatctaagcactctttcttcgtcattatacaaggcaaagacccggtccacgttcagctgctgggtggtggggaaggacgggtgtctgggggcgtgcctgcacacctggtaagtgatgttctggtggatgcggtaggaccatgtttggttgattgcaccaaaagtcagagagtagtctctggaacttgtagaggtcacagtggagtcggagtagtggtacagctccttgtagggagagatgtgggctgtgaaatttgctgggacgtaaggcacctggccttgaatgttggtcttaatgctcaggtagttctctgggtcaagtccctcagcagtttgagtgatacgaaccgtctcctctcccgggtagaatgtaacttccatgtcatgggtaaaggcagcacctgcgaggctgaagccgttctcagagccaggttttccctcgtgccgaattcggcgcgccgtcacttcatactct

SEQ ID NO: 150963 - DNA, 867 bp, Homo Sapiens
  misc_feature (26)..(26): n is a, c, g, or t
  misc_feature (75)..(75): n is a, c, g, or t
cagggaggagcaccgtggtgctgccnacagagttcactgcacggatgaacagcgttgcgtgttttcggagtattntacaaacaccaacagcagcttcagggctgtcttcaccaccaagcgggacaggctggcacacaatgtgtacagccactgaatagtgtcactgtgggccaccaccccccagcattccatccacaaagagcatcagctggccgagcgctctaaggatgtagctctggtagttgtggtcggcagcagcacccacacggatcaggcagctcagcccctctgaatgcacaaattcaggcaccaggtctttgtcctcctggaagatctgcttcagtgagaagagggagcggcggagctcaggaccactggagctatacagcttttccaagatagcgttgaccctcacagagagctgggtccgaaggatcagcgtgggcttccgccctttgctgatctcttcatagaagccctccagcatctcccgctgctcttccagggacagctcggtgtccaggtagtatccggagggagacacttgcagagcacaatcctccaacttgagcggcgctcccagcaggcggtgcaccgcgggtatctgcgcgcccaagggcagcgccccgtccaggctgcaggtgggggcccggcgcggctccggaaagttggcacatgcgaaggggtcggtgtcttccaggtactgcaccctcacggtcaccactgataccggctctccgtccccgcggtcttccccgcccgccatggctctgcggccggctcacgcagcgcgcctccgagtcccggccccagtgcagcttctaccctcgtgccgaatcggcgcgcctcgacttcatactcttcgcc

SEQ ID NO: 150964 - DNA, 812 bp, Homo Sapiens
tggagcccttctggaaagctagcacccacgatgtctattttgaactccaccttcttctggttctgcaagacagtgcaatgtccaggtgccactatcctggagctccagctgagacacggagagggtcttccccccctgtatgtttttaccccttggactcctacattgcactgaggggctactaccaggggggctctccaaggtcagggtcaggctctgcccctgaagcaggtgggtgtcagagttggcagtcaatccgaacactagcaattgcacctcctccttctggtcctccacttcacagatgtaagtatctgagtcttctatcttaagattcttgatgatcaggggaaagtttccttggtcccaaaggcttcttcttgagtcagcgcgatcattcagcttggatggacctttagttaagaaggagccctgatttcccagaatctttatctggttggagtttttccagtggaattgtatgctcttcttctgggaagctgtacaggtcagttccactgtatccccttttttgcccagcaccactttctttccctgagtggctgctgggaggagcgccagttgcagcaccagaagcaagtgcctaaaagggactccccggttcattgtggccttgccgagggaggcaggggcctgagccagtagggacctgagcccacagaaatggcagggcctctgggcttgcgtctttcttgcccgctgcttctcaaacaggcgtatctgtgtgaggacttggagctctgcaaccaggagcccagtggggagggtgctttgttccttctgcagagtcg

SEQ ID NO: 150965 - DNA, 725 bp, Homo Sapiens
  misc_feature (185)..(185): n is a, c, g, or t
  misc_feature (274)..(274): n is a, c, g, or t
tgaaagaccggttttatatccttttgtttcaaacaggatcggtccattttggatccgggacaaggaggtttcccccttagtttacctggatcttctgcagtagggtatacaggggtttccagttaggtcaggttgccctgagcagtgggtcaaattgcagcatccgacatagcaatgcactctcnttctgtctccaatcacagagtaagtattgagtttctatttaagattctgatgatcagggaaagtttcttggttccaaagggcttcttcntgagttcagcgcgatcattcagctggatgggacctttagttaagaaggagccctgatttcccagaatctttatctggttggagtttttccagtggaattgtatgctcttcttctgggaagctgtacaggtcagttccactgtatccccttttttgcccagcaccactttctttccctgagtggctgctgggaggagcgccagttgcagcaccagaagcaagtgcctaaaagggactccccggttcattgtggccttgccgagggaggcaggggcctgagccagtagggacctgagcccacagaaatggcagggcctctgggcttgcgtctttcttgcccgctgcttctcaaacaggcgtatctgtgtgaggacttggagctctgcaaccaggagcccagtggggagggtgcttgttccctcgtgccgaattcggcgcgcctcgacttcatc

SEQ ID NO: 150966 - DNA, 862 bp, Homo Sapiens
  misc_feature (689)..(689): n is a, c, g, or t
cttgtgttgaaagagtatgaagtcgacggcgcgccgaattcggcacgaggagaaggaacaaagcaccctccccactgggctcctggttgcagagctccaagtcctcacacagatacgcctgtttgagaagcagcgggcaagaaagacgcaagcccagaggccctgccatttctgtgggctcaggtccctactggctcaggcccctgcctccctcggcaaggccacaatgaaccggggagtcccttttaggcacttgcttctggtgctgcaactggcgctcctcccagcagccactcagggaaagaaagtggtgctgggcaaaaaaggggatacagtggaactgacctgtacagcttcccagaagaagagcatacaattccactggaaaaactccaaccagataaagattctgggaaatcagggctccttcttaactaaaggtccatccaagctgaatgatcgcgctgactcaagaagaagcctttgggaccaaggaaactttcccctgatcatcaagaatcttaagatagaagactcagatacttacatctgtgaagtggaggaccagaaggaggaggtgcaattgctagtgttcggattgactgccaactctgacaccacctgcttcagggcagagcctgaccctgaccttggagagcccccctggtagtacccctcagtgcatgtangagtccaggggtaaaacaacagggggggagacctctcgtgtctcgctgagctccagatatgcacttgactgcctgtctgcaaacagagaagtgagtcaaaagactgtgtgcacttcagagctcactattataaagaggacagtgatccttcctcctcgtgagcgagcagcatg

SEQ ID NO: 150967 - DNA, 842 bp, Homo Sapiens
  misc_feature (141)..(141): n is a, c, g, or t
ttagcatgaaggaatcacttcccttcttatagttagtgagctttgaaagtacacccgtgttatttactcacttcttggtttgcagacaggcagtccagtgcatatcttgagtccagtgagacacgagagggcttccccccntgtatgttttacccctggactcttacattgcactgaggggctactaccaggggggctctccaaggtcagggtcaggctctgcccttgaagcaggtgggtgtcagagttggcagtcaatccgaacactagcaattgcacctcctccttctggtcctccacttcacagatgtaagtatctgagtcttctatcttaagattcttgatgatcaggggaaagtttccttggtcccaaaggcttcttcttgagtcagcgcgatcattcagcttggatggacctttagttaagaaggagccctgatttcccagaatctttatctggttggagtttttccagtggaattgtatgctcttcttctgggaagctgtacaggtcagttccactgtatccccttttttgcccagcaccactttctttccctgagtggctgctgggaggagcgccagttgcagcaccagaagcaagtgcctaaaagggactccccggttcattgtggccttgccgagggaggcaggggcctgagccagtagggacctgagcccacagaaatggcagggcctctgggcttgcgtctttcttgcccgctgcttctcaaacaggcgtatctgtgtgaggacttggagctctgcaaccaggagcccagtggggagggtgctcctcgtgccgaattcggcgcgccgtcgacttcatactctttcgcccc

SEQ ID NO: 150968 - DNA, 1193 bp, Homo Sapiens
caggttgtctgagatctccatggcatagatcttgaggcctcgtgagctctttgcccagcctgtaaatgcgggtgatggtggggcactcctcgttcaccaccttcatgagctggcgcatgtcccttgtagctgtggtgccggaaatccaggtcatcggtggccaccacctcattctgtgcgtagtagctgtagacaggggccacagagcaccccagcacctccaggcgcatgcacaggctgccattccaggtgagtgggtagatgcggatgaaacgagccaccaccggctctgggagctcactcagcacgggtgtgtccttgtccacgttcccatgaaaggtcatttcctcatagccgttggtgtacatcacccatgtctggctgtcattgctgaagcccacgaagaaggtggtcacaaaatcgtcatggatgctggagtctctgccctgggtgatgacgcctgtgaaccgggtagtcctcctggtgtccacctctatccactgggtcctggcatcgtcctcggcacaccacgcaccatcatagtagtcgtcctcagtggcaccggtctgcatgttgagccggccgcgctgtgcccccaggccgtggcgcagcatggaggaggctcggatctggttgtcctcaatacggtgtgactccatcccaatggggggacacttgactttctccgtaggcgtccactcctcctccaactcctcgccctttcggggctctttgtggtccttgcccttctccactgcccacttgtcggtctcctccttggggctgctgtcctcctttttgggtttcttcagctcctccttctcttcgtctgtctggcgctcagcatcgggcttctggggcggaggaggcccaaagtaatagtccatgtcatcgtagttggggatcacgtaaccatcaccatagtcagggggcagcgggggcagcagaggcttcacaggaggctcaatcctctcctccggggctggggccggggccttctcctcagggggctctggccagacccgctcgggcctcctccttctgcttgggggtggcctgggttgcttctggcgccgaatgtactcaaagtcctcatagtcctccctctcgatctggtcattgtagtccagtgtgggttgctcggtctcctcctccggctcaggctggtgctcccgtgcctccacatgggtctc

SEQ ID NO: 150969 - DNA, 653 bp, Homo Sapiens
gggcgccgctttcgcgcggcggcggcggctgcggcggggtctttctttgcttaaatacctcgttggccagaagcgctggtaccgggggcgggttgggtcgggtcgggcagtgctgcacacctgggtttccttgcctagagctgtgtgttcggggtcctttggtccagtcggatgctgcggagcggcgggggttgcctgcgctgtccgcccgggcatcctcccggtgatggaagctgccgccgccgccgctgcgtggtcgcgctgtgccccatccaccgctgcctgagaggtgggaaatttctccgcacggaggctgaaagctagatgggctgcttcgctatgcctggagccgaatcccaattaagccgcccccatctattacctcttactgtgattcattctcctgagcgagacatgaatctgcagtcaataaaattcctatgatacttcactggagtctgtaggcttctaggttccgtgatatgatttacgtgtcttttgactcttaaaggttttatttctaattcttagttgcctactgctttttactttttgagatatatactgcttattcacaatacctttgaatggcttgtatattatcttatttggttttgtaatattattttttcttaagatgaaattccttcgta

SEQ ID NO: 150970 - DNA, 891 bp, Homo Sapiens
  misc_feature (12)..(12): n is a, c, g, or t
cgccatcttccntagtggggagctacgacactcttctttgcctttacgtgtccaggactaagcctgtatgtgtcacctgcagtgcccatctacaatgcaattatgtttctctttgtgttggccaacttcagcatggccaccttcatggacccagggattttccctcgagctgaggaggatgaggacaaggaagatgatttccgagctcccctttacaaaacagtggagataaagggcatccaggtgcgcatgaaatggtgtgccacctgccgcttttaccgtccccctcgatgttcccactgcagtgtctgtgacaactgtgtggaggaatttgatcatcactgcccctgggtgaataactgtattggtcgccggaactaccgttattttttccttttcctcctttccctgacagcccacattatgggtgtgtttggctttggcctcctttatgtcctctaccacatagaggaactctcaggggtccgcacggctgtcacaatggcagtaatgtgtgtggctggcttattcttcatccctgtagctggcctcacgggatttcacgtggttctggtggccaggggacgcacaaccaatgaacaggttacgggtaaattccggggaggtgtgaaccccttcaccaatggctgctgtaacaatgtcagccgtgttctctgcagttctccagcacccaggtatttggggagaccaaagaaagagaagacaattgtaatcagacctcccttccttcgaccagaagtttcagatgggcagataactgtgaagatcatggataatggcatccagggagagctgaggagaacaaagtctaagggaagcctggagataacagagagccagtctgcagatgctgaacctccacctcctcct

SEQ ID NO: 150971 - DNA, 1763 bp, Homo Sapiens
  misc_feature (1741)..(1741): n is a, c, g, or t
gacagagtatgaagtcgacggcgcgccgaattcggcacgaggattgttgcaggtggggaatggatgagaatatttgttttgggtgatcagaactgagactcctattgtggattagtaacatgcctcctcctagaacaagggagggcagggatcgccgagaccaccactgggctcccagcgaggaagaggccttggagaaatgggactggaattgtccagagacgcgtcgcctcttggaagatgccttcttccgtgaagaggattacatccgtcagggttctgaggaatgtcagaagttttggaccttctttgaacgcctgcagagattccagaatctcaagacctccaggaaggaggagaaagaccctggacagcccaagcacagcatcccagcgctggccgacctacctcgcacttacgacccacgttaccgcatcaacctctctgttcttggccctgccacgcggggctctcagggactgggcaggcacttgcccgcggagagagtggctgagttccgccgagccctgttgcactacctggactttggccagaagcaggcatttgggcgtctggccaagctgcagcgtgagcgggcagccctccccatcgcccagtatgggaaccgcatcctgcagacgctgaaggagcaccaggtggtggtagtggccggtgacaccggctgtggcaagtccactcaggtgccccagtacctgctggctgctggcttcagtcatgtggcgtgcacccagccccggcggatcgcctgcatctcactggccaagcgtgtgggctttgagagcctcagtcagtatggctcacaggtcggctaccagatccgctttgagagcacacgttcggcggccaccaagattgtattcctgacagtggggctgctcctgcgacaaatccagcgggaacccagcctgccccagtatgaggtcctgattgtggatgaagtccatgagcggcatctccacaacgatttcctcctgggcgtcctccagcgcctgttgcccacgcggcctgacctcaaggtcatcctcatgtcggccaccatcaacatctcgctcttctccagctatttcagcaatgcccctgtggtacaggtgccctgggaggctgttccccatcacggttgtgtaccagccgcaggaggcggagccgaccacgtccaagtcagagaagctggacccgcggcctttcctgagggtgctggagtccattgaccacaagtacccgcctgaggagcggggtgacctcctcgtcttcctcagcggcatggcggagatcagcgccgtgctggaggctgcccagacctatgccagccacacccagcgctgggtggtactgccactgcacagcgccctgtctgtggccgaccaggacaaggtatttgatgtggcaccccctggagtccggaaatgcatcctctccaccaacattgctgagacctcagtcaccattgacgggatccgcttcgtagtagattccggaaaggtgaaggagatgagctacgatccgcaggccaagctgcaacggctgcaggagttctggattagtcaggccagcgcagagcagcggaagggccgggcgggccgcacgggccccggagtctgcttccgcctctatgccgaatcggactatgatgccttcgccccctaccccgtcccagaaattcggagggtggccctggactcgttggtgctgcagatgaagagcatgagtgtgggggaccccngaccttccccttcatcgagccc

SEQ ID NO: 150972 - DNA, 845 bp, Homo Sapiens
ccggaagttaaggcgttcgcggcgtgtgaatccaggcctgaaaacccagaatgaacttgtgtccatcccagagatcactgcagatgtcatgaggtaccctttgtgtcaccagctcaagcaggcctctggccactttatcatctgtggtggtcctgtgccgtgaccaggaggaaaaattagctctttgaagagaaagtagttctctattgcaggcactggcctcttaaattgttgcaggtggggaatggatgagaatatttgttttgggtgatcagaactgagactcctattgtggattagtaacatgcctcctcctagaacaagggagggcagggatcgccgagaccaccaccgggctcccagcgaggaagaggccttggagaaatgggactggaattgtccagagacgcgtcgcctcttggaagatgccttcttccgtgaagaggattacatccgtcagggttctgaggaatgtcagaagttttggaccttctttgaacgcctgcagagattccagaatctcaagacctccaggaaggaggagaaagaccctggacagcccaagcacagcatcccagcgctggccgacctacctcgcacttacgacccacgttaccgcatcaacctctctgttcttggccctgccacgcggggctctcagggactgggcaggcacttgcccgcggagagagtggctgagttccgccgagccctgttgcactacctggactttgggccagaagcaggcatttgggcgtctggccaagctgcagcgtgagcgggcagccttcccatcgccagtatgggaaccggatcctgcagacgctgaaggagcccaagtggtg

SEQ ID NO: 150973 - DNA, 694 bp, Homo Sapiens
  misc_feature (75)..(75): n is a, c, g, or t
  misc_feature (112)..(112): n is a, c, g, or t
catcatgttggtagccgtccggttgcggcagatgaggtcggggtcgggcccctcgtcgccgcccgagccgttggntgcgcagacgtcgcggccctcggcgccccagcggatntcgcccgcatcgtacttgtactggtgggtcaggaactcgggcagcgccgacagcagcgcgcccagcgccatgacgatgccgccgcagccgatcaggcgcggccggtgcccgcgtgccccgaagtagctcacgaagaggatgagcgccaggttcccgatctcgaagctgctagcgatcacacccacgtcagcgctttgcaggttgaacctacgctccagggtggtcaggacgctcaccaggtaggggcccaccgtgccctgcgccagcatcagggcgcactcggacaccaggaagatcttgatgttggaaaagcaggacaccttctttttctttttcttgttcctctgcgcctcgtccggttccccttgcccgccggccgcgcctgctctcaccccctcagccccagccccaaggcctgggcctgggccgccgctgcgcgccctcgccgagccgctcctcgctgccggtgcgcccccggggaggcacgggaggcgggcttgggatgcggagggcggcccggcggccgaggctgggagggtccggctgccgggagaactggggagacctcggagtccttgcgga

SEQ ID NO: 150974 - DNA, 1269 bp, Homo Sapiens
  misc_feature (848)..(908): n is a, c, g, or t
  misc_feature (927)..(935): n is a, c, g, or t
  misc_feature (957)..(966): n is a, c, g, or t
  misc_feature (1074)..(1105): n is a, c, g, or t
  misc_feature (1111)..(1111): n is a, c, g, or t
  misc_feature (1187)..(1198): n is a, c, g, or t
tttctacccccctggaaaaataaaacaagctggtaccggtccggaattcccgggatgtcgccctttggccgggcgagctaatcgtcggctcaatgacgacgaggcccgacccttcccgtccaggacctacagagacaaccgaaggagagcccaaggcggcttctttgctgtcgccgcccccactgaagcaagagctccccggctccactgaaacaccagctcatttaagctttccccaacgaccggccctccgggacgatacctaacaacgaccggcgcccgcatctggaataggctggcgagatacttagtatccgagggctcgggacttggcgccatcgaggtcatggggacccaggatccagggaacatgggaaccggcgtcccagcctcggagcagataagctgtgccaaagaggatccacaagtttattgccctgaagagactggcggcaccaaggatgtgcaggttacagactgtaagagtcccgaagacagccgacccccaaaagagacggactgctgcaatccggaggactctgggcagctgatggtttcctatgagggtaaagctatgggctaccaggtgcctccctttggctggcgcatctgtctggctcatgagtttaccgagaagaggaaacccttttcagctaacaacgttttccctaagcaacatggataaagcaatataggcattgggcgtttgagggtcccctggcactgggtggctacccgggaaagaaccccctggtgggaaacaaaaaagaacccccctttttcacttcgcaaccttggaatccaaatttcccggggcacctccccttaaaggaaacggaaattttatnnnnnnnnnnnnnnnnnnnnnnnnnnnnnnnnnnnnnnnnnnnnnnnnnnnnnnnnnnnnntcaccccttaaattttatnnnnnnnnnactggggggccccctgtggggnnnnnnnnnnggggcccaacacacaacctttttcccccctgggggacccacccactttttgggcgggggggcaacaaaggcccccctttttttaataatacaccccacccccggtgtnnnnnnnnnnnnnnnnnnnnnnnnnnnnnnnntctccnaaagaccaaaaaccaccgcgggggggtaaccccaaccgccgatccacctataactgttgaacccggggtgggaaannnnnnnnnnnnttctttctcacccccacacctggggcggggtggtcgcccccccattatgtgcaagcacccctcccaggggg

SEQ ID NO: 150975 - DNA, 1140 bp, Homo Sapiens
  misc_feature (14)..(14): n is a, c, g, or t
aggcgtgcgagccntgtgagaagacacgggagcccagcaggcagggcgccgaggagaagcgttccgggttctccacctgcacgcggtagccatggttggtgacgctggtgaggtcgtcagacacggagagccagccagctgcggtgttggggtcaaagctgaagggtacagattccacagatgcaagcatcttcttccagacgcggtactgcagggagcccaggtacttgcaggcattgataagcctgcggggctgggctggttctggttccctggtgcagaagagtcggcgttttcggctcttgtgtttcatgagaaaagaaacgtcgtcctccttcatctccatctgcagccgctcggatgtcatgtgcccagcacttccgtctcctctgtgagctgtttcatcttcttgtcggccagaaagttgcttctgctttgtctcttcggccatggcatccagaatggcctgctcctccactctcaagaactcgcgaagcttatcaaactcctgccggatccggccttccagccatgcagcctccacctgattgtgcttggcgatggcctcataggagcgccgcatggcccagaaggccttggccttctcccgcagtgcatgctccatgttcctgcacttggcccgaaagtcgtgggcagtgtccttcaccggctgcacgcggtgcccctggtgtcgggggtcggcctggcaggagcagcacagcagctccttgtcctcgaggcagaagaggctgagctgtccgcggtgcaggcggcagacacgcgagaagcggtagctggtccagcgcgcgccctcggcctcctcgcgcagcagcttctccaccaggttgttgagggtgtggttggtgcgcaggtcggcgggtgacgcgcggtctttgcacactgggcaggtgggcgacacctgcacctcccagcagcggctcacgcacccgcggcagaagttgtggccgcagcgcagagtgactgcgtcgcggaaggggtcgtagcagacggcgcagagcaactcctccttgaaggagcgggaaggcccgggggacacgtcgggactccgctccatggcacgagcagccggctcgggcgccccctcgtgccgaaatcgccacccaggcctcgcttcctatg

SEQ ID NO: 150976 - DNA, 1495 bp, Homo Sapiens
  misc_feature (45)..(45): n is a, c, g, or t
ttccattagggccaactccagactctgagccggctgccttgtcantgcgcccaacagcttcagcgaccctggggcatcagccacatctcaggcgtctctgccggcccctgggctgagggttgcaccgcctgcgtcaccaggtagccctggacatgttcgtcatagaaatacaggtgcacgctggacggcaagcccctgggctcaaacctgcagagtggggtgcccattgggggtgcagcagtggcggcatggtgcaggctgaggcgggcgaaggctgtgtaagcagtgagcatgacatcactgagcccactggggccatcagccgcgtcgtaggtgttctcccagtaggccttgagggctggcgtgccgggggggtagctgccgtacaggtggaagtccaggatttccagcacctcctggttcacagtcgactcgaacttccgggcgaagaaggtgggtctggagacttgctgcagccggaggaagtcctgtggcttgaagtcgttgggggagcagccacaccagtccacaatgtgcttgtactggcacttgcagcccagcttgcggttccagttggtgacccgcaggttgttgtccacgagggtctcacaggccaggctgttctccagcaccgtgtggaagaaggactcggctgggagcagtgtgtatgtgtagaactggcgcagctgggccacaagcaggtcatctgtgtacaccacatactccacaaagctgcgtgtcagcacgaaccagtcagaaccgccatccaccacaatgcctgctgggatctgccgctcgcccaggcgccacatgtgtgagtggcattcatggaagagccggtccaggccctgtttcttgatgaacctggagttgtcccggccatgtgacttgaggaaattcttgtcccggttcttggataggaatgccaccagttcttcattgttcctggttggatagtcagtggcactgaggttgatgaagaagtcccaggcccagccaggcacttttagcaggtcccgcatgttcggcaggtacatcctcaggaggctggccccgccccagatggtaaccatgcgccagggcgtcacccgcacgttatcatagccctgggccagctccaccacctcccggtgcaggtagtcggaacgcttgtccacatggatgtaaaagaagtgctgctcgtgataaacggccttgaggagacgcttcagctggcggatggcgcggccgtgaaccaccagcatgtaggcgattcgcaccggggggccatccatgggctgctgggcttggctctcatcccactggatgccggggctcatcttcccagtcagctgacagtgccggggcacagccttgggcatgaggctcccagcctggtgcaggcacaccacattggcgatctcctgctggcactgcttggtgctggcccgggccagtgcagacagtgcgtcctcgtgccgaattcggcgcgcctcgacttcatactctctccccc

SEQ ID NO: 150977 - DNA, 849 bp, Homo Sapiens
  misc_feature (25)..(25): n is a, c, g, or t
cgggggccagtttccacccaccctnccggtggcaagtagtcggaacgcttgtcccacatggatgtaaaagaagtgctgctcgtgataaacggccttgaggagacgcttcagctggcggatggcgcggccgtgaaccaccagcatgtaggcgattcgcaccggggggccatccatgggctgctgggcttggctctcatcccactggatgccggggctcatcttcccagtcagctgacagtgccggggcacagccttgggcatgaggctcccagcctggtgcaggcacaccacattggcgatctcctgctggcactgcttggtgctggcccgggccagtgcagacagtgcgtccttgcccacgatctcgcacttgggggtgaagccattgtccgtgggctggggggcgccctccacgctccctgtatctccgtgtggtgggaagccagctgcccctaccagcgcctccccagctgctgccccactcaggttctggcggcctggggcttccgggggtggggcaggtgggacccgccggctggctctctgccggctggttactgcccgtaccaccttggccacgggcactcctgggctctcagcacggccccgccagcgcccatgccttctgcctgtgctgccccgtcgccctgctgaactgtctgtgtccttggaaccctcgccagggtccagtggccgtggcttcctctgccttcctttctcgcccgcctcgtcctcctccaggccgctgaagctccacactaccaggccctgcagcagcaggatggccagcgccgtggcaatcgccagcttgtagcgccgcaccagcttgtgcactcgcgcgctcgccac

SEQ ID NO: 150978 - DNA, 1694 bp, Homo Sapiens
  misc_feature (443)..(443): n is a, c, g, or t
gtgtgtccgctggtctttgctatcctttatatttttgtactactatgtgtgcgtgtagtgtaggggtttattataggtttctcttgttgcttaatgtctgattgcttgttcgcggttgtgggggagtgtctgattttaagttgaaagaggtgatttcgctgcaggaagggatggggcgtggtatttgcatgttctgttttggggtgaaggcagggccatccctgtggggagggaagttggccaagggtccgtttgaaagcggtggacacctgaggggtatttatttccaggaggagtcacattcaccaggcatggcactgcaacccagggtctccccagtggagctcttggcactcagaacaagtccgccctccaaagccggcacggcagtggcactgccctgtgaactcgttgcaggtggggcctctggcccggcttgggtnggcaggcacaaggctggcaaccatggccactggtgaggttccagaagttgggggcacagcggtcacagctagggccctggacattggggaggcatgggcactgcccactgcttggatcacagtggcactggtcaggagatgggcactgctgcggatttgtgcccagcaggttgcatgtgcagcggtgacagctctgtcgggcagcctgcccatggaagccaggcttgcagtgggcacagtgtggaccctctgtgtggtgtaaacagcgcaggcattgccccgtgtgggggtcacaggcatcaggatccattgggtcaatgttcccactgcactcacacagttggcaccggccacctggccttgatgggtccccaaagtgcccaggggcacaagcttcacatcgcagccccgtatagcctgcccggcagtggcacacaatctgctgggaatattcatcctggtggcaagaagtagcaaagtgccgttggctcccagggccttcaggacagggacagggccggcactggcccccatatggcagccgtgggtccccgtggaaaccagcaatgcacctttcacagtgctcaccccctgtgtgatcacggcagcccaggcaagcgcctgtgtgggtgttgcactcatctgcatgcccattgcagacacatggccggcagctagggaatccccactggccacgctggcagcggtcacagcgaagcccaaaggcaccagttcgacagagacattgcccactggtcttttcacagagactgctgagtgccccctcgtggctgcactggcaggcttgacagcctgtggggccaaagccatagtagccaggggcacagaggtcacagcggcgcccaaccactccaggcttgcacaggcactgaccaccatgagggttgcactcagaactcagtgaaccttgagggttgcactgacatggcagggcaccattgtagatgagggtggacaggctgatgaggaggggtgcgcaggcctcagagggagaagtcttgctgggcaccagaccctcctcatggcattggtagcgttcaaaggtggcctggcgctccagggcagcagcatcacccccactaaacatctctagcaccaggacacggggcagcagcaccagcgagtcaatgagcaggccaggtccagagtagggagtctcaggctgggcacttccccctgtccgtaccagcttcagatgcagcttgtaggagataccaggctcaaggcaga

SEQ ID NO: 150979 - DNA, 680 bp, Homo Sapiens
cccaagtgagatgcccgaagctgccgtaggaataaccggttaggtctggcgatggctggctgagcctggggcatcatgggtggcttctcactgggtaccaggcctcctggggcagagcaagccctgaggttgaccatcatggctggctgggtgctgactatggcatccttgatcagttcctcaattgtggagagctccacttgttcttcacctctctccctggcctgaagcttgggaagcaccgttaggctgagatctgggcgatcagtgaaggcccaggatatgagcagcccctcaccagggatttcctccaggttgacttccaactgtgttggtggcagtgtcagagtgacgtggtaggtctccatggagacggcagcgggggactgctgggtcacagagactgggaaccgcacctcctcagcagagagctggcaacgcagcaccatggtatgctcagattggtctacgcaggtcacatgactgatgctggctctgggtgggagttggggcacctcctcaaaggcgatttggatggagctcccgtttctgcaggcctgctcgttcagcgctcgcacccaagcccgctgccagttctcccggaaagacttgaaggcgaagagtgacgccaggaggccccggactcctggctcctcggcggcgccagcccgagtcgcccg

SEQ ID NO: 150980 - DNA, 1431 bp, Homo Sapiens
  misc_feature (248)..(248): n is a, c, g, or t
  misc_feature (407)..(407): n is a, c, g, or t
  misc_feature (832)..(869): n is a, c, g, or t
gaggaggcctttgggggcccgcgggggaaagcccagggagccccaggcaatttccagggagcgccccttgggccccttttaccacccagggtgttccattcagcccccaggggtttccagccagggcccagcagcacccagcgggggcccaggggggcccagggttcaccagggcacaaccctggggacctttcagagccttgggggcccctggggaccaagcttccacccttagcccccaacagccnccagggaagccaggaggaccagcggggcccggggggaccagggggcccggcagcaccagtagcaccatcatttccacgagcaccagcagggccaggggctccagggcgacctctctcaccaggcaggccacgggggcccatctgaccaggagctccatnttcaccagggctgccaggctcacccttaggaccagcaggaccagcatctcccttggcaccatccaaaccactgaaacctctgtgtcccttcattccagggaggccagctgttccgggcaatcctcgagcaccctgaggcccaggaggcccacgctcaccaggacgaccaggttttccagcttccccatcatctccattctttccagggggacctgggggacctcggggacccatgggacctgaagctccaggctcgccaggctcaccagggggaccttggaagccttggggaccaggtgcaccaggggggccagggagaccacgaggaccagagggacccatggggccaggcacggaaattcctccggttgatttctcatcatagccataagacagctggggagcaaagtttcctccgaggccannnnnnnnnnnnnnnnnnnnnnnnnnnnnnnnnnnnnnaagtccaggctgtccagggatgccatctcggccaggggggcctgcgggtccccttgggcctcgggggccagtgtctcccttgggtccctcgacgccggtggtttcttggtcggtgggtgactctgagccgtcggggcagacgggacagcactcgccctcggggacttcggcgccggggcagttcttggtctcgtcacagatcacgtcatcgcacaacaccttgccgttgtcgcagacgcagatccggcagggctcgggtttccacacgtctcggtcatggtacctgaggccgttctgtacgcaggtgattggtgggatgtcttcgtcttggccctcgacttggccttcctcttggccgtgcgtcaggagggcggtggccgctaagaggagcaggagccggaggtccacaaagctgaacatgtctagaccctagacatgtagactctttgtggctggggagggggttagcgtccgctcatgcgtggcctcacactccgcgtgcctcctgctccgaccccgaggagacctcgtgccgaattcgccacccaggcctcgctaccta

SEQ ID NO: 150981 - DNA, 974 bp, Homo Sapiens
  misc_feature (953)..(953): n is a, c, g, or t
gagagtatgaagtcgacggcgcgccgaattcggcacgagggcagtggctgaagtggcttttgcttcggcggctgcggcggctgcaacagcttcgggctcttttgttttggcggcggcgccggcgggctaggctgcgcggtgcggaccccggcgcgcggtccgggttgctggggcttttcgtaagatgcctctaatggaggagtttctgagcagcacccctggcccagtggctttgaaagggagctcaaaccagagactatttcaagccctggatatcatatcctgagggccacaggagaagagaacatggctgtgagtttggatgacgacgtgccgctcatcctgaccttggatgagggtggcagtgccccactggctccctccaacggcctgggccaagaagagctacctagcaaaaatggcggcagctatgccatccacgactcccaggcccccagtctcagctctgggggtgagagttccccctccagccccgcacacaactgggagatgaattaccaagaggcagcaatctacctccaggaaggcgagaacaacgacaagttcttcacccatcccaaggatgccaaggcgctggcggcctacctctttgcacacaatcacctcttctacctgatggagctggccacggccctgctgctgctgttgctctcccttgtgcgaggcccccgccgtccccgcactccggcttggcatctatgtccacgccaccctggagctgtttgccctgatggtggtagtgtttgaactctgcatgaagttacgctggctgggcctccacaccttcatccggcacaagcggaccatggtcaagacctcggtgctggtggtgcagtttgtcgaggccatcgtggtgttggtacggcagatgtctcatgtgcgggtgacccgagcactgcgctgcattttcctggtggactgtcggtattgcngtggcgtccggcgcaactgcg

SEQ ID NO: 150982 - DNA, 934 bp, Homo Sapiens
gcaggtccccgccctcgctgcgtttgcgcttgagcgccgataatttggtggcggcgtccggagggtgctggtttgttctcggtgaacggcgcgcggggtctctcctgagtgcgagctacgggaccttcgccatgccggggatggtactcttcggccggcgctgggccatcgccagcgacgacttggtcttcccagggttcttcgagctggtcgtgcgagtgctgtggtggattggcattctgacgttgtatctcatgcacagaggaaagctggactgtgctggtggagccttgctcagcagttacttgatcgtcctcatgattctcctggcagttgtcatatgtactgtgtcagccatcatgtgtgtcagcatgagaggaacgatttgtaaccctggaccgcggaagtctatgtctaagctgctttacatccgcctggcgctgttttttccagagatggtctgggcctctctgggggctgcctgggtggcagatggtgttcagtgcgacaggacagttgtaaacggcatcatcgcaaccgtcgtggtcagttggatcatcatcgctgccacagtggtttccattatcattgtctttgaccctcttggggggaaaatggctccatattcctctgccggccccagccacctggatagtcatgattcaagccagttacttaatggcctcaagacagcagctacaagcgtgtgggaaaccagaatcaagctcttgtgctgttgcattgggaaagacgaccatactcgggttgctttttcgagtacggcagagctttttctccacctactttttcgaacacagatctggtgcccaagcgacattgcgggggcctcgccctgcttcatcaggcaacaggacatatcaggaaacaaccaaggagctgcccaggggtctgccatgccccagggagctcccaa

SEQ ID NO: 150983 - DNA, 1121 bp, Homo Sapiens
  misc_feature (130)..(130): n is a, c, g, or t
cactctaactcctcccttgagaatctgtccgtgggcccatcagggctgtcccgagagttctcgattccatcttgctccagaattggcagcaagtactgagaaggggggtagtattccagccctgactctntgcagaggaactgcaagatggccgcagtgccggcaccacacacctcccgcggcgggtagaccatggccgaggcgtcaaggctcagcatctccagggttcgaacgtgagccagcatctgcggcaatctctggatctcgtttccactgatgttgagggtacgcaggcttcgaagctcccccacggtgtctggaagctccttcagcttgttgtctttaacattgagagtctggagctgggtcaggttcccaatggaacgtgggagctgcatcagttgattcctttccacgtttaagacctggagggcagtcagctgccccagatcgtcaggaagggctgtcagctgattatcgtggagatctagaaccttaatggttgccagactcaggaggctgcaggatttgggaagcagggaagtgaggtgattcgtgtggacgatcagcaccttcttctgcagaactttgcatgttgcaaaagctccaaatggaatctctgagagctcacatttagagatgtcgagaatgtcatctgccccagcttcttttgccaaacacatctggtactccaggcgtttccgagcctcctcactgggtttccgcttccggaagaagagcggcatccttcccttttcccagagcgatctttaggaccctggctttgcggatggagggatcccccacgttgggacccgcgggtgcacccgtagggcaggcctgatcactcgcgaggagcttggtcacgagactgcggggcacgcagacccacccggtcacggggccgggtcggagccggacgtctggtctccttcaaaggcaggtggataaaggaatatgggaaacagctagggctgggatcaccggagccacccttctcagacttctccggagcgaactacccgaaccccctttcggaatctctagcttcagcgcaccgcggtgccctgcttgccagcctcgtgccgaattcggcgcgccgtcgacttcatactctctcc

SEQ ID NO: 150984 - DNA, 654 bp, Homo Sapiens
  misc_feature (21)..(21): n is a, c, g, or t
  misc_feature (54)..(54): n is a, c, g, or t
gccagcagcacagcgtaggcnggctcatggaaggtgtagaaggagaccaggagngacataatggcggtggggcccagagtcacatcccgggaggtgcccaggaagaaatacacgaagcagcccatgaaggcagagtagaggccatactggggcgggagtccagccacttcagcataggccagcgcctggggaatggcagtgaggccaactgagaggccggcgacgaaatccatcttcagccactgcagggagtagctgggcagccacgccaggatgggcagcctcctctgcagggccgcaggggagcagcagcaggcgctcggggccatcccggggccagaggacctggcctgacccagcgccgtcaccgaagaaggcatctctacggtggggcgtaggctggcggggggtgcgggtggcagccaggagatccagcggggctccgaggttttccaactgcgcaccaaggcgggctccacccgctacggtggactgcggcgctcgagggagagtgggggggtcctccgctcctgaggccacgcctcgctcagcccccacctgtggctttcacagccctggagttctagttgcttccactcggcgatgcagcttggggtctcctggcgtcgccgcagctgggtccgcaggaatcgc

SEQ ID NO: 150985 - DNA, 846 bp, Homo Sapiens
cttacctgaagagagagcacccagaggtcctactgtttcatctggaagttgacactgcagagacgctggatgtcgagtcccgcagttctaatttccaagcgatgggaggcacagcagagtgaagctttaatgacgggtaggaaatgaagtccagcaggaccccaaacgcaggacccccatggccagctggatgcagccggacaggaaggccagcagcacagcgtaggcgggctcatggaaggtgtagaaggagaccaggagggacataatggcggtggggcccagagtcacatcccgggaggtgcccaggaagaaatacacgaagcagcccatgaaggcagagtagaggccatactggggcgggagtccagccacttcagcataggccagcgcctggggaatggcagtgaggccaactgagaggccggcgacgaaatccatcttcagccactgcagggagtagctgggcagccacgccaggatgggcagcctcctctgcagggccgcaggggagcagcagcaggcgctcggggccatcccggggccagaggacctggcctgacccagcgccgtcaccgaagaaggcatctctacggtggggcgtaggctggcggggggtgcgggtggcagccaggagatccagcggggctccgaggttttccaactgcgcaccaaggcgggctccacccgctacggtggactgcggcgctcgagggagagtgggggggtcctccgctcctgaggccacgcctcgctcagcccccacctgtggctttcacagccctggagttccctcgtgccgcctcgtgccgaattcggcgcgccgtcgacttcatactctctccc

SEQ ID NO: 150986 - DNA, 1114 bp, Homo Sapiens
aggcagccaggcgggccttgacagcatcctcactgccggcacaggctccacgttcaatgagggagttgcccatgtcgataaccccacggatccggtcagcgttggcatgcagctctgcttcaaaagcctggtgcttctggtgcttgctctggatgttggtgggatccttgtacgactcatcactcgctgtttgcaatttttcactgatccaagcctcaatctcatccacatcccggctgaactgttggagggtttgagattctcctagctttgaccttttctcaatcatctgggctttcagacgtcgccacctgtccaagacctcattgcgccggctagaaatgtctcccttggcataatggccggcagcgatgagctggtcggcaaaggcctgcagagcagcaatcttctcttcctggacgttaatcgctttgtcaaagtcttcatgttttttgatcagagcctctacgctgtccagtgagtctcctttgtcttcggtattcaagaaggcctcccgggcagccatccagttctcagcttgctcacagtcccgatggaacagctgcagttcaaggcactgatccagcatcatcctgcgctgaacccaggccttctccaggtctgcacgctcctggtcaagaatatcaagtttctgcttgatctcagggctggcatagtgtccgtgagccaacagctgctgtccaaacggctcaaatgcctggaaagtgccagccctggcatcgatttctgtccggtgttcctggtgtcgctccagcaatgcctcagctccggtgacatccttggctagctcatctgaggacaccaacccccgtattccattgatccaagacatgaggtcccggaaatcgctaaggaagcgctgcaggtcgtgggagtcacccaactttgccttgcgctgatctgcacgtttccccaggctgctccaggcctggtttaactctgtgcacttttcctgcaggtcttctgctgactcgggatgggactggatcaggcgctctgctgtttcaccaagggagtataccttgtcaccgagagccgcaatgtccctctcgaagccctcatgcttgcgttgcagggcctggacactggcgag

SEQ ID NO: 150987 - DNA, 1358 bp, Homo Sapiens
  misc_feature (72)..(72): n is a, c, g, or t
ctgtaacccgtgttttgtcgctccccctttggtgtgctcccccccctaaaagtcgccttcggagcttcctcncacggctcaattttatgtggggctgtgatatgtattggaagctgagtactgtattttttagaaaggccctggccgtgggaaagggctttctataggggggccagttgtgggttatgggcgcgaaccaggtgtgggtggtactatcgtggatggatgaatcacacattttggggcggagcaagagtttggttgggtggataaggaagacactttgggagggtaggcgcatagaggattattaggcttaatcattactgtggggggtgccttacccagaaaataggggggagtggggtgccttgtaaaaaaccattacattgattagcttggtggatagaatgtgtcaggtgggttggctggttgccgtctgggcctgtttgttgggaacttgccagtcgtgtgaataatttcgcttgcacagattggatgtgtggctgggtggatgttttcggtttggttggatgtgggaatggagtgccaactttaatttggatggctaccgtggctgctgctgacctgtcgggtggaagtaggcttactggtgggtgcgattatggcattggaaagtgtgtgtagccaagggcaatagtgatgaagccgtggagcttgttgtggttgctgctagctggtgctgctgctgtagcgccgcttgctgatggttctggaactgcttattgttgctgctgctgctgcagcgccacctgctggagctgcagctgggtctgtggagttgccgtagacacgacagccatgctgtgaggggccatccccgaggtcccaggaggcggctgccctgagagagacattggctgtcccatggcaccaaggctacccatcccgcccagagactgtcccgggccccgaggaggcatgccaattccagcggctcccgcagcaggtccgccagtcaggctctggagtgcattcataggatcactgacggaagcttgagatttcttgttatgaatgtctcgaaaatggataatgagcctggccacgagagaaaggtattcgtcccgggtcttggccttcaggaaaacatggctctccatatccttgctggatttactgtgtgccacaccagctttcctcatggcatcctcgatttgactgaccagcttctgccggaaggcggtgctccgccagtcggtctcttgcccggaaacgtccatgcctgttccccagctcccgccgcccgtatcccgcttggccgccaccgccgccgcctcagtcacagagcccctcgtgccgaattcggcgcgccgtgacttcatactctttcgccc

SEQ ID NO: 150988 - DNA, 1248 bp, Homo Sapiens
  misc_feature (401)..(461): n is a, c, g, or t
  misc_feature (920)..(941): n is a, c, g, or t
  misc_feature (956)..(986): n is a, c, g, or t
ttgcaaagatacacaaaaagttaaatacagtgaaaacaaagaacaccatacaaaaataattataacagagcagtttacaatatgtgcggaaatgatgttgaaactgagcaattaagaaataagcagagtagcccacatgtcgacactttaagcacattatcattttactaatcagcacattaccacctcaagttaaatagaatttagaagttggaggattgaagattagggcagccacagacattacgtacagaatgtggttaagcagagtcggccccgtagaaggcagccatgaacgcatcggccaccagcagcgtctccacgaagcgcgcctcagacacaaaccgcttggtcctactcgtggcccccaggggcggtggcggctcgctagcgccttctgnnnnnnnnnnnnnnnnnnnnnnnnnnnnnnnnnnnnnnnnnnnnnnnnnnnnnnnnnnnnnaccctctcccgtctccacctcccactcgggtcctcgcgggagggggcgggctccggcgggaccccagcgctgcaggcggtgcggctgagccagggagccccccgcgccctgcggctggatggtgaactcctcgccgtccagcaggaaggagccgctcagcccgcggcacaggctgaccgccgccagcgactcgggctccccattcacggtgccggagaagaagcagccgcgcagcccccgctcgcccccggtcgcccggccggagcccccgaggcgctcgatcttgaagtcgggcgctaggaagctgtcgtcgggcgccaggcgcagcacgaagcccttgccgaaggcggacaggtggagcgcgagctcgcccgcgctgccgggcaaccgcgtgggcaccaccagctccgaggcctgccccccggctgcgggccgggccggggcgccgcgggccagcgnnnnnnnnnnnnnnnnnnnnnngagcggaggccaccnnnnnnnnnnnnnnnnnnnnnnnnnnnnnnntgcggcggtggctgcgcgcaggagagggaagaagcccgccaggcgcgggcaggtgctggcgctcccccggcggcccctctggctggcgcagcccgctcctcccgcgccgccgcccccgagccgagcgcgagcagctggccccggcccgcgtgcgcccgtcctccgcccttgcccgcgccagccccgcgcagccgcctcctgcctcctccccaccccgggaagcaccgagtgggctgccgagcccttcttatttatacttccc

SEQ ID NO: 150989 - DNA, 946 bp, Homo Sapiens
  misc_feature (629)..(690): n is a, c, g, or t
aggtaaaaaattttcccccccaaatttgaaagaagggccgggacagggagttgtttgggaaaaaagggccaacatgttttcccaagacaaaaacccttcaagggttggttttttgggcaagtagaaaatcccctattcagggccagggttggccgcctgagcccctaatcttgatcacgagcagttttgtggggtcacaaaagtcccggagtctgccacaccaagggtgtcacacagccctccctgcccacagaagttctgtctggtgagcaggatggccgtgtcgtagtgctctgggtggcggtcgctgggctggttgaaacgccgctgccagttgcagaagttacgcagtgtaagccccccattgtcggacacctctgggccccatttttcatcttctacgatcagcacttttaccaccatcaggttgatggaattcttgatgctggggtgcttgtagattcgggctgccacagacattaacgtcaggatgtggttctgcaggtcggccccgtagaaggcagccatggacgcatcggccaccagcagcgtctccacgaagcgcgcctcagacacaaaccgcttggtcctactcgtggcccccaggggcggtggcggctcgctagcgnnnnnnnnnnnnnnnnnnnnnnnnnnnnnnnnnnnnnnnnnnnnnnnnnnnnnnnnnnnnnncctctgaccctctcccgtctccacctcccactcgggtcctcgcgggagggggcgggctccggcgggaccccagcgctgcaggcggtgcggctgagccagggagccccccgcgccctgcggctggatggtgaactcctcgccgtccagcaggaaggagccgctcagcccgcggcacaggctgaccgccgccagcgactcgggctccccattcacggtgccggagaagaagcagccgcgcagcccccgctcgcccccg

SEQ ID NO: 150990 - DNA, 875 bp, Homo Sapiens
gggggagagagtatgaagtcgacggcgcgccgaattcggcacgagggcaggagagaggagaccaccaggaggacagcgaggaggagagccaagaagaggaggcagaaggcgctagcgagccgccaccgcccctgggggccacgagtaggaccaagcggtttgtgtctgaggcgcgcttcgtggagacgctgctggtggccgatgcgtccatggctgccttctacggggccgacctgcagaaccacatcctgacgttaatgtctgtggcagcccgaatctacaagcaccccagcatcaagaattccatcaacctgatggtggtaaaagtgctgatcgtagaagatgaaaaatggggcccagaggtgtccgacaatggggggcttacactgcgtaacttctgcaactggcagcggcgtttcaaccagcccagcgaccgccacccagagcactacgacacggccatcctgctcaccagacagaacttctgtgggcaggaggggctgtgtgacaccctgggtgtggcagacatcgggaccatttgtgaccccaacaaaagctgctccgtgatcgaggatgaggggctccaggcggcccacaccctggcccatgaactagggcacgtcctcagcatgccccacgacgactccaagccctgcacacggctcttcgggcccatgggcaagcaccacgtgatggcaccgctgttcgtccactgaacagacgctgcctggtcccctgcacgcatgtatctcacgagttctggacgcggcacgaactgtctctgatgcctgctgcgcctgccctccacagctccggcgctggctgtcactgacacatgagcatttgggcgatcgctgccaccttgtagattgcca

SEQ ID NO: 150991 - DNA, 900 bp, Homo Sapiens
  misc_feature (132)..(132): n is a, c, g, or t
gcgctctgccgtgcttcattctctcgtacagtcttgacgagtgcagcgcacgggcgtcaccaggcagtgcatctgtggcacaggctcagccatcatgtgcacaagctggcgcgactctgagcagagtgtggngcagtgcgaaatccgcccaaagatctgctgcactgctgtccagctgtacaggccatgcggcccgggaggcctgtgggaggggcagggccgcagcaggggcatccaggagacagtctccgtgcccgctgtccagaagctctgtgagatacatggcgctgcagggggaccagggcagcgtctggttcaggtggacgaacagcggtgccatcacgtggtgcttgcccatgggcccgaagagccgtgtgcagggcttggagtcgtcgtggggcatgctgaggacgtgccctagttcatgggccagggtgtgggccgcctggagcccctcatcctcgatcacggagcagcttttgttggggtcacaaatggtcccgatgtctgccacacccagggtgtcacacagcccctcctgcccacagaagttctgtctggtgagcaggatggccgtgtcgtagtgctctgggtggcggtcgctgggctggttgaaacgccgctgccagttgcagaagttacgcagtgtaagccccccattgtcggacacctctgggccccatttttcatcttctacgatcagcacttttaccaccatcaggttgatggaattcttgatgctggggtgcttgtagattcgggctgccacagacattaacgtcaggatgtggttctgcaggtcggccccgtagaaggcagccatggacgcatcggccaccagcagcgtctcccctcgtgccgaattcggcgcgccgtcgacttcatactctctaacacaag

SEQ ID NO: 150992 - DNA, 866 bp, Homo Sapiens
ggctttgtgcaggttaccactggccaatggcagctctacaagttgggcggcgaatcgcccaaatcgctcatgtgtcagtgtcagggcatcgaccggaggctttggagggcaggcccagcagggcttcaggagacatctcctgcccgccgtccagagctctgtgagatacatgcgctgcagggggaccagggcagcgtctggttcaggtggacgaacagcggtgccatcacgtggtgcttgcccatgggcccgaagagccgtgtgcagggcttggagtcgtcgtggggcatgctgaggacgtgccctagttcatgggccagggtgtgggccgcctggagcccctcatcctcgatcacggagcagcttttgttggggtcacaaatggtcccgatgtctgccacacccagggtgtcacacagcccctcctgcccacagaagttctgtctggtgagcaggatggccgtgtcgtagtgctctgggtggcggtcgctgggctggttgaaacgccgctgccagttgcagaagttacgcagtgtaagccccccattgtcggacacctctgggccccatttttcatcttctacgatcagcacttttaccaccatcaggttgatggaattcttgatgctggggtgcttgtagattcgggctgccacagacattaacgtcaggatgtggttctgcaggtcggccccgtagaaggcagccatggacgcatcggccaccagcagcgtctccacgaagcgcgcctcagacacaaaccgcttggtcctactcgtggcccccaggggcggtggcggctcgctagcgccttctgcccctcgtgccgaattcggcgcgccgtcgacttcatactctctcccccg

SEQ ID NO: 150993 - DNA, 970 bp, Homo Sapiens
gagtatgaagtcgacggcgcgccgaattcggcacgagggagacattggtgacgctggacttcacttcccgcatcatcgacttcttcacagtgcacagcacacggcccgaggatgaatttgatgacccccaggccctggctgtgctgctggaagaggagctggtggtgctggacctgcagactcctggctggccagctgtgcctgccccatacctggccccgctgcactcctctgcaatcacttgctcggcccacgtggccagtgtccccgccaagctgtgggcccgcattgtgagcgctggcgagcagcagagcccccagcctgtctccagtgccttgagctggcccatcactgggggccgaaacctggcccaggagccgtcacagcgagggctgctgctgacgggccctgaggacggcaccgtgaggttctgggatgcctcgggtgtggcgctgcggccgctctataagctgagcacagctggcctcttccagacagactgtgagcacgctgaccgcctggcccaggctgccgaggacgactggccacccttccgcaaggtgggctgcttcgatccctacagtgacgatccccggcttggcgtgcagaaggttgctctctgcaagtatacagcccagatggtggtggctggcactgcaggccaggtgctggtactggagcttagtgatgtgccggtggagcaggcggtcagcgtggccatcatagacctcctccaggaccgcgagggcttcacatggaagggccacgagcggctgagcccacgcacggggccgctgccctggcctgctggcttccagccccgtgtcctggtgcagtgcctgccgccagctgctgtaaccgctgtcacactccacaccgagtggagcctcgtggcttttggcaccagtcatggctttggcctcttcgactaccagcgcaagagccctgtgctggccaggtgcactcttca

SEQ ID NO: 150994 - DNA, 843 bp, Homo Sapiens
ggatactctagatgcccccagcgtcacaacccgagcatcccagacctcacggtgccgtcctcatggcccgtcagcagcagccctcgctgtgacggctcctgggccaggtttcggcccccagtgatgggccagctcaaggcactggagacaggctgggggctctgctgctcgccagcgctcacaatgcgggcccacagcttggcggggacactggccacgtgggccgagcaagtgattgcagaggagtgcagcggggccaggtatggggcaggcacagctggccagccaggagtctgcaggtccagcaccaccagctcctcttccagcagcacagccagggcctgggggtcatcaaattcatcctcgggccgtgtgctgtgcactgtgaagaagtcgatgatgcgggaagtgaagtccagcgtcaccaatgtctcggctcgaagcacacttacacagtggcggtcaccatagctggcacggggcatgccaccgctgaagatgataaagtggcccccagattcacagttccgccacagaatcttgttaatggccttgcagggaaaggggccgtaaggtgtggtggctaccgtgggctgcagcgttgggaagctgccggcatccacagaccagacagcatagctgccatcgctgtgtgagctgaccacagtgctgctatcacgcccccagcataggctctccagctgctggttccccaggaagatgtggtccacacactgcgaggcctggttccagatgaccagcaggccccggctgtagccaatgccaatcatttgtggggtcccgcaggtgtcctggagtgactccacgggcccaggccttccc

SEQ ID NO: 150995 - DNA, 1327 bp, Homo Sapiens
  misc_feature (227)..(253): n is a, c, g, or t
  misc_feature (919)..(1013): n is a, c, g, or t
  misc_feature (1122)..(1122): n is a, c, g, or t
  misc_feature (1223)..(1276): n is a, c, g, or t
cattcctgacaagcaagattccatagtccttcaggcgccatcttaatgatcccagatcttctgcccccactgtattgtgcatctaatcaaaagcttctgttgctagctggctccttgggtttcagctacatttcttagatgatcccgaaggtctagataacaagggggcgtagctgaatggaggttaacatttcctgctggactgtaaacttaagggcccaggtctnnnnnnnnnnnnnnnnnnnnnnnnnnnctgttttaacctaatgatttgtatatagtgagtactcagtaagtacttgtcaaatgaaagaacagggattgccagaccttcaaggcaatgggaaaggagcaaatctgcaaaggtaggatctctttggaaggcaggtattggccaccaagtcaaactccttgagtcttatattctgattgggatgatctcacatggatgttcatctcttatatgtgaatactcatttgtgaaaaatagtaagagccagctaggatatttggattcagtcaggcaccatcagaatagtgcagtgaaaggccaaactggccacaagacagaggaatgttttcagttttctggttttcctctggtccatgataaagctcggagtaactcttctatcaagatggggctataccttctcatgacagaggctggcatttgagctacccagcagaacgtgtgctctcaaaagggaagtcaagggaactgggttcctcttctccctctacttctgagccaatgcttcatgtctcatataagccccatggatgccaaagatagtggcatggcaggtgtcatgccaattgcatggcatcagattctccaaagaaaacccacttggaaaagccaaactagcccctggaaaagcaacccaagcatctcgtggacatgtgaggaaatggnnnnnnnnnnnnnnnnnnnnnnnnnnnnnnnnnnnnnnnnnnnnnnnnnnnnnnnnnnnnnnnnnnnnnnnnnnnnnnnnnnnnnnnnnnnnnnngtagggtttattgactcttatgcattgttaaattagagggtagaaagacagagctggtagtctttccctgaaggctgtaaggttatttttgtggtttggtgacttctcnaggttggcagccgtcttgttgatgtcccctatgtcatccagagggcaggagcgggcagctctctaccttggcaactggttcctctctctccagcttcatcnnnnnnnnnnnnnnnnnnnnnnnnnnnnnnnnnnnnnnnnnnnnnnnnnnnnnnacagattgatttaaacattttttaaaccacatggtctttttctgggctccc

SEQ ID NO: 150996 - DNA, 558 bp, Homo Sapiens
cacaggcagcccccatgttgtacttatgatgcacttcccggaccacttagggtgtggccgacctccggaagatgccctcggtggtgagagcgtgggcctgtaagtaggcaacagtctccatgagtacaatgggaatgggctcctgctctggattcttctcctggaggtgctgcagcgagactccaaactgctggttgggcaggggggtccgttggggcatgggcttgggggctgtcgcggggctcttctgtgtggatttcaggaagtcgtcatatttgagcacttggcgagggatccccagctgctccagcttcacgtgctcgctcagctcgctcaggtaattcacatagaagatcttctgcccgaacttgaagctgatgaggggcttgaagaggatgagcagagttttgatgaacatggttggatgcacgatgtacaaggccttgatgttcttcttgtacttgcggtcaaactcccggtaggcatcacggagccagctgagggagggcttgttgtcgctggtcaggccgtggtgcagatacagaagtgtgtagtcac

SEQ ID NO: 150997 - DNA, 925 bp, Homo Sapiens
cccaccttagccgtgggggatagaagagagcgggagggggcggttcccgttccaccgcggagccggatgtttgccgagccttgacaggcgtggcagagggagcagtgcccgagcgcggtttctcttaaggttctgcagggcaaggctgtctgggacaggcttggccatggatccgctctcagagctgcaggatgatctgaccttggatgacaccagcgaggctctgaaccagctgaagctggcctccatcgatgagaagaactggccctcggatgaaatgcctgacttccccaagtcagatgactccaaaagcagctccccggaacttgtcacacacctgaagtgggatgacccatactatgacatcgcccggcaccagatcgtggaggtggcaggagatgacaagtatgggcggaagatcattgtgtttagtgcctgtcgaatgccccccagccaccagctcgaccacagcaagctcctggggtacctgaagcacaccctggaccagtacgtggagagtgactacacacttctgtatctgcaccacggcctgaccagcgacaacaagccctccctcagctggctccgtgatgcctaccgggagtttgaccgcaagtacaagaagaacatcaaggccttgtacatcgtgcatccaaccatgttcatcaaaactctgctcatcctcttcaagcccctcatcagcttcaagttcgggcagaagatcttctatgtgaattactgagcgagctgagcgagcacgtgaagctggagcagctgggatcctcgcaagtgctcaatatgagacttctgaatcacacagagagcccgcgacggcccagccatgcccccgccccctgcaacagaattgatctctcacactcagaagatcaacaggcattcttgatcggaagtgcatacgccgcta

SEQ ID NO: 150998 - DNA, 905 bp, Homo Sapiens
tggaccggtccggaattcccgggatctctcggttttcggttatagccggccggcgctcacttgtcttcaggaagctcggagcctttggtggagccggggagaggaagggtgggtgcaagagtgaaaggcgagaggggactgcaagcatccgggtcggctcctggccggagcaagatggctgagggcgagcggcagccgccgccagattcttcagaggaggcccctccagccactcagaacttcatcattccaaaaaaggagatccacacagttccagacatgggcaaatggaagcgttctcaggcatacgctgactacatcggattcatccttaccctcaacgaaggtgtgaaggggaagaagctgaccttcgagtacagagtctccgaggccattgagaaactagtcgctcttctcaacacgctggacaggtggattgatgagactcctccagtggaccagccctctcggtttgggaataaggcatacaggacctggtatgccaaacttgatgaggaagcagaaaacttggtggccacagtggtccctacccatctggcagctgctgtgcctgaggtggctgtttacctaaaggagtcagtggggaactccacgcgcattgactacggcacagggcatgaggcagccttcgctgctttcctctgctgtctctgcaagattggggtgctccgggtggatgaccaaatagctattggtcttcaaggtgtacaatcggtaccttgaggttatgcggaaactccagaaaacatacaggatggagccagccggcagccagggagtgtggggtctggatgacttccagtatctggcccttcatctggggcagttcgcagctgatagacacacccataccttggagcccagacaactaagagaatgagaag

SEQ ID NO: 150999 - DNA, 544 bp, Homo Sapiens
atctgcctctaaggagaaaaaaggagctggatgaaatgacctcagatgagtcctgttgcataacctcatcttgctagtcctcagtgccccaggatgcaggagagggacagtctttcccacttcttcctttcatcctgatgatagcacataccccctataggtgaccaaggcagtcaaagcaggtgacatagatgccaaaactcggcggcggatcttcgatgctgtcggcttcaccttccccaatcgtctcctgaccaccaaggaggcgccggatggctgccctgaccatgttctgcgggctttgggtgtggccctgctggcctgcttctgcagtgaccctgaactggccgcccatccccaagtcctgaacaagattcccattcttagcaccttcctcacagcccggggggacccggacgatgctgcccgccgctccatgattgatgacacctaccagtgcctgacggctgtagcaggcacacccagagggcctcggcacctcattgctggtggcaccgtgtctgcctatgccagcatacctggg

SEQ ID NO: 151000 - DNA, 1261 bp, Homo Sapiens
tttacccagccgtacccaggtatcttttcagacacggaaacgccgtcggccgaggcgtttgtccaggtaaagttttgtgggtccagcagcgccgaccgtttccacgagtatagttaatgggtagtctgattgaagcaagccagagagtcctttgaactagacttctccgaaaagctccccattgacccatcttcagaactgctacttttttgcacttcattccgacaggccatgactgcagccaccgtcttctccccagtggtggcaaagctcactagggcagtctgtgggaagtttttaagcaaactcagcgttccataatggtactgcagcagagcatagtggcttggggacaagtgcaggaagaactgggcccgggaagcgtccactgggttgggctgggtaggcaggacccggggttggaatccacttccaaattctaagtcgagagactgcagtgggatctgtctcaactcccattccgtctccagagccaaagtttggagggaacgtgagctcgggtcaggacacaccaggacagcctcatccaccacaccacaggctccagacaggtgctgcagccacggagttgaaaccctaacctgctgaacaatctctccatcttccacattaaacttgacaatgttcacatggctgaagggaacaactccgagggcccacaccaccccagagccgtaagaatacaccatctggtagtggatgctgtcactttctgggagatgttccacccacttgaggtgcccactggagaggtgatggagggcaagtgtagtcttcttcaggactgcgatgtaccttacagactcctgcaggccaaccagcccaagtgcctggaaactgccactgtccagggttatctcccagttcaggcccccgatgttagtctcccaggaacgcatgattcggcctccattggacacagtgatcacatcctgtccgtgcagcagcatggcatccacagccccttctgccgtgcccttgtcaacatggcgccacaagatctccccagttcgggaatttaatgctgcaatcacattcttctctgtggctacaaccaacttcttggatccaggggaaaattccaaggaggcaaacttgaccttcccaacatattgctgtctccaatcaaacttgcccacttggtcttcgtagaccgcggccgcaggaatcagcagcgtagcccaaagccagaaacgagaagcccactcagccgccatgatgcgagcgcatgcaccaccca

SEQ ID NO: 151001 - DNA, 796 bp, Homo Sapiens
acttgaaccaaccgttgaggtcttccccagtgccggcaaaggcccataaattttccacccccctggaagaggttcccatcttgtgattccagaatcaagctgttgttcatgtgtaagttggatggttttcttgcctggccagacagatggctcctctttaacttttgtggcctgagtgcaggaattctcctgaagatataggcaatagaaaatgttgtagtgaatcctattgctgatgttaatccccttctccctcatggcgtagagaagcacggctatgcagtacagggtctcggtgacatctggcatggtcaccgtggagctgggtctccggaggcagaagagcagtcgctggatgtcattcacactgctggagaggagcaccacagccgccaccagggcccagatgttgacacccccggcagcagcgtagaggtcggggaggtgttgccgcacacacgcctcagcctcggggaggagggggtggtccctcagactccacagcaccctctcgggatccacactcggagagcacttagtggtggctgtgtatcgtatgaggttcagcacacacaggtctgactccttttctatgccacagttagacaggatgccgtccactttgctgacagcttgctcttcattcatcaggtatcgatggtacagcttcttccaaggaatgaacagcgggtcactgatgatctccctccgcaagtggcacaccaagctcaggttccaatagaggtcttccaccgggaggaaggcaaacacgtgcctcaggacctcactaggcagg

SEQ ID NO: 151002 - DNA, 1155 bp, Homo Sapiens
  misc_feature (53)..(53): n is a, c, g, or t
  misc_feature (85)..(85): n is a, c, g, or t
agagagtatgaagtcgacggcgcgccgaattcggcacgaggtgtactcccagngagaagaacaagaacgccaacagctcccccgntggcctccaccaccccgtccgcctcagccaccaccaaccccgcctcggccaccaccttggaccaaagtaaagcgtggaatcgttaccgcctccccaacacgctgaaacccgattcctaccaggtgacgctgagaccgtacctcacccccaatgacaggggcctgtacgtttttaagggctccagcaccgtccgtttcacctgcaaggaggccactgacgtcatcatcatccacagcaagaagctcaactacaccctcagccaggggcacagggtggtcctgcgtggtgtgggaggctcccagccccccgacattgacaagactgagctggtggagcccaccgagtacctggtggtgcacctcaagggctccctggtgaaggacagccagtatgagatggacagcgagttcgagggggagttggcagatgacctggcgggcttctaccgcagcgagtacatggagggcaatgtcagaaaggtggtggccactacacagatgcaggctgcagatgcccggaagtccttcccatgcttcgatgagccggccatgaaggccgagttcaacatcacgcttatccaccccaaggacctgacagccctgtccaacatgcttcccaaaggtcccagcaccccacttccagaagaccccaactggaatgtcactgagttccacaccacgcccaagatgtccacgtacttgctggccttcattgtcagtgagttcgactacgtggagaagcaggcatccaatggtgtcttgatccggatctgggcccggcccagtgccattgcggcgggccacggcgattatgccctgaacgtgacgggccccatccttaacttctttgctggtcattatgacacccctacccactccaaaatcagaccaatggcctgcagacttcacgccgcgcatggagactggggatggtgacctacggagactcctgctgtcgaccctgtctcctcagcacacaggacggtgtcctgtgatgtctgactgccacatggtcggactgggacaaatgtgatgctggctacaagctccctatgaactgtgcattcgacc

SEQ ID NO: 151003 - DNA, 1143 bp, Homo Sapiens
aggtgccaggatctttacggggcctgggctgccccgctgcaaggccacagccttctcagccccgcaggaatccggttcacggcgcccagcttcatggcttccacctgggcatcggtaaggggctttcagcacgtcgctgagagcgggaaattttcttgcgcccaccagcgccttgccagccggggctgagtgacagggataatgggctctggcctcctcttggcctgcggtgcctcttcctccaggggggacatggagctcagggaacccaccaccgagatggcttggccctgggctgacaggcgccgcttgatcaggacgctctctgtcttcaccaccttctcctccttgggctcctccttgcactgtttggtctgctctacacctggtcccagtccggcagctgtcatctgtgtggccatgagccgagccaggtgcttgatctgggcttccgtgcctgctgactccacgggggtgtagatggcctggaaggaggctggcatggcctcgggtaggtacaccatgctgatgaggaccagattagccacattatcaggcgtcagcagaggctgcaggaactcagctgtgatgtccgtgtctgactggccggagatctgcgctgaggccttcgaggtccccgacgggcctggctccaagtctttgtcctcatcgtcctcccccaggttgggctccagcttcatcttcttgagtgtggagtccgagtcatcgcggggccgcttgcgggtgtccttgctgctcggcatgttgcgggcgatctcggcctgaggtgtgcccaggtccaccagcagggtggtgatctgggcctggaactccaaggaagccgggtgcttcagcacactcaacaggtgcagcttcagattcttacgcacactgctcacctgcgatttggccagcgtcgggggcaggttggcatgcagagtttcataggcctggatcacctcagacatgaacatgggtctctggcgggcgatattggcaagggagcccagcgctgtggtcaggttgatggaggagatggcagggtgcaccatgaacttaagcagctgctccaaggctgccttgccctcttcccatagcacgttgcctcgtgccgaattcggcgcgccgtcgacttcatactct

SEQ ID NO: 151004 - DNA, 1345 bp, Homo Sapiens
cgagcctaaaaccctgcagacttcagccacactcaaagacttgttatttggtgttcctgggaagtacagcggggtgagcctctacaccaggaagaggatggtctcctacaccatcaccctggtcttccagcactaccatgccaagttcctgggcagcctgcgtgcccgcctgatgcttctgcaccccagccccaactgcagccttcgggcggagagcctggtccacgtgcacttcaaggaggagattggtgtcgctgagctcatcccccttgtgaccacctacatcatcttgtttgcctacatctacttctccacgcggaagatcgacatggtcaagtccaagtgggggctggccctggctgccgtggtcacagtgctcagctcgctgctcatgtctgtgggactctgcacactcttcggcctgacgcccaccctcaatggcggcgagattttcccctaccttgtggtggttattgggttagagaatgtgttggtgctcaccaagtctgtggtctcaaccccggtagacctggaggtgaagctgcggatcgcccaaggcctaagcagcgagagctggtccatcatgaagaacatggccacggagctgggcatcatcctcatcggctacttcaccctagtgcccgccatccaggagttctgtctctttgctgtcgtggggctggtgtctgacttcttccttcagatgctgtttttcaccactgtcctgtccattgacattcgccggatggagctagcagacctgaacaagcgactgccccctgaggcctgcctgccctcagccaagccagtggggcagccaacgcgctacgagcggcagctggctgtgaggccgtccacaccccacaccatcacgttgcagccgtcttccttccgaaacctgcggctccccaagaggctgcgtgttgtctacttcctggcccgcacccgcctggcacagcgcctcatcatggctggcaccgttgtctggattggcatcctggtatacacagacccagcagggctgcgcaactacctcgctgcccaggtgacggaacagagcccattgggtgagggagccctggctcccatgcccgtgcctagtggcatgctgccccccagccacccggaccctgccttctccatcttcccacctgatgcccctaagctacctgagaaccagacgtcgccaggcgagtcacctgagcgtggaggtccagcagaggttgtccatgacagcccagtcccagaggtaacctgggggcctgaggatgaggaactttggaggaaattgtccttccgccactggccgacgctcttcagctattacaacatcacactggccaag

SEQ ID NO: 151005 - DNA, 673 bp, Homo Sapiens
  misc_feature (23)..(23): n is a, c, g, or t
  misc_feature (494)..(557): n is a, c, g, or t
tcatccagcaggtgcagagggcnttgtggtataattccacgaagcagccttgatgcatggaagtatctttgaaagcttaatagtcttttcacctttttcttggtgccaatctcccctgagtatgttgtactgttaagtaggcggaagtcaatgaatgggtaggagccacggcgttcagcacgaacccccgtctgaccccttagtcgtatatctcctggaaagctgcggagagcatcttcattgtccagaatgcctctctgtttggtcgcctgcagctcacttttggatttccaaaccagctttaccatcctgatcatctctggcaagtcccagggcagcggcccctgctggcaccccggccggcttcccggggaggagggcagcacaccttctgggcctgtccacctcctgcctagctctgctgggtggaaatatcgctctagcacaggcattctgtcttgtgccccagaagaggaggtagtggtggtggtggnnnnnnnnnnnnnnnnnnnnnnnnnnnnnnnnnnnnnnnnnnnnnnnnnnnnnnnnnnnnnnnnaccacaggggaaattcttcccaggcagggaaaagcgaacccccgtaagatcctctccagcttcggaaagacaagcctcctccagcctggcacaacctccctgtctcttcaggccct

SEQ ID NO: 151006 - DNA, 694 bp, Homo Sapiens
  misc_feature (36)..(36): n is a, c, g, or t
gccctggcggttagtggcggtgcagacgtaggtacntgcgtcctggggtcggactgagggcagcatcagcatgttgttctccaggcggctgtcaggtggcaggctgccatccagcttgctccagctgatgtcaggagtggggtagcctgaggctatgcaggggaagacagctgcagaaccagcaggcacacggacttcttggggcattgagatctggggcaaggcttgcacaagcagcaggacgtgggattgtgtggtgccagctgcgttggtggcagtgcagcgatactgtcccgcatcagccagctctacgtgggcgatcctgacgacacctccgctctgcacaatgcctggccgcaggtgccctccaactttgctccatgtcacctgaggcttggggtcacccagtgccaggcattcgaactccacggcgtggccaaccaccacggtctgcacagaggtccggatgttgatgagcaccgagggcagggcttggataaccagctgggcactggcctgggccttcccccaaggtccatgggcctggcatatatacgtcccttggcagctctggtccaagttctggattcggagcaccccatcctgcacgctgtgacccggaggcagctgacccccttccttgaaccaacggagctgggtaccccggtcgctgggcacagcacagtggaactca

SEQ ID NO: 151007 - DNA, 1107 bp, Homo Sapiens
  misc_feature (334)..(389): n is a, c, g, or t
ggagaagggggggaagttgattttctccgaggctgcaaattaagtgggcgcgggctggcgaaggggttgttcatcgcggcggagagagggtaagctgcgatatgtactttcatggggcgaagtgcaataattgggaccggtgaccacggaggcgttggaggagggcggggcgttcgaaatggggggttggagaggcaaaatacaggggggtacggatccatggcggggggagcgggggccctttgaggggccttccggcaaggtgtcctcaaaacccccccgttccttccagcactggcctttggacagtacctgagtggaaaacaagggtgtnnnnnnnnnnnnnnnnnnnnnnnnnnnnnnnnnnnnnnnnnnnnnnnnnnnnnnnngccttcagaccctcatctctaggtggccactgtccctcttggcctttcatgctgcagggagggaggaactgtggctaccctgagttgacgtctgggagttgtggggatgaaagtgagatgagggtggcccactgggtggggagccactgcttcttgctccagaagctcttgtgagtccagaggtcctgtccagccgtgggagcttggtccttgagccatctggaggtcatcagttactgggagtcgttctctctgagctccttgtgctgctttgggcccgtacagggctgggccaaggggagaggctacaggcttctcaggcatctcttcagcaggggcgtggcggacatcagagttcctgtgactgtcagctctggggttctccgggaacacgtcaaaggcctggggctctgagcccacagagcccttggggtgggctccgagggatcatagggatttcggagttttcaagtggcctgggaaagcccctccccagggcagggccagtccccaggagtggcagcagcaacagcagaaggccacatacacagccccatgggctggaggccatggtctactccgatgcctgggcctaaagcccccaccttccagtcctcactggatgagcctgcgcgccgcagcccccgtgttcaccttgcgcgcgtccctgcagccgatcgccgcgccgcaatcccgataaccccaggccgtacacctg

SEQ ID NO: 151008 - DNA, 661 bp, Homo Sapiens
  misc_feature (38)..(38): n is a, c, g, or t
tccacaaaggacgacatctcgaagcatttgttcctctntcgagcagcctcaaaggacttgaacttgacaggttcgatgtagttgacaagcgtggacatctcctcagtggcattcacctcgctgctggctgtgccctcatctgtagttggctttttggggtctgtctgttcctcctcttcctcatcttcctcctcatcctcacggtcagcaggtccaagaacataggggcctcggttcaggccctcgtcacccagagacttctgaggctccaggctgggcttctcaagccctacctcctccccattgctcaggcctgggcagctgtcagagctgggagaccccagctgcggggaggagggctcggtggccgcggagctctcgctcagggcagaattgctctgctccaggggccgcttgcgcccggcgctgtctgggccacctgcgctgggtcggtgccgcttcttgttcttcaccaggatacggcccatcaggtcctgggggctgggcaggggaacgcctggggccagcgggtacttgtccagaggctcgatgagtagcgcgtctccaaagatggagcggcagtactcagccatctttgcctgttgctttgccgagtccacatggttctcgaaggagaggatgacggggtagggcgaggtct

SEQ ID NO: 151009 - DNA, 557 bp, Homo Sapiens
gggccccgccccctccgctgtgtcgtcgtctagtcctacgccgccagtgcgcctgcgcaagacgctggacttggcgctcagcatcctagccgattgctgtacggaaggggcgtgccggaccgaagtgcgcagactcggaggcatactccctttggtgaccattcttcagtgcatgaggacagacagcatccagaaccgaacggcccgtgccctggggaacttagccatggaacctgagagctgtggggacatccactgtgctggtgctgttcccctgcttgtggagagcctgacagcctgccaggactcgcagtgcctacagagcgtggtgcgtgccctccgtaacctggcagactcaccccagcaccgcctggccttggcacagcagggagcagtgcgtccgctgggcgagctcctggccactgccccagatgctgcactgaccttagccctcgtccgtgccctcctggaactcagccgaggctgctcccgggcctgtgctgagcagctaagtctgggtgggggatttggtccactcgtcagcctggcttcccacc

SEQ ID NO: 151010 - DNA, 643 bp, Homo Sapiens
  misc_feature (78)..(78): n is a, c, g, or t
cggctccctcctcctcactctcttgcccagaatcggagtcgaagttcaggtagtcactggccggcttgctcttccctntcgagggctcagcatccaggccatcattcgcccaagtggctgcctgcgcccgcctctgatgaactgacagaaactcctggaactctgtatcctccttcagcttctccagttgacctgccacctttttcttcttctcatctttcttaatttctggagtagtagagtcttttggaggctgcttgggctggcttggtttctgggcatgtttgctccaggctctgggtttggccgggtccccgaatgacttgcagaactccactgtgatccgggatgtgtcgatgaagctcttgttgaaatgcttctgtgccttctgggcctcttcctcggacttgaagccaataaaaccaaacttgcggaacttgccatctttggtgaacttcaggctgcagtctgtcagcgtgccgaaggcggcaaacagctgcctgaaacgctcctccttcatcccattcgggagattcttcacgatcagtcgcgacatggcgcagggtccccgctgttttgattccaacacgactggtcagcgtcttccaccaagtttcacgctaccgccctgggcgccgccatc

SEQ ID NO: 151011 - DNA, 1137 bp, Homo Sapiens
  misc_feature (1099)..(1099): n is a, c, g, or t
gggatgtctggttgcccccaaccacatcctagagatccccagagatgcaagcctgatgctatatttccgcataaggttttatttccggaactggcatggcatgaatcctcgggaaccggctgtgtaccgttgtgggcccccaggaaccgaggcatcctcagatcagacagcacaggggatgcaactcctggacccagcctcatttgagtacctctttgagcagggcaagcatgagtttgtgaatgacgtggcatcactgtgggagctgtcgaccgaggaggagatccaccactttaagaatgagagcctgggcatggcctttctgcacctctgtcacctcgctctccgccatggcatccccctggaggaggtggccaagaagaccagcttcaaggactgcatcccgcgctccttccgccggcatatccggcagcacagcgccctgacccggctgcgccttcggaacgtcttccgcaggttcctgcgggacttccagccgggccgactctcccagcagatggtcatggtcaaatacctagccacactcgagcggctggcaccccgcttcggcacagagcgtgtgcccgtgtgccacctgaggctgctggcccaggccgagggggagccctgctacatccgggacagtggggtggcccctacagaccctggccctgagtctgctgctgggcccccaacccacgaggtgctggtgacaggcactggtggcatccagtggtggccagtagaggaggaggtgaacaaggaggagggttctagtggcagcagtggcaggaacccccaagccagcctgtttgggaagaaggccaaggctcacaaggcagtcggccagccggcagacaggccgcgggagccactgtgggcctacttctgtgacttccgggacatcacccacgtggtgctgaaagagcacctgtgtcagcatcccaccggcaggacaacaagtgcctggagctgagcttgccttcccgggctgcggcgctgtcccttcgtgccgctggtggacggctattttccgccctgagggccgactccagcccactacctgtgccaacgaggggggctccccccacgggttggntgatgaccatccggggatgggaatccacgggaccccgg

SEQ ID NO: 151012 - DNA, 576 bp, Homo Sapiens
cagctctgggaggtggctgaggaggagtgaccaggagagaggagtgcatggatgggggctgagtggacacagcaggagctggaaaaatattgctctgaaaaggattccccaaagggcttgttgttgaccaagcattgggtgccacagatgcagaagggccccagacaacaggcactggagggggagttgaggctgcaaagggtgaaggctggttccaacctgaaacagctggacttgtaccaaaaatgacgggctgactaaaacctgaaggttgaccacccatcatggctcccggagccattgaaggggactgattgaagaccaaagatgctgtgttccatggtcctgcctgagggagtgtgacagttacaccacctagacccaccaggggccccactggggcaggagcacttgttttgaagagatccagagggttgggctgcagggctgtaggttgtcctgtgggtgacgcctggcctgaaggttctgagacgggaggagcaaagatgtctgatgcaagcaagtcattggctgaagacttagcagtccttctgcctcttcctggtttggtacttt

SEQ ID NO: 151013 - DNA, 569 bp, Homo Sapiens
  misc_feature (20)..(20): n is a, c, g, or t
  misc_feature (109)..(109): n is a, c, g, or t
agggtgaactgctgctctgngatgagcacatcctccagtttttcctttagttcatcgctgatgcccaagctgtccaatgtggcctcgatgcgctcgggcctttctcgantgaaggaccgggctgcccggaagtgaacggctggctctccccgggccatgacactgtcaaaggcttgcccaaaccgcgtctctttccgtctctttcgaagcaggatgagggccagggcagcatccgtcaccagggccgttagcacaccaaggaccacaggtacccaggatgtgcggctgtgaggagggccctgctggcctgcacggtcatgagaagagaccaccagtggctgactccagggtccacagccaactgcattggagacgcacacacgtacgatcaggtccttttggggatcccagcctgtcaaattggccctggtcccctccactgtcagctcatcctgggttccattgtcttgaacccaggacagtttgtagggtcccagggggccttccaaaggggcctcggggatcacttcttcccactccaagatgaggcctgaatctgtgcggatggc

SEQ ID NO: 151014 - DNA, 1045 bp, Homo Sapiens
tgtttttcctccagatgtgtgagctgcgacaaagacagagtcatgccctcccaagtgcaggatggcctgtttctgaaacacatctggctcaaatgcccactggaagactggctggggaatgaggcgatagaaatcaccaacaggggaggtggcgtccacagggatggcccacttgctcctgagatggaggctctggggcctctggggtggatacagctgtggacgcttccttcaacactaggtcttccaagctgcttgctcgggccaggggagcactgcagggagaggctgaaacagtgtcccctctgggacctcctggctgtcccactgcctcattctcatcctcgtcacccccacccaaatccagaggctccaacagacagctaaggcttagtagtccaggagctggagttggacaatcttttggtgcaaagtccatgcctttcttgaaaccaggtggaatagtaagaagatctttctcaaagtctatctcctcctcagcctcctcccgtgtgttcagatctgttatggtgggttcatccatcccccctggccagaagggatactgagttggatttccccataaggactgggaggctggccctggaggccggcgaagagacaaggaggttgtagccgagagatttgtgttctccagcaagacctctttgtaacccagtatctggcctgtggttgggtgtctttgggcctgtaggtcggatgggactggggctcccaggacagccaaaagagaccagggatccgtcttcctctgccattttcgggctgagtgctccacaccatgcagaggcagccaggctggggatgacagaaacaactgttctgcttcttgctgcagatctggggcacaaggagggaggccatggggaaggctactctctggagctccaggcaagttcagcagctcccagtgccccgtgcatccgagctccacggcccgaaggggtaggtccaggggatctggagggggtagcacaagtcgctctgtctccatcatcctggagatcccgggaattccggaccc

SEQ ID NO: 151015 - DNA, 832 bp, Homo Sapiens
  misc_feature (50)..(58): n is a, c, g, or t
  misc_feature (378)..(378): n is a, c, g, or t
ggaggacccccctggggggcccagggccccccaaaaagaatttttctgannnnnnnnnaaatttgggttttcccccaaaagcacacgggttatttaaaaggttcccaaagtgttccccgcccacctagggtttccccccccgttagggtttggcccaaggggtttcccgttggcattggcccctttcgtttggtcccgggcccgtagcgagccctgtcctgtagcacgtgcctggtatctattcacgcactcccagcaatcttcggggcactggacacgaatctgagagtacaggcctgctgcaggtgcccccgtgacccacttggctcgctgcaacttttgacaggcactgagtggcactgtgccctgccactgtgncaccagcaatattccacccggttgcttctgagcacagggcgcagccatgactgatgttgctggtatatcatctgcgttttttcatctctgcagatcacttggtaagatctggctcctcttctgaatcgggcatggatttcctggctgggcgaaacgaagactgctccacacagcagcagcacacagcagagccctctcttcattgcatccatgattgcttcacagcgtcccttaaattcacggcttgctccttccctttcctcgcagaggttttctctccagccctggactcctgtaggatctcagctctgagctccccacagctccggcctcctttaagtttccaggcagggggtggggtcggtggccccggctgggcgggtttctgtgtggcgggaggatgctcagtggcctcgtgccgaattcggcggccgttacttcatctctctcccct

SEQ ID NO: 151016 - DNA, 895 bp, Homo Sapiens
ctaggggggagagagtatgaagtcgacggcgcgccgaattcggcacgaggagcatcctcccgccacacagaaacccgcccagccggggccaccgaccccaccccctgcctggaaacttaaaggaggccggagctgtggggagctcagagctgagatcctacaggagtccagggctggagagaaaacctctgcgaggaaagggaaggagcaagccgtgaatttaagggacgctgtgaagcaatcatggatgcaatgaagagagggctctgctgtgtgctgctgctgtgtggagcagtcttcgtttcgcccagccaggaaatccatgcccgattcagaagaggagccagatcttaccaagtgatctgcagagatgaaaaaacgcagatgatataccagcaacatcagtcatggctgcgccctgtgctcagaagcaaccgggtggaatattgctggtgcaacagtggcagggcacagtgccactcagtgcctgtcaaaagttgcagcgagccaaggtgtttcaacgggggcacctgccagcaggccctgtacttctcagatttcgtgtgccagtgccccgaaggatttgctgggaagtgctgtgaaatagataccagggccacgtgctacgaggaccagggcatcagctacaggggcacgtggagcacagcggagagtggcgccgagtgcaccactggacagcagcgcgttggccagaagcctacagcgggcgaggcagacgcatcagctgggctgggaacacactactgcgaaccagatcagaccaagcctgtgctctcttagggggagtcctcgatcgcacactgctgccagaactgcgccttgatgtcctctgccaactccacggccgctctgatcgcgagagtcgcacagcgcg

SEQ ID NO: 151017 - DNA, 1101 bp, Homo Sapiens
  misc_feature (65)..(65): n is a, c, g, or t
  misc_feature (112)..(112): n is a, c, g, or t
  misc_feature (161)..(161): n is a, c, g, or t
cggggggtttcttcaggccacggtggccacccaaggggcttgggcattcccccatcaaggaattnccggccagtaattatgttttgccccaggccccagtgccttgggccantggggttttctgtgctgtgtaaacccttgccctatcagggatcatgganttccacgggagggcaggaggcacccgactcggtgaggctgtgcgtgccacggtaggctgacccattcccaaagtagcagtcactgtttccctcagagcaggcaggggtgctgcagaactctgagctgtacttccccgccttaaagacgtagcaccagggctttgagtctcgatctgggtttctgcagtagttgtggttccccaggcccagcctgatggcatctggcctccgcccgctgtagggcttctgggccaacgcgctgctgttccagttggtgcactcggcgccactctccgctgtgctccacgtgcccctgtagctgatgccctggtcctcgtagcacgtggccctggtatctatttcacagcacttcccagcaaatccttcggggcactggcacacgaaatctgagaagtacagggcctgctggcaggtgcccccgttgaaacaccttggctcgctgcaacttttgacaggcactgagtggcactgtgccctgccactgttgcaccagcaatattccacccggttgcttctgagcacagggcgcagccatgactgatgttgctggtatatcatctgcgttttttcatctctgcagatcacttggtaagatctggctcctcttctgaatcgggcatggatttcctggctgggcgaaacgaagactgctccacacagcagcagcacacagcagagccctctcttcattgcatccatgattgcttcacagcgtcccttaaattcacggcttgctccttccctttcctcgcagaggttttctctccagccctggactcctgtaggatctcagctctgagctccccacagctccggcctcctttaagtttccaggcagggggtggggtcggtggccccggctgggcgggtttctgtgtggcgggaggatgctcagatcccgggaattccggaccggtcc

SEQ ID NO: 151018 - DNA, 814 bp, Homo Sapiens
  misc_feature (11)..(11): n is a, c, g, or t
  misc_feature (23)..(23): n is a, c, g, or t
cccacgtcaanctgcggttcttnagcacgtggcaccagggcttggcatccccatcaggattccggcagtaattatgtttgcccaggcccagtgcctgggcactggggttctgtgctgtgtaaaccttgcctatcaggatcatggaattccacgggaggcaggaggcacccgactcggtgaggctgtgcgtgccacggtaggctgacccattcccaaagtagcagtcactgtttccctcagagcaggcaggggtgctgcagaactctgagctgtacttccccgccttaaagacgtagcaccagggctttgagtctcgatctgggtttctgcagtagttgtggttccccaggcccagcctgatggcatctggcctccgcccgctgtagggcttctgggccaacgcgctgctgttccagttggtgcactcggcgccactctccgctgtgctccacgtgcccctgtagctgatgccctggtcctcgtagcacgtggccctggtatctatttcacagcacttcccagcaaatccttcggggcactggcacacgaaatctgagaagtacagggcctgctggcaggtgcccccgttgaaacaccttggctcgctgcaaccttggtaagatctggctcctcttctgaatcgggcatggatttcctggctgggcgaaacgaagactgctccacacagcagcagcacacagcagagccctctcttcattgcatccatgattgcttcacagcgtcccttaaactctcacggcttgctccttccctttcctcgcagaggttttctctccagcctggactcctgtag

SEQ ID NO: 151019 - DNA, 1723 bp, Homo Sapiens
  misc_feature (207)..(226): n is a, c, g, or t
gggagagtatgaagtcgacggcgcgccgaattcggcacgaggcgggttcgcgaccgcagccgagagaccccgggcgaccggcacctccgagactcgcgggccacctgcctcgaccttccccggagcgcccccgcctccgagtcgctacttgccgggccgggccgggccgggcgtgatgcgccgcgggacccctgtcctggccactgnnnnnnnnnnnnnnnnnnnntgagaccccgagacccccagtgacgccgcagccatggagagcggcccgcgtgcggagctgggggcgggcgcacccccagctgtggtcgccaggacccccccagagccaataccttctccagaaggtgacccttcccccccaccaccaccaatgtcatccctggtccccgacactcccccggacacccctcctgccatgaagaatgccactagctctaagcagctcccactggaaccagagagcccctcagggcaggtcgggcctaggccagcccccccgcaggaagagtccccttcctctgaagcaaagagcagaggacccaccccaccagccatgggcccacgggatgccagacctcctcgaaggagcagccagccatctccaacagcagtgccagcctccgacagccctcccaccaagcaagaggtgaagaaggcaggagagagacacaagctggcaaaggagcggcgagaagagcgggccaagtacctggcggccaagaaggcagtgtggctggagaaggaggagaaggccaaggcgctgcgggagaagcagctccaggagcgccggcgccggctggaggagcaacgtcttaaagccgagcaacgccgtgcagccctggaggaacggcagcggcagaagctcgagaaaaacaatgagcgctatgaagcagccatccaacggtcagtgaagaagacgtgggccgaaatccggcagcagcgctggtcctgggcaggggccctgcaccacagctctccaggacataagaccaatcgcagcctgcagctgagcgcatgggagagcagcatcgtggatcgtctgatgacgcccactctctccttccttgctcggagtcgcagcgcggtcacactgccccgcaacggccgggaccagggtaggggctgccaccctgggagaggccccacgtggggccaggcaggggcctacctggcccgcgggccgcaacccatcctcattcatccctctgcctcttttgccggtgtggcccgcgcacagggtactacaatccactctgaaagagtgtcagcattacccaaaagcgtggcaacgtttacgccctcatgccggtgggctccgattgatcactcgcttgacattacactatggggttataccagcatattatggctcatgcggtgctttagaagctatcccgttgctttataactttgttatgaaatagaaccatgaatatgtgtgtaacatgacctatagtgaattggattttttctcctggttgatatccgtcctatagctatctattgatttttggccattgcctatagacgacgtatcttattacattatatatagattttagtaggttaaataaaagcatgtttgtgccgcccttaatgtcattgaattactatgtctcactgtttatcctttgattcataattttattttacttatgatagatttcttatttcaacggactttcgttatttcaattctcattgtataagttgggcg

SEQ ID NO: 151020 - DNA, 919 bp, Homo Sapiens
gtcgcaaggcgtgtgcgggattcagctccgtcgggtctacggcacgcgtgctcgggcccatctggccgatcgcccgctgtgcattgtgcgctgtgaacggcggccaaaggcactatcgctgctcctgcaagcgcctgcagtcattggcgtccaggctcctcctgtcgctgtctggatctgtgcgctgatgtcgcacttgagctcactgtggctgctgtcaaggagcgcgcacgagcagcacagcggcttggaacatcctcggcagtagatgctggtcagcgtaggggtgcggtggttggggttggagcagaagatgttgttggtcttgcgggtgccgtccaggaactcacgcaccgactggttgcgcagctctgctaggggccgggcctcgtgcttgaggaaccactggtgtgcctcgaagcacttggcgcagaggagctgctcgcactcaaagcaccagaagtcggccgactctttgcagcgggtgcacacagcctgcgcatccacaatctgccggtacaccgacaggcgccgctgcagactctcgaaaaagacgttatccagggcgggtgtgtctgcacctaggggccagggcgcctggcagatggggcactgcatgcccgacgcctccaggcatcctgagcacagcgtgtgcagacaaggcagcagcttcgggcacttggcttccgcctggcattgctggcagcgcagaaactggaactcctcctccgaagcgggggctcgctctgtagggctggggctggggctgggctggcggccttcagagggggtctcggggggaggcatggtgggctcctggggccgggcggggtcctgctggggcctcggagatcgggcgggtgcaggctccatggaccccagcttagtttcgattctcggtttagatcttggagtgcgc

SEQ ID NO: 151021 - DNA, 1688 bp, Homo Sapiens
agagtatgaagtcgacggcgcgccgaattcggcacgaggccggttaccggcccctcgctcgctgctcgccagcccagactcggccctggcagtggcggctggcgattcggaccgatccgacctgggcggaggtggcccgcgccccgcggcatgagccggtgaccaagctcggggccgagcgggaggcagccgtggccgaggagtgtgaggaagaggctgtctgtgtcattatgtgtgcgtcggtcaagtataatatccggggtcctgccctcatcccaagaatgaagaccaagcaccgaatctactatatcaccctcttctccattgtcctcctgggcctcattgccactggcatgtttcagttttggccccattctatcgagtcctcaaatgactggaatgtagagaagcgcagcatccgtgatgtgccggttgttaggctgccagccgacagtcccatcccagagcggggggatctcagttgcagaatgcacacgtgttttgatgtctatcgctgtggcttcaacccaaagaacaaaatcaaggtgtatatctatgctctgaaaaagtacgtggatgactttggcgtctctgtcagcaacaccatctcccgggagtataatgaactgctcatggccatctcagacagtgactactacactgatgacatcaaccgggcctgtctgtttgttccctccatcgatgtgcttaaccagaacacactgcgcatcaaggagacagcacaagcgatggcccagctctctaggtgggatcgaggtacgaatcacctgttgttcaacatgttgcctggaggtcccccagattataacacagccctggatgtccccagagacagggccctgttggctggtggcggcttttctacgtggacttaccggcaaggctacgatgtcagcattcctgtctatagtccactgtcagctgaggtggatcttccagagaaaggaccaggtccacggcaatacttcctcctgtcatctcaggtgggtctccatcctgagtacagagaggacctagaagccctccaggtcaaacatggagagtcagtgttagtactcgataaatgcaccaacctctcagagggtgtcctttctgtccgtaagcgctgccacaagcaccaggtcttcgattacccacaggtgctacaggaggctactttctgtgtggttcttcgtggagctcggctgggccaggcagtattgagcgatgtgttacaagctggctgtgtcccggttgtcattgcagactcctatattttgcctttctctgaagttcttgcactggccagcagcagccatctgtggtaggtacccagcaagcaaacagcatgtccagcatgtgatacagccataaggccagacaggaatcccaacaaaaggacagctagcaaagaaatgcacgagaacaggggacccggaagagctacagggaacgcacgtccgtatccaggaccaaaacagccccatcggcccagaggcaaccaggagaatatcaaagaccggatctatccctccgcagacacaccgaaagaagcaccgggacaggaacaccacaagatggtgaaaagaaagacaggatgaaccacaacacacaacgcaccggagaaaaccaaagacaacacaaaggaccaccggacaaagcacaagcaaaacagcaaaagacgcact

SEQ ID NO: 151022 - DNA, 241 bp, Homo Sapiens
ccggtttacgtggctttgggcgatgtatgcaaacaccgttgtcgtgcatcttgtctgctgtgcaataggagatcctgtatatggacacgttctcaatgagctggttggtgaggttgtctgtcagaataattccccgtggcgacaccttcagagtcaccttctgcagcttcttcccactggccttagctgaagccacggtcaacccacaagccacggtcaaccacaagccacggtcaaccac

SEQ ID NO: 151023 - DNA, 665 bp, Homo Sapiens
gattggaggaggtgaagagatgacatactgataaaaaacgcctgggttttcctcctgaaagatcatatagacatccacaggctgggtggtggggccttcagccgacagactctcccctttgccctcctccctgggaggacggttatatcgaaagacggtcccgccggccctgtaggacccagggggatccacagcccagttcccattgatgatggaccggcccccagggccacgaagtgccaggtagttggagctaggccggagctgggcaatctggagccgcaaggctcccgctggaatccacaagatcttctgatagcccagggggccccctcggtcagtgaggttccccgaaacaaggcgacaggtagaatcatcacccccacagactccacagccatcaggacgcctgccagagccaaggatcccatcacagccggggctcagacagcgtccagccacacagatgtcaggggctccaggctgacacagggtcccatcctggaccttttcagtgtgacggacatagaagcggaagccacggggccggcagttcagttcacagcgctgggagccctggacttcagtgaagggctcccacgtgatacagctggcccatgaattcctgggagttaaagggtgcgcactgcagggcccggggtgtg

SEQ ID NO: 151024 - DNA, 1667 bp, Homo Sapiens
  misc_feature (111)..(111): n is a, c, g, or t
  misc_feature (463)..(463): n is a, c, g, or t
  misc_feature (524)..(524): n is a, c, g, or t
gggaagggtagggaacaggggagattcccaaaagagcccggtcccccagggcaagcccccgatgaagcaggggacggggatgaaggacccccggcagaccaccgtgagccncgtaggtccagcaggccaggaagaagtagaccagcgtgaacaggccgagggtcagggggttgtaggagcctggcgggtcgtgaagaggctcaccacgctcttctccggggtgtgaagaaggccgcagccatggagttgtactcgccatctgcacaaaagagctgcagcgggtaggacatggagcccccctgcaggggctggcaatcccgcgacgagtagatcagcacgaaggcaactgtggccgtgacggcggccaccagcacggccctcaatcacctgcaggcagggccggtggatgtacctgattcgaaacatggtcagccagtagttcaaggcattgaacactgctccnaagcacaccgcccaccacgcccatggcgatgaaagaccgggatctcgtggatcgtgtaggnccattttctccgagtcaacccttccgaagttgatgaggcctgggctggacaggtcccacatgttcccgtggtaaatgctcagaacaaaattcagggtgaacgtggagatcatggaagcaaagaagatcctccaggtcaggaactggttccagaaggacgcaccctcctccaagctgaacaggaccccacccacgggggctccaaacgccgctgacactccggccgcagcccctgcggagacgaagtcccgcttctctgtgtctctgcggaagtactcgaagatcttgaaatctcgtttcagtgacgttgaccttccctgagagatcccggcggcaatcactgaacctgagtggatcatcggcccttcctttcccacggccaggcccccgaccacggacaggatcacaccagacactttgatcaccaacgtcttgagccgcaccacgtgggggatcttcaccccgttgaggaagcacttgatctgggggattccgctgccagcagccaccggctctatgaaagccacaatcacagagcccacgagcacgaaggcggcgttcagcgtggcccacagcaacagggagaaggacagtccgcccttctctgtgaacttgtcgatattgcccttgatgaccctgtacttgaggccagccaggttttccaccacgatgtcaatgaagcaggccacgaggcccgtgaggatcccaatgagggcgcagatgacccagcgcttgatctccaccgtccggaaggccgtgtgattgatccgccgctcctcctccaggaacagctggttctcactgttgtcatagtccaagctctcatacttgagggacaggagcttctcgttgtgtgggatctccttggggaagggatgtggagggtccatatccgggtccaaaagttcatcatccagctccacgctgctcatatgtccgactcggaaaagcgcagaacgtggtgactggcgcgcagccccgggcccagccccgttcagcagcggcgtccccccgccgggccgcgccgtcctccgcagcagcggcgccgcctcctcgtcgtcccggtcccggccggaccaggacaccttcttagagacgttggccctggctcgtcgcggattcggcgccggccgtaacttcatcc

SEQ ID NO: 151025 - DNA, 1413 bp, Homo Sapiens
  misc_feature (29)..(29): n is a, c, g, or t
  misc_feature (193)..(193): n is a, c, g, or t
  misc_feature (1400)..(1400): n is a, c, g, or t
ccagggtgcagccagcagccggcagcttncacctcataagttccctccacttcaggggctgtctccagctgggccttgatctctgcgatctccttagggggcagtgaagatacttgttccctgaagaagcatggggagcagctgcctgaggcggggaggtgggttagtatgtccccagcgccatacttaactnccaggtcatagcccttagcgcggtcaggtctctctccttcctctatccgattggtcaccacagggtttccggtgatccgggtccgcttgaagggagtcatgggcttcagctgtgcagccagggggctgtgggcgacggcagccaagaagcgggcaatgtagaatgtgccggctccttctgaacccgactccccaggtcccagcagctcccagagcactgtggctgggaagtagcccacaaagctggtcttacaatggacatggagttcatagcattcaccggggcccagtggacagggcaactcctggtcttcattgtagaaagcaaactggggtgtccggcagagtgggaagaggtgagtgagggtaacagactgggttccgccattccgaagcctcagggtcagcacctctttgcggttcaaatccaggcggataaggagctgcccatctcgggcttcatggggcccctggacttccacatccacaccatgtttcccatgaagatactcagccctgtcataaaagatcttggctagcagtgacttgtggtgtttgctgatatctgaccccagcttcattctcctcttttctgggaaccgcacgtcggcccagcggtcgagtctgaagaacctgacccgagtcttggtgacgtaggccagatttgcaatcttcattccatacagcatggaggagaagccaggggcgggggtcccaaagctgatcttgaagtcgcggttataaatggtccgcagccgctcgcgatctgtctccatgtccagtccccgaacgaccaggaaactctcgaaacactggcccgcctcccggagctgccggcagctgaacttactgggcatcgcggcggcggctgcggcccaggcaggagggtccgtggaaatgaaactgaaagtcgccgctgcagctggaagttggcggccctgagctttcccttcggtttcttcgtcctatcccctccccgtcttcgcattaactctttcctaaagcgtctgacccctccctcagggccctccccttaccccaagctccctcccctggcttctagccagtatcagaacgtggctaccgcttggggccctctgaacagcccgggaggacctccgagcctcagccagggctaccctcacgcccaccctccagagcctcgggactcagtgaaaagcaggagagcaaagggcagggctgggatntaggtcgggtgcg

SEQ ID NO: 151026 - DNA, 1030 bp, Homo Sapiens
gagtatgaagtcacggcgcgccgaattcggcacgaggggcgaggagctgtgcaatggccacgggctctgggtgaagctgacaaaggagcagctggcagagcacctgggcgactgcgggctgcaggaaggctggctgctggtgtgccgcccggcggagggcggagcccgcctggtacccatcgacactcccaaccacctccagcggcagcagcagctctttggcgtggattatcggccggtgctcaggtgggaacaggtggtggacctgacatactcacatcgcctgggatcgagacctcagccggcagaggcatacgcagaagctgtacaaaggctactctatgtacccccgacatggacctacgagtgcgacgaggacctgatccacttcttgtatgaccacctgggcaaggaggatgagaacctgggtagcgtgaagcagtatgtggagagcatagacgtttcctcctacacggaggagttcaacgtgtcctgcctgacagacagcaatgccgatacctactgggagagcgatgggtcccagtgccaacactgggtacggcttactatgatgaagggcaccattgtcaagaagctgctactcacagtggataccacagatgacaactttatgccaaagcgggtggtggtctatgggggtgaaggggacaacctgaagaagctgagtgacgtgagcattgacgagaccctcatcggggatgtctgtgtcctggaggacatgaccgtccacctcccgatcatcgagatccgcatcgtggagtgccgagatgatgggattgatgttcgtctccgaggggtcaagatcaagtcatctagacagcgggaactagggttgaatgcagacctgttccagccaactagtctggtgcgatatccacgcctagaaggcaccgaccctgaagtactgtaccgcagagctgtcctcctgcagagattcatcaagatcctcgatagtgtcctgcaccacctggtacctgcctggggacacacactgggcaccttcagtgag

SEQ ID NO: 151027 - DNA, 1129 bp, Homo Sapiens
  misc_feature (23)..(23): n is a, c, g, or t
  misc_feature (586)..(632): n is a, c, g, or t
  misc_feature (869)..(879): n is a, c, g, or t
ggatgcgggtatcagtatgaggnggtatagggacggtgagttcttgcggtttgtgtggtgttgtgttagtgccgcactgtctatcgtatgtttgtatggttctgtctttctcttactctattggcggtttatactcttgggttgtcttaaagctctggtcggtgtgttatctccgtggtgtctgtgcgtttggtgttggtcgattcgggtggagcgtatagattggtctgatgcgcgcgcggatgttgtactaggatagtggtcgggcagcagtaaaaattaggaggctcgcgtttatgttgtggggtcgtgggaggtgtatcggggttggattgtgcatgattgtgatctgctgggcgtggttccagtaacgacgtgcgtgtgacatctttcgaagaacgatagagtagagtaaagagcggggtattgtatttgtggtcgttggaggtaagtgagcgtggtagggtgagcagggtgagtcgaggttcgttttgtgttagttgcaagctttaatcttttcggtgttatctccttcgctgtggtggggggttattgagctagttgttatgctttcttcctgttgtcnnnnnnnnnnnnnnnnnnnnnnnnnnnnnnnnnnnnnnnnnnnnnnnatgtcctctctttcgtttctgatgtggggtggtgtttctgtgggtgttcgtaatacttatgctgtgtatttcgctctctggggtgttttcgcgttgtatggtggtcgtttgagtgtctgggatctgggttagtgttttggtttgacgtgaggtggagagggccgcgtgcccgggcggcagggcaaacgtgggcgaggtgggggaggggggttaggaggttagtgatgggtggctggnnnnnnnnnnnccccacccccccaaacccagccggtcccaccccgagcgcggctgaggaatctggcgccggctcctacaacaatagtgcccgcccacctgaccccctccccgggagaaggcgggggcggcgagggggcggcggccaccggggagcccgggccaggccgggagaggggaacgaacccgtgctaggtggaaggtgggtccccgagcacctacggggccgtgcggcggggaggaaggggaggagaggctgcggg

SEQ ID NO: 151028 - DNA, 854 bp, Homo Sapiens
gttagaataacagatgaattcaagaacggtagttttagtgtatagaaatctgaaatggcatgagagaggagagacatgaaaagcccaatagataatacagtcaacatgggtcagtagtaaaggcgatcaaatattctgtagcactcatgcaagtgtcagcaaagacaaattgcagagtgtcggtgcagagagtgaggatgtcctccatcacgcacagcgcccagcaggcgctggcgggccgcgtccctgtcgcccaaggcacgcgctgtgcgcacctcacccgtgcgcaaccccaggctgaagagcccgggctcgctggcctgcagcacgtggtaggacagccaagcgttgtgtcctgagtctgcgtccaccgccaccaccttggtcaccaggtagccgggctctgcggcgcgtggcaccatatcgaagagggcggagccatcaggccccagcgcggggtacagcacccgtggcgcattgtcattgaggtcgcccactaacacgcgcaggctcacgttggcgctgagcgcgggcgagccctggtcgcgggcctgcagtgtgagctcgaaggcgcgcagctgctcatgatcgaaggcgcgctgcgcgaacaccaccccgctctgcgcgctcatggacacgtaagaggccagtgccagaggctctaggtcgctggccatgatagagtaggagacttggccgttcaaccccaagtccaggtccgaggcgcagacttgcgcgatggaggccccaggagggttgttttcgggtacactgactaagtaggacgcctggtggaaaaccggagcgttatcctcgtgccgaattcggcgcgccgtcgacttcatactcttccc

SEQ ID NO: 151029 - DNA, 1244 bp, Homo Sapiens
  misc_feature (811)..(842): n is a, c, g, or t
ggaatatattaagcctagctgacttatgttggttcttagggtgtcaaattacgttatgggatcgttatggtaaggatagtgattgttgaggcctgagaagacctgaggacgcaataggggagctgaagccgcgtggggcagaaggtacgcgtggcgtccataagctgctaggtcacgtgtgactacagcgcgtcaagaatatggtgcgttcgccggtcgctttactgttgtacataggatagtaatgggagtcggaggggcgtgagcgagcgatcctgatgacgtacaagggatggcgttctccactgaagtatagaatggtgtacagtaaactgcgaccgtattgccttcacggagtacgatcggcgcgccgctcaagcgggatgctacgcctagataaatgtttgcgtcgacaacgcttgtgtatagaggcatgtcttcatatagggcagaagcgtatcgcttagcgaacgcggttgtacgggacgcgtttttgtttaaggagccggtgggaagcgaggccgctcaacaggtttgaaccctttccggggcaccgggaggtcctgccatgggcagcccccggggcgccggcgtccggtcaatggttgtccgcgggccaccggggcaggtgccgccattgcttcagcgcaaacggcggattcccgcactccctggtgacggagcgcaccggttccgggtcctctcggctgtttccggatccgctcggctgtttccggatcggccccgggctggaggccccggacggaggatggggggattgccgagcctcggccgaagattcccgagtcgnnnnnnnnnnnnnnnnnnnnnnnnnnnnnnnntcttcttggctgggtcgcgcggttcgggaggacgcctgcctttcaagcccggaagaggatccttaagaggtcttgcccggcgtctctccgtgaccttggaagccctgctccaattatgcctcctccgggacaccggcctgcggagagctccccctcgctccctcgctgcccctgcccggagccagcctttgatcggctccggccgcccttccgcccgagcctggcttgcgttaccgcgaattgtggcggggccctccctgcacctccgccctcttggagcgtccctcggggcagggccgggtcggcttcatttttctgagcgcctcggagtccccgcgtagttagtcggagtctgaaacttgcacgtccccacccccatttgatcccgggaattccggacgc

SEQ ID NO: 151030 - DNA, 918 bp, Homo Sapiens
caggggctctgagctgtgacagtgtccccaaataggggcccatcagctggcacgacctggatgatgttggggggcaggccagcctcccgaaggatgcggtagacagcatagctggccagcatggcagggtcactgggctgtccataggaccacgttgcccatcagggccggtgccaccgccaggtggccgccgagttgcagtgaaggtaaagggcgagatggccgccacgaaggccctccagaccccggtacaccgtgctggtggtgctcgggggcacgctgatgggctgctgcccctccagcgtccaccgcatacttggcattgaaccggaagaagtcgatgagttccgctgcagcgtcaatctgccgcttggatcacggtcttaccctgtcccaccatggtcttggcgaggatctcagccctgcgcggcccactcagcatgtctgccgccttcaggaagatctgggcccggtctgcaataggcttcaggtcccactctttccgggcagccagggcagcctcaatggctttgttgagcaggctcttgtctgcataacagaacttggccaccttatgtccatggttaaaaggcgacacttggtactgcacgtccgacgtccacacctcctcatcccccaccacgcatgggatggcttccatccggcccttcaggtccttcaaggccttttgcagggcatctcgctcagggctgccctgcgtgaaggctaagacgggctcgttggccaccttcagggaggaggtgtgcttccaccgcaggccggccccggtccaggggcgggacagcagggcgcggcggagcgcgggcgccggcagcagcatctcgggttagaagcggcctcgtctggaatcgccacccaggcctcgctaccttaggggcgttggcgcgagcgttatga

SEQ ID NO: 151031 - DNA, 911 bp, Homo Sapiens
  misc_feature (20)..(20): n is a, c, g, or t
tttaggatatttttgtcagncctcaaaaattcatcttcatattctcaaagtccctactgttacctaaggcagccagctgtgttggtgagcaccgattcccactcaatatggcgtggcttacagtcttcattaggttcccgctcccaaccagaatgaggaatgatcacttcatctgtcaaggcatgcagtgcatggtccacaatctccattttgattgagtcatgggatgaaagattccacagggttccggtaataacttcagtaaggtccatatcacgagcctttcgaagcaatcgcacaagggcaggcacaccatcacagttttttatggcaatcttgttattctggtcacgtcccaaagagatattcttgagagcttcacaggctccaaggtgcactttcttttttggatggtctaacaatcccaccagtactgggatgcccttgagcttccgcacgtcagtcttcaccttgtcattgcggtagcataagtgttgcaggtatgcagctgcattggacttgacagcatccaagcggaatccaagcatggcgatcacctcttgcagctcttgctgtctccaattaggaggtggaggccctcctttgcgcaggctatcccagcttgctaaacttcctcgctcatgctgggccaaaggagcccagtagtattgatccgatggcacctcctcacccatcatgtcttcatagctcctgaggcgccgacgagggtcagagggtgtcccagtccgacgggcagtgccataatcagacatcataccataatccaggtcatcatagcccatactacgctggtcatcctctagcccataaggctctggatgaaagcgatgcagatccacgctgctcccacctacccgaacctggggttggggcccatacacatcctgtct

SEQ ID NO: 151032 - DNA, 980 bp, Homo Sapiens
  misc_feature (74)..(82): n is a, c, g, or t
gtctttgccttttcaaccccccttgatctccttaaaacagtcctgcctggttatccttcaagaccccactccgnnnnnnnnngaatggtttcctgccaaccagatacgggcccccaaagaattccatccaccaccgctcagtccaaattgccctcaagtcatcagatccaacccccagcaagatgttgaagacattctgcccacagtgacctcttgcaggatcttcacccccgtacacactcgcttacccgctgatgcacctggggattccgaacatgaaattccttctccccttcctcaactcgacggaaagggatccattcctcctgcagcgattcattggtgggctggttctcttctggggcctgcttgcagaaataggtggttgccgctgaccggtccctgtgctctggcacagcaaccacaaagccacgtgaggccagctccatgcagaaggctgaatacaaagtcctgaaggctcctaggccatgggagaagatgatcaaggggtatccagagtcctttgtcttaaaggggccattccagctaacaggcaggcgacaagatcccaccgccaggttgaacagcaagcccccgcagcgcttattaaactgcaggtactcggccaggccagtgcagtactcatagcggggaatccacaggggctgctccatggtctcctctgccttttggcaggggtagaagagtcgaaagaagctcccctggagattctgaccctccatcacatccccacagcctacgaggtggggtcctgtgacaggtggaaagcccacagactggttgacccccatttcatcaccgggtgaatcaaatgacttgccggagctgaacttgctggccagtcaagctgattcctcagaagcagcccccgacgcgtggcggacgcgtgggtcgacgatatcccgggattccggaccgggtaccagcctgctttatgaccactttctatattcaccatg

SEQ ID NO: 151033 - DNA, 1077 bp, Homo Sapiens
  misc_feature (84)..(84): n is a, c, g, or t
  misc_feature (106)..(106): n is a, c, g, or t
  misc_feature (113)..(113): n is a, c, g, or t
  misc_feature (122)..(122): n is a, c, g, or t
  misc_feature (146)..(146): n is a, c, g, or t
  misc_feature (156)..(156): n is a, c, g, or t
  misc_feature (182)..(182): n is a, c, g, or t
  misc_feature (202)..(202): n is a, c, g, or t
  misc_feature (222)..(222): n is a, c, g, or t
aggggggacagtccccggcaggccttgaaggcccagccagctgtggaattggtcaccttcccaacagcaatcatcaccgacttntggccatggccctctcatcctnccatctnttcatcatnttcttcatcctcctcatcgtcttnttcctctctncccaacccattgcgctcctctttctntagggagtcaaagtgggtgncctgatgctccaagaactcntcaggggtggcgcagagggttagagcactcaggaccactcataggggctccatcttgactttcggatgggggagaaaggtggaggcagtggtgttgggggaggcaaaggaggtggcactggtggctcagctaccgtagcagaaaggtgctgggcctttcgatgagccacccacagctcgggcgaggggaacagctcctggcagtcccagcactggtattggatctggtttgcagactctcggaggtgggcatcctggtgggccaggagctccccaggggagaggatgagctggctgcattcaccacactggaagggcccctcagcacccggcaccagctccggctccaggccaacattctgtgtggtcagtgcctcctcctctgagacagcaagcatgtgctgctcctggtgtgagaggacttcctccagtgtgttatagaggctgccacactcagagcacatgaactggtgatgctggaagaagagggatgaggcaagggcctccccaggtgtcatctcagtcacttctgttgacatctccatcatctctgccgacataggtgttgacatctccactgcccctggtgacatctgtgttggcatctcggccacctcagccaccacctctgccattgtggggaaggcagtgccagctatcgctcaggaagtcttaatccactgtttctgcttcagtcttccgtgatcccatgtctctgaagcctacacacaccccacggcagcccgtttctcttatctcctgcagcccctgccgctcttgacacagaccctcggctccaggcgtgtgggacccccctcgtgccgaattcggcgcgcctcgacttcatactcttccc

SEQ ID NO: 151034 - DNA, 1060 bp, Homo Sapiens
ggcttttcattgaagtgtgaccgaagtcatgatctggaaacctccaagaggaccctggtccacgtttgccgcgcatgtcggaaacccgtttccctctcacgacaacttggaattgactctcctgcacatatggtggatggttcagctgctagaatttccgatgcaggacttctttcaaaattgagtggatgatgccttgcagagcctgaaagccgtcattcacgggaaacacatgatccttactgtccgcaatccgggccagctgtgtctcattgaaatctttcacaccaacacagtaaacaattgcaccaagatctcgagacctattagcctccctctctgaatagaaaaagagatcttcatggagttctccatcagtcaaagcaatgatgacgctggctgtcctgtacccttgtctgttttcataataaatctgctcactggccctttcaaatccttcatgcatgtaagtgtctcctcctggcagaactttctggagttcttctaggccttgacggatttgttctctgtcttctgtcagtttcattaaggttgttcctcgggtggagaaaacaataaaggacattctcaactgtgggctgatgaatttgtgagccaactgttccacaaagtaatagatttcattccagtggtgcagcacacttcctgatttgtccaaaatgaagtacaggtcaaatccgccgtagcaggctggacccccatcctccctgcgtcccccttgcccggcgcagatgagcaccagagtggccaaagagagccactggaagccgatgccgagggctctccgctccgccgtggccatggcccgcagcccggggagagcagggtccgctccttcccacgctccgcgaactcgccacgaccctcagggacgcgccatccgcgggcccttcctcgcgggtcctttattccccctcgctccctcgcaactccccggaagcaattgtctggaggagttcaaggtttcccctctggtttccgctccgatgctgtttctgggtttcgggtttcaaggatcccaatcctgtcctccgcttct

SEQ ID NO: 151035 - DNA, 740 bp, Homo Sapiens
  misc_feature (577)..(577): n is a, c, g, or t
aggggagagagtatgaagtcgaggcgcgccgaattcggcacgagggctcttcgtgtgtccgtggatgcggaggaaaataacaggcaaattacaaaaagaaggtgctttatcacgagtatctgacgaaagcctcagtaaggttcaggaagcagagtccccagtatttaaagagctaccaggtgccaaggctaatgatgacagcaccatcccgctcacgggagcagcaggggagacactggggacctcggaaggcacttctgcgggcagccaccctcgggctgcatacggaagagcactgtccatgacccatggctctgtgaaatcgcccatctccaacggcaccttcggcttcgacggccacaccaggagcgacggtcatgtgtaccacaccgtgcacaaagactcggggctctacaaagatctgctgcacaaaatccacatcgacaggggccccgaggagaagccagccccggaaagcaactaccggctgctgcgccgaaccacagtttacacctgctacaccgcagcctttgtgggctgcagtgcacgccactttcgagctgcgactctcgcccangagacgtgagagctgtgggcgaccgtgtctactcagaagagtgcctagacgtactcggctatgtaccgtgcaagcgaatcagcgagagcggtgaaataacggtcgatgcaactacacccaagactcaaaaggaggggaagacccagtccctttcttcgggccc

SEQ ID NO: 151036 - DNA, 873 bp, Homo Sapiens
ttattttcgaggccactgtttaactcacatatgggacaaatcttcccaattcagttcacgttcacagtcgaggcgctaggggagcgattgcagagcagtgctgcgcgggcgccggcgagtcagtgcagcagcgacgccgcgcgaacaggtcgatctcgcacagcttgcagccggtgctctgcagaagaagaccaggcgctccagtggcaggcgcaggaaatcctcctcctcggcgatctgcaggaagtgccggaaggtgaaggcatccaccgactctcgcagcgaggccaggctgaaggtggtggccatctggccgatgttgaggcaggtctccacgctcatggccgctttcaggaactcctcgcacagctccaccacgggcagcatctgcaagaacacggccgcgcccagcacgtcctgcacgcagtccaggtccagtgtcacctcggcgctgtaggcgaagtcgatgatgtgccgcaggccacgggccgacacgcccttcagctcgatgacgtcctggcttgcctcccgcatgccgccggtgaacatggccctgaagtagtcgctgcaggcagccaggacgaccttgtgtgcaggaaaggcctctctgttaatagtcagcacaacatcgaggagctggccctgagcgcggagggtggccaggccctgcaggaggctggtgctgtggctgggtgccgagaaggtgcacttgagggccccgttcttgtcggccgtgctgttcgggcgctcggggcccgggcccgcgccgaaagcgccgccgccaccagcaccaccgctgctaccgccggactccgccatcttccccctcgtgccgaattcggcgcgccgtcgacttcatactcttcgccccta

SEQ ID NO: 151037 - DNA, 784 bp, Homo Sapiens
caaaagtgattcgaggtcagtcgagtgtccaacacagctgtaatcttgggttggctacaatccttccatgcagactcacagtcacatcaaactgtttccggtccaggggcaaaaagcttttctgcttgggaagattaaaattattgttcaagactgcagtttgaagaccttttgcccgaatttgagttatggcctcagtcatcacctgggaactgctttgccactcgctcactggtcaacagagagaaaaatgagtccacaggcacggaggtctttaacatttcagagcaaagtctcccgaaattctcgtacaaaaccctctgctgttatttctgctctcataaatctcatccagggcccattttcaccaccttccatcaaggcctttaatatagttccagaagggatacgattctgtacctcccattctgcagcgactctccctggagaaggaatgagaactccgcccatgtcgaaaatcaccgctctgtaggtgctgcctccaaggtgtgtccatcggtgggacccctggtgcctgcgctgggtgtgtttcaggaaggctgttctccacacccactggagacggggggactggaaacagctcctgacacacatggtgaggctgaggctcgcggagccagggatcccgcgccgtcagccgaggtggattaggacgaggcctctggagcaagcagaggttaactcgcgactgtgcgaaaacctgcagctcagcctaagtgtggcaccccacctcggccgaattcggcgcgcctcgacttcatcc

SEQ ID NO: 151038 - DNA, 781 bp, Homo Sapiens
  misc_feature (100)..(100): n is a, c, g, or t
  misc_feature (103)..(103): n is a, c, g, or t
  misc_feature (122)..(122): n is a, c, g, or t
tcatggcccagttcgactttgagagcccttgagagagaggaccccaggcaagcagaccagggcccaaggaagcacatgttgaggagatgcccagctcccngcntgcaccctcacccccagcntggttctccacagccaggggcaccatgggctgaggtgggccggcttcccggccccgccgtctccgcagaccctccatgtccacgtcggtgtcatcgtcactgctggagcagcggccctcctccctgatccaagctgctttgggggttgaaggcaggctctgtggagggctctggccttccaggtcctgtgtgtctggtcccaggcctgtcaccacggtggtctcctgcaggtctccctggactactgtgtctcctgggccaggaggctccacaccacaaacatcaccttccagggtgcccttgacctcagtctcctctgttagaatgctgccagactgagggctttcagtctggaagagcgtcccttctccatccatggtcccagctaattctttcccatctgtcttggaggggctgtgaggggcctgcagggctctctcagattctgggtccatcctggatgccgggcccagtgtctccactggcaggctctcggagccagcaagcacccagctattatcagagtctgggcaggaggccatagttgctgaggtccctgaggctgctgtggctgccacctgaaccagctcttgcttcggtcttcagcttaacttgttgcacctcgtgccgaattcggcgcgccgtgacttcatactctc

SEQ ID NO: 151039 - DNA, 1075 bp, Homo Sapiens
  misc_feature (970)..(1035): n is a, c, g, or t
agatgtggctgactgggtagatatcgaacgagagggactcacaggacgccgaccgcatgcgggaggcgagggagggtgtcagctatgcgatatgccgtgacatacttgcgcaggagcgcaatgggcggggcgtcggtttctccagcgtgcgcggccctgtcggggcggcgccgcttctctgctggcctccgcgcctttcctgtccacggcccgcccgtccccttatcagcggagagcgcggtcaggtgggccgtatgggaattgccttccgttgggttatgacccccagggagtcttgtccaggcgctggcccctccatttccaatcccatgtctgggggcatgttgttagcggcgcaccagggttggttcataaaaatcattttcattaatgcccgcctggatgttgagtctccctcgatgtgcccccaggccatagcgcttcaccgtggaggcatggagctggaagtctgtgatttttaaggtttccagaccaagaggtgggcaactctctctgacatcttcacgggccacacggacactgtgatcatcgttggcagccttctcagagctcttggttctcataacttttttgttgctgtgtttacctggtggaggcggctccggagccgacttctccctcttgggagctttcttgggcttggtggccctcttgggcggcctgggctcctgcgggcgccgctcccactcctccccgggccccgcaggcagcggcggagagaaggtctcgagctcgggctccgggcgcgcgtagtagggctcccggctccagatctcctgcccgtaataatcagggtcctcgagggctgcgccctgggctccgaccccggccagggtcactgccaggagcaccagggccagcgctggggtagcggtccccgggcgggacatgcctgctccgccccgcgcccagggcagggtcacggtcaccgggggcgccgggcgggctnnnnnnnnnnnnnnnnnnnnnnnnnnnnnnnnnnnnnnnnnnnnnnnnnnnnnnnnnnnnnnnnnnaggcggccgaatggctgcgcgtggaccggcatcctggaaa

SEQ ID NO: 151040 - DNA, 861 bp, Homo Sapiens
ggtaacattaaaacgataaacgaagaagattaaaagaacacccaggtatagatagggctcaggatgacaatcagggtgagggcctggaaggtagcatactgtttagacttgctagtttaggccgagccgggggatcagggaccggaccttgcgtagagcaaatatcacgcctggagcagcgttccacttggctccagggccgtcctgcccagcatgcagcgtctccaggccttttcttgctgccgccgggcttccaggccctccaatatcgggctggtggcagtgcccatgcatcacagtcacccgctgtccctgggtgatggcccggttccggcagccgtgccagcgcgtggtcccggcaggtccaatacaccttgtccccgacagccttctcccgcttgtagaggaacgactcgtgtaccaggaagctgcccccgtagcacgtcctcaggaactcgaggggccgggcctgtcccagccccaggatcgagcgcttcttgggcggcaggctcagcagtgacagggctcggggtgcctcctcctcctccagggccggcttgctcagcaccagcccaggagtgggctcgggctcctcagggcactgccacgggcccaccccctccaggggctcctccactcggcctccagggccctcaggaccctggggctctcccaagccctctggcagggccaggctgggcagtttctccctctggcgccgggcctccaggccttgctcatcgggcgcgtggcagtggccccgcatcactgtggcccgcaggcctcgggtgatggcccggccccggcagcccagctcagccctcgtgccgaattcggcgcgccgtcgacttcatactctct

SEQ ID NO: 151041 - DNA, 901 bp, Homo Sapiens
tatctactgcaagcagaccacttctagcatcgatggcatcatgatggaatggcacagatgtgagtgcagctctgattagctgagtgcgaagttcagcatggcttccactcatgctcagctcttcatactctctcatctgcttccagtctagcggggatgagaataagaacagacagggcaggtgacgggagtgtttggacgagtagaaagagggttctagtcagctggaaacctctcccatttacctgctcctcagtggagaaggcaggcaggatgctctagtgaaagtggggaagggaactagaaggagtcggtggaggggtccgtgcctttggtaagtcccaagaaagcaggacaatgcacctcagcaccttgtccagggcagataggatccaggagtgccccaagagttgacaatggagaaggcaatgggggtaaaggggtgaggggtgggacacaggagggctcacagaagtagtttgccatttctgtggattttcaggatacggccgagtctctgctttgctgtggccaggccctttttgggaccctttgcttgtcctgcctgattgctctgggagccaactgaagggcgccgctgggtcaagaagacaccgggggccataggtgtggtgctgcggtttgcctgggccatgccaaaggcattgggacgagcggtgtactcatggtcagcgagacttcctgacagggcctcttgtttatgctcaggaggaggcaggggtgaggaggaggtgacaagttgtggtgtggcagccacagtgggggctggtactgtcagactgagattggagtcttgagggcgaggctgttctacctccttcagcaaaggcttcttctcctcgtgccgaattcggcgcgccgtcgacttcatactctctcc

SEQ ID NO: 151042 - DNA, 1102 bp, Homo Sapiens
ctgtagtggttaccctggttttgacagcccaaaccagctccaggcaggaggactgaacttaagcctgcctccaccttggcccccatgcagttctccaggctcggagtgagctgagggaggttccagctcttgactccactctgtcccgggaccctgggactatctcccaggaccctccacccctggtgtctccaggtctctcttgctctggggatactcagacagcaccaggcatggaagcaatggggcccgggacatgggcaagcctgtgcctgccccgatcagcatctgggcccaggccaggcctcacacccagtactgccattcttaagggcaggttgggtgtccggcagaactgcagcagctctgggtcaggctggcctcctggagggggccctggccaggcacagctgtgagcgggatggcctggcctggctccaccttgcgaaaggtctcggtgtcaccagccaggccgttgcggggcttggcagtcaggacctggacgtcatgcttgcccgtcttgttgcgttttcggaggtagaagagcaggggcaggatgagcgccaggagcagaagtaccaggcacatggggatgatgacgctgaacatgttggcctcaaggaagctcaggaagcctcccttggccacagcgggctcagggctggatgccatggggcctggctcgcctgtgggggtgctgctctctggcttccctgcttccgtccgggcggcctcggggacactgagcagggccacgctgtagggccgggcagcattgtaaggctcagtggcaaagtccagggaggccacagcaggcgggacgccctgtgcccacagctccagagtgagactgtcacctgcggggccgggggccctcccctctggcctgcccacctccagccccagcctcccgtcctcaaggtcctgctgagtgaactgctccaccagctggctgcccccgggctccgtcctggctcggggcacgcggaccacgcggccatgccggggtccctccaggaggcggaagcgcggcacactgcctgtgcggttggccagctcgcctcgtgccgaattcggcgcgccgtcgacttcatactctctc

SEQ ID NO: 151043 - DNA, 2396 bp, Homo Sapiens
  misc_feature (293)..(293): n is a, c, g, or t
  misc_feature (309)..(309): n is a, c, g, or t
  misc_feature (323)..(323): n is a, c, g, or t
  misc_feature (372)..(373): n is a, c, g, or t
  misc_feature (380)..(381): n is a, c, g, or t
  misc_feature (471)..(471): n is a, c, g, or t
  misc_feature (475)..(475): n is a, c, g, or t
  misc_feature (537)..(537): n is a, c, g, or t
  misc_feature (547)..(547): n is a, c, g, or t
  misc_feature (620)..(621): n is a, c, g, or t
  misc_feature (627)..(627): n is a, c, g, or t
  misc_feature (664)..(664): n is a, c, g, or t
  misc_feature (684)..(684): n is a, c, g, or t
  misc_feature (692)..(692): n is a, c, g, or t
  misc_feature (695)..(695): n is a, c, g, or t
  misc_feature (710)..(711): n is a, c, g, or t
  misc_feature (721)..(721): n is a, c, g, or t
  misc_feature (723)..(723): n is a, c, g, or t
  misc_feature (727)..(727): n is a, c, g, or t
  misc_feature (729)..(729): n is a, c, g, or t
  misc_feature (738)..(738): n is a, c, g, or t
  misc_feature (742)..(742): n is a, c, g, or t
  misc_feature (754)..(755): n is a, c, g, or t
  misc_feature (760)..(761): n is a, c, g, or t
  misc_feature (772)..(772): n is a, c, g, or t
  misc_feature (781)..(781): n is a, c, g, or t
  misc_feature (785)..(785): n is a, c, g, or t
  misc_feature (789)..(789): n is a, c, g, or t
  misc_feature (815)..(815): n is a, c, g, or t
  misc_feature (823)..(824): n is a, c, g, or t
  misc_feature (968)..(968): n is a, c, g, or t
  misc_feature (990)..(990): n is a, c, g, or t
  misc_feature (997)..(997): n is a, c, g, or t
ctcatgtatacatacatagttgatcagagcgtcaaagagtcgatacgtaccgtgggtggcgtgttgcggcggcggtcggcggattgttatgatgatggttggaaaaaggcggcggacgtgaggaggtgatggggaacttagttcacgagacaaaggcatttctcagggcggtcaggacagaataagggcctcggaattgttcttcgagtcccgagggtcggtggagccgaggggtgttggtgggcggcgagggtagaagctgaaaaaggggtcgtaattagggaggtgtgagnataattgtttgggtanttgcgcaccagctnaacccacgaggcccggcagttaggcgggtgggaccctttgccggcggtnnaccaaanngccgtctggtggcgggttgactggcagcgtctcccaacgaagtgtagtgagccgggtaattctccgcccgccgaggaaggggagacaatnggcngggggggcgaggcgcgggtaaatgtccggaaacggtgggggagaaaggctgtgtgcgacgtntgggcccggnttccgctctcctcgcgttaatgcaacgccgcgcggaggtttgcgtgggcagagagaaatatacccccacaggnnaaaacncgggcactggagattcggcgccgggctctgaaagagncgtccccttccatgcctccncctctgcngtnttcaattttctcttnnctgcgtgcgntnaaantntatattttncccncccggcgggttnntccgnngttgcacgggncggtggggnggcntcgngacctctcaatgcataacactgacgnacaaaacnncttcccgcgagcccattccccggagcgctggggcacgcgtcgggtcccgtcaacttgtgctggggctgggggtggttgaattggtcgctcccctgcccaacgtggtgtgccccgccgccagaagcagataaggcgcgggtcggngtgacttacgcgtacacacagngccctgncgggaaacctgcgtgtagagagggggatttttctcctcgtattccggatgcagtgtgtgggcctgtgtcccttatgcatacggggtaggggtgcccgtgtcgcggtgtcccccaagacagtacgtcttttggcttgtgaggtgggttctgccccctccctaaggccattataccgcttgccgacccgtgctttccaggaacggttatggttggttcaaggcaaacattgactgggggccgaagggatgcggggcccgtgtctcttgagccccagggtcctcttttgcaggctggacagctggctgaccatctgcttctggaactttgtggggatcttcaggaagatcagccgcctcctgcaaggcctgggcctgtccaggcctcctcccaacctctccctgctccggctcttgtttctctctttctgagtcgggcagaggcggcgccatctggccctggacccctggagcctttccgcccgcgtgtctggatggaggtttgttctcttctggcacctctcggtcttggccttcatctaccaccaccttgtcgtgaggaacaggaggctcgtggcggtgggcctcgcccacaggcacagcaatcccttgcccagggcgatcgagctgtgcctcctccggtgcctccttgccatcttcccgtccaggcacatccacgggccccttgatctgggcctgctccagctcctctctctccttcggcagcttcggcttctcccggccatcctcagccacggccacaaccggatcctgggctgagagccgcgctgcctccaccttcatcaaaccctcggcctctccaagccggccgccaggggcttcctctgccaagtcctcggggacctcctcgctcacagacagtgtggtgacagtgctcaccaccaggacgcccaggccgacccacagcaccacctgggaggaaagtgcgttcttgtggattttcttgtagatcagcgccgggcagatgaagcagatgaggcttcccatggtcgctcctgtgaggcccaggatggtctccacgttggggataaggatgccaccaaccatggttccaaacaccacagagagggtaagtgctttaaaccggagagggggcatgtagccccctgctgcaaaggtgccatctttttgctgctgctcacacagcagcgtgctcagggcctgcctgcatggcaggatcatcatggggaagcccacagccactgacatcatgaagcccacacggagcatctccgtcaccaggttggagggaaagtgcatgagcacgttgccggccgtggcctcggtgaagctgacgtagccgaaaaaccccaccatgacgtagaaggtggtgaccaccctcgtgccgaattggcgcgcctcgacttcatactctctcccct

SEQ ID NO: 151044 - DNA, 860 bp, Homo Sapiens
  misc_feature (60)..(61): n is a, c, g, or t
aatcttccacacacaaatccaatcagaggcacagtaatagtcacgcaacgtatagttaanncactcccccaagtaatgatgaaaaaagaccagcacaatagagatgatataataagccaggcatggatgaccttatagcacctgtatttatacagaaccaccaggaggatagtcatgacaacaatgacactgatcatgatggcagcattcagaattgagtgcagggctctctggcccacagtctcggtatcttctgtgaatggggtatagattagctgcccatccttccgggtataaaagctgactgacttaatggtagccacgaccaccaccatgcagagagtcacagggacaaagagcatgatcacatgcttggcgccatatttcaatgtcagctcctcatcttcttcctcatcttgctccaccacctgccgggagttaccctggggtcgtccattagataatggctcagggtggccaaggctccgtctgtcgttgtgctcctgccgttctctattgtcattagtattgctcaggtggttgtcctcagacatctgtgcattctggaagtaggacaacggtgcaggtaactctgtcattggagcaactgtatagaaatactgtttcacagaaaacaaagcctcttgaggttctttctttcatgtgttctcctccaggccaagctgtctaaggaccgcaaaggctgttgtcacttgcaggctcccagattaggtatacgcttccccgccgccccgctgccgccgcggctcgtagctcaggttccttccagaccagccgctgttttgtttccgacatcgtgccgaattcggcgcgccgtcgacttcatactctctccccct

SEQ ID NO: 151045 - DNA, 941 bp, Homo Sapiens
cctcttccacctgctggaaccccgattgttcccgtggcgccagaggcggcagctggcggtcaccccacgctgatctttgatcgggccagccgggcagttggtgacacgctggctattttctagcacgggtgttcttgttctgtttccactgttctcgtattctcagcaacactgtgcggaagccgactcggttcaagccatcctcaggagggaaataggtgcccccgacaaagggctggaggttgggagtcagccacacattcatgggccagcccccgccgctgctggtggcctgcacgaacgtcatgtacaccttgtccacgtcaggccgctcctcacggtctaccttcacactcacaaagtcctcactgagcaggcggccaatctcctcattctggaaggactcctcttccatcatgtggcaccagtggcaggtggagtacccgactgagaggaaaatcggcttgttttccttcctggccttgtcgaaggcttcctgtccccaggggtaccagtccacaggattgtaggcatgttgtaggaggtatggtgacttctcgtggatcaggcggttggggaccctctggggtgtagatgaaggatggcttcctttccctccagcaggcatgggcactgaactactgaccgtcgcacttcggtccttgtcccgggaggagctacccctgctgggactcctgtggggccaggtcctgggccagactccaggacacctagggaatcagagacctcagggagttcagcctggaagtgggactgcaggcagacctgcggctcgcggcgaggcctgcaccggcgcggggcagcagaaggacgcggcccaaccaggcccgcgcgcccagcatggctgctcggggccgtgggcccggccgctgacctcgtgccgaattcggcgcgccgtcgacttcatactctttcacact

SEQ ID NO: 151046 - DNA, 1019 bp, Homo Sapiens
  misc_feature (27)..(28): n is a, c, g, or t
cctttcttttcccaaccctataaagtnnttaacggtccaaagtagcgaggcctgggtggcgatattcggcacgaggggcgcgcgggcctggttgggccgcgtccttctgctgccccgcgccggtgcaggcctcgccgcgagccgcaggtgtcctggagtctggcccaggacctggccccacaggagtcccagcaggggtagctcctcccgggacaaggaccgaagtgcgacggtcagtagttcagtgcccatgcctgctggagggaaaggaagccatccttcatctacaccccagagggtccccaaccgcctgatccacgagaagtcaccatacctcctacaacatgcctacaatcctgtggactggtacccctggggacaggaagccttcgacaaggccaggaaggaaaacaagccgattttcctctcagtcgggtactccacctgccactggtgccacatgatggaagaggagtccttccagaatgaggagattggccgcctgctcagtgaggactttgtgagtgtgaaggtagaccgtgaggagcggcctgacgtggacaaggtgtacatgacgttcgtgcaggccaccagcagcggcgggggctggcccatgaatgtgtggctgactcccaacctccagcccctttgtcggggggcacctatttccctcctgaggatggcttgacccgagtcggcttccgcacagtgttgctgagaatacgagaacagtggaaacagaacaagaacaccctgctagaaaatagccagcgtgtcaccactgccctgctggcccgatcagagatcagcgtgggtgaccgccagctgcgcctctggccgcaccgtgaacaatcgctgttccagcagtggaagagggcatgaagaggaaaccgggctcccgtgggccccaagttcccaccgggaaccgggaggccgggcccatgggccccacgcagacagaggtccggccaaaaggtggaccgcaaaggtcgagggggccgcccaacgggggacccaac

SEQ ID NO: 151047 - DNA, 1536 bp, Homo Sapiens
  misc_feature (1415)..(1415): n is a, c, g, or t
ggtcttaaagagtatgaagtcgacggcgcgccgaattcggcacgaggcccgggtcggacgcctgggtctgccgggaagagcgatgagaggtgtctgaaggtggctattcactgagcgatggggttggacttgaaggaatgccaagagatgctgcccccacccccttaggcccgagggatccggagctatgggaccagaggccctgtcatctttactgctgctgctcttggtggcaagtggagatgctgacatgaagggacattttgatcctgccaagtgccgctatgccctgggcatgcaggaccggaccatcccagacagtgacatctctgcttccagctcctggtcagattccactgccgcccgccacagcaggttggagagcagtgacggggatggggcctggtgccccgcagggtcggtgtttcccaaggaggaggagtacttgcaggtggatctacaacgactgcacctggtggctctggtgggcacccagggacggcatgccgggggcctgggcaaggagttctcccggagctaccggctgcgttactcccgggatggtcgccgctggatgggctggaaggaccgctggggtcaggaggtgatctcaggcaatgaggaccctgagggagtggtgctgaaggaccttgggccccccatggttgcccgactggttcgcttctacccccgggctgaccgggtcatgagcgtctgtctgcgggtagagctctatggctgcctctggagggatggactcctgtcttacaccgcccctgtggggcagacaatgtatttatctgaggccgtgtacctcaacgactccacctatgacggacataccgtgggcggactgcagtatgggggtctgggccagctggcagatggtgtggtggggctggatgactttaggaagagtcaggagctgcgggtctggccaggctatgactatgtgggatggagcaaccacagcttctccagtggctatgtggagatggagtttgagtttgaccggctgagggccttccaggctatgcaggtccactgtaacaacatgcacacgctgggagcccgtctgcctggcggggtggaatgtcgcttccggcgtggccctgccatggcctgggagggggagcccatgcgccacaacctagggggcaacctgggggaccccagagcccgggctgtctcagtgccccttggcggccgtgtggctcgctttctgcagtgccgcttcctctttgcggggccctggttactcttcagcgaaatctccttcatctctgatgtggtgaacaattcctctccggcactgggaggcaccttcccgccagccccctggtggccgcctggcccacctcccaccaacttcagcagtttggagctggagcccagaggcagcagcccgtggcaangccgagggagcccgacgcatctctcggctgctggtggcatctctgctctgctgcctcatgcctctgcctggcgcgcctggccagtctcacaagtgaacgagtgtggaaagctaacgtcctt

SEQ ID NO: 151048 - DNA, 2552 bp, Homo Sapiens
gaggcttattcttcttgtggagaacttcattttgttgccaaactcggagaaacttattcattccactctgctcagtgtctgggagttcttctaagtactggtccactcgctgctccaaaaggccctttgcccgacactttcttagctccctgtcttggatgaagccaggaaacatctgagactccataaaaatctcaagaaagcggcggatgcttttggaggccacagatttggggaagggctctcgctgaaagggcctctcttccttctcactctgtgtcagaaagagggagtaggtgcccaacggtctccacaaagaaccggataaacacctccgacaccaggccattgagggtattacattcatcgtcggagtcgctgtcagagtcctgggagatcagctcattcttcctctccagagcctgctccagagctgcctgtaacttcctaggtaacaacgtgtcttcgtcgtccatctgtcggatgaatcggtcagatcccagattcaccatcagcgcctcctccacaggcagctccttcagtttggggagggagctggagagcaggccaaccaggaagggggtgggacagcagacgatgtcaatcatggaggccgggaggacaggaatgaaggtgtgctgccaggagaaggggtagagcaaggccaccaccgcgtgggagcagctggagagggtactcattgccagcacctggcaggaatgtcttccactttgatggtcttcccttggggctgggaagggcgactccatgagacttctcatgaaaggatagaccaatgcagcggagatcccacgccggcgctccacctcatctaggaccttggaaaacaagccgaagcagccaaggcggctgatgacacagtacacctctggcaaccggggccctttcccacttggcagtaagcgcctgcagtagccaaagcgtctgctgccatcttccccagtcagcatgaaagaaaaggtctcactgctatactctgacacaggaagccagtccttggcatcagggaagcaaaactggggaatggctttgagcctttcctctgcctctcgcatctgcttggtgggtcggtccagcttgggaaactggtaggagacttcggggaggtaggtgtttcgcgatggcttcttcttgagggacaccaccacaaagtactcaaaaagctcccgctcctgccactccagcagctccagctccagcgtgcgatagctgggggcgcgcttcagcatcgactggatgtggaccaggcgctgtgtgtgggctttgaacctgtcatcagagtcgctctcgctctcactgttttcatctctcagtgatgctgtttcaatgctggacatagacaacttttttaatctcttctttcctctcttggcattgtagatggagttaattctttggacaagcttgggaatgcggcgggcccggcggctggacagcagctcgctggtggtgctgaggctgtcttcattgaggctggagggtgaggacggcagactcagctgagccagcagcagcatgtcgtcatggctgtgcctcttgggtaatcgtggcagccggtggctcttcctttctgaccagttcccactgcgcagggactggctgttgggtttcagggaaagctgtgtgggcgggctgttgtacttcctgtcctgaggactccacatcctgtgcaaagagtccaaggagttctcagacagttgctgggattttcgtcctgctcttcggctctttaagtccacatcctcatatggattctccttgggcagatctcccacaatatcttcataggcattttcttctaaagtgcttttggatccaaacttgggttggttctcagtaccattctcagtgggagaagaggggtacagggactggagactggatgcatcctcaaactcaaaggattttctgctctgggacttgcggtgaccacgcatgtccttcttgggtctccgggtgactggcggggctggggtggagggcaagggaggtggagcagcaggtgtgggtgaaggaggtagaccattactgggcttactcttggggttcttgtcagcctcgtattcaaaggtgcgcattgggtttggggacagggttcacagcgggatcgagggaactcttcgatgtcagccgctgggtagctagggctatttccaggggtcccgggcttagtggaacctctgccttccctctctgggggtgggcccgcctcaccccagcaacaccagccactccgactgcccggctgccagcgctcacactcgcgccccctgccggctcctccaaggagcccaaggttccagtgttccttttcccccggtccacgctgtagcagctgctggggagctgggggagcccccggcccggctgctccttcaggacctgttcaattttctggatccggctcagcactgctgagctctccttcctgctgccatgccccctgaggaaggcgctgggctcactccggcccagccgtttctccagccggcctcgtgccgaattcggcgcgccgtcgactttcatactct

SEQ ID NO: 151049 - DNA, 867 bp, Homo Sapiens
ttaatagaaacgtttagacttagaaatgcaagcgtgagtttatcacagctttaccacgtgccgagagggttttcctgccgtggcctcagaatgtagccagcgtgggcgtcatctcaagactgaagtagcccactgaagcctcgaccctgatcgccagagcagacttgttggccggtatcgtctggtagttggcgattgatgtggccatagtcatttttcacatcacccccgcagatggcttcgtagactgcaaagaagccctttccaacccaattgctgctgctgcggaattcaacccagaggcggctgtcagtggagacgataggctcagggagtttggacccgcagaagcggcctcggaggggcgccttcctccagaagccatctcggacctccacatagtcgtaccagcacaggcggctgcggtacaggtccagggacgtgaagttcaggatgatcttctccccgggtgtgacagagatgcgccacacgcagtgcatgtgagcagagtagccattggggtattcaggggaggagaagttgcctgtgctgtcttgcagggtctctccacaggctgggcacttgtaaagcttgcgggcttgggcaatgtcccccttgctgagccgtgtcctttggccaatgggaggtttcaccccgttcacctcatacttggggacaatggtatccaggaagatgcccctggagaatgtgttccgagcgtaatgcatgatgctgtcgaagtcataggtctcccccagggactccacctcctgaggctccatcttcaggaagttatactcctgccctggctggatgttctcctcgtgccgaattcggcgcgccgtcgacttcatactctctccccct

SEQ ID NO: 151050 - DNA, 1224 bp, Homo Sapiens
  misc_feature (247)..(247): n is a, c, g, or t
  misc_feature (324)..(324): n is a, c, g, or t
  misc_feature (827)..(839): n is a, c, g, or t
aaattcactatgagatgatgctcatgtaagtaagtgttgataacaatctattacacttttagagatatttatagattatcaaaaagaggtagctgactactccactatctgaagtgcgtttcgtttagacatgtccttgcaacttagtccaagtctacacgtagagagtgcgagagcatagcaatccgccataagctggtctcatgggcccaaggcccggcatcccgctctgtcctgccatggaganaacgtctccgttgcctgggccctccatgccagttgctgagtggcctacgttggaagagaaggacaagtccccagccntgagctccgccagcgtgggtggcagcctggggaagaggaggcctggccctccagctgtgttgggtctggattggaggcgccagaggtttttgctcgaggggcacctgggaggtgggcgtcagggccccactgcggcgggaacatagctgctgagtggccgcagtgctggcagggcgagggctgtccccacagtcgatgttcaggccagatgtcctgcactgaggcccccaaacccaagctgagggcaggagggtccgcttcccacgtggatggaggcagagttgctcgggaccccagccgtcccctctgcaggccgatggggcccccggggctcaggtccccagaggccaccgcgaacagcctggcttcttcctcaggacacaggcaggcacagcagagaaccaaagagtgcagtgggcaggggctcttctccctctggttggtttgtttgtgtcttttttgttcttttcctaaaacggcacacacgtgcttccgtcttaggnnnnnnnnnnnnngacacaggcaggcacagcagagaaccaaagagtgcagtgggcaggggctcttctccctctggttggtttgtttgtgtcttttttgttcttttcctaaaacggcacacacgtgcttccgtctctgtgccaaataaggactcaaatgcgattggccgctcgggagggtgggtctcacaggggcaggctgccgaccggggtgccggggccctgggaggcttgtcggggaggggcccggccgtcggcatccgtgggtggctcctcctgcggcctgccatcctgtccagacgactgtgtgcgccgcctgtaccgcggctgctccgacgtctccgagggggaccgctcacctcgtgccgaattcggcgcgccgtcgacttcatactctctc

SEQ ID NO: 151051 - DNA, 724 bp, Homo Sapiens
gagattttggtttataaaatttttaaaaccccaatgggaagggcccaaccccgttaggcattggcagattttgaataaaagtttacaaaagcccttcccccaggttggccaagaggttaaggtcgtttctttaaaggacgtggcccacttttgcaattccgatttgggagttggccttccagtagcaggggcgatttggtctgtcagccagggagtcacagccttggtgggtccaaggttaagctcggacaccgactgagccatgaagttcatcccgtccaacaggcgctgggcagcattgttgttgtccttcacaaacccatcagttccaggccacacatgcacaatctctgtccgcaccaccgtatccacaggatcttggtttccaaaccagtactgccgactacgatagaccacgccacagttaggacattcgattacatacccagaccaggcatattttgcgagacccatccagggggagtcagtggaagcagatgttttgggcactacactgacttcctcgcctctctcatagcaggccttgcaggtatacactcggttgtcatactggtgggagtatctgcagcggctcttggcttcatgaggcactccttccttcccatgattcatgcttttcttacatccaaccccacagctgaggcacaaggaggagcaggtgaaacctcgtgccgaattcggcgcgccgtcgacttcatactct

SEQ ID NO: 151052 - DNA, 387 bp, Homo Sapiens
  misc_feature (210)..(210): n is a, c, g, or t
  misc_feature (268)..(268): n is a, c, g, or t
ctccttgaactgctgtcggtcttcccgaggaatcttcaccgcatggtactggggcagaccgacagcagttcaaggaggagaagacgggcaccatcctgaggaacaactggggcagcccccggcgggagggcccggatgcataccccatcctggctgctgatgggcatcccgagctgggccccgatgggcatcagggccaggcacgcctangttccatgtccagcctggctgtgctgcctcatccttcccagaatgctcctggatgaanagtagatggcgctgtgccacaaattgcagatggctctcaggcacaacttccaccagactctccacacttcctaatgctgaataatgaatcgacagctggagtaaccagttctacagtga

SEQ ID NO: 151053 - DNA, 843 bp, Homo Sapiens
ttgtatcactgcattctttgttgagggtttgcggaccagccggacgattatgatgttaccagtggggcaacggcctggttgtagagctccagcggaagactgaggcccggtcagagtcctgtacagcggatgtgtacatgcgtgacatctggctctccaggaagcgccgcaccctgtggaggtcaggatagtagtcgttgcggaccacaatctgcagccagcggatgcggatctcagcgttcatcgagtccagcagggaggagtagcacttggacaggctcatcaccacctcctgcggcagcggggacccatccaggagccggtccaggaagagtgctgtctggaaggtcctccacttggagatgtcaatggcgctggccgaggcagctgcctggtccagaggttctgcggtccacagctggaaaagggcctccacgggccgggtcaggctggatccctgagacaggtccggctcagccagcggcgggcctgtggcattgagccagcgctcgaattccagccctgcccggcagtgcacgctctgctccttcagctccgggaagaagctcaaggaaggagtccagcaggtcctgggccaccacgctggtgaacttgtacttctccacataggctcggagaaagtcatcaaagcgctgtgggtctccgcagagctgggacaggtagtacacgaagcagtagcccttctcgtaggtgaacaggttcatcaggtggctgggattcactcctggctccagcttgacctgcagtttgctgaccgggctgtcctctcccagaagccctcgtgccgaattcggcgcgccgtcgacttcatactctctcccc

SEQ ID NO: 151054 - DNA, 1363 bp, Homo Sapiens
  misc_feature (95)..(95): n is a, c, g, or t
ccccgtttcggccctcccggccgccggaatttcaggcggacggagccaggacaggccagggaagagggaagcccccaggtaacgccagcccgggnccagggagtttgccagaaggtggcggccccagcccttcccgagccttggtggtgggcgcccgagaggttcaggttggcgcaggttgcagcaggacgccaccagcgtctccaggatgctgctgtcgatgtcgtcctccgccttgcggagcagcgagtctggggacagccagtggacgcagccgctgaggttcaagctggccaggctccgcaggtccttcccgccgttgatgacctgctggatcagatggccgcctgacagggtacagcggctgaaactgaagtagaacgggttgttgaatttcatgtgctgcaggagggaagagccgttcagccaggacttgggcagctgcagggcatccagcacgacattgcgcgccatggagtccaggaggttcttggtggcgccgctctccgcgaagctggcagggacggagatgaggaaggcgtggaggttctgaggagtgcggtcgctaagcacagccaggtagagccgcaccacctcctggttgatgtagccgggggccaggcgcgcatagaagacccgcaggttctggtagtgcggcacgttgctctggcccaccataagctggcccgagaggatggcgccctcgcgcgtgcggtccagaatctcgaagtagagcagcagcttctctaggctggtgcagcagggcaccacgccgtaggagggagtgaacagcgtctgcttgagctcccgcacgcggctcagggtggccttgcactcgctgctcagctggctggcgtcgaagccggggctcacgtcgatggccagcgagcgcaggtgctgcagggccgagagcatcttggagaggcgcagggaagtgaggtggcagcccgagaggttcaccttcaccaggctgcggcagcgggccacgtgttccacggtggagccaggcagccagtagctgccagccatgctcagctgctggatctcccggccgatctccttcaccagctgcctcactttgtcctcgctcgcctgatagtccttttgcagcaacacggtgtggatgaggctcttgtcaaggcacagggctgcaagcttccgacaggtacgccggacgttcagaatcagatctgtgctggggacgtgactcaggatgtgaaggaggatctcatcagagaaccctaggaggtggaccccgtctgccatcccggctgctgcagggtgcatgtcatcatcatcattggatatgtcctctccggagctgcctcgtgccgaattcggcgcgccgtcgacttcatactct

SEQ ID NO: 151055 - DNA, 1245 bp, Homo Sapiens
  misc_feature (1056)..(1112): n is a, c, g, or t
accggaaggcagggcacccaaaacgggggtcaggttgcaggggtttctattgtcgacagggtaactggcaacagcagcccttgaggtccggtggacggcaagtgttgggcctgcaacctcgaaaggccgtgggcagcaacacggggccctggggaaagggccggtgccttttcaggccaaggtccccacgcaagcaccagggcgcgcagatgccgggcggcttccagctccaggtggaaggtgtggtccagccgcaggaagtccggcccccctcgcagtggccctgttcgggccctggcctccccatccacttgcagtaggcagcagaggtccctgggggtggcccccggcgctggccgcagccccccgagaccgtacaggtgcaggctgaggcggccccagagtgcggccgggggtgcccgggctgcgggacccacctcgtagggccggaaggaggtgggtgatgggggcccagctgggcgctccggtgagtccccgtcgctgaggtaaccggccctcgggctccgggtgcccccaggccctgctgccggcccggggccccccacgctgctgtccaggtggtagcggctgatgacggagcccgcaggggcagccctctcgcgctccctgccagcccgggggcctcgcaggctcaggcggcgccgcagttccggcagcttcttcatctttatggagaggcgcctggcggggcccggggacttggtgcgggaggctttggttggggggctggcgggggctgcaccttggggggccaggccctctgactcagctgagccaggctgtggccccgggggctcaggtgctggaggtctggggtcttcctcagggatggggttgtaccagatctcgccggcgggctccccagtgccaggtaccccaggccctaaagaggtgtcctcagctggcttggccccacccagcacccatcggcggctactgggctccaggctttgcaggtaggctccccgtgcagggctccttgatgcctcggggctggagggcccctctgctccggcctgggacccttcgggagcnnnnnnnnnnnnnnnnnnnnnnnnnnnnnnnnnnnnnnnnnnnnnnnnnnnnnnnnncttggcgtccgactttttccggggaagtttctcccggccccgcaggcgggagaaggttttcctgagtagcggctcggccatgctgcggcccggcctcgtgccgaattcggcgcgccgtcgacttcatactctc

SEQ ID NO: 151056 - DNA, 1247 bp, Homo Sapiens
taatagattgatgatacttaaattattattagacatacatgtttatgaacattagcaattaacagaatccatggaattaaaagataatttatatattatgttcagtcccaagttgttacttgtatgaaaatagctaccatgagattaaggggtcaaagcccatgcaggttaacttgatcttcaccgagtagtccatgtcttccggccccgggaagggctcaagtggccagttaaagaagcagttgaggaaaaccagcccggagcagccggcccagaccacgaggacgacgatgaaggagacaccagcatcatagatgagcttgattcctggaaaggtgactgccgaggaggcgtaggacccaatcatcaaggcaataaacgtggaccgaaggtcgccgaacatgttgggcagtgttaatgaggtgaaggtcatacacatcccaccaaagccattcagagccagggcgatgaagatgagcacggagagagcgtttggtttacttgctccgtacgcaatcagcaagcaggaaaccgcgaagcaggcggctgcccagcagcctgagcttcctcgggccatacttgtccatgacgatacccaggggcagggtgatggcactgagcagaaaggagcccacagtgaaggccaaatttagcatctcgtcctgggcctggcagctgagccagccgttcatccagctcacctcctcgtgccccggctctgctgtgccgcccactgtgccattggtgacattctctggctcggtacacaggtaggagtaaaagccctctgacttgagcatgatgagcagcgagccccagcccaggaggactgccgagaagaggaggttctccagcacggccgtgcaggccatccaccagcggcgccgatgggcagtggccagggtgggcgccatggtgcggcgcggcgcggctccggctccggactccggctctgcaccaccgctgccctccgctacgacagagccgccccggccaggcagggagacgtctcccgcagctcactccgaggtaaactgaggcatggaggcaagaaggggctaacgcatgctcagggccgtggaactagtcctggcctgcagcaggactgacatcgcctggggccagcatggaacgcagcgtgaggtgggcaggggcagatccgagggctgcctctcccagggaccctgacaggtgccctcgtgccgaattcggcgcgccgtcgacttcatacctctctatacacataa

SEQ ID NO: 151057 - DNA, 763 bp, Homo Sapiens
  misc_feature (40)..(40): n is a, c, g, or t
  misc_feature (134)..(135): n is a, c, g, or t
gtggcattcgactgggtgtgcaccgtgtgcctcgccctcntgcccgtgcgggaaatgacccaccagccgcacgggtgagtggggccagtcctgcagatgtggtgtcccagaggtctcttctgcagtgcgatcgnngcgccagcaggtcccggcttcagtgctgcctgccgttccccagggccgtcaccgccgatagcggtagcgcttgaagtgaaaccacagctggaagatgccgttggaaaactggcagcggaagccgtggcggtgcgagtattcccactcgcggttgacgatcttgaaagcgatgtcctcgtagggcggccccgcgtggaagcgcaggatggcgaaatccttgttgtcggcgcaggcctccaggaagtactcgggcgtggagcgcttgtcgatgaggtcggggtagaagatgttgaacttgtatccctgcacgatcttgggcggtgggttgtcaaagtcgtagtgcgtctggttgtacttgttccactcgaagcccgtgtgcacgcggttgaagaagcgcggcttgcgtggccggtacttgtcggcccacaggtaggccttgccggtgagtggcatctccacgctgaactgcgcctcgtcctggcccatgccctccttggcccgccggaagaagatgtcctcggcgctctcgctggcgtctcccgtgacctggagctgctggcgcgagagctgcaggcgctgcagtcctcatccggcctcggccgaatcgggcgccgtcgattcttcattt

SEQ ID NO: 151058 - DNA, 930 bp, Homo Sapiens
cctccggttttctgcgcacggccccggcccaggcgaattcctcgtcggagagtttggcccggcccggcctccgggtacttgcgcacggtgtccggcccagagggcacgggctggcgtggccagggagcgctggtaacctgaccagcatcgggctgtcggccagagaagatgcggaccagggccagccagttcttggtgggggaggacatggctccgtggggctcaagaagccagccgtggtaggacagaagcagcctcagggccacgtgcagtgtgaagatcagggctccccacaaacacgaggcaaacagcgcggctgccaggaccccccggagcccgtggtgttgtccaccccagtcaggcagcaactctttgatcttctccatcagtcctaaggaaggatccagctggaggaaccaggcaagctggatggcactgaagaggaaaagccaactgagggggctggcaggaaacacaccggtgagaaagtcattccagaaacgtgagagatgccttttccaggagcgcaggccagagaggtagatctcctgcagcacaggggcactgagttccacttcagccccgtccgaggtcagcgagggtcggaagcccacggcctggtgcgcttcagccatgtcacgctggagccctgaagggtcttgagggtcctggtttgtagacccggaggttttgagggaaggacgtcaattcgggacctcacgttgaatcaagggtccgctgatcggatcctggggtccaaacccgagtccacccccgccccccgattttgagcgccggccccaaatctcccgcttgcatatgtccaatcccagtgcaaggagtccaccaccgggtcgacgggcctttggagtcctgcccaccccgagatcaccgtcacccagaaaccccgattcctctctctcgtgtccc

SEQ ID NO: 151059 - DNA, 1064 bp, Homo Sapiens
cgggccgctccaggcccccggggcgtttctgtgcaaacggtaggtgtttctggcgggtcatcatgctaggaggggaggttgttgggggtgctcgtgctgtcccttcccgccgctctgggatctctgccttgttggggttgtgggcgctgctgaccatggggctggaggggggcagcccttgactcccactccccgcgggtgctgcagctcgccttccggcctggcagccgctcctccttcagctccgcctcccccgtgctcgtcgggctgcgtttggggtgcaggggtgcaggggatgggccacagaaatcgctatgcctgcgctggcggtggtaggtggaagaggaactccgctgccctttgctgtggctggtgcctttgctggaacttgttccgttggtggtgtcgctgggcgcccgcacccgtgccagggccagccctggggcgccccggtccccaccctcctcagtcttcctgcccagcaggaggtaggtggcggtcacttcgttgtacttctggctggtcaaggactctttgatttcttcccgtgtgtagcccatacccaccatcacctcaattctcttggtgtccccgaagtcctcctcgggctctgtgtatggcttcaactcctcaccctcatagccgatgttgatccatttgtctttcatgatttgctcgagagtacagcgtttagctgggttcagcaccaaaaatctccgcaggatgctctcacagtttcttgccctgaaacagctccggggcggcatatggggggctcccgcagaacgtgtccagcttcgatcccagcgtgaactcgttgctgaagccaaagtcagcaatcttgatgttggcctcggcatccagcaagaggttctccctcgttccgaattcgccacccaggcctcgctacttcttgccctgaaacagctccggggcggcatatggggggctcccgcagaacgtgtccagcttcgatcccagcgtgaactcgttgctgaagccaaagtcagcaatcttgatgttggcctcggcatccagcaagaggttctcagccttcaggtccc

SEQ ID NO: 151060 - DNA, 1159 bp, Homo Sapiens
ctcacttagccagagtgttgtgtgagaccagctcatcgttaatcgaagtggtcaagtttggtgagccgccggaattcagcttctgagttggaaggcttcttctgaccttggccacagttcccaggatccgatatcctgagtccaggaagctcttttgcagtcccgggtcggaaatgtttccagccacagcttttgcatccatcaccatcggggagatggttttgctcaattcatcagaggcagctttcacagcctcacggaacttgggatcctcggaattctccacctccctcttagccaccagcaggatccggttggcccgacgagcaatactggttgccccagcaaccagcatctgaggctgaatgttggccatagctaccttgcacttgtccaggtcttttttaattgcttcttctgaagcatccaacagagatttggtatcaatggcttcgtccaccagccctgtcattttttcaacattatcgatccactggttcttcatggtctcaaaatgttcataagcagcttgatttccagggttcctaagtaagatacgagcagccgagaccacctggggtgtgagttctcgggccgtcttcactgaggcctgaatgccttccactgttgatttattagcagtaccaaccgcagccgccttctcggccgtagcaccaagctttcctgaatggttttcaaagttagctgccctctcatcaaatacctcttccctgttaggcgcatcaggaggcgccgtggctgccactgccaacagcttgatgggagttgtggtatcgctgaaaacatctgacacttcctgagtcatggcctcctgcatccgagcttttagatcctttaaggagtcttggagctgagatgcaagtgctcgtgcctgaggactctccccttcccctctggcagccaggtcagccagctgggctgtcagctggtccactcggtcacacttggcgagaagatcttgccgataaggccccatcataacattagccagacgatgcccttcggccacaagcccccggatggcagcctgaccgactccacggtcatccactgtgggattatcaatccaccgctgtgcttgctcaatcttgccctcaacctcgtgccgaattcggcgcgccgtcgacttcatactctc

SEQ ID NO: 151061 - DNA, 781 bp, Homo Sapiens
ctttcctgctgggaagtgatgactcgcaggtcgggcttgcggtgggggctccaagctggttgctgtgggtaggtgggggcggagacttggcagggatgaccttgtttaggctgttgccattggccacagggaggaggccaggggaagcccgagcactgacgtagccattcccaacagggctggggcaggctccgttagcactgttcaggtcaccccccagcatggcccccgcactagctggccgctggggcaggccaggagacacactgttcctctgtagtgctggctgctggggggacagtatccgcgggtccgtgagggatgatgtcaccagggaatgggtgaccagggagccgctgggattgctgaactgcagtgagctctgattggacacgggcaccgtgacaggcatggcaaagttgggggccgggacagttgacccatagcgccgggagagcccgtcgagctcctcgctggcgcgtcggtacttgtcctccagcagggggctctgttccagcgagtcctccccgtcgggctcggggctgtcgcagccattgaagcccttcttcctcagggtctcgatgatgtcggcgttggtgcggctctcgtgtggctcattgtactccgtgtacttgagcagcaccttgtccatgtcggtgctggcgtactggaacagcttgttggagtggttgaagatgatgagtgcgatctcgcagtcacatagcacgctcagctcatacgcccctcgtgccgaattcggcgcgccgtgacttcatactct

SEQ ID NO: 151062 - DNA, 1178 bp, Homo Sapiens
agagagtatgaagtcgacggcgcgccgaattcggcacgaggtgcagattgatgtggaagtgaagaaatatttttgcaaagcaggagtcaagggcatgcagctacatggcgttttgcgggtgatactggagccactcattggggaccttcccttcgtgggggctgtgtcaatgttcttcatccgacgcccgaccctagacatcaactggacagggatgaccaacctgctggatatcccaggacttagctcactctctgacaccatgatcatggactccattgctgccttcctcgtgttgcccaaccgattactggtgccccttgtgcctgaccttcaagatgtggctcagttgcgttcccctctgcccaggggcattattcgaattcacctgctggctgctcgagggctgagttccaaggacaaatatgtgaagggcctgattgagggcaagtcagacccatatgcacttgtgcgtttgggtacccagacattctgcagtcgtgtcattgatgaagaactcaacccacagtggggagagacttatgaggtgatggtacacgaggtcccagggcaggagattgaagtggaggtgttcgacaaggatccagataaagatgactttctgggcagaatgaagctggatgtagggaaggtgttacaggctagcgttctggatgattggttccctctacaaggtgggcaaggccaagttcacttgaggctagaatggctgtcacttttgtcagatgcagagaaactggagcaggttctacagtggaattggggagtctcctctcgaccagatcccccgtcagctgccatcttagttgtctacctggatcgggcccaggatcttcctatggtgacctctgaattgtacccaccacagctgaagaaagggaacaaggaacccaaccctatggtacaactgtcaattcaggatgtgactcaggagagcaaggctgtctacagtaccaactggccagtgtgggaggaagcgttccgttcttcttacagaccctcaagccaggagctcgatgtgcaagtgaagatgatccaggggcctgacttaggacactgagctgcctctggccgctgctactgcccaaactcttctggaacatggtccagctcacgcttggttcaattcaaattattgaaatatctggagatccgtc

SEQ ID NO: 151063 - DNA, 865 bp, Homo Sapiens
agaaaagattcttcatcgagggactaatccataaattgacacagtgacaggttgaacggccagatggatacacacaagcggcaggccaattttgaaggcagtccacgcgcgcaggcacttgctccagagttgcagcaggtcacagtgttgcgcatggcaggtcctcagctcgcagtcccggcagcagagccgcagcgggctgctcacgctgcttcggagtgcctcccgcaggaacgcataggaggcccggttcacccgcaggtccacgcgcacctccacggggatgggggctggcccaggctctgcggccccaccctgctgctgggcaatgcatgtgcgagctacggcagcagtacagtcccacatgctcatggtgccaggatcctgttccacaccatcatccaagaggcccgtcatgtccagcacccgcagcgcatgcttcctgcagaggggctgtgtgctggccccaggctctgaggtgtggagccgggcagtcagccccaggataacagcctgcatgctctcagtgctaggccgctcctgcaggagggcacggctgcagtgggcacactcctgtagcagctgctggaaactgagcagcgggaagggccacgtgtgtaccaactcgcgcagtaccactgtcttcttgtccatgaaggccaccttgaacagcagggggaagagttcgcgtggcagcaggggcagggcctggcaggcagctggctggcactgcagcacctgccgtgtgctcaagaacacaagcgtgtgcatggtgctgggccgggcagacggccaccggtcccgcaaccgcagccaccgccctcgtgccgaattcggcgcgccgtcgacttcatactcttccccc

SEQ ID NO: 151064 - DNA, 763 bp, Homo Sapiens
tgggagcggtaaaggtttcaggaggttgtgtgaggaccctgacacaaagtacccccgaaggcaggggtttgggcaccctcccgaggcctcaggccttgcgtctcgggcttcatgtgggggcggtttggtggtctgcttcgcgaggcttggtgggatcgggaagatggaagtggatctggtagaggctccatctgccccaagatgctcagaactgggtaggttgtgttgccgctcgaacccagctcgacacaccccattgggctgcctggctgcagcagcatccaagtggtggtcactggttgatgaggtcataactgcaacactggaggctgaagggcctctgcgtgacagggtctctttccggtggtggatcagcttctggaggactccacgctgttccaggctgtacttgccaccatcccgcatggctgtgttgtgtacagcctcgatggcccggtcaatggcctggaggacatcctgctccaggccctgcaggcggcgcaggtaggctggcggcacgtagcccgtctcaccactgcgcgcccgcgcggccagccaccagtgcgcgctgcttcgctctagcaccaggaaggtctcgcccgcggcgaacgccagcgcgttgggctccgccgagcggaacgcgtacagcgcgcggtacatgaggccgggcagggcaggtgcagggaaggtggcaagggctgcggcgcccctcgtgccgcctcgtgccgaattcggcgcgccgtgacttcatactctgtcgcac

SEQ ID NO: 151065 - DNA, 860 bp, Homo Sapiens
tgaaacaagttgggagccctgggttccagaattgggtctgagacctgggtatagaaggcggtcccacagggaaggtgcttgcctgacttaagggaccccgctggaccacagaagttcacccccgggagggccatgggtttgttggcccccccactccccaggaggccattcagggccctcgcgggtctcggcgctttcactggtgggggccggtttggtgggtcctgttcggcgaaggcctgtggtgggatctggggaagatggaagtggggatctggtagaggcctccatctgccccaagatgctcagaactgggtaggctgtgctgccgctcgaaccccagctggacacaccccattgggctgcctggctgcagcagcatccaagtggtggtcactggttgatgaggtcataactgcaacactggaggctgaagggcctctgcgtgacagggtctctttccggtggtggatcagcttctggaggactccacgctgttccaggctgtacttgccaccatcccgcatggctgtgttgtgtacagcctcgatggcccggtcaatggcctggaggacatcctgctccaggccctgcaggcggcgcaggtaggctggcggcacgtagcccgtctcaccactgcgcgcccgcgcaggccagccaccagtgcgcgctgcttcgctctagcaccaggaaggtctcgcccgcggcgaacgccagcgcgttgtgctccgccgagcggaacgcgtacagcgcgcggtacatgaggccgggcagggcaggtgcagggaaggtggcaagggctgcggcgccacaacgccaggcccggagcgccgagccgcgccgcggtttccatgcaagga

SEQ ID NO: 151066 - DNA, 1115 bp, Homo Sapiens
  misc_feature (1095)..(1095): n is a, c, g, or t
  misc_feature (1102)..(1102): n is a, c, g, or t
accccgccggtacacatttcttaatctttctgccctcacacaaattctgaggttagataattggttttcctctgtgttctttgtataaggccctctcttaggtcgctatgggtagttttgtctaccgggggtaggggataaccctgaggtttgtgttgagtttgatgggggtcctccaatctccctgtttcttcccgacccttttcttcccctccttctaaaatcacccatgttgggtttgaatgaaccagggcaccaggtggggttaaggggtttttctgctcccttggggaaaggtaacactgtaggttttcctggacttgccaattctggggtcttgtccggagtgggtaacaaaagggcgttgaggtgccacccgagggcaaaaaggcaaccaaggatgggtcaagggcgagcttcaaccttctgaaagcatcaaaggttggcggccatggcttcagttggccccggcagcaagaagtgggcgggtgggctggctgagtttgggcccttcgtgagttcagcacccagcggtatgggggaccaggcccctggcctggatcctcttggagccctggggtctcacctgactctgagtagccagtggcagtgatgatggggacagccaccatgagcaggcccgaggcgctccacacatacttcatgaggaactgctccagcataacataccacaggcgttccagaaggatgaggttgatctgcgaggccaggtcctggtaggagcgctgtagcagggccagctccacctcatggcccccatagaaggcgatctcctcggtgttggccaccacacgcgagtgcatgtagcgcagctcccccttccgccgcgcctcctctgccaccagctccccgaacttgggcgagaaggcccgcagcacgttggccgtgaggaacaccacgaggccggcgatggccgagggccaggctgtgccggctccacgggagcgggccgcccgaagcagggtgtaggaagtcacagccacgtccaggagtggcttggtcaggttggagtagaggtgggcctcgtgccgagttcgccacccaggctcgctacttagaccgtaagggccaaantcggtgntgcaaagtaaaag

SEQ ID NO: 151067 - DNA, 1001 bp, Homo Sapiens
  misc_feature (207)..(207): n is a, c, g, or t
  misc_feature (592)..(625): n is a, c, g, or t
ggaccaagccaaggggccccccgccggggttttggggtttttaaggtctggaaaaacgggggctgggggcagaaaatgcccaggggagggctgggtctcaaggttggggagggggttgtcttgactccaaggccagggggagcttgagggttctgtctcagggggctcctgttggctggttctgggggggccaggggcccgctttcntaaggccactggaggtgggatctcatcctcattgatctttctgcctctcctcacagaggctagctgcgactccaaggtcttcaggccgcgcttgcagcggcctgggctttggttgtttcgcctgcctccttgggcactggccgcagcctctcggtagttggtgaatcccgttcctccagcaaagcgtgtagcccctgagatgctccggcctgagctgctggggctgaagctgtcaggacggctgtctgcactggaggttcagtgtcttctaggccgttctcctcctcagagccgcctgggtcagctacctcatcaccatccaggggctcagtctcctcgtccacccctaagacctcctgcagctccgtcagcagctctgcatctnnnnnnnnnnnnnnnnnnnnnnnnnnnnnnnnnncatcccgcatacagtctgccgccaacttctcgatgtgggccatgggcaggggggcctgccccttgggtgctggcttcttgcctgtggtttgtgcttcccctgtgagagccagcagctcagcctccaggtcctcatcatcttcagcctcatccatgcccagcagcatgtcctcagggccaaactccataaagagccccatctgcttggcagcggccaccccttggcctctggcctgagggcccttccgaggtcttggccctggcatcatggcagcctagatacctcgcggtgaatccgagccaaaccccggccttgtctcacccggcaccgccctgggctcccgcctcgtgccgaattcgccacccaggcctcgcac

SEQ ID NO: 151068 - DNA, 1112 bp, Homo Sapiens
  misc_feature (68)..(128): n is a, c, g, or t
  misc_feature (322)..(372): n is a, c, g, or t
ataaggtataaaatgaatttataattatattataaagaaaaagaaaaattaaagtataatgagataannnnnnnnnnnnnnnnnnnnnnnnnnnnnnnnnnnnnnnnnnnnnnnnnnnnnnnnnnnnnctaatatttctaaatttaacaattattattttcctctaaataataaatgaagttatttgctataaaaattgtattgaaaatataatgataattaataaggaaagtttaattgaaaactatgatattaataaaaagatgacttaactatgtgcacagggtagtttagaactattggtatcaagagatgtcagcannnnnnnnnnnnnnnnnnnnnnnnnnnnnnnnnnnnnnnnnnnnnnnnnnnttgagggatgttttatcctggctgtcacagggacacgtgccctccctcactttgtcaggggagctgtgctgtaggatgtagccctttggggctgctgaggtgaaggatgatggcacttggtaagattcctccggggcaccggggaccagcatttctgcctgctgtagaatcagcacatgctgggattggcaccacagggaggccaaggagggagtgtcaggaagcagtcagggctgaaggccttttcatacacggggaggtgaccacttgggggcccgacagtcagggctggcagcccgggaggactgttagacactggggtggacactgctgcaagcacaggggctttcggggggacccactggtccctgggcttcctgggctaacaagagagacccttccagctccccttggccctcaccggccaccacagccccctcaaggacccctgagcacggctcctcctgcgcctctggtgtctccactgggaccccatgtccctggacttcctggtccccctcctggctgcccttctcctcttcctctgcgcccctgccctccaccatcctggctccgtccccaccgcccagtgcagccctggtgggggacttgaggttctgggtggcggccaagatgtcggcctggagctgccgggaggaatccagggcttcctcgggcctgctgtcgggggctctgtcggcctcgtgccgaattcggcgcgccgtcgacttcatactctc

SEQ ID NO: 151069 - DNA, 890 bp, Homo Sapiens
cgcttatgacagcattggggccatacgtgggatccgtgccccgtctgtcgggggtgccacatcagcatcagttgcagccacttctccagtcgctcagccaggacactgttaaggattattggggtagggtaaagagcttgaaaacttcaccgttccattcaagtcttcgctaacaacaatgtccacctcactcttctgccgcacttttgaatgccactgcacgggctgccagttggggaggaagggccggaagcccgtgatgcactcaaaggccagggtgccgaagctccagtagtcgacggtcactgtgtacttctgctgctccagtggctctggggccaggtactgcagggtccccacgaatgatgtgcaaagactgtcctgatccagctccttggcatatcctaggtcaataattttgtgtattaacctctgttctccttgctgcaggacgatgttttctggctttagatcccgatggatgattctgttttcatgaaggtatctaagcgcagaggcaatgtcactcagcaaggtgaggatggcaccttcccgcagaccacagcagttctcaaactggttcaggtacttccggagatctcctccttggcagtactccatggccagcaggggcaggtcattgggcgccaagttctgcatcccctcagggacatctcgggcagccaccacattggggtgggtcagccttctcatgatctggatctccaggcaccaccgctctcggttccgggggctgagctcctgccggcactgcttgatggcaatctgctcacctgtttcctgattgtgccatcggatgacatttccaaatccccctgtcccaaggcgctcctcgtgccgaattcggcgcgccgtcgacttcatactct

SEQ ID NO: 151070 - DNA, 1353 bp, Homo Sapiens
gaggaactcgcttacacgacgccgacgtcggtcggagtgggtcgtccatggtccgggactgtgggcgtagggggttgggctgggcaaggcggggtcccacacgcgggttggagtgtgccgggggggataatggttcgaggcgtagttgctccattttgggttcgggaaaggcgtttgtccctggcggggtggtgggtgtgccatttgtggctgcgtgtgccattttttgtcgtcccaccctcaaaattctgccttaggcatttgtgtgcttaattaaatcccactctgtgctttattgttggagaatgtgggacaatacaaagatttggggtggggtcatccagtgtatccaaaacacacacactatgtgtttggacaaattcgcctagcgtgagaatcatcagtagtgagtttaaaagtttgaaaatcagacccaacattttgggtgtttaaaatatctcccgccttgaaatggctcctgtttagttgttagatgggagagcactggatcaaaacaaaaacgaaataaaaacagcttctcgagttgcaagggttctctgaatgccagagccttgatcggcaactgaatctcaagtctgcagtgtttgttttccatattacataggacttggctaggaggctgagaagatacaaggcaaaaagagtattcagggagtttgtatataaaacctcaggcttgaagaaaacaggttaaccaaatccaaagtacaataaagttcaccccccctgcactttggcccttagatcaatcctaagtagccattgccagtaggccaagtttaatcagaggacagtgcctaccagtaaatactgaatagttacaatagttatgtccatccaaccagtagcagatgaacagctaatacatcatgatgctatgctctcctaacagggtcccctcagatcctcagtgagcacataaagaaagggaggtcatatcccttacatctctaccaggtattaacacctaactactctctagccagaggcaattccctttatttccttactctcgtcgtcttctctttagcccaatctcctgacaatagttaaaacaaaaagacccccacaatatctcttgctaaaacagagtagtccctaaactctctcatctttagacttactgtcaggtacactcagcagaggcaggatctttatcaatcaagttagtggctctcagaagcattatgggaaatagtggaatggaaatgagctgactataaccacgataaaggaaaggtattaggaatttcagcctctgcggtttttgattaattcccacccctatgcagacctcgtgccgaattcggcgcgccgtcgacttcatactct

SEQ ID NO: 151071 - DNA, 896 bp, Homo Sapiens
aagagatggttaggtagtgtttcttcatacaggtggaactggctaggctgggggaccctcctgtggccctcgtcagcaacctcgggtttggtgtcagacagggggatgatatattcgttgtcaccctcatttgggcttcacggcagtatagaggacggatctggcgtccaggggagatcggaggccatggaatccaggcaaacgggcctgggtccgaaaggatggctgggtggtcactcctcagaaactcctcatccacctgctggtacttctttttgtaaccttcgcccaacagtctctcgagaagcagcaccagctgggagaaggggggccgaatctcaaacttctcttcccagcacttctgcatgatctcatagatctcgtcggaggcatgggcaggctgggccatgcggtaaccccgtttgatggcattgtagaactgctcgttcatgggcagctctgggtaaggggtgccacccaaggtgaagatctcccagagcaggatcccgaaggaccacacgtcgctcagggtggtgtagaggctgttgaagatgctctccggagccatccactttaaaggcaaaaaggtgctgcctttggagatgtaattcgagtcccgcatgatgtctcgagccaggccaaagtcacagatcttgaccagcttgccttcacagatgagcacgttcctagccgccaggtctctgtggacgcagttcttggaggccagaaactccatgccattggccacctggtagctgaagcccacgaggtccatgtagcttagcactggagactcgttgatcaaagttgctcggcaggtcctctcaggggcagagggaacgtagtcctcgtgccgaattcggcgcgccgtcgacttcataccctctccccctaaa

SEQ ID NO: 151072 - DNA, 929 bp, Homo Sapiens
ggctgaggggaaccggcacaaggaagcacgggcacaacgagcagagcccacccagggacagagggcagtcagggagcgaagaacgaggccaagcgcaggggagcgaagcgcagggtcccagggccggccacgtctggagctggagcaacgcatagctgcctggtgtccctggtctccagctgcctgaaggctgcagcaggcgtgcaggatggcaggtgcagtcaattggtgctggaactggtgaatgatcgtcaccgggcagttcccaattcctggtcgtttctttaaccgagtacagatgttccccatttcaagcgatttattgaaatgcttgctcgtgtgtgctgcactccggcagggtcagtggagaaggtggggcacagaaggagtagtgaggtgcctctgtcccggtttgtataggggttgttcctgagaacccttgctgctcccactggagagtcccgcagaagttggggcctgcagagagccccagatcgggggcagggacgttgggtctcggtcaggtcttcccggtgctctggtcccgcaggagagatggaggctccagctgcgtgggccccgcccggagccaccgctcttgtcgcacggaggtaaagctcacggggcgcgggcgaaggcaccagcttccccagcccctcctggccgatttccccattgggatgcccgctcctggccgcgggctgctgggttggcccagcctggggtcctcccgccaatccacagcagggctgcgtgggggccccttcctcaccctgctcccggggactggccttgccctccacagcctagagcaccatggaggggcacgcacaggagttcgggggtccggggggcggactccacctccggcggctccgatggggcacctcgtgccgaattcggcgcgccgtcgacttcatactctatcg

SEQ ID NO: 151073 - DNA, 801 bp, Homo Sapiens
gggtcgaacagtgagaaaagaagtaacaccttctgtagggcccaacgcggcgcttcatgtccatccagttttttacaggatgcacagcctcagcctcactgattttctgaagcacttcacacggtgaatgccaggtaacccgttctaggttcaggaacccggaggaaaaccattctgagagcattcctttcagcaccccattcatttcccggacgtccggcccctccaccagcttgagggcctgcgcctccagcaggtcggcccgcagctgcaccaggaagcgcacgccgccgtccagcttgctgatgtggtggaagaggccgcgatagcgcggcaccagcgcgtagcgcagccggtcctcggcctgcagcagcaccgccgcctcccgctgctgctggcgcagatggagcacgccggcgctctgctccgccacctggccgtggtccacgccgaagccccgcgccaggcggcccagcagttcggcccgctgggccgtctcggccagcccaccgtagaagctcacgaagtccgcgcactgaccctcggcgggcgccggtgtcttctcgcgcagctcgtaggccggcgtcggcggcaccgcgcggcgcagcagctcgtccatggcccgctccagggcgccggccgcctgcccgctcgccagccggggcccgggcggccgcgggggcaaccgcagcgggaggagacgcctggccgtcaagcctggcccgaagcctcgcacgtgccccacaacagctgccgcctcggccgaattggcgcgccgtcgacttcatactctccgcccta

SEQ ID NO: 151074 - DNA, 757 bp, Homo Sapiens
ggaattgcaccagcttccgatctcaaggtctcgcccgacccggatgccgacgccatgggtgagctgctgggacacagcaggcacatgtcggctctccatgcgtcagcactcagaggcacggccgagcgccggcacgtcggcgtcccttcaggtgcagctcaggtgcaccagggtgctggtgtcctcgtccgtgaaggtctcacactcactgtaggtgctctcggagcccatgtacgcgctgttcgtcacctcgttggcctcataggtgacgaagtcatcgaactcgtccgggcaggccaggggctcctcatcttgggcagaagcgacaccaccgtagcactggccatcaggatctccgtttttgatggctgtgatcccttggtagaagtcttcaaagctgatcacgccgagcccactgggatccaagtacttagttaagtccttcacctgctctgccccgtagaccgtagcaaactggatgaagtcctcgatgcggacgaaaccgtccccatccccgtccagggcatcgaacacggctcggaggcgggggccgtcctcctgactccccacgggctcgctcggaagggggtgggtctggctgaggtccgagggctgcggcggggacccgggaccttgctccagcgccagctcgcccgaccgtgggcgcggggaagggagagaagacgtcgacctcgccccgcgctcggtggctgctgccctcgtgccgaattcggcgcgccgtcgacttcatactctc

SEQ ID NO: 151075 - DNA, 941 bp, Homo Sapiens
agagtatgaagtcgacggcgcgccgaattcggcacgagggctgggcccctcctgcccacagcccccgccagcaccgcagccccaggcgcgttcccgactcaatgccacagcctcgttggagcaggagaggagcgaaaggccccgagcacccggaccccaggctggccctggccctggtgttagagacgcagcggcccccgctgaaccccaggcccagcataccaggagccgggaaagagcagacggcaccgggcctacaaagggagacatggaaatcccctttgaagaagtcctggagagggccaaggccggggaccccaaggcacagactgaggtggggaagcactacctgcagttggccggcgacacggatgaagaactcaacagctgcaccgctgtggactggctggtcctcgccgcgaagcagggccgtcgcgaggctgtgaagctgcttcgccggtgcttggcggacagaagaggcatcacgtccgagaacgaacgggaggtgaggcagctctcctccgagaccgacctggagagggccgtgcgcaaggcagccctggtcatgtactggaagctcaaccccaagaagaagaagcaggtggccgtggcggagctgctggagaatgtcggccaggtcaacgagcacgatggaggggcgcagccaggccccgtgcccaagtccctgcagaagcagaggcggatgctggagcgcctggtcagcagcgagtccaagaactacatcgcgctggatgactttgtggagatcactaagaagtacgccagggcgtcatcccagcagcctgttctgcagacgacgagatgatgacgagctgcgggaagagcctgagactgcactgctctgaagtgtcagtaccctgcgcatctgagacagatacgatgatgctcaggagatgctgtgtccttccacgccataccta

SEQ ID NO: 151076 - DNA, 1045 bp, Homo Sapiens
gagtatgaagtcgacggcgcgccgaattcggcacgagggaggtggggaagcactacctgcagttggccggcgacacggatgaagaactcaacagctgcaccgctgtggactggctggtcctcgccgcgaagcagggccgtcgcgaggctgtgaagctgcttcgccggtgcttggcggacagaagaggcatcacgtccgagaacgaacgggaggtgaggcagctctcctccgagaccgacctggagagggccgtgcgcaaggcagccctggtcatgtactggaagctcaaccccaagaagaagaagcaggtggccgtggcggagctgctggagaatgtcggccaggtcaacgagcacgatggaggggcgcagccaggccccgtgcccaagtccctgcagaagcagaggcggatgctggagcgcctggtcagcagcgagtccaagaactacatcgcgctggatgactttgtggagatcactaagaagtacgccaagggcgtcatccccagcagcctgttcctgcaggacgacgaagatgatgacgagctggcggggaagagccctgaggacctgccactgcgtctgaaggtggtcaagtaccccctgcacgccatcatggagatcaaggagtacctgattgacatggcctccagggcaggcatgcactggctgtccaccatcatccccacgcaccacatcaacgcgctcatcttcttcttcatcatcagcaacctcaccatcgacttcttcgccttcttcatcccgctggtcatcttctacctgtccttcatctccatggtgatctgcaccctcaaggtgttccaggacagcaaggccctgggagaacttccgcaccctcaccgacctgctgctgcgcttcgagcccacctggatgtggacagccaagtttactctgctggaaccctgatcctatgccattttgccttgtctctcgtcatctctcttccaattcagcaagatgctccctgtcgattggtgtttacgttctttttgctctctgactgatacctctatcaatgttgctt

SEQ ID NO: 151077 - DNA, 1123 bp, Homo Sapiens
aagatctcattcccacgtttctgtttcccccaagctcacctctcctaacacaggggaggtggccaccatcgccaacgggaaggtcaacccgtcccagtccacagaggaggccacagaggccacggaggtgccagaccctgggcccagcgagccagagacagccacattgcggcccgggcctctcacagagcacgtcttcactgacccagccccgaccccgtcctctggcccccagcctggcagcgagaacgggccagagcctgacagcagcagcacacggccagagccagagcccagcggggaccccacgggagcaggcagcagtgctgcacccaccatgtggctgggagcccagaacggctggctctatgtgcactcggctgtggccaactggaagaagtgcctgcactccatcaagctgaaggattctgtgctgagcctggtgcatgtcacaggccgtgtgctggtggctctggcggacgggaccctggccatcttccaccgtggtgaagatggccagtgggatctgagcaactatcacctaatggacctgggccacccgcaccactccatccgctgcatggctgttgtgtacgaccgcgtgtggtgtggctacaagaacaaggtgcacgtcatccagcccaagaccatgcagatagagaagtcatttgacgcccacccgcggcgggagagccaggtgcggcagctggcgtggatcggcgatggcgtatgggtgtccatccgcctggactccaccctgaggctctaccatgcacacacgcaccagcatctacaggacgtggacattgagccctacgtcagcaagatgctaggcactggcaagctgggtttctccttcgtacgcatcacggccctgcttgtcgcgggcagccggctctgggtgggcaccggcaacggagtggtcatctccatccccctgacagagactgtggtcctgcaccgaggccagctcctggggctccgagccaataagacatcccccactctggggagggcgcccgtcccgggggcatcatccacgtgtatggcgatgacagcagtgacagggcggcagcagcttcatcccctactgctccatggccaaggccagctatgcttccat

SEQ ID NO: 151078 - DNA, 538 bp, Homo Sapiens
tgaggtgactccaggattaagtttacagcgttcaggcagtcagcgttagggtgacgggccccacgtaggcccccggggaggggaagaggctcctgcttggccagcagctctcccgcatcttccatacggaagtccacgaggccctacgtggggcccatctcccctgtaccacctatgactcaggcttgaacaggcgcaaagcaggcgctggctgggaggtctgaggggactgcaggtggccctggagctgtggcaggtttggggctccccaacttcctctcctctccccagccctgttgatgggcagccatgactccacagaagtcatttgacgcccaacccgcggcgggagagccgggtgcggcagcttggcgtggatcggcgaatggcgtatgggtgtccatccgcctggactccaccctgaggctctaccatgcacacacgcaccagcatctacaggacgtggacattgagccctacgtcagcaagatgctaggcactggcaagctgggtttctccttcgtacgcatcacggccc

SEQ ID NO: 151079 - DNA, 957 bp, Homo Sapiens
  misc_feature (834)..(861): n is a, c, g, or t
tggctcaggatagccgtgctctgtcagcaatgcatggagacgtcttccaggaagattccgcagggccttcctgtgtatactgtagctcccagtttgatcatgaccccacctgctggatgggcaccaccaggaccttcctcttccaagtcacccggcatctttgtacccaattcggcttctccctctgtttggccaaggacccttcggaagagaccagtttttcatagttactctccatcacgtttctgtagagctccttctgccaatcctccagattttcccattcctgctcggtgaaacagacgccatcattctccagtgacctggacaccttgggggcctcccccttgctgcccgggggcagccgcaggatccagaagttcctgttgcgcagcaggttctccacgttctccagccgcctctgcagtagcccgtactcctgcagcagggtccccagcacggcccacttgccctccagctggttcccgaactccacggccatcttctcgcagtcagccagcttcttctcggctgtccccgtgcgcccctccaggctctgtagccgggcagcctgggactccatcttcttctccacagcctgaatagcggccaccaccgtccagagtgaaatctcggtggtctgaaaataggagcttttctctgttgcttgtgaaggaagtgtggaagaagttaaaggtgtggagcgtcgttttctcctgtgccgagcaggcgccgactccgccatggctccagtcgcccctcaacacccagaccccgcctcggagcccccgtgctgcgttcctgtccgctcggcgccccagagcctgttggaannnnnnnnnnnnnnnnnnnnnnnnnnnngtgttgatgcctccgcgggaattccggaccgggttccggccttttttggggggggtggtgccggtctggtacggtgggtgtcggtttggtttggtg

SEQ ID NO: 151080 - DNA, 1208 bp, Homo Sapiens
  misc_feature (394)..(394): n is a, c, g, or t
  misc_feature (461)..(461): n is a, c, g, or t
ttttccaaaggcacccaaggggcgggggcctcccccacccagggaaaaggtttttttgcccagtttggggagttccccccttttcctttaagggggtccccttcggggtactttgggtctcaaatgaagggcgctgggccaattatttggaaagggcccaccctcccggaaaagcccgtctcccggggggcggcaagcaagggcggccgggccaaaggaaagttggcgggagattcccccgaccagaaggtggagcccttcctggctttgaccccgttcaatctgtgtcccaggggtgccgggggccctttgggggcccggttgtgcagcaagccacggcccgaaagcattgaagaaggctggcacgtttcagccactgggtcgtctgtgaagncggtggccgctggagagccaccgtgaagaagtctgtggggctaccggcccggttccacttgggtggncgggccccggctgccggggccctgggcgtggagaagaagccgccggagtgtgggagcccttgctggaggctggcgtagcgcagccagtcgaaccaggccgcttgttgagcagggtggcctggtcctcctggagggtgcccgggctgaggaccacgaccttggccatgacggggaggaggtgtctgaggctgggtccctcaggctgccggctctccagcgctcgtagcacgccctggcccacggctctgacctcctcgtttctgtcaccctgggccaagagaacggaggccaccaggctcagctgccggctgttctgcgtgtggtcccaggccaggctgaggctgtcagagggggacatctctcgcaggatggcggcgcaaagcacctggagctgctcggggcatgcaggcaggccgagggtggcctgcagcaggtctacgcatgtcttctccagcctccggctgtacttcgtggctgagatgatgaggaagagcctctgcagggagtcgagggtgtccggccccaagtcctccgcctgcagcagtttacagatccgggaacagaacttcttcagctcctcgtcctggatctccctggcctggtggagcaaactctccgctcctgccgagaacatcacgccgccgccaccagacgcgcacgaacctcggaaactccaggagctgcagcccaggagctccgcaccccggtcaacttccgatcccagggaatccggaccggtccagccgc

SEQ ID NO: 151081 - DNA, 733 bp, Homo Sapiens
aagagtatgaagtcgacggcgcgccgaattcggcacgaggcgtgtccccgcctgcagagtcagtgtgcggtttgggagaaaatgtgtcggatattttggggcggtcacgtgggcgggcgggctccgagaggccccgggacagtcccagcctagagccgtgcccccccaggagccccccagtacggcgagccccggacattgcgacgctccatccaagagactgcccgacgccgggacctcggggctccgccgcctcccttccccctcccactccagcagctacggcccagttccctcaacctgacccagtatgtagaagccagtctctgcaggcggccagccggacttttggaggcccagtgggcaggccaggcagggcgggtacggagcctcccaggctggggcagtgggcatgggcaggggctgtggctgaagacctcgcccgcccactgcagaccccaggggactctcacaccgcagctgccatggccaccaataaggagcgactctttgcggctggtgccctggggcctggatctggctacccaggggcaggtttccccttcgccttcccaggggcactcaggtggtctccgcctttcgagatgctgagccctagcttccgtggcctgggccagcctgacctcccaaggaatggcctcttgtcggtggaaacagagaccactcgaggaatggtgccagtcgcctccccctccgctctctgtttcaacca

SEQ ID NO: 151082 - DNA, 1287 bp, Homo Sapiens
  misc_feature (399)..(399): n is a, c, g, or t
tttcaagatagggccagggtgggtggcgttggcccagcatctcgaatgtgcttcgctgccctggcagttcctggcaggcaacactgcgtgctcctggcggctctgccaggccctggcactgcagggcactcttcaagtttcacagtaccatcgccgtcaccaaagcagattttagggtcacggtcagggaagctctcatagtagaaggagtctggtgtggggacgccagtgccatagaggcagtgcagctgcacgccaggtggcatcgtggcttccaccagccctttctgtgtcctgccgcatgagccagccatcttcaaagccgatgtcctggaagaacttgcggtagtcccgcagtgtgtagttgattgtgggtgtctgcacgaacaccttctcagngtgaccatgtgtagttgtagggcagcagccagctggtggagacagctgaccgctgctgctcccggatcttcaggggcccgatgactgggatccggttgttgtctcctgaagccaggacgcgcagggtcttggccacgcccccccagggcgcacccagtgaccacgaaggccccggatatacttgtccttccaggccttgcggttgccgctgcagaaagtagagcgtgtacatgttgcccatactgtgggcaaccagcaccacggggcccccatacagctggtacatctcctcgatcatctcgcggagggccaggaagtagggcccgttttcatttggggctcggcgccagtcatagggagcccctcggacatcctcaccccgtgtgtagccccagcccacaaggctctccaccatggtgtggaaataggaacccacgctgcttttgctggggtccaggaactccagtgagaaggtcttcccaaagccagggacacgtacatccacaccatcaggaaactgggtggccctggatgttttgttgtaaaccagcctgatattgtcaatccagcagtcaatgatgacaggcagcagcagttccaggttcagccagattgtgaagtagctttcggtcttcttggagcagaggtagtgcaccactgtcggcttgtccagcttggcttccagttggttacccaaatcaccagggaccagcaccactggggggtgacgtccggccgggagcgctgggtccgcgagcagcattagcagcagcaagaggaacaggaggccatccgggagcagccccacacggtaggggcggaggtggaggcccatggtgtacgacgcctcgtgccgaattcggcgcgccgtcgacttcatactcttcc

SEQ ID NO: 151083 - DNA, 948 bp, Homo Sapiens
  misc_feature (117)..(117): n is a, c, g, or t
  misc_feature (171)..(173): n is a, c, g, or t
  misc_feature (256)..(256): n is a, c, g, or t
tccagccaattcagaatcagttgggggtaggcaggcagtcccctgtacataatgattttagcttcttctcgctgatggaaggcaggcgatgattctctctctgaggcgtttttcgtnggggcagtggatgtagacaggggtgtcagtatcggggcagtcagtgtgagtgcnnnttcctccgcttcctgtcagctgtggtagcagggtcacagcgcgcactccttctcgatgcaaactgggggatggttgagtactnggaagaacactttccacagaatatctgcccacacgcccggcagtggtgcttacgggtcatcaccccgaactgcaccctgcagcggtggcattcctcagcgtccacccagtctggggctctctcggcagcaaacatggcatcgctctctttgaattctggaaagacgtgcccctccaccttcatgatctggtaggtgtcctggaccaccttgtacttgggctcgttccggaaggcatgcgcccaggcctggatcaggtacaggatcttgttacggacgtttacctccacttgtctcttcagcaggtccttcagctcctccatggtctgcttgttggccacctcatcatgaactgtctggccacagttctttaccacagattccatgacctccagggcatacaaggcgacgtgtgggttcttgtcgttgactttcttcttgatggaattcacagcatattttgcttgtgtgtccccttggcggatcaggtcgcagatctgcaaaatggactcccaatctgtctccaacaggagctggctggtcgccttgtctaggagacgctcgaaggtgccgctgcctcgccccatggcgacctccagcccaaacccgacgccgcgggcgctcccctgctacgagctggcgcgcccccccctcgtgccgaattcggcgcgccgtcgacttcatactctctcgc

SEQ ID NO: 151084 - DNA, 703 bp, Homo Sapiens
  misc_feature (71)..(71): n is a, c, g, or t
tctcagaaatgatacggtccttggttgcccccaggtcagccagatcagcgccgtggccctccacagtggtntggagctcattcagtgagtcattgagggagctgaagctgagaataacctcagagagctctccttgcagggcctgcagggctgagcctgagctgcccccaaacacgctgaagccgtccaggggcccacggcttgggcccccaacacctggaccagccccaggaccccgaggaggcaacagggggcaggagcagcgctccacaccatcccgaaggcggcctagttcctcttggactccgccacaggccccacagccctcatccccatgggcctgcagcagcccctccagttggcctagccgggccgcagtgagattcagccgtagtgtgaactctgcagctgtctcatcctgggcatccacacgatcctggagccggcccacaacctcttgtaatccctccagcgtggcctgccgggcctcccccgctgcttccaccgtgtgcaggccggagcccaccagccgcagctgcccctcactgtccagcaccctgcgctccaaggcactgaggatctcgctgacttgagagtcctgctccccaggggccccagagcagagctgcccgcatgcctgcatggcccctgccacccctcgtgccgaattcggcgcgccgtcacttcatactcttcccccgta

SEQ ID NO: 151085 - DNA, 1186 bp, Homo Sapiens
  misc_feature (146)..(146): n is a, c, g, or t
tcggcaggggatgctggatggatgatctcatcactgctcacagcaggtgtgtgacatggacatggtgtgagtcgactcgccttgggagaggaacctcagtgaggactggggtgttaaagggaagcgtgagggtagaatatctgtgntggaactaacaggcatcctggaaacagactctcgcatacgacgcatagtcaaagaaggtagtgctgggactccactatcaccaatagtggaatttggaaacaataagagttgtctgatgttactccagtccacacacatagtaggtactttggtgctacagtgctcatgaaatttgtagccaccaagtctgacatcgaaaatccattgagcaggaatttcttgacagatgtcccagaaggcaagcttcagggaacgtcttccgagcaaagttgtgtgttgtgaggggaacatgatccaggaaatctacttgaagttcttctccaatcaaagacgcagcatcagtattccaatctaagcgtgcttttttacctttgtgttcgtggagaagtctgaacactgcacagcactctggttgcaggcccctcaccttgagtgctttcataaggcagtcatgcaagctcattccatttcgcacattgaccactgttctttgcttgttcggcaagaaaacacggatagtgttgcttgtcttagaaggatctgtgagtttgccatcatctgatgcccggcgctgatagccaaactgctgaactattgtaggagagatgcagctggagccatcaaacacggcatctttgaatccaaaaccattgctgatcgtcttccaagctccctgtatgtgctccattgatgcagcttaaacaattcttaaacctgagggagccaggccgccccaacgtcctgtcgttcggcggcagcttctcgcccgctcctcctccccgcggcgggtgagggagcgggaggcggtcacattcggcgcgtccccagcccaggggacggagccccgagcagcccccgcatcgtagcaaacgcgctccgcgcctcagggcacgcgccccaaagcccggccagctgacccttttcggggcccaaaaaaggcagcagaaagccgttcccgcctcacaatcgttttcctcttactcccgccatctaagatggcggcctcgtgccgaattcgccacccaggcctcgcttcctt

SEQ ID NO: 151086 - DNA, 996 bp, Homo Sapiens
atttaggtttgggggttctcttttggggtgggttaaccaagggggttccaagggaaaaatggtggtaaagcccaccaaagttgtgaaccattggaaaatccccctggaggccagggaatttttttggacaagaatgtccccaggaagggccaagctttccagggaacgttctttccgaagcaaaagttgttgttgttggggagggggaacaatgatcccaggaaaatctaccttgaaggttcttttcccaatcaaaggacgcagcatcagtattccaatctaaggcgtgcttttttacctttgtgttcgtggagaagtttgaacactgcacagcactcgggttgcaggcccctccccttgagtgctttcataaggcagtcattgcaagctcattccatttcgcacattgaccactgttctttgcttgttcggcaagaaaacacggatagtgttgcttgtcttagaaggatctgtgagtttgccatcatctgatgcccggcgctgatagccaaactgctgaactattgtaggagagatgcagctggagccatcaaacacggcatctttgaatccaaaaccattgctgatcgtcttccaagctccctgtatgtgctccattgatgcagcttaaacaattcttaaacctgagggagccaggccgccccaacgtcctgtcgttcggcggcagcttctcgcccgctcctcctccccgcggcgggtgagggagcgggaggcggtcacattcggcgcgtccccagcccaggggacggagccccgagcagcccccgcatcgtagcaaacgcgctccgcgcctcagggcacgcgccccaaagcccggccagctgacccttttcggggcccaaaaaaggcagcagaaagccgttcccgcctcacaatcgttttcctcttactcccgccatctaagatggcggcccaagcgcccgcgattaagactctcgggcggcccagaccctcgtgccgaattcgccacccagg

SEQ ID NO: 151087 - DNA, 862 bp, Homo Sapiens
  misc_feature (492)..(492): n is a, c, g, or t
tgggactcaccacgcggtgtggtccctcctgcacccgctgcagcatggcggcaagccactcggtgttcacttcgcagtggctatccagaaaggtgagaacggtagctgcagccacgtccgccccacgcactcgggaccggatcagcccttcccgccgatcattgcgcaggcacttgaccttggggatcctggtcaggagtagacagtcttccggatctgagctgaagtcatccactaaaatgatctcctggatcaagttggcaggagttcggttcaggacactcttcactgtgcgcagcagggtggaacgggcctcattgtggaaggtgatgatgacgctggtggctggcaggtccgaggagtaggacacagatgggcagctgtaatggcgggtgtcccggatgggccggtttgggctcagcttgtcacatctccagctggttgaaggcgtgctgtctgtagggttcctctccagccttcagctgcttggcncgacaggtagggccttctcatcaaggcctttcgagggagttcctgtcacaatgagcgggatggtgcggtcctcgcggagctgctccagacctcctgcctgccctctgcgcgcccacggccgccggaggatgctgcgtgggctcggttgtcctagccataagtagtagaaagtgcccaggatccaggctacggtcaggatggcgatggcattggcgcggatcttcctcatggtgggcagacgggcgccccaggtgggggactgggccggcgtgctctcggggccggggcgggggcgctcgcagccccagctgttgttttcgccctcgtgccgaattcggcgcgccgtcgacttcattactctctcgccctt

SEQ ID NO: 151088 - DNA, 797 bp, Homo Sapiens
tctcacatcggagtgaatcgtgagcgatgtacattgcagtcatatgctggttgccctcgctcgcttctgagctgtgcagagaagcagtcgggaacagaagacgtgcgcagctgcggtccccctccaccagctccaccatgaagctgtccttcagcagctgccggtgctctccattcttcaccgtcatggactgtcgtcggggtgtgatctcctcattgatgctggacaggaagttctgtgagatgcggagggcgtcctgcagcaaggggtggtcagggtggctggcaggagtgtgcttcagcaagtcatggaggaccagcgtgctcctcgtcacacggtccacaggcttgtagagcagagtttccagagagttcttggtcgttggatccttggcatctttgttgcttctggctctcaggttctcggagatttctgcaaactgagcattggcctgacagcacttctcagccatttccatggcaactccgtagttgtccacgaaggcccggtacacacccagctggctggccagcttctggaagaggtcgcccacccgctgctggtggctccactgctgcacgcgggggaagagcccatcatagaactccttgtggatctcgtagagctcaggcactttgaagaagatggtctcgatctgctgactcgtcagcaccggctgagaggtggtggcagcggctttcaaaggcttcatgggcagcagcagtgcctccaggtggctcaggtaagtctcccctcgtgccgaattcggcgcgccgtgacttcatactctctcaaca

SEQ ID NO: 151089 - DNA, 842 bp, Homo Sapiens
tgagaggcagctccaggcagtattattagatagtcgcagatcaagttctgtacatctccctaatacgacgatatggtgtggcagtgtatgcagcatgacacagacatgagcagggtgactcagtgtatcatggtaaagtctatggtcatatgatgtcaggagcaacttgaatcctttaaatccttgcttggctccaaggcagctctcaaagtcctttttcatgtcggacacagcaactttgtcctgaggccttttgggtccactacagcaaggcactactgttttcaaatctaattccacaacctgggtgaagtctgggtcttgagaagggtcattgaaatctcgaaacattcctacagcctgaagatattttttaatatactttaatttttcttcatcacgacctgtttgcaccaggtacgtgatactaacttcatcaactgggaaaaaggcagcagttgctccgtactctggacacatgttagcaatcgtagctcggtcagcaatggacaactgggctactccaggcccgaagaactcgacaaatttgcccactaccccaacctggcggaggtgcttggtaatggtgagcacgatgtcagtggatgttaccagagggtggggcttccccatcagcctgtagccaatcacctgaggaagcaccatactgattggctgacccagcatgacagcttctgcttcaataccaccgacaccccaaccaagaatgcccaagccatcaatcatggtagtgtgcgagtctgtgcccacgaggctgtctgggtaataatacctcgtgccgaattcggcgcgccgtcgacttcatactctctcgcccataa

SEQ ID NO: 151090 - DNA, 520 bp, Homo Sapiens
  misc_feature (453)..(453): n is a, c, g, or t
  misc_feature (495)..(495): n is a, c, g, or t
cacagaaccatgagcaagggtgaactcagtgttatcatagataaaggtcttatggtcattatgatgttcaggagcaacttggaatcctttaaatccttgcttggctccaaggcagctctcaaagtcctttttcatgtcggacacagcaactttgtcctgaggccttttgggtccactacagcaaggcactactgttttcaaatctaattccacaacctgggtgaagtctgggtcttgagaagggtcattgaaatctcgaaacattcctacagcctgaagatattttttaatatactttaatttttcttcatcacgacctgtttgcaccaggtacgtgatactaacttcatcaactgggaaaaaggcagcagttgctccgtactctggacacatgttagcatcgtagctcggtcagcaatggacaactgggcgtaaccttagacagggtgcacnctgaaagtaagcctactgagcagaaaagtttttggcgcccancgtacgccgcaaaccccttggggcc

SEQ ID NO: 151091 - DNA, 462 bp, Homo Sapiens
ccccccccactgcagacttcagtgcccctctcaggggtccgttacctcccttcattcagctgccttattaagctcagagtctggtgatggacagatcccagatactatcccatctcttgctcaggcaggggaagttatccactgtgagaactggcccatctgtcttgtgctggggctcatgagaagaaacaggccttagaagcggcatggcccaggaggcagatttctgtgttaacctctgttaaagtccttcccggggctactcccgagaacactctcctggaatgtttaaggcccaagtcctgcttgcagcagccccacagtgttcccatttctcagcccgaaaacccacccctgttgccccctcccctccaagtttattcgtaaacacacacacatccattctctctctcacctcgtgccgaattcggcgcgccgtcgacttcatactcttcccaccat

SEQ ID NO: 151092 - DNA, 1015 bp, Homo Sapiens
  misc_feature (1004)..(1004): n is a, c, g, or t
atcatagcatttttaagatacgatattggatgtatgcaacttcaacttgagaagggcaaaagcatgaagaaatcaaacagggagggaggaggtgagggaaggggagacagcaacttggggcaaaactggggacagccaaatttgtccacgagtcatcagcttctgatcagcctggcggtggggggtcgctagaagagcttctcatagcatttcccacagtgaatggtgtcacggtgaatgaagatctgatccaggagatcgcccatcggtttactgcaaatcccacacttaaagcaatattcatggcagcagataccaagatgttctagggtaatctttggacagtctcggatctcacggttgcagtaagtacagatccctccagttgtcctctcagagtatggagtgctgccacatggaggcttcttctccatggcgaatgagtcctcaatgctgctgacgttgctatagcgtgcagatactggcttcccagaagacacttcactagcattcacgtactccttcacgaagagaatccctttggtggtagagctggagtccaattcacttgcgggggctggaatataaatgtgaggctgctcagatgtggcagtgacagttacagtgaccatgcagctcgaggggttcctccccctgctgccacaactctctcgtctgacaagttgctcagatccgctggggctgctctgccgctctggggtgctgggatctgcaggttgctgagcgggtacagctgggtctccttggccacctcttggagctccaggcctctcctgccaggcctctccgaccctggtggccacatccttcccctcataatcagccaaggccgcgggggaaggggcagccagctcctcgggcccattcgtgatcctcgggcgacctctggcggccggcacgggcatggcctcaagagaatccccgccgaggccgagctcgtcccgggcggccatttcacctcgtgccgaattcggcgcgccgtnacttcatactc

SEQ ID NO: 151093 - DNA, 893 bp, Homo Sapiens
atcgatcagcacgaccgcctcaccagagacgggtcgacgattgtgtgtaggcgtggtgtgcgggccacctgtccgtggtacagctgccgtgacagcatctcggccatagcaaggcagttcctgtgttaggcagtcatagcaccagcagctggggcctgatggatacccagtggactccagttgcgtcccccaaaggtccaactcctgggatccagcaaaagctccacctacacctggagccttgggcttaactcctgctccagtgggaactccagggagcacccccacaccggggaaccgagctcctgggagcacgccacctgggtatacacctggcagccccacacccggcactttcccaggcttcactccggctccaggctgaggaaccaccgcacctgcagacactcctaagccaccaactcctgggacaccaccaagcccagcgccagccttagcagctttataggctgcagcagcgtcagccactccaccaggcaccagagcccccggaaaggtaactgcggggaaggcgccgagccctgccccaaggccagcacccgcaagccctccgggaactggcttaagaggtttgcctccaggccccagcgctcctcctccaagggctccgagaccagcccctggataaaagactcctccaggaactccaccaggaatggccccagggacccctccaggccgagaggggtggaggatggacagcaggagcaggaggactccgggccgcggggccgccgccgtcagacccgccatctcggggagaaatgccccagcccgctctccgcacctcgttttatccccaaagcctaattgttgcctcgtcggctgtgagcctcgtgccgaatcggcgcgccgtcgacttcatactcttc

SEQ ID NO: 151094 - DNA, 1113 bp, Homo Sapiens
aacaacttagcgctttgggggataaaacgaggtgcggagagcgggctggggcatttctccccagacccgagatggcgggtctgacggcggcggcctcgcggcccggagtcctcctgctcctgctgtccatcctccacccctctcggcctggaggggtccctggggccattcctggtggagttcctggaggagtcttttatccaggggctggtctcggagcccttggaggaggagcgctggggcctggaggcaaacctcttaagccagttcccggagggcttgcgggtgctggccttggggcagggctcggcgccttccccgcagttacctttccgggggctctggtgcctggtggagtggctgacgctgctgcagcctataaagctgctaaggctggcgctgggcttggtggtgtcccaggagttggtggcttaggagtgtctgcaggtgcggtggttcctcagcctggagccggagtgaagcctgggaaagtgccgggtgtggggctgccaggtgtatacccaggtggcgtgctcccaggagctcggttccccggtgtgggggtgctccctggagttcccactggagcaggagttaagcccaaggctccaggtgtaggtggagcttttgctggaatcccaggagttggaccctttgggggaccgcaactggagtcccactggggtatcccatcaaggcccccaagctgcctggtggctatggactggccctacaccacagggaaactgccctatggctatgggccccggaggagtggctggtgcaccgggcaaggctggttacccaacagggaacagggggttgggccccccaggcagcagcaagcagcgggcagctaaagcagcagccaaaagttcggggctgggagcaacccggagtcctcccctgggggtttggaaaggggcctgggtggtccccgggggggccctgcgcgcaaattccctggaaattggcagggaatctcccaggggtgcggggacatccaacctgcccgctcgtgcaattgcccgcaaaccaagcgcgcttaaggggaagcccacggtcaagtgcgatctctttcgggaggcccttcatttcccgtcgtggtggcgg

SEQ ID NO: 151095 - DNA, 838 bp, Homo Sapiens
gacttctaaaagcatcagcctgtgtctggtatggcctttcaaacttctgcaatgtccctactgacttttgctggacctgatttggcctcaccctccaccctccctttctcactccactatcctgcttgtccttgcccacaccagcctctcccagagtctggagggtcttcacaaaatgaaaaacatttgcatcatggttaagtgaattaatttaggaaccttggcaaacaagagattagactgacatagtcactatcaacttaagaagagatggattgtgaggaggaggaggaaaggaggatgcaagcacaggttaaaaggacttttccatgtcgaatgcagcactaaaacaggtctcttgccctcagaggagcctcttccatgaacattcattccgaaaggagattctggtccccaggagggcacaaaaacacaaagtcagaaccagaccacggccccgcccctttagatgtgagccggggtgaggtgggtttctggtacatccccattaaagcagatatgtttacaaaaatagggagtgctctctagcagagactgtgttttctctggtgtctaaaaacacccacaggcacccatccacactcatgcacacgaactacgcacaagcaggctcctgccaggaggcagctgggggttcttctggcctctaggtttaagccaagtaagaatctggttgttttaggtctgggacttcctggggctgcattcctaggacatgctgggtgcacctggatttggcttaatccaaatcgatggatatgcaacgacactgcttcacaccctcgtgccgaattcggcgcgccgtcgacttcatact

SEQ ID NO: 151096 - DNA, 1058 bp, Homo Sapiens
tgttccccatccagcagcaagagcgtcggggccctgggcagccgctggggagctgctgtgtacccgaaagtgctgggttcctctccttcagccggtgtggctggggcagggagagaagtcgtgttgggattcgggggtcacactcaagggtgcagcaggtggggacgtcacaccaacaacggaaggttcttcgggatcagtggctgttgtgggttcatcattcactgtgccattggccaagccactgtggcctgagttcttgacgggctggcggtgccggctccgagcaccggggctttgctcgccggttgctggggttgttctggctgaagcacccgaatgtctgtgcgtccgggatcttccaccaaagcagtttgtgctggggggctggtgccggttctctggagctactgctgttccactggagtctctcgaaggcagctgtgatccatctgtcagggcactgccattaggcacatttcccagatcaacagttggcccgtccaggaaaattgtcagctctccgcctgagacaacgctgcctttgttctccgtctgcaggttcagggtcagctgcatgttctccattttgcccccattgttcttcaagacgttggagaggttgacagatgcggtgcctagcagttcatttctcaaggtatggcagctccagacctttaaatctaaatgactctgtgccgtgacattcaaaatgatgatctcattccagagaagctcagagctcccaatgcgcttcccagtcttcttggtctcactggggagtccatccaccgccacctccacgtaggagttaattcgaggttgacgattatgcaccttgggctttgcggacaccactttcaaagtgagctgagacttctcaaaaggcagggccactcctgcccggctagagctggcagatgccatatcatcaccgtgaagctgccgtggccacagaagcggcgccgaactcctctcctacttccgccttccaccgcccgcactcgggccgggtcacgcctcgtgccgaattcggcgcgccgtcgacttcatactct

SEQ ID NO: 151097 - DNA, 1444 bp, Homo Sapiens
  misc_feature (132)..(132): n is a, c, g, or t
  misc_feature (193)..(193): n is a, c, g, or t
  misc_feature (362)..(363): n is a, c, g, or t
  misc_feature (367)..(367): n is a, c, g, or t
  misc_feature (465)..(465): n is a, c, g, or t
  misc_feature (1263)..(1316): n is a, c, g, or t
gttttgttggcgattcgtacgttgtgtgtggggcgggacgtgcggtgggtcaccgcgtcacggcgcgcggggtgtgtgcgttcgggctgggtgctagctcgaggctaaaaacgcacagctactctcttctcncccccgcccatttcactccacgttgggccatctcttcccgccccacgacggatgttcatcntcagcctgggaggctcgcctcgcccggggcgggtatcccgtattgttttcggcgaaggggggaggtcgcgtgtggtgtagtcggcacgcttggcggcgtatttttgtggtggtggggcgcgccacggggtactccccctccaccgtcccctattctgtggtaggtgttnnctcngggcctgttttatttatgtgttttcggcctttgtctttggggtgtgcgcgccttgtcagaagcgacccgcgctgcctccgcaatggggttcgtctgtncatcactggtcgcgacgtgaggtctctctacgttccctcctcccccgcacccacatctttgcccctatcggctccctccttgccgcattatatattgtgatttgggtgtgacccgtgggtaccggtggtgggggtgtccgagaggcgaaggggttattgagggcgaccgacgtgcgggtgcgaacgccgtttgcgcagggcgcgatatcatgtgtggacgggtgggggccgctggagttgaggtgggggactgctgcggtttgtgcggcgccgggcgggacggaccaatcgctcttgtcggagggggcgtcgtgaaaccccccttttttttgcggcggacctgtggtccggggggtagaaaccccgcgaggggcctgcggagcccgcttcttgtagggaggcaaaagccatgccttggggggccgtgggtttctcttcttaggccaggagaggagccccctcggtggagatggggcctaactcccccgccgcccgcgcaggcggcgcagatcgggggagaaaaagccagccacggcccttcgtcatctcgaggcccaggggtgtgcgcccagtgtcacccggagctggggatcagcacagtttctccgtcggcggtggcagcggcggctcctccctggctcgtgggcgccccacctccctcgcaggggccggagcccggggtctgcggggccaggaggcgaggtcggccgcgccgaggtctgctagatccggacggggcgggaggggcaggccggcggtcccggggccacggtgcaggcgtcccccggctggctgacnnnnnnnnnnnnnnnnnnnnnnnnnnnnnnnnnnnnnnnnnnnnnnnnnnnnnnaggggcagtcattcagatgaaattccagtccccgtccagagacaccagcccgcctctgcgttccctcgtgccgaattcgccacgcaggctcgctacctaggacctgaaggggctcgtgagtgttgtta

SEQ ID NO: 151098 - DNA, 939 bp, Homo Sapiens
  misc_feature (86)..(86): n is a, c, g, or t
ggggattccttatggttcaaggcccattcaaaggggccatggtggccatgccaccagggatgtagaggaggaaccacccagggganccagctgtccaccctcgggccctgtgtagggcttcccattgacaatctctggcgaggcatagagggggctcccacagaatgtctgcaggaacttgccttgatggtagaggttggagaggccgaagtcagcaatcttgatattcccattggcatccaagaggatgttctccagcttgagatctcggtggacaactctgttctgatggcaatagtgcacggcagagacgatctgccggaagaaatgcctagcttcgcgctcactgagctgctgccgctcgctgatgtagtcataaaggtcgccccggctggcatactccatgacgatcacgatcttgctgctgttctcaaacacttcatggatggcaatgatgtgagggtggttgagtgatgacatgatctcaatctccctccgtatgtgcatcagatcttgctcatctttgattttgtccttccggattgacttgatggccaccaggcgccccgagctctcccgcgccttcttcaccttcccgtaggtgcctttgcccagggtctccaggaactcgtagcggtgccgcaggttgtgcttgtggtggtgccgcttcaccgcctgcttcttcattaggggcttgggcgacttgatcagcccttccgccagcggccgggctagctctgcggccgagggagtggggccggagcgccgcgcgaaaaccagcgactccatggcgagcaggaggtgagcaagggcggcaggggaatcagtaggctgtgcggggagggctgaagcgcggggcacaggtcccgcaccaggacggggagccacagcagtacccctcgtgccgaattcggcgcgccgtcgacttcatactctctc

SEQ ID NO: 151099 - DNA, 1178 bp, Homo Sapiens
ttgaaccatttcggttgcaagttgggggttgccccatcttccggggtttcggggggtacatatcgggttccgccaaaattagcgtgcccgggttaagcaaagcccttcccttttggtgggttttcccttccagcaagttggttccggagttgggcggataataatcatttttccacatttccggtttgaccgttttgaggctggagcctgtgtactcttcggagaaagtgttctccccacatagttggacgacacccaggttggttcagtgactcgcctgtggatgtggcccacggacggtcttggactcagactgtagggtggactggagaccatgagctggctgagagctgacacgagaatcaggatgaggataggcatcagctgcacaaacacccctagcccgccatcaccctggttgtccctgcggtcctgcctttgctggtaggtatagcgcatgcggccgttgctgtagacgtggacgttactagaagggaagccgccgccaaagaacatgttgaagaggtcttcaggggagatgtcggcctcaaagccacggtggaaatccccatgcccatggccgtgccgggccgcctggctcttgtcatcgccgaactggtcatactgcttcctcttctccgggttgctgagtaccgcatatgctgtgccaatggctttgaaggcttcagtggcaccaggtgcgtggttcttgtctgggtggaatttgagggccagtctgcggtaggccttcttcaggtcctcatccgaggcccctctgctcacccccaggatctcatagtaatctttacattgcttgacccttttcacagctgcaacctgttctgcagtgtagcctttggtgctctctcctccagcttcaccgttggccgagggggcatcggtcccacctgctttcctgtgggtggcatgggttgtgtctgtgggtgggggttggtcaccggcagtctgtggtttctggttgagggactcaatcagggcgcgaactcgcggcgtcggatacagccgctgtgccttctccaggaagcggagcgcccggtcgggctggttgctctggatggccttgagggcgatgctgatacagcgctcagcttcatccttgttggattccatggcggaaccagaacgcggaaccagggagggggaggccgatcccggga

SEQ ID NO: 151100 - DNA, 845 bp, Homo Sapiens
ttccgcagaggtgtcatctagcctggagctagccccctgagctgaggatgcttctctttgcgcgccctcacagattcagcccgcagcctgagcaatgttgagagaaggacttcctgagtgtgctcccccagacagcgagaggcagactgggtgtcctggccagaggtgcttcaggcagcggttgatggcccccatcttaaggatgaggcccccagaggcattgatgcgaaccagcagcagcggctccgccctcacaggacacgtctcctgcagtgcagggggcagcggccgctgcggcaggagcttcatcttctcgcccaggctccggaggcccctcttctgcttgcatatcttccggcactcaggacagcagggcggctcacagcccgggagacggtgtgtgctgaagcaccgtatgcagaagtcgtggccacagtccagcgagatggggtcgcgcaacctctccaggcagatggagcaggtagggagctcccggggcgccatgggctggggccccaggcctagctccaacttggggaaaggtgtatgggaccaactgttgccgctgtttcccatgaagctctgttttctctcccgtttgccaagccgatgacaaaaggaagtgactgacaaggcgggccttggcatgggaggctgggatggggagagggtccggatgcagagggggaggccccgagaccttcaaccagaggtaaggatgccttttctcccggaaaggctagcaggctgcggtaggtagaaggtgaggtcgggggatggtatccccgaggagctgactcccctcgtgccgaattcggcgcgccgtcgacttcatactctttcgc

SEQ ID NO: 151101 - DNA, 1325 bp, Homo Sapiens
gtcacatcagtgctaaaggtgcaggagccgtgcatcagtcccaggggcagaggctcaccagcagtccccacagtccagcagcagcggcgcatgcttttctgcaccgagcagactctctgcccgcatcatgctgtgaagtcaaagcagagacatcaggctgcccatgggcatcctgggcaaactctagtttcccgagcttgccatgggtggcaaagtcagcagctgcccgggtaaagcgctgcagagcctcgggcaccacattggcactgcccagcagccgattggtgtctggccagtcctggcgcagcacccccagccgcagcaggcactgcttcttggctgtcatcacaaagtagtgggtgtcgtccttgtagtacacaatgttctccagatcaatgcctgtggctttgagaaggctctggaagaagctctggttgtagatcctggctacaccactgatctccggcacctgtgtctcctccacggtgcgtccattcacaaagttagctgtgatgccaatggccagtttgcctcgcatttctcgaactttgaagccttcagggacgaatttacctcctgcagccgagataaggacgtcaaattcatagttggccagctgggcaggggggttgggttggagctgggcacgccagccactccccttcctaggagggggctggaggccagtgaaagtgacaccccagtgaatttccacccccagcagcaatgctaccttcagcagaagcagctggagctgcctgatgctgatgtggtccagggtgccggtgcagaagcgcccgtagaacttcttagcaccgagtgcccgcaggtcgtggatggtgaagggccagaggtggagcacgttgtggcgagagaacttggtgcgcttttccaccagcaccactcgggcccccagcagcgccagctccacagcgacccgcagcccgcaaggtccagcacccaccaccaggcacttggtgctggtgcaggcccggccctgctggtagacaggctggcctgctcgcttgtccagcttggtccacagtgacttggcgctccagtagttgagctggtccttgatcttgtggtactggggcagccccccaccgggttccagccccagggccccacacagctcctggaagctgctcagcacgtcctggcacagctgggcctgcaggaagctctcaaagtgggcatgcgctgggttggtggaggtaggtgaagccatggaggcctcctggggagggcagcagctgggcagagatgagtggcggcggccctcgtgccgaattcggcgcgccgtcgacttcatactctctccc

SEQ ID NO: 151102 - DNA, 680 bp, Homo Sapiens
cctccaaatatgatttctttaagttaaccttttaccaaaactccagccagaggtaacctgtaggtattacggtttgaactagccagaggtcctgagaccatctaactgttggttctatttcttggggacagcagctaccaagggggtgccagcgtggaaacagtgacacagaggggggccagcctggtcggaaacgacgctggggagccagcacagccaccacacagaagaaaccttccatcagtatcaccactgaatcactaaaggtgaggtgggaggagccagggaagggaggatgagacctgttaaggtgggagtagacatgggcccagtgtaacggggtggggggtatctgtgtcccagagcctcatccccgacatcaaacccctggcggggcaggaggctgttgtggatcttcatgctgatgactctcgcatctctgaggatgagacagagcgtaatggcgatgatgggacccatgacaaggggctgacaaatatgccggacagtcactcaggtagtacctgcagagggccaggcagcatgggcagagggaagaagaggaccgaagagaaggaacctgaacgcagaacctcctgtacctccccaggtgtcagtagaggtggccttgaccccacctgcagcagcttgaagtaaagaaagtgacttaagcgagatcc

SEQ ID NO: 151103 - DNA, 733 bp, Homo Sapiens
gaataatataagataattaaagaatagatccgaagatgtatgaattaattataatatataaaaagacaaaaacggcgtattaacattccctataagaagaatttgtgcttggtgtgggaagatatcaaaagttacgtgaataatgtaggagccggatgaaagatggccagagcatcgggtcaggaatagcccaggttgagatcttgtgaaatgagcaagcgcatgaactcaggccggtcattcagcagggcgtccatgagggaagcttcgagatggaaggaccgccattggatgtccccccgaaaagagttcactctgggcaatgtccacgcggttccaagccacagccaaacgcagctcatccaggtaggctgaggcctccgagctcccacaggccttcacaagggccttcaaaactatggtctcgaattcctcagacccatcctcagaagaatagactgtcaggagctccttccgggtcataatcctctccacctgggcctgcaggacctcaaggtcccctttgggaaagaaacgcctgattcgatctcgggcttcgccttgcctggctcccccactccctggggccagagtgtcttccagggtctccgccaggcagtccgcagctccccctgagccagccacgaggagacatgggagctgagcctgggtggcgttctctattcgcgtcaacatccctcgtgccgaattcggcgcgccgtcgaattcatac

SEQ ID NO: 151104 - DNA, 785 bp, Homo Sapiens
gctggtacccggtccggaattccctgcatgcacctggtgccccggcgggtcgtgcggcgcggcgctccgcgagagctggcggtcaccatggcaatgcgggagctggtggaggccgaatgcgggggtgccaacccgctcatgaagctcgccgggcacttcacccaggacaaggcccttcggcaggagggattgaggcctggcccctggccccccggagccccggcctctgaggcagcctccaagcctttgggagtagcttctgaagatgagttggtggctgaattcctgcaggaccagaatgcaccccttgtgtcccgtgcccctcagaccttcaagatggatgacctcctggctgagatgcagcagattgagcagtcaaacttccgccaggctccccagagagcccctggtgtggcagacttggccttgtctgagaactgggcccaggagtttcttgcagctggagatgctgtggatgtaactcaggattataatgagactgactggtcccaagaattcatctctgaagttacagaccccttgtctgtgtcccctgcccgctgggctgaggaatatttggagcaatcagaggagaagctgtggctgggagaacctgagggaacagccaccgatcgctggtatgatgaatatcatcctgaggaggatctgcagcacacgggcagtgactttgtggccaaagtggatgaccccaaattggctaattctgagggtacatcagatgctggggttgaccagttcacaagaccagtaaacacatctgccct

SEQ ID NO: 151105 - DNA, 881 bp, Homo Sapiens
tttatctgaggtagctgccgtaaggtcatcatagtcagaaagcccggggggggcctcagcatcccgttttgccatttcctcccaactttgcctgcacttgtcccagaaatcgacatcaggattctatagctgacttggctggttcaaactccatatcaaggggcagatgtgtttactggtctggtgaactggtcaacccaggcatctgatgtaccctcagaattagccaatttggggtcatccactttggccacaaagtcactggccgtgtgctgcagatcctcctcaggatgatattcatcataccagcgatcggtggctgttccctcaggttctcccagccacagcttctcctctgattgctccaaatattcctcagcccagcgggcaggggacacagacaaggggtctgtaacttcagagatgaattcttgggaccagtcagtctcattataatcctgagttacatccacagcatctccagctgcaagaaactcctgggcccagttctcagacaaggccaagtctgccacaccaggggctctctggggagcctggcggaagtttgactgctcaatctgttgcatctcagccaggaggtcatccatcttgaaggtctgaggggcacgggacacaaggggtgcattctggtcctgcaggaattcagccaccaatgcctcagaggccggggctccggggggccaggggccaggcctcaatccctcctgccgaagggccttgtcatgggtgaagtgcccggcgagcttcatgagcgggttggcacccccgcattcggcctccaccagctcccgcattgccatggtgaccgccagctctcgccgagcgccgcgccgcacgacgcaccggggcaccaggtgctg

SEQ ID NO: 151106 - DNA, 1089 bp, Homo Sapiens
aaaaacatgggtgcagaaaaaagggtttttcctcaaaccaagggaggggttccccgacgccttttaatttagggtttcaaaggaacagaacccttccggtaaaggatcctggggcggtttccccacccaagagcttgggttcctccttgagccccaacgtgtcttggcacaaaagagtggggcaattcccccgcagaggtgccagttaccggcaccgaggcccgtgccgggccagactggggctagtgcagctcatcggggtcccgcggcggccggggtcggcctgggtccatgtcatcgctgcccactgtccaacctcgaaagccacggcccacccgagaaggctctggggcactgaactggcggaagatgctgacactgccatgccagaaggtgggttctgggagccgccccaccacgctccacgcgcgagtctctgggtcataggcctctaccacgtccgagagttcaaatgtattgtcgtatcccccagagacgtacagcttccccccaaggacggccaggctgccccccacatgtacctgattcatggacgggatcttgtcccattcgttcctcgtcgggttgtacacgtccacctcagcggagtcatccctgacaaagtacatgagtccgtttagagtcgcagtcttgggggcgaaggaccagggcgggagctggccgcagtccaccagcgaccacaggtcggtgtccgggtcgtagcactgcatcaccatggtctccttgccagccagggagccgatggcatagagccggccacggcacgcagtggtggagcagttgtccatggggtaggtcatgggctgcagggcctcccaggagtcagtggtgtggtcatacgcgctcggtgctgtcggcggccaccacgtacagcagtccgtccagcacagaggagctgtggtactcgcgggccttcagcatgggcgccacctccgcccactcattcacgcttgagttgtacctccacacgcagtcatagagccgggagccatcagacccacacctcagcagaccagagtcctgggccttgggacagttctcctggggagccacagagcttgtcggcag

SEQ ID NO: 151107 - DNA, 1178 bp, Homo Sapiens
catggagctgtcatgcaggttgtgcatcgccatgcagctggttgaagtatgagctgacagttctggggcagagcatgccagccgcgccggttcagggaggtgggtccacttccggtcgtgcagggtcgcgtgcgcccgccgcatagtcgcgcgtgggcagacagcgggcgcagcacgagcgcagcgcaccgtggctgcggcataggcagtgcggacgtccgagctgcgccgcgtgcccggagagaagaacgtagagccgttgtccgtcgtgccgcgcgtgaaggctgccgcacaggtctcagggtacatagggcagaggcctacaaaaggtgacggttcagttgagccagaaaggtccacggtagctctgtcgttcatggactaggtgcgggccccattgttacgcaaggataattgggtttccgttgctccaggaagtctgttgagtgatggccgatgtacagctacaccatgccacaacgaaggcccagcactggcccttatgctgcggatcagtagggacatcttgcccttcccagtcttcatactctccatgctccaaagtgaaggtgagcatcgttgacgtaggtgcacttgggctggaaaggcgtaggtgccacatgacgtacagcgtgggaggcattgtatgggctcgcacggaacgcggactgaagttgaagcactcggtctcggttgttcttccctttctggatacactcagtcttcttctccacgggggcctcccaggagatcgctccttgcagctccagggcctccatgctgaaggcgaacagggcctctcgggcgcccacgtacagaagcccagtgggctccgtcagcgtcagtgtcaggaagtcctggatgccggtctgggagaaccgccgtactaccgtggccagctccccagaagacactgtcttacgcggcacaaggttccaccacacctcagccccaatgcccaggccccacagccttgctgccagcagccagacagcccagtgtggggccatggcgcacgccccggctctgagcttcaggccagctgtcctggtgcggccggctgcgagcggaggtcccggtcccggcctgtccccttccccagcgcagacaatagccctgcagaaccccaaaccccgcctcgtgccgaattcggcgcgcctcgacttcatactctctcg

SEQ ID NO: 151108 - DNA, 1113 bp, Homo Sapiens
ctggagaatgggagctgcatcttgttggacattagtctcatgaatgatcaggacacccgccattttgtgtaatgtcttccacataatccctcagcgatgtagctgtgctcatgcagaatctcctccatgcggctgagggtgatgcctgccaggtgcccagggtacttcagctggaggagacgctggaggtaaccagctgcttggcttcctccaagattgatgcgcttgcagtttttagcatctaatctcccttctaagatgggtaaaacatgcgtacactggtatccagatgaaatgattagcccactgcacatcgagttctttggcttattgtggtagaagctgaagaggctgtctattccataggcaaccttgggaatcccgtagcactcaaaaagaagctcagacatcatttgccgtgaatacagtgggttgcacacagcttctgtcaaaactatgggatgatcaacacagccctgtgaggagacacccaggtgctggaagctgtagtccagcagcaactcctgaagctccaggttgaccggcacgttgcggtcgaagggcgagcgcagcatccagcgcagtggctccaggctgcccagagcgttccccacctgcgggcccgacgcgccccgtgccccgccacgaccgcgggcgcacaccgcgcggaactgcaggcgcggctcgggacctgggtcctgcccgggacacgcccagccagcgcggacttggaacgacccgttgtccagcaccagcggtaccggcagtggcccgtgtgccaccgggccggcctccagcactgggtccggtgcggcacgggcgtcgcggaacgggaacacgttcgccgccatcttggagcgcgcgtccagccccgcccctcggcgcagtgtccgcccagacgccgcgaaaccgcgcccccgacgtcacgccgcgcgattcaggcctttaagtacctcgatgccccctcccttctcgaagcccggccagcctttccacttgactcgcctctggctgtcaaggctgctttcaggatcgctgagacgtacccattctggctgcgaaattctcctcgtgccgaattcggcgcgccgtcgacttcatactctctccccc

SEQ ID NO: 151109 - DNA, 869 bp, Homo Sapiens
aacggctgatgcgttagtcgtgcaaagcgtatgtaggcatggatgatggtggctgcgactgctctacaaccacagggggtgttccctgggggactgggcgcaccgggggtggtggacggggtggaggggcatcgccggccagctcctgggaagccctgggcttcctcaccacttcctggagcttttccacgcgaacccggcgcaggtgggacagcatcctcatggaggaaaaattctccaggaacgtttccaggggcacctcgccctccaggaacttctcagccatggcctcggactcttcttcgatcttcatgccttccacctgcagaaggtctaacaaggtccctggctgcagtgctgaagaaaatttctccagctttgccttctgctcctggcaccgctccacgagcttccggagctcctggtatctatccgagaggtttgagcggctgatctccaggggaacctggaactccaagttccgctctgccaggctccggttggtggccagtgccatctcccgttccagctgtaggtcctggacctcaggggactccagggccagctggtcaatcgcctccgagtcattctgcaactcctccagctcctgcagggtcttatccttcagcgtctccatccttccctgccagggccgccgtcgccgccgccaccgcgggttaaaccgcagccgcgcccacacttccggggtccgccaggcccgccccctaccggatgtgacccccttgcaacgtccggcgccccagtggcgcgcgtgctcgccccgcgaccccgttggccgccccgcctcgcgcgcctctgagttaccacgacacctcgtgccgaattcggcgcgccgtcgacttcattcc

SEQ ID NO: 151110 - DNA, 1031 bp, Homo Sapiens
  misc_feature (263)..(275): n is a, c, g, or t
gactacagcggcagagaacggcaggcgtcagaaggagggcgtgacgcgggttaggcgcaaagtcggcgagggggcggcgggcaaagggacccgcgcggtgagggggtagaccggggagtccggcgcacacaggggggggcgccggaagtcagcaaaagcgcgggcgcaattggagagagggccagggagttgtgcgggcggagggagaggggcagggggcagtacagggccgccgttccgagggggaatagaaaagtccccannnnnnnnnnnnnaccgataacccagggggcgagggcgcgggatgagaaggggggcgggagggcacccgcctagagttcccacgggcggcgggaggcagtgcggcgccataatcagggagtggtgtcgcagctgtgccggaggaggaggccggagcggcgttagtcgccggaccccagcgggcagcacgttccccctcggcctattgcagggggcgtcagcacatgcagcacgcgaggcccgggagggagccggggtccggcatctgtgcagcgtcgccagaaccgctcctggggcgaccacctggcccggctgcgcgcacagctcccgcaccacgcccgcgcgctccgacctcagcctgcgttccggccgcgcggggcgcacgcagcccccggaggctacacgggactgagaggccccggaggactgcgcggaggcggcggcctcgaacacggccagcaccgagccgatgcgcacggccgcgcccgccgccaccctccactccagcaggcgcagcggcgcgggccccgggcagcgcacctcggccacagccgccgtcggggcgccctcggcaggaacgcgacccgcggccggcacctccatcgcggacagagggcgggcgggcggtcggtacggggcctgcgctgcgctcagagcgcagcgcctaccgcggcgacacaacccaggcggcgacgctgtagttcctctcggtaccggcttccacccgtcgcctagccctcgtgccgaattcgccacccaggcctcgctcc

SEQ ID NO: 151111 - DNA, 964 bp, Homo Sapiens
gagtatgaagtcacggcgcgccgattcggcacgaggcctgggctgacttcactaagcgagagagccctcctggcaagttaccattctggacatggctggacaaaattctggagttggtacatgaccacctgaaggatctctggaatgatggacgcatcatgggctttgtgagtcggagccaggagcgccggctgctgaagaagaccatgtctggcacctttctactgcgcttcagtgaatcgtcagaagggggcattacctgctcctgggtggagcaccaggatgatgacaaggtgctcatctactctgtgcaaccgtacacgaaggaggtgctgcagtcactcccgctgactgaaatcatccgccattaccagttgctcactgaggagaatatacctgaaaacccactgcgcttcctctatccccgaatcccccgggatgaagcttttgggtgctactaccaggagaaagttaatctccaggaacggaggaaatacctgaaacacaggctcattgtggtctctaatagacaggtggatgaactgcaacaaccgctggggcttaagccagagccagagctggagtcattagagctggaactagggctggtgccagagccagagctcagcctggacttagagccactgctgaaggcagggctggatctggggccagagctagagtctgtgctggagtccactctggagcctgtgatagagcccacactatgcatggtatcacaaacagtgccagagccagaccaaggacctgtatcacagccagtgccagagccagatttgctctgtgatctgagacatttgaacactgacctatggaatcttcagaactgtgtaagattgaaaatcatgccaatggtgaccattgttgctggctaaacccgggagaggttactctccgcccacccttcatactgagatcttgagcttcgctttagaacatttct

SEQ ID NO: 151112 - DNA, 1446 bp, Homo Sapiens
  misc_feature (42)..(42): n is a, c, g, or t
  misc_feature (45)..(45): n is a, c, g, or t
  misc_feature (110)..(111): n is a, c, g, or t
ccagcattcttcaccttggcccacaggggaagggcatcaccnccncttggcaagtgggcaggctctctcccagggggcacgctctgccaggggcatgacctccgtgaagnnctggtgagaggacggtcttcccggaggcaggtgaagagctcgggcccaattctgaaggagatggtgctctgcaggtacttgcagtcatggctgaccgtggcgatgaagtgtctggtgatgtactcatagagccgccacgcgtcaccccctaattcggcctctgtggcagacttcatgggggtgatggggggatggtcgccggcgtcatggcctttccgcgggcggttgataccttctgctaacaaccgcttcaccgtgtcggcccagtaggggtggttggcctgctgccgcagagagcccttcaggtcaaagttctcagggtagtgggtggtctctgtccgtgggtagctgatgtagccttgcgtgtagagccgctcagccgtctgcatggcgtgctgcggccccatgcccagagaagagctggccacacgcagcatctccacagtgttcagggccaggggcctctgcttggccttttctttcctgcttgtggcctccacctgggcttctttctccagctttgtcatgtttaaaaacatctgtgcgatctcccggtcaaacactcttactcggtcccagtccaaaaggagagatctgtctttgtcagtgttaaccttggcctgcagcacccagtaggtctctggtttgaaggactggattttatcatgtctctccacacagaatcccagggttggagtctgacacggcccaaaggagatgagagagctgtctaaatcaccgtatttcccctggaaatatttagtctgaaacctcaaagcagatgttctccccctccttgtcgcagtccagccacagcacgatgtagtcgcagcctctgccctccacctgcaggaacttcaccatgttcagcttggggttagcttctttcttctccgtgggagcttggctgaacagttctgcggggtccactttgtcccatttgttgtattttcccaggaaatccagggtcatcacgtgaccacagacagacgtcatcttgaagcgcactggctggccagcaaaggtcccagtgtactcgtggactgagcaggccccgttcagccctttgtgtgaggacaggctccctctagagaggattttggcaattgactgtgccaaggacggcttttcagcaaccatgagcacagtcttcatcttgtctcggtccttcacactccagtttcggggcactggcaatgaaaaagtttagactccactcttccgcagcacagcactattaccaatgctgactcccacagccgcaccgcggatccagctccggtcctcctcgtgccgaattcggcgcgccgtcgacttcatactctctccccccta

SEQ ID NO: 151113 - DNA, 860 bp, Homo Sapiens
tcgcgcgcgtcctcctgactcgaggccagatggtgagttgtgaggtgacacgcggcctctctctccctcttcatctgcgtcacattctcttggtgagcgtgcagctggcatgcgccactggcaaaggtgcagtcgctgcattgctgccgtggtctgctggagcgtctgccatatggccaccgccgccgactctgtggagaccttgaagggctcctggctctccgttcactggggttggcaacacaagctgagatggcctgtgctgtctttccagaggtgcactgtgacggtacctttgtactgtggggtgaaccgcttcatggccagcggcagggattcatagaacctctgctcccgggagacgaggggcttgcacaccgtatgctcgtcatacttcatcacgctcatgtgccccccgacctggtgcaggaagggctccagctgcacgcctgccctcatgtccccggcgtcatgcgctgcttttagcacaaccatggcggcagatggtggtaggtggggggtccctgcacatgtctgctagaggaaggtttgaagtagaaagggcagctcccaacagcacacggggctagtcagcggtccatcaactttctccttcttggcctttattgctgtcatagctcagttgtcctcctgtctgtgggttctcagcggggtcctcagagcttcctccgagatcgtggggagtgtatggaaggcagggcccaggaatcttgtctctcagtgcccaccatgtacaggcatcaggcaatggcccgtcccagcgtggagcatttgctgttcaccagagcccctcgtgccgaattcggcgcgccgtcgacttcatactctctcaacactag

SEQ ID NO: 151114 - DNA, 1297 bp, Homo Sapiens
  misc_feature (114)..(114): n is a, c, g, or t
  misc_feature (124)..(124): n is a, c, g, or t
  misc_feature (134)..(134): n is a, c, g, or t
  misc_feature (269)..(269): n is a, c, g, or t
cttgggccgggtcttcccaggcaccagggcgctttcccagccccatccggttcatccaccggcgttgttggtggtcaaaagagaaatggaggggtgccacaaaaggagtatccntgaaagattncgggggtccncaggtgggggggctgccagggggtgagtagacaggctccagccgagtgaattcctccgcaaagttgcccacatccagctctgagcggatttggggccggaatggggctggaatcttcctggcagccagagccacncaatcgaggccctggaagaagggatggttccggacttcttgtgcccccttgggccccgcggcccatcgcttcttaggatccttacaaagcagccgctgcagcaggtcctgcgccacgggcccgatccgaggggtggaatgggaggggagcacttcaggatccgtcgagacacctcagcctgcgtgttcctctcgccctccagggtgaagggcgaggcccccgtcagcagctcgaagagcaagatgcccaggctccaccagtccacagcctttgccatgccccgtcttgctacggatgatttcgggggccatgtactcgatggtgccacagaaggagaaggtccgctctttctcctccgtcaggaactccttgctcagcccgaagtccgtgaggacaatgtggccctcggagtccagcagcacattctccagtttcaggtctcggtaaatgatgccgagcttgtgcaggtgttccagggccagcacgatctcacccccatacacgcgcacctcagcctccttgaagtactggcgctggtagaggtgggtgaacatctccccgccgctcacatagtccaggatgaggtgcagcttggcatccgtctggaaagcgtagtgcagcgtgaccaggaagggcgcctggcgcaccagctccagcaccgagcgctcggtgcgcgtgtgctcttgcgtcttggcgcgctgcaccagcgccgccttgcgcagcaccttcatggcgtacagcttccccgcgtcgtgcccgcccgccttccgcaccaggaacaccttgccgtaggctcccgtgcccagcaccttgagcagctcgaagttctccacgctcaccttctcctcgtgcccggtcaggttggcttctgtgatccgcagctccacggcgcagctctcatcgtcgtcctcgtcccccatggcgggcgggtcgctggggcccgcgcggctcgggctccgggcggcgccggttacatggcggctccggccggggcgggcgcttcctggtgccgcctccggggccgaggc

SEQ ID NO: 151115 - DNA, 978 bp, Homo Sapiens
  misc_feature (76)..(87): n is a, c, g, or t
gggtgagggtttataaggccttgttttgggggcccggttgagccccattcccttttttccgggaagttataatttnnnnnnnnnnnnttatttgggaaagtggccccgtctcagcacagagattccgccaagggttctccgaagtggggggccttcttgttgtggaggaggttcggcaccacatgatcggggcggtgcttgggggtaggaagggtgcctgcagcagaggccgctgcacattgcggagggtggacttccagaactgcaggtggcggcgggagatgagtgcagctcggatggcgttgtcaaagacgtccttgatgccgaactgggccaccacgctggtctcatagtaggggatgcccagctccttggccacctcccgacccttctctgggggcaggatttcattaggtttgatgggcctagccaagggtcgcctagccctgttgacagcctccaggtcagcgtagcgcaggtccaactggcagcccaccaagatgacaggtgctcgggggcagaagtgcttgatttctgggtaccacatggtcttgacatggtggagggaattggggttggcaatggagaagcacagaaccaccacatcagatctcccataagcaaagcgacggtctttgtggtggtctccaaaggtgtcccagaggcgcagagagacgctgacatcatctaccacgtctcgggagcgttccagcacctcctggcacacacgatattggtcgatggcccatactgtgggcacatgcgtggccagcagctggtactgggtgagggtggcattgcaagcgcgggcacagatgagcctggtcttacccacggcgttgtcccccaccacaacgcacttgatggtctctacgtttggcctttcataatccatgtcagaatccattaaacgggacatgctgtctgaagaggtcttctgggggccatcggggccttttctccaggcttgcatcgctc

SEQ ID NO: 151116 - DNA, 975 bp, Homo Sapiens
tcagtagcggtgtgcgcttcagggtggtacgtcgatggcgcagggatcccatggcccaggggtaagcccatggatgggatggtacaccagctaggaagtttgtacggtcgctatctaccagaggtcaagcaacgtcgctaggcacgcagggcccgcgacccatgtcacgtacccagggtacatctgccgtccagtgatacgggctgatggaacgttagtgccaataacatatacgtctggctgcctccgtttcgcgtggcgcgttagtcaacggtctgatcaagtagtctcttgaggcgggctcctgtggactttaattctggtaagggctaaactggagtctagttctatcaatccgcatggcggtgtacccaaagaagtctcgagggaacgatacgtgcggctaacgaccgtgaacgtgtgacgtcattgcgctaggacggcgaatagctgttgggctcatgtgttgcacatgtctcaaggaggtctcagggttgttcgacacgactgcgtgcgtgtttctggtgacgggaactgacggttccggaacgatcctgctaagatgcggaatggtcggaggccacagggcgcagtatgagacgcagacactgcagtcttgtggactgccatggtgctcgtctgaagccatcggccgtggtcaacagggtcacgacaggtgagtgagacggaggaacaggatgcgaatcgggagtcggatgcggatcgcggtcgcgtcggggtcagggccggggcccgggtgtgggtcgagtgtaagcatgggcgcaggcgtctcagtcacagctacaggcatggtgcacactgtccaccgcccaggccccccgtcttcccgctaagcggcgctttgcacccaaaaggggagtgggagaggcagccagcttcagcaaaccccaagcgcagcccctactccgcctcgtgccgaatcggcgcgccgtcgatttcatactctctccgatt

SEQ ID NO: 151117 - DNA, 805 bp, Homo Sapiens
tagtggtcgggtcccgtgttggtgtgggctgcttctttcggtcgtcggcggtggatgtgtcgtcttccctcagcatcaccgggccggctgttgtacatgttcctggtgtggtgcaggttgccctggttcaccacgttcccgatctgctgccggtagctcggcggcagctctgtgttgttcaccagcgcctcctggctgaagaggtgggagagcaccgtgtcgggtcaagtgctagtttaggccggagagcttggtggcagcccagtctatccagcctttggccattggggtcgatgttcaccagccaccagcccctgccaccaggtcggggtagatgagtgcgagcttggccagcacataggctccggcgcccactccgatgccaatcacatacttgaacccgaaatgctgcaccacgctggggagcatggcagccagctgctccatggaggggaactggtacccctgaggaaactgcgacgcccccacctgttgtccaggggcatccacgtgacacaccacaaagtgcttggtgatctcctgcatgtcctcgaagttgaagaaggtgttgaagcatagtttgtggttgaggcccacatcatggtaggtgaggatggctgggcggttccccttgggggagccccggatcactacatgcagaaggccgtagggtgtctcgatgtcatgttccccatcccagcactccggcatcttgccgagggagggaacccgcctctaccaggaaggacaaagcaaaggcctgagtcactcgggtccagagggcggggcagctcgagtgggagat

SEQ ID NO: 151118 - DNA, 954 bp, Homo Sapiens
ggggaactgtctcgtatgtatggggccaatgtatatccacctgggtgattgatggacaagtgggagccacattactatggggcccatctattcaccggtagcatgttggaaacctccatgctctatagggttgggcatagcgagagatcacgcccattgggagctgtccaactcaatggtgtttcttgttgattttcttgtagaatgttggctgtgaaggagccggtgtgtatagtagaacaagacttcctcgatcagcgtgaagatggccagctccaggaggaaccagtgtaaggtgggtagctcacggcggcaggggtctctccaccatttgaggtaagggatagaggaagaccaccatggggaaagatatcatgcactggttgaaaagaactgtgcggatagactggcgcagtttcacaggatccacaggttcattcttgccgacctgaattcggtagcgagagatgaagttaggttttcctgttgtgtcaaccaccaatagaagcccattgaagctccagaagaagagacaaggcacttggatggcacctataaagaagaggatccactccttcccttcaaatgtagtcagcagcctctcccactgggcttgccaaaagtagccagaagcaccccaaaatctctgaagatgccatgtcactgagttccagaaggccacaaatgagagaagtccagagcccaggatgaaagctgtcctcctcatagagccccagatgtgtccctcctgctttgacttttcattgtgtagcatatgtccagcttctcctttcatctctgcagtgggctgtgtccaagctgctgaggtccttgcacaggtcaaatctaagttctcttccctttcagcccccgctttggtggctgttgctgctgcggctctgctgcaggccctcgtgccgaattcggcgcgccgtcgacttcatactctctccc

SEQ ID NO: 151119 - DNA, 1463 bp, Homo Sapiens
acggaggggggtccctttctcaagattgttaaaaagccccccctgggttatccagagggggcccatggaactttttccccgggggagaattggccttttcaggccatctttccgggggcaaggtttatggcaacccaaaccagtggcccaccttaaggggtttcaagacccccttgccattgtcttaaggggcgactttcccggcattaggggccttcatccaggggcttctcccagtggcttttctctctgtccgcttccagggtttccaggtcccggggccaggccccaccccagtctctgcatcaacaggatccccagggctggggttggccggccatggtgctgggaacttgtgcagtgcacagaaggcctgatgcaggcagtgggcatggtgaacttcctgggagctctgggccaccacatggggctggagcagggctgtgtccagggacttatgtctcacagtcttgggtctcttgacttcagtgatagccccaccacgcaagtaccgagtgaaagttgttgtgtctccaatcctccagggacgcatcgctcccgcacgtggataggatcggtgatctcagttcgttgagctcaagccattgccgctcaatgtcccgagaaaggtcaccaagtctccatcacggaagtagtgggtattggcccctttcctcagagtgagaatgccaggggagccctgggagatgtgctggatggcaggctgtcaggggttctgcctctgtgggttcctgcacagtgaagtcctcaccaaagtcacagaacaactgccccacgaggccccgggtgtcagccgccagaaagcaaactccatgcttatgacacaaggtgcccaccttcagctgctcctccagctttgcagcagtcagcaccaccacctggaagtccaacagcaggtcctcagtgatgtcacccgtgtgcacgacgacctggacagctctgttgagctgagccaagagctcttgagaggcctcggctctgctcctttccaagtcctgctctgagaggagaaactgggcagccaggtcggaccagcaggtggggtggggatcatgcagagtgaggctgcccacacccatcagaaccaagttcttggccacctcggcccccaggccctgcaggcctgacaccaggaccctggctccctgaatcctctgcatggcaggtgagcccagcacatacagctgtcttgaatacagctcctcatccagtagcttcgaagcgtccagggcatccatcctcaaacctggggctgaacagtaggctgcagcgctcagagatagggtctttgtgtaggtggcggtgacagtaggggccagtgccctgctgtagccagtgcaaacaggaaccaaggccaagcgaataagggacgctgctggtcacagctctcttcccctcgtgccgaattcggcgcgccgtcgacttcatactctctcgccctt

SEQ ID NO: 151120 - DNA, 1080 bp, Homo Sapiens
gggagtaacgggatggacaagagaggtccccgttgggtgaggaacccgggaaggccgcccagattcgggcccccgtgcccttgtcccctgggctgggggcgcgggcaaagcgggggcctggcgggcgctgagaggacctgaagccggcgcgggcggcggaggcgggctgggggcagcagccatgcctacctggggggcccgccccgcgtccccagatcgctttgcggtgtctgcggaggctgagaacaaggttcgggaacagcagccccatgtggagcgcatcttcagcgtgggggtgagcgtccttccgaaggactgtccggacaacccccacatctggctgcagctggagggccccaaggaaaacgccagcagagccaaggagtacctgaagggcctctgcagcccagaactgcaggatgaaatccactacccgcccaaactgcactgcatctttctgggagcccagggcttcttccttgactgcctggcctggagcacgtcagcccatctggtgcccagggcgccaggctcactgatgatcagtggcctgactgaagcctttgtcatggctcagagccgggtagaagagctggcagagcggctgagctgggacttcacgccaggaccatcttccggagcctctcagtgtactggagtgctgagagacttctctgccctgctgcagtccccgggggatgcccatagagaggctctgttgcagtttgcccctggctgtccaggaggcagctgctgaggtctggtgcaggaggcgtctatgtgggcaggggccaggagcactggcttcttgggaggggcggagctcagccttgctgggtgctcagtgccaaggagtgagagctccccctagtgacggcagggagtccctggacactggatctatgggacccggagattgcggggagcaaggtgagaacttacgctgtggaaatgatggatggaacagggtggtccaaggagatgatttggggtgtaggatttgctggggaaaagcggggaaataaagtgccacagccacatcatgggtgagggcaaggattccacctgaaggtaggctgg

SEQ ID NO: 151121 - DNA, 1156 bp, Homo Sapiens
cccccatataattatgtccattgcctgattcttttgtgacacacctcgatgtcactccagggcgtacaatccttgaccttgaccatccctctggggcaccctgtgctgcacttccggcacatctcagcagcattgtcattccggaaagttcctggtttgcactgacatgctgtgttcctggtcgtggtgcagggacttctctcttcttcatctgatttacaagctgtacatgggaggcaagcaaacaaattgttggaagcattggtgtaacccacaccctctgtgcaccggttacaggctccaggacgttctgatctatgagatcctggtggacacaactctcccaaagggctatgttcccattgctgtgtgccaattgattgatcatgaagtttgatggttgcagctgagctaggtacgacctgcagcaggaccccgacgacgacaaacttgaaggtcttgtggacccggagccgagggctggcttcccgcgccggcctgggtcctggggcgcgccctgcccgggcccgggcactgggtccgtgctgtcccatggaggtagggagcgcctcctcggcccccgcctcgtggttcaatcctccccgcggaagagccccacactttgctgggtgtggccgcggctgcctctgtcccactcgctgcgctcccgggattcggagtcactgccaggaacgcacctagatgtactctagctggtggtggcgccatcctgccaggtcaatccaagaagcagcgtgcttggctatgacaagacagaacttcgcattcggagttcagggcacccctgaccccgcccccttttcggggcacctgcggctcctgttggctaaccctgaacttccttcctctgtgaccgcccttgccgctctcagcttctgttcctcaaccacggccgccgcgtggatgccgctgcattcggagtcgttttgccacttggtcccagcgccaggcttctcggtcgggagttgacctcagcctttctgtgacccagttcctggcacccagcaggcgctcggtggacggatgggtggcggaatgaaggacacagaggccactgcggggtctggcctctaagaggcttttacggcctcctccgcctcgtgccgaattcggcgcgccgtcgacttcatactct

SEQ ID NO: 151122 - DNA, 742 bp, Homo Sapiens
  misc_feature (31)..(31): n is a, c, g, or t
  misc_feature (127)..(127): n is a, c, g, or t
caccagcacggagcagcccgatgcctgggtncataaggactcttccccttgccatcctctatccttcctgggtccagccggagacgggctcctctgcccggtggcccacttccacaaaggcacagtntgggtggaaggctcccgtgccacaggccagcaaatgggtgcggttgtaggcatgcagcaacttcacgaagttcatgcactcagtaccaatgtccttccctgcccagttgcactcctctcgccattccacaggggccggccaggccagcttcttggcccgcttgctgatgttgtccaggttgagggaggccacatggttctcggcacccacaaacaggcgtccacgctcctcatccaccagcaaggcctggtagcagcaggttcgctccaggctgaaagtctggagaccatgccaggcctggagctcttggaaggagagccgaaggcgtggggggctgggggcggcactccccagccccactgcccagagcagggccaggcccgggatcacggcggcagccccggcccgccccatctcagcagctcagggtgctcagggttcagcgggtgtgtgtgtggaggagccttgagctgccctggactctgccccaggatcgctgcctcttctcaggttctagaggtcttccaggccaacactggctgccttctcacactccaccgaggacttccgcctcgtgccgaattcggcgcgccgtgacttcatactcttcgccat

SEQ ID NO: 151123 - DNA, 796 bp, Homo Sapiens
cagagataattttcgaaagacatgggtagtgcattggaccaaatggcattagagggaagccccaggtcacagttgaagcgggccagatgccgccaatgcagattcaagctcccttggccccgctgtgttcaggacaagaagcgtgcaagcaggctggagaagatttccatttggtcagagctgcagtacttggcgatctcaaaccgctgcaccaggaagtcgatccagatgtagtggggggtcacttcggggggacagggtttgggttgacttgcttccgaggcagccagggggtctgcttcctttatctcagcagaaaacaggccaaatttctgctccaccgtcatgtgccaggcccctgccatctcccgcatgaacggcacttccactccatccttgccagccagcagccactcccagcaggccagggccgtctccatgccatgctcattgaacatccggaggggaccccagcacagatgatgaaggagctgcgggtcacaatctttactgctaatgagcattgcggtcagcttgaacatggcctgcgtgtagtgctgaggatgactgcggtctaaagctgaatgtagatcctggaccatcattttgttcaggtcagacatctggcctgtggtgcctgagaaccgaatcattccatacacctcgcccgcgtagcggttgcgcagattcagggatgccatgaagttggagtagtctttcttcacacaggccgggcgctcgctcagctgagttgccccctcgtgccgaattcggcgcgccgtcgacttcatactct

SEQ ID NO: 151124 - DNA, 1391 bp, Homo Sapiens
taaagccccggagttaggcgcctccccttgctggagcagtgtcatcaatcttctcagtgatggagaatcatagacgggatctcccagtttgctgccagggctaatgcatcttcagggtctctgccacccagtgaagagcctgttctcgggataccaggctggtgagacttgaagccctccaggatgttgagagcactgatgagggcagggcccgtgtgcggagtgggggactaagaaccaggtggcctctgtacaaccgcccacacacaggcttcctccacaagggcgctgtaattgctgaagtcctcttcggttatgacaccccctgcgtgctgagcctcggccaccatctccagtgtgaggttgccacctgcgtagaaggcagccggccggaggtgccaagtacatccagcacctcagccaggtcgggccgatgcagcaacgagccaggtagtggcgggcggcccgatggcaggaacgtctcccggaagcgctcggacatgttgggtggcagctgttcagccagggcacgggctagatcatgagtcacgttgaagccatcttgggccacagctgctgcaaaggccagggacttgggaccatggcagcctgcccatagagctggtgagcttcatgtagccccttcacccattccgggaaccccccaccaagagcccaggcttggtctcccaggatctttgcagggtctcttccctgagggcccctggtgcggactcccggaaatcaattaggtggctctcatttcgtcggatgtcatgtaccagcatcacgcccccaccgcccaggccagaactgtgtggagccacgatacccaaacacaaggctgctgccaccgctgcgtccacagaagatccctgtttactgagcacctcgatgcccagtgaagtgcagcgggcagcatcggtcaccacggcaccctgctggaagatctgggggtccccgaagtagatctgcatgaccagcgccacggtgacaccggtagcgaaggtgagacaggccgtgacgatgaccgtgagcccatcctggcggcaggagcactcggccgctgcggcggagaacgggtctttgcgcgtctcgcgtagcggcgacccgtcttggctgcccatctccgacgacgacgatggcagccgctgcagccgtgcagacttcaggaaggagtccgggtcggtgtcggggtctcccagaaaggcgtcctcgtccttgcggcccctcagcggggccgcgggcgccggctcgtcctcgggcagccgcgggaagctggtgatgctcatgtagtccactggcgagtaggcgcccagggcgctctcctggctggcctcgttctccgccgccatcctcgcccgcgatcccgggaattccggaccggtcca

SEQ ID NO: 151125 - DNA, 962 bp, Homo Sapiens
acaggtcggcccaatggggtgccaaggcagtgtattcccatcgggggagcccaaaactttccaattcaactggcccccggggccccccaagtttggggccagggggcccaccaaccaaggtcccttttttcaaccagggaagggcccccgggggcttcctggtatgggcctggaggtttccatttttccacccagggggcacccagggttcaccctttccacaccaggaaggcaccggggctgtccccttcaatcccatcccaggaccatggtgtccccctaattcccttggaagccagggaagtccagggagttccagggaaaccacgagcaccctgtggtccaacaactcctctctcaccaggtcgtccgggttttccagggtgaccatcttcgccagccttgccaggagggccagctggaccacgagcacctgcaggaccagtttgaccaggttcaccaggctcaccagcaggtccttggagaccttgagggcctggggctccaggtgcaccaggtgggcctctaggtcccattaagcccattggtccagggccaagtccaactccttttccgtcatactgagcagcaaagttcccaccgagaccaggggggccaggaggaccaggtggaccaggagggcctgtgggaccatcttcaccatctctgcctggggggcctggtggacccctttctccacgtggtcctctatctccggctgggccctttcttacagtttcctcttgtaaagattggcatgttgctaggcataaggttactgcaagcagcaacaaagtccgcgtatccacaaagctgagcatgtctagcacttagacatgcagactccttgtgtcgcagagcccctgggtcaccggcggaggtatcacctggcgggcgcgggcatgcagtcgtggccagtacctcccctcgtgccgaattcggcgcgccgtcgacttcatact

SEQ ID NO: 151126 - DNA, 865 bp, Homo Sapiens
  misc_feature (200)..(200): n is a, c, g, or t
  misc_feature (203)..(204): n is a, c, g, or t
  misc_feature (207)..(207): n is a, c, g, or t
agtgagctatgctgtccggcagctcacgacgttcctgtccagcatcatatcatccagagtaatctgtcatcagtacagagatcggacagatttattgtcagaagcggtagttgctgctgtctgcatgtgtaagccgtggcccaagtccaccccagactcgtgttatccccacaaggtgtgtaccgacagaggcagggggngtnngcngtcgcaccccccaccacggcgtgtgtgccccgctgtctcatggcccacgtgatctgccacacgtgcagcccacgggtatacccgactttgcccctgatagcgtccgtgctctgggccaccggatgccggtgaaagatgagcttgtcgtcctcctttacaaagacattgagcgatcggtcgttgttgttccatgaatgcagcagctggacatcataggacacagggggcatgtccagtagcagatccagccgggtgggcttgcagtaatccagaccctggagctcctgcttcaggggcctgtacgtggggtccctcatgtccacagtcttgatccctccagtgaccttctgacccatgttcgcccctggcttcaccttcttaccgactcccaaggcaaactcatcaatctcgtggtctcgtctccagtattctgatcggggccagacagaattcctaatgagggctgccaggagacctctgcaagctgcgcagtgttcagtattgccgcgcccggggtgccgccgccgccgctgctctccaaggccgaggaggctcgggcgcccgggccgcgcccgccgcagggagcgaagtcgcctcctccccgcggcccctcgtgccgaattcggcgcgccgtcgacttcatactctctccccccta

SEQ ID NO: 151127 - DNA, 893 bp, Homo Sapiens
ttatggggagagagtatgaagtcgacggcgcgccgaattcggcacgaggagaagtttttaactgaagtagaaaaaaatgctacagctctttatcacgtggaagccttcaaaactggaccagaaatgcagaacattttaaaaaaagttgcagctactttgcaagtgccagtaaatgatttaaatgcagatttaattcaagtagcctttttcacctgttcatttgacctggcaattaaaggtgttaaatctccttgggtgtgatgtttttgacataagatgatgcaaaggtattagaatatttaaatgatctgaaacaatattggaaaagaggatatgggtatactattaacagtcgatccagctgcaccttttttcaggatatctttcagcacttggacaaagcagttgaacagaaacaaaggtctcagccaatttcttctccagtcatcctccagtttggtcatgcagagactcttcttccactgctttctctcatgggctacttcaaagacaaggaacccctaacagcgtacaattacaaaaaacaaatgcatcggaagttccgaagtggtctcattgtaccttatgcctcgaacctgatatttgtgctttaccactgtgaaaatgctaagactcctaaagaacaattccgagtgcagatgttattaaatgaaaaggtgttacctttggcttactcacaagaaactgtttcattttatgaagatctgaagaaccactacaaggacatccttcagagttgtcaaaccagtgaagaatgtgaattagcaagggctaacagtacatctgatgaactatgagtaactgaagaacatttttaattctttaggaatctgcaatgagtgattacatgcttgtaataggtaggcaattcc

SEQ ID NO: 151128 - DNA, 843 bp, Homo Sapiens
ctcctgcttgtccagctctgtcctggactgctgctccatgtgcacagggctgtctgcccgcactggctctttctgggtcagaggtttgatctgtctcgtcatggggtcaaaaggtgagcttccgctcttttaaccggacaggcttgacgcccgcctcagccacctgcccgtccaagttaaccgtatagtctcgaggtcggtacctcttcttctttttactgtccgagccccctgaggaggcagcatcaactgtccgccttggaggagtctggggaaaagcctgcccgggacaggaggggctcggctggggacagccctgccttgcagcccggccccgccagccgctggtggctctcaggctgctcaagccagcacactgggctttccgcactgggcagcagctcgagccgccgtacggggggtgtggacggctgtgccagtggaagcggtgacggcacctgtgtggcatcgagtgcctggggccgcggtgaggggctgggcacggagcccttgggtgcatacaagctctgctgccgggcaaaggagccctcatgccgtgagttccgaggactgaaagagcagcgagggggtcccttgggatggggaggccccggagtctcgtccaccctgtccagctgctgcagcaccgaagcctttggctgcaagcagggtccagggggcttgcccaggcccggggagctggtgtgcggtcgcacggcgttgacggggatcttgccactgtgcttgtcattctcgtcacgctccaggcggctgccctctgggcctgcatgcccactgccatccagggagctggcgaagctctctggactcccactgatcccg

SEQ ID NO: 151129 - DNA, 787 bp, Homo Sapiens
ccgaataaataagcatagaaatgataaatactaagaaggaagtaataaaaaaaagattgaactaaaatacaaaccaattataagtatatgtgtagtacaaatagaggagattaacccaaaaccattacactgagttagtcaagagaaatcaaataattataagaacaccaagcaaattgcagaggtaaggggatgtgaaatgcatatttttcatactatcaatagtaatttaaggacccatgaggcaatagtgagatctggaataccaaaccaaggaagcataatatggacacattaataagagggaacagggcaggccccaaggataggcgtgagagccgattagatcaagaaggggatgagcacagaggcacccctagaaaatttggcaaaaacaaggagctcaaaagaaggggaggggagaggtcagagcaggtcctcccccagtcactggcggtttgggagatggtcagtctgctgcctgaagccccaacccccacagcggggaggtcaggggccactggtcaggctggggacttcaggccccctttgccctggcccccaggaacctcatcctcgctagaggcattggggtggggaccaggctgcgaggagtcatcctcaaacatttcagggttctccagcatctcgtcggattaagggaggcatcgggcctggaatctccatcttcagagtaatggcccatttcagctccacttagtgctgatgccccggaggtcggcctcgtgccgaattcggcgcgccgtgacttcatactctttaagac

SEQ ID NO: 151130 - DNA, 491 bp, Homo Sapiens
ggtatatgtcgtgcatgtatgtccttcttggaagcatgaaggggccacaaagaacatggaagacgttgttttcttaagttggacaaggacattctctatcaacattttaaggaaacattttcattgcagaagttgtggacatgttccagtaaaacaggctgtgataccaggaacatgggggataagaatgaaaattactttggaaatcctggcaaaacatcactgtgatggagtcagtggctctgtgccttcctcccttctcctgggcatggtcttccctcttgtggagccctgccacgatgcccatggcacaccggacatgcacttctcacctggggcttgatctcatctttgtccttgtagtagaaaagctgatccccacgcagcacaatccagcgctgctgccagttcttcatgatgctcctctgcttcttcagccagcccgccttcagcacggggcccagcctgtgagggcacgacatatacctagg

SEQ ID NO: 151131 - DNA, 718 bp, Homo Sapiens
gacaggacttaggaggcaggacactgcacatgtcacggctgcaggagacgtgcctgacgcagactggcatctgagcataagccagaagtcactgaataaatattcaaggcatcttttggttctcagagaaagagcagggcttaaaagaaaaatctctcccctgcctgactggctgcagctctgatcttcaggctgacaatgctgagggctgggagaggtggcaggcgggccccagaactggctcccccgcagcaggtggctttggtccatcacgtgtcagggccgcttgtgtccggctggccccgggccctcagaagctgaagaggtcatcctgctctgtgccgctgctgtcaggcttgtcccagtcgacaggcgagaggcactgggcgtaatgcatgtcctgggctgtcaggccagtgtccaggacctgagggtttgtccgagactgggcaagcctcgaaaacgcttcatccaggccatcatccagctcccagacaacactgctgccactcaaggcttgtggccgcggcacctcgtccatgttggtggtgttggcgctgaccgtggacagcggggccttagctgtctcctctaagtccagcaggttcccagtggcgaccaagctcttcaaggagggggtgcagtcttggcgggcccccaggacgtcccctcctcgtgccgaattcggcgcgccgtcgacttcatactctatcacgat

SEQ ID NO: 151132 - DNA, 1420 bp, Homo Sapiens
  misc_feature (76)..(124): n is a, c, g, or t
  misc_feature (1262)..(1322): n is a, c, g, or t
gaaaaccccggaggggtttggccccacctttcctttcccagggtttcctttcccgttaggcgcccccggggcttgnnnnnnnnnnnnnnnnnnnnnnnnnnnnnnnnnnnnnnnnnnnnnnnnngaaggggcttgggagaaaggtggggcaaggcccttccttccgctttccgctgcacctcttccttggtcttccaccagagggtaataggtgaactgtttggaatcagacacgtcccctcctcgcttgcgtttcagttgcagaaacactgttacaggccgctcaatcttcatcttgtgataggggggtgtccggaacacaatggcatactgtttatgcacatctgtgggagagaagtccccaaaggcctgccatccattctcatcatcctcatagaaccgaacctcaatgtcatctttctgcaccttgtcacaaagcagataaacttcatctccaccccgcacagagcctgctgtcttgtccattcgagaaatcttcaggtttgatgcccccggagatttgctgtcatggatgggctgggagatgactggcttcaggggcagggagaaggagccatcactggctctaaggaaggcagagaagcgcagccgcactatactcagatccatcaccttcttcagttctttggcctcttgctccagctcccgctgctcggcctccgtaaggccctggggcctagagcggagccgctgcctctgaagtttttgtatcatagtccccatcatgttcttcttagtcacatgcaggacacccaggttgttaaattgggcagtcatgtccttgggccccacagaaacggcgcagatccccagctccgagcattgcttgcccaccagactgtgggcatgagcacgaggtgggtcactgtgtgttaccaggtccacctcgatcttggctggtccctcgtagttacagatcttgacagtgggataggtctttcggcccttctcactggaggcaccgggcagtcctccatgggaggggccttcacagccatatcggaatcggaagcctctctgcttaggctgttccacgatcaccaggtaggggccatcagctgtttctggggctggctccttgggttccacaatggaggagttcaatttgaaatcatcatattcaataataccatccagacctgggttgtagcaactctccatgtctctgggctaggcccggctctgtctagtggctccggccaggttctgcttcccagaattttagacgcccgcctaaagtnnnnnnnnnnnnnnnnnnnnnnnnnnnnnnnnnnnnnnnnnnnnnnnnnnnnnnnnnnnnnccagatttgggggagggtccgacctcctccagccgcctgtccgggtgtggcgggtgagatccggtcctcgtgccgaattcggcgcgccgtcgacttca

SEQ ID NO: 151133 - DNA, 921 bp, Homo Sapiens
ttccaccaaaattgtctcttctccaagtggggagaatggcatttcttaaccctggaggatgactcactgagatgctattcagggaacatgaccaatccagaaagagccccagggtggctttttagcattccggtgtggctcagcgccaggttcccagccagaagccagttggagtactgggcccgcacactgtcattcagtggcttgtagaccacgacatccagcacctgaagctgtgaggtcagaccccctgggatgatcaccatgtcagtgttcatgctttccatggagttcttcacggaatctgtggcatggccccggaagccattcaagatcagcatccctcgctgcttgggcactgctcctgtcctccgtctccacaccacttccaaccagtcctgcatcaagtcttcagtcatccacccataccggtggcagcgaatttccatcccactgggaaacttccccggggggatatatgttcccctcaaaatgatgtacggtggtaacttcctcccatcagccaagacaccaagcattgctgtgattttcagtttttccctgcctggtgtcttgaccaagacaggcttttcgtcctggttatcaacagttacccgtgatggcacctctaaacaaatgggcgtctcatctgcattccctatctgagctacctcatagtcatgcgccctgcgcagagccaggacactgcgctggtaagtgacgagtttctcagtcaggtcttccggcaggtgctggggcacgggcacttaatgcctcagagacaggtcataccttctcatcattcttcgacaccaacccaagcttgccttgaaccctttctctggaatgttcatttcctagggcgatttcgagagctttaagctgcatcgcctcccgggtgaaggggtcccctttggcctg

SEQ ID NO: 151134 - DNA, 1084 bp, Homo Sapiens
cggcgtccaccacttagacgcaagttgctgaagccggccggggagaaggtgttgttgccggagctgagaccgggcggccacagtccgcagggatgaacctcgagttgctggagtcctttgggcagaactatccagaggaagctgatggaactttggattgtatcagcatggctttgacttgcacctttaacaggtggggcacactgcttgcagttggctgtaatgatggccgaatagtcatctgggatttcttgacaagaggcattgctaaaataattagtgcacacatccatccagtgtgttctttatgctggagccgagatggtcataaactcgtgagtgcttccactgataacatagtgtcacagtgggatgttctttcaggcgactgtgaccagaggtttcgattcccttcacccatcttaaaagtccaatatcatccacgagatcagaacaaggttctcgtgtgtcccatgaaatctgctcctgtcatgttgaccctttcagattccaaacatgttgttctgccggtggacgatgactccgatttgaacgttgtggcatcttttgataggcgaggggaatatatttatacgggaaacgcaaaaggcaagattttggtcctaaaaacagattctcaggatcttgttgcttccttcagagtgacaacttggaacaagcaataccacagccattaagtcaattgagtttgcccggaaggggagttgctttttaattaacacggcagatcgaataatcagagtttatgatggcagagaaatcttaacatgtggaagagatggagagcctgaacctatgcagaaattgcaggatttggtgaataggaccccatggaagaaatgttgtttctctggggatggggatacatcgtggcggttctgccggcagctgccctgtacatctgggagaaagcattgcaacctgtgagatctcatggacgagagagactctctggagtgctggatctgtcgacctctacatcattccgtgatgtacatctgcacgatcataaaatgatgcttgccgactcaaatgagaatgaatcaagagacaattgataata

SEQ ID NO: 151135 - DNA, 1184 bp, Homo Sapiens
acgccctggagtggctactaacaaatggcatccacgttccaagtctcgaatctgctgaccaatatcggcgccaccataaaccacgcaaggacgaactctagatcggtatgaaaattttctggcttcctcgtagatctgtactgccaactctctcgttggtgctaataccaaggagattgggtattgtttgcggcgcccataccttccattttccttcatggccctcaaagcctcgcctggaccatctgaataaatctgactcaagatgggcaacagaaatgctgcagtttttccagaccctgtttgggcacaagccatcaagtctcttttctctttgataataggaatagcatgcttttgcactggagttgggcgagtataacgagtaagctcaatgtttcccatgataatttctcccatctcaacatcactgaaactttcaatatgtggaggacagttgttgcctgttgcctcaactggaatgtcatcgtatttctcaaaattaatcccagtgttgcctccagaaaagagttcctgttccaagcgttcacttggtgggagtggttttgaccaatcatcttcatctgatttgtcacaccagcgactgtttccaccacgttcaaatttgccaaagccacttctgtcaccacggctgccaatgccatcgtaatcactccgtccacgatcatcaaaccttccccttgatccacttccacgatcactgaagaagctagacttccctcttgaatcactacgagatccaaaactgctatacgcatccttatctttgctagaactccaccctgaactgtctttatcgtagaaacctttagtagcttctcggttccttaaatgaggaggaatatagcgccctttgctggctgtacttcctccactctgattatctgaagagttcaggtctaggccagcaaactgctggtccagcccgagcgcattttccactgccacatgactcatccctgaagagtaccgagaactcggagtcttccgctgctaagcgagtgtttgttccaccgcgaaggccctctcacctcgtgccgaattcgccacccaggcctcgctaccataggaccgttatagttactggccggaaaatacaagcctgctccgcgaccgtctggttcgcgggtcggcggaggggaggtggaggaggaggtgggggg

SEQ ID NO: 151136 - DNA, 367 bp, Homo Sapiens
tgcctggccttgatgttggctgcagccttctgatagaaccacatggattccacccacagctggccaggcttgttacatgggtcagctgggatctgaagggaggcttctaagaccagacaccctgttagtgctaaagatgatgatttgggggtgggatgcctggaggggctggcaccattcaaaaaagtattggaaaacattagccaagaaaaaggctccttgtccctcctaatccatatccagatacccccaaccagagatcttaaaaaggatagaccagccatatgccaacatgccaggattccaaaagcatgcctcaacctcgtgccgaattcggcgcgccgtcgacttcatactctctcccctt

SEQ ID NO: 151137 - DNA, 857 bp, Homo Sapiens
  misc_feature (101)..(102): n is a, c, g, or t
  misc_feature (105)..(105): n is a, c, g, or t
  misc_feature (113)..(113): n is a, c, g, or t
tccgttcgacagcacatccatgggatcttcccttgctcacccacttatggcccagtcccatacatcgccctattggctgctcagctgcagagcagagtgcnncanggccagcnttcagatgtcccctgaccccctctctgggaaaggcggcagagctactggccactgacaagacctttgggccctcgtgctagacaggccttcgaatccacctgctccagcccagagagcatgccctggccgtgcctcccacaccgcagccgacctcagagcaccctgcctcaactgtgagttttttcttggcaatcctctgaaacggaaagggtatcagtcctgactagggcgaacgtgaggtccattctgcatctccatccaccttagctgtctccttggaaaaggacagcaagggagtttgaggtgcactgacacagtcatttctgaacagtgaagagatgacaggtagggtggtcccccttgaaaagtcagccagaagtagctgtatctgatgcactaggtggcagggagtgagtcttggagtaaatgggactgaaaacgtagaaaaaccaaataaatgccaaagagactatccctatggagaatacctagaacatgggtctttgaagtgtggaaaaatgaaagaaatccaatttgaccagggcctttagtgccaaagagatggctagcaggagagtggtgagaaaggagaactggagagttcacatgagcggaaataggaagaaatggatccaaatccaagtgagaaaaagcaggagacttaaagttagcctggcaggatgatgagaaaaggcctcgtgccgaattcggcgcgccgtcgacttcatactctctcccaccta

SEQ ID NO: 151138 - DNA, 841 bp, Homo Sapiens
ccggaggagcccctgggggccaggggagacccacgggtcgccccttctccacccctgttcaccgggaggacccgatgagcccgatcaggcctggatgacccttttcacctttgggaccagaatctcctttgaggccgggaagtcctgggggacccatggggccggggggaccgtccgggcctggggatcctgggagaccttgttctcccacagggccagggatccctcgaaggccatccggtccgggcttcccaggggccccctgggggccgatggggccagtcttcccaggagggccttccaagccggcttctcccttggcccctttctctccctgtctgccttcggggcctgcggggcctgggggacccctttttcctggaggccccgatggacctggttcaccagtagggccgggggatcccgtctgcccgggttcaccatcatctcctttgtcaccagggggaccatcttgacccgcggggccaggctctccgggggggccaggatctccaggaaaacccactgggccagggctgcctttgggaccatcatctccgggagggcctttgggtccagggggtccggcagcacctgaagggcctgactcgcccttctctcccctttctcctttgggtcccggggggccgccttctcccggaaggccaggctcacctgcttcgccaggctcgcccttctctcccactgcaccagggtttcctattccacctgggggaccttgtgggccatcagcacctggagctcccctcgtgccggaacgccacccaggcctcgctacctaggaccgtgagcgggcggggaggcgcagaggaggggaaat

SEQ ID NO: 151139 - DNA, 717 bp, Homo Sapiens
ggtttgtgaggctcgcactggccgcagaccctcgggctcgatcgcccgggagccaggactcggcgacgcgaggctgccgggctacccggccgaggcttcgggggcgcaaactaatgggactggctcgctcggcagcatctccccgctcttctaagtacactgagcagggcccgcgctgaagtagaagctgtccgggggcgcgtagcccggagtcccagtgtggcccggaggaacggagcccgtgccagggcggcccagtcgggagcccggggaccgagcttgtgctgtggggaaacccccacttcttccaagggacagcgatcccgggacggtctatgcgtcggggcggtctccgatacctctgcgggaagaccccgtctgggagagggcgcgcagcccctgaagcgtctcgggaagtctagcggaatcgggcggggatcacccgggggcccaaaagccccgtttgcgcctcgtgcggcatgcggaaagccaagtaaaacaagccttgggggccgaatccaatccccggtttggggcggcttcccattgaatcctcctggcccgtccggcgtaaaaaagaaacacctacccgtgggaggggaacattcaaggccggggtctccaatgatggccacttaaccgtctcaactcaacttggtaaagaaggcgaagcaccttttgtgaaaggccctgggtcccaaatgattttctccccgt

SEQ ID NO: 151140 - DNA, 1233 bp, Homo Sapiens
caggcagccaactagccctgtgcctgtcactatcaggggactgtgcctgccccatactacaagctgggtaagtggagtgaacatttagggaggaggaagagtggcagatgccgtgggaactgtggggtggttgctaaatgggagagggatgagctttggtggagagaaagaggaagaactgttgggagggaacatggaggcagaagatacggaataccctgtgtccatggagacttcagggcagacaaagagaagagtcaggaagccttttcttcactttacagcctatagacgcctgtgatagtagttcattattgcaatgttcttccagagttcaaatggtatttttcagctcaagggaagttggagaagtgggtgtggtaggttccatgatatttattcccaggtaagacatcgctggaggagtggaagaggcagatgcaggagaacctggctccctggggagagctggccacggacaacatcatcctgacagtgccaaccacaaaccttcaggccctgaaggaccccgagcctgtgctccgcctctgggatgagatgatgcaggctgtggccaggctggcagctgagcccttccctttccgccgtcctgagaggattgtggctgatgtgcagatctcagctggtgggtgctcccagggaatcctcctgacatggagtgggatcttgggcaccttcttagagaccttgaaccggtctctgtccccataggtgtcagtgaagtacactccggctacacttgtcaccttgttcccagggaacctggagagcaccttgtcagggccgtgctggctggcccagtaccaggcctggcccccgattaacaagccccctccatgtttcacaaactggatcagcgttgcagtcaaggtgtcattgtaggcattgatacagtaaacccctaggggctctcctggttctggcttgacctgtgcctcaagcccagcatcctgtaggatgtttactagaggtgccagggatggatgcactcccacgggagccccaggacagggacagagccagctcactgcattgaggagaaatggagccaagccagcatgcgacaggtagccctcatgggacacaaccaggaggcggcctcggccgtaggaggaggcagcaatgagcacctggcccttgtcattcaccatcacggggaaggcgcctcgtgccgaattcggcgcgccgtcgacttcatactctctcccccct

SEQ ID NO: 151141 - DNA, 786 bp, Homo Sapiens
cgggtggagaaccccataccacagctcttggagcatgctgtccactctgtggtctgttcaatgcagttgacacttgagtcagagacttctactcctagggtggcttctggcctgtaagctgcaagggtaaggcctcccagtgaatcctcctcatctgggccacagatccacttttcacagcactctccaggcacctcaacttttcttggagctgggcagttaggctcaggcagtagcacatccagctgacagcggggcacacagccaatctgcccatctctgcaggtgcactggaatttgcagcttggctgaaatttctctccactgcggtagatgaccccatcgaacacacagttatctccctctaccgccgtgcagatgccagtctggttgctggggtccgcgctgcgatcacagtagaggccactgctctcgtcgcatggctccagatctgagcagctctcgccacgctggcgggcacacaccagacagcatgagcagccgtccagcaccgcgcgcaccccgggggcgcaggtcggcggcgtcgcagggcaccggcccgggcactggggagggcagcgctgagtcgcagcgacctgtcccaggagatggagaagcaggaaggtcaggcaaaggcactgctttcggagacaaaagctcgtgctctgcacactctgcatgctcaggctttcccctctcgcttttaccaaacgagactttcttcgctgtagattggcacctcgtgccgaattcggcgcgccgtcgacttcatactctctcccccat

SEQ ID NO: 151142 - DNA, 899 bp, Homo Sapiens
acacactatgagcagaatcgccgtgctgctatctagagttttgagagaatgctcattatgagtgagggttcaaatcgagcgcgatttcacactcgtacaaataggtacatggagcagtcatatgtactcttcagtcgtgatgtgatctgcacttgacactctggcatctctgcccagctcaattcgctggccagtgacgcaacaattttctcctttttgtactccttgcagttaacaccttcatgccaaggagagtggcacttaaaacaccagacgaattggcaggtagggcactggattttgtatttgctttctgatctggaaggggtgggaatatgtccttttttcttgaaggttgtaaagtgcttgcactgaggacatggcttggtgctggaatcaatacggccaagttccaagaagtacttatacttgatggagtcttcatgcgttaagttatagacaacagttgtttcttccaagaattcaaaacactctgtgatggggcatttgatttctacttggccaagttgtacctgggcgctcaggtagactttgaggcactcctcgcacacggccttcttgcagcaaggcaggggcttgatgggcttgtcttccaggcacacccggcacatcagcaccatgaggggcgcatagggatcccctacaccgcccaggccagagtagggtggagctcccaacaggctgggcatggagaacggctcgggcgccaggtagaactccagctcgatgctgccgccgtcgggggagagggaatccgttgggagggacagtcgggggctggggaaggaagagcgggtgctgggagggttcaacactggcggagcccccctcgtgccgaattcggcgcgccgtcgacttcatactctctcccccataaa

SEQ ID NO: 151143 - DNA, 1230 bp, Homo Sapiens
  misc_feature (365)..(462): n is a, c, g, or t
ttaggggggagagagtatgaagtcgacggcgcgccgaattcggcacgaggtgtccttgagtttggagcctgagctctggtgaaatgctgatacatctgatctatcatgggaattgcagttagagagagtaaggaataccatttagtcatctatccgttcttcacttagcaggaatatgaaagaaaggcacatgtttaagaggaatacctaaaggtttttctaaattccaacatttaaaaggcaattgtgggctatttttattttttaatattttgaaataaagtttagtgtctagggctgggagccaggactgatcttccatttctttttctttgttcccagccatgcttttgtaacttgccagnnnnnnnnnnnnnnnnnnnnnnnnnnnnnnnnnnnnnnnnnnnnnnnnnnnnnnnnnnnnnnnnnnnnnnnnnnnnnnnnnnnnnnnnnnnnnnnnnnctctattcatttgctcctttattctttcctgtattctctgtatgtccagcactttgtagccatgggaggaaagggactataaaagtgtacaagtgttaatggaatgatacggtacctgaaagccttgttttctagtaagaaaatgctaccttgctgtacatacttataaccttgtatttggaaatgagaaataggtttatattttcagatctctcaaaaatcacatcatttgaccaaagaataatttaagacacatagaacagatttttttaattctatattttcatcctgaccagcttagttctaataatttttagttgtgagtgattaaaaaactttggatcaattttggtcaaacatgccaactttgtagtctgagtgacaggcaaggattttcgggtttaagatgcacttttagcacacatttgtatttcccttggcatatcagattgagctaatggtgatgttatttcaatctaacagccaccaatctgaaattgtatttcaaatgttgattctgtagttctttaaataataatgaagctcatcttatacattttgctttcaccaattgattccttcttcttttagcccactattaaaacatttcttactgaatggttcatgtaggcttgctgaacagcacgcattacttgcttcctgaagagttcccccattcatccatttgtccattagttgctgtggatatcaagttagaaggaactgacatccatagactgaacatctaagtgaatgagtattatcaag

SEQ ID NO: 151144 - DNA, 642 bp, Homo Sapiens
tttatgttttaaattttatatttatatttcaagataattgtgttgaatattttatggttcataacaaacagaaaggggagggcagaataaaaataaataaaagtttagttacattaccctagcactgacattggtacgggaatttttgctgcaataagaaagccacttcctctgacataaggtcacccatacttctgggtcttgccacatcctcttagacagttcatcgtagctgggctggctggggcggtcaggactccagacgctcacactaaaagaggggtggtagtcgagcagtcactccactcctctgtagggagctggccgcgagtgggtgcgcagcagggtgcgcgcggacccgtgcagcgcccagggcggctgtgcgaagccgccgcagcctgcgcgcccaggcgattctccaccttggggctcgccttcctgccgcgttcctcttccttccatccctaaagcgcgtacgccctgcagagtcaaacctggcgcatcctcaagcttccagggggcaacgtgaccgagccccgcatcacgtgtgcagagacggcctatagtgtctgaaggatgccacctagtcgcaggcccggcggcgccaccaacagcgaccgcggtagtccagctcgcgccgcg

SEQ ID NO: 151145 - DNA, 900 bp, Homo Sapiens
aggatcccagttaagcgcaggcgttgaacgagaaagtgccgacagattgcaggttgtggggaggtgtcagcgcattatttctgggagcagaggtgagatggagcaatggcctcagcagcggacgcagttgcgcatgaagtcgacacagaggcttgtgtagtaagtagggtagtcacggagggtggttgacgtgtgcagatgacacgaaatccacagaacggcgccaggacccggcgtgccaggcgtgcctccaccatgcgttctatgtctctggccaggactacttcgtcagccctcgagtagaggtagagttcgggccagcgagagcccgcgtcctgtagcctgtcatagaagtgggtgtggaagagggctgtgatgggagcaagcaggacgtggaacaggacgaccaccagggcaaaggccaccagcagcaacaggcgcagcatggcggcccggcgctccaggatggctgccagggcccgcagagcccctaccaggttgctgtcaccaggagcgctgtcaaagatggtgcccaccacacgcaggcggcagaagcgacgggtctgcaggagctccagcacgtagcggtacagcatgacgccaccgttgctgaagacatggaagagcaggggctccttctcaatctcataatcaaagagcagctcgagcagcttccttttgtggtagatggcactgtacttggcaaggttcttgtccttgcagccaccccagcccaagagaatcaccacaggctgccgagtttctgcctccttcccacctgggctggggctgttcttctggctccagcagggctgatccgggatctcgatggtgtagtccagctctgccgaggccatggtgaaggcgccggcccacctcgtgccgaattcgccacccagg

SEQ ID NO: 151146 - DNA, 1547 bp, Homo Sapiens
tatcagctcggtaccttcccaccagcaaagacagtgatgttatactgaacacaggttgcaagtcactgagggtgacggagtttgcagtttcaggaaggttgagttctgtgctgctaccttctactgatggcgaatagactattctgtaccctgtgatgggagcctggggtctgctccagcgaacaacaattgaggtgtcatcaacttggtccacagtcgggtcaggaggggcatcaggcgctgttgtttgtgaagtagacaggatcaaactctgctccccatcctcagatatctgatagacatttacaatgtattttcggccaggaagcaggtcagggatgttcacagaagtggctgtgcttggaagatccaggtactgtggctcatctccctcctcactcagctcatattccacccggaatcccgacacggtgtcggaagctgagacccaggagaccacaaagctactggctgtgatttcggtcacagattcagaagtggccacaagaggagaaaagggagtcgtctctcctgtcacggtgttgctggtcacaggtgtgctggtgctggtggtggtgaagtcaaagcgagtcacttcttggtggccgtactgctggatgctgatgagctggccctcgtataccacaccaggcttcaggcctttgatggtgtaggagtttaagtggcctggtatggtagcttccttccaacggcctacagaatttttaggtctccacctgagaatgtacttggaaatgtgagatggctgtggtgcattccactggatggggtgggagttgggctgactcggagtctcagtgataaatacttcgacaggaccacttgagcttggataggtctgtaaaggttggcaatgccactccccaatgccacggccatagcagtagcactggtatctgacaccatgcacatacttctcccatgaatctccaatttgataaaacgtcccagtctctgaatcctggcattggtcgacgggatcacacttccacctgccccgaccctgaccgaagcatgtacagttcagcatgtgcccctcttcatgacgcttgtggaatgtgtcgttcacattgtaagtgatgtcatcaacaatgcactgatctcgaagctgcgagtaggcaatgcatgtccattccccacgaccattcccaacacacgtgcacctcatcatgtgacccatgtcatgctgcttatcccactgatctccaatgcggtacatgaccccttcattggttgtgcagatttcctcgtgggcagccatggggcagaacccaaacttctggtcggcatcatagttctgtgtggtcccacaccacttcatgttgtctcttctgccctcagaagtgcaatcagtgtaattgtggttgttgtataggaaggggaagtggcacaaggcaccattggaatttcctcctcgagtctgaaccaaaacagtgtggtctgtgcagaaagagtatttctggtcctgctcataattcgaagttgtgctgcaccaaagatgtccgtcctgtcgcccttctgtggtg

SEQ ID NO: 151147 - DNA, 624 bp, Homo Sapiens
actgcactctcaggcggtgtccacatgatggtgaccttcacgtctgtcacttccacaaactgcaggtccctgggagagggcactgtatctgagcgtggggtgccagtggtttcttgttgaatgacaacaggtgtactttcttgattctcttccacagcatagatagtgatgttatactgaacaccaggttgcaagtcactgagggtgacggagtttgcagtttcaggaaggttgagttctgtgctgctaccttctactgatggcgaatagactattctgtaccctgtgatgggagcctggggtctgctccagcgaacaacaattgaggtgtcatcaacttggtccacagtcgggtcaggaggggcatcaggcgctgttgtttgtgaagtagacaggatcaaactctgctccccatcctcagatatctgatagacatttacaatgtattttcggccaggaagcaggtcagggatgttcacagaagtggctgtgcttggaagatccaggtactgtggctcatctccctcctcactcagctcatattccacccggaatcccgacacggtgtcggaagctgagacccaggagaccacaaagctactggctgtgatttcggtcacagat

SEQ ID NO: 151148 - DNA, 848 bp, Homo Sapiens
ctggaccggtccggaattcccgggatggcagcggtgccggcggccccgcgggccgggggctgagcggcgcccgctggggtcgctcgggctccgcaggccacgagaagctgccggtgcacgtagaagacgccctcacctatctggaccaggtgaagatccgctttggcagcgaccctgccacctacaacggcttcctggagatcatgaaggagttcaaaagccagagcatcgatactcctggagtcatcagacgtgtctcgcagctcttccacgagcaccctgacctcattgttggattcaacgcttttcttcccctcggatatagaatagacattcccaagaatggcaagttaaacatacagtcgcctctgacaagccaggagaattcgcacaaccacggggacggtgcagaggacttcaagcagcaggtgccgtataaagaggacaaaccccaggtgcccctggagtccgattccgtggaattcaacaacgccatcagctatgtgaataagattaaaacccgcttcctagaccacccagaaatctacaggtcattcctggagatcctgcacacgtaccagaaggagcagctgaacacgaggggccggccattccgaggcatgtctgaagaggaggtgttcaccgaggtggccaacctcttccggggccaggaggacctgctctcagagtttggacagttcctgcccgaagccaagcggtctctgttcacaggaaacgggccgtgcgagatgcacagcgtgcagaagaacgagcacgacaagaccccggagcacagcaggaagcgctcgcggccctcgctcctccgccgcgtgtctgcacccgccaag

SEQ ID NO: 151149 - DNA, 594 bp, Homo Sapiens
  misc_feature (365)..(400): n is a, c, g, or t
  misc_feature (458)..(468): n is a, c, g, or t
agaagattcttgtatttattacaactctatttaattaatgtcagtatttcaactgaagttctatttatttgtgagactgtaagttacatgaaggcagcagaatattgtgccccatgcttctttacccctcacaatccttgccacagtgtggggcagtggatgggtgcttagtaagtacttaataaactgtggtgctttttttggcctgtctttggattgttaaaaaacagagagggatgcttggatgtaaaactgaacttcagagcatgaaaatcacactgtcttctgatatctgcagggacagagcattggggtgggggtaaggtgcatctgtttgaaaagtaaacgataaaatgtggattaannnnnnnnnnnnnnnnnnnnnnnnnnnnnnnnnnnncatttcccacccacactcgccagctcaccccatcatccctttcccttggtgccctccnnnnnnnnnnnatcctagtcattcttccctaatcttccacttgagtgtcaagctgaccttgctgatggtgacattgcacctgtatgtactatccaatctgtgatgacattccctgctaataaaagacaacataagtc

SEQ ID NO: 151150 - DNA, 365 bp, Homo Sapiens
cctgctcaacagaggtttagtttacagtctctgaactaaagtagtaacctcccaaattgttttttctaataagctgagattcccatttctcttaaggagaagccacccatgagatgtcttttccttctccatcatcttagagccaagttatatgttcttgtctaatccatgtagctttttgttcaatgacttgatcatctgcttcctttttgaatttttaacagatagtaagtaaatttggtggttttttcccctgggtcagtgatggaaaggggttaacttcagccaggattgatggcagctgagggaaattcttgcccaactaaacccagaactcaaacttaacattagaaaataaggtccag

SEQ ID NO: 151151 - DNA, 832 bp, Homo Sapiens
  misc_feature (130)..(186): n is a, c, g, or t
  misc_feature (737)..(737): n is a, c, g, or t
  misc_feature (760)..(760): n is a, c, g, or t
tttttagataaatgcgtgtattattttctcaaaatgttataaaagtcatttctccttagtacagagagctttatacattttatctagtaatgaatacaatctagtttaacactcatctattttactaacnnnnnnnnnnnnnnnnnnnnnnnnnnnnnnnnnnnnnnnnnnnnnnnnnnnnnnnnnaggcttctgtcaccacaaaatgttacttggaaaactagatcccagcagatgacctgtacttctctgctctctcccctactgcaaagaggcagtgagggcagcattagtaagcctgactcaggggaaggtaagtggcctgcagagaaatggtcctaggtccgcaaccgaggcgagtgaacttgtcggacagatgaagactctaactggaagaaacgatcagcgcattcacggatgcaccaccatccagaaatctcccggtggcttccatacaaaaactgatgtttctaaagatggaaagaacaggtctaggaggcagaagagtatctcctagcaaagtgttctgtagctcaaagggtgagtgggctttggtagcaaaaagctttgaaggcttcaccctgggtgaatctgacaagggctggagccagacgggacctgcagcacctcctcagcttggcctcgtctcccctgacctcgcctccgtgcatgctgcctcagtttgccttctcagcagagaagcctccaccaccaggggctgggcatgcccaaggcangtgtggggcctgtagtggggcancagcaactggtgggtgcccctctagtgggcgctcatctcacagctgctcaaatgggaacaggtgggaagctg

SEQ ID NO: 151152 - DNA, 1178 bp, Homo Sapiens
  misc_feature (496)..(562): n is a, c, g, or t
  misc_feature (609)..(618): n is a, c, g, or t
  misc_feature (858)..(868): n is a, c, g, or t
cggtccggaattcccgggatcggggatgcccagaggcaactgcccaggctggaggtgccccagggaagggtgctcacagtggtcccagggctacacttggctttgactgcacagcccctgctcagatccttgtggagggtgtccgatgacttggggaggttctcttccccttcctagaggaggaagtgaccaagtttgaaggcggcagaaatggccacacagccaagaagagcccatgcaactcagtccaggattttactgggtcagtgacattggtggaagccttcatgcctcctcattccacagcacttcctcctatgttgaccttaaacactggcttcccactgatacagactgggatgagctgagggcagtctcatttactgtcaagagttgtatttttgtattgtcctttttgccaagtctacatgtgttgactctgtaatggatttatgtagcccacttcagtctgcaaataaagcaaagtaactggagnnnnnnnnnnnnnnnnnnnnnnnnnnnnnnnnnnnnnnnnnnnnnnnnnnnnnnnnnnnnnnnnnnncggggggcccgcccaaaagataccctccaggggggcccagggttaannnnnnnnnnatctttttcttgatcaaagggggggcgcggcccagggacgggaaattatatcccgtggggccccgggctcgtgcgtttccaacccctttctttatttggagaaaaccggcccccctttggggactcctttgtaaacgaaacctcccccccgcgggggtgggcaaccccttgggccgccccccgcaaaccgcaagttttggaggctctccatgggaaagaacaaaacattttttctgggcnnnnnnnnnnntttgtaggagacccccacttcttcgtttgattgtcttaaagcactttccgaaattactacaattatctttctgggaagaaatggttggttccacccgacccacgctgcttcctatcttcgtctgcgggatttttcatattctgggggcccccgcgggtccaatacaacgccacccacccgcccgcgacgcgcgcggtgtcgtggcgggaaaatccatcacacacgccgccccggcgagagggttctttctccgccttgccccacatactcgcaccgcctgccttcgatagacgagagctagtccccggag

SEQ ID NO: 151153 - DNA, 1019 bp, Homo Sapiens
aaaataactgacaaatcgtctttattaaataagcaaatagtctacacagatacagtcacttgtctgttgcacacgagtgcttccccttctcttgggaaagatcactctatgtgacaaggtgcaagctaagcagcagcccatttgaatgccctgtaataacataaaaatgaccggcaagatacagattcacgctcaagttcccttgagtgtgactcgagtcacagcacaggcaggagaaaacgaacatttcaattcacagagacttaggtgaagaattattagcttcatttaaagtgcccatattgtgccttctacatatctctttcaacaattaagccagctgttactcttcaaagtgtgtgtcactttctttgcatttgggtcaaactccaactgtgaagatccagtaaagaaataaaagaacccaaattcttcaaaaacagcatcaatctttgagtcaatccctggaaagtcttcagctatttgcttgggaaagcctggctccatggaatttctcttctcatcaaatctccagtatttgtcctctacaaagaaatatgttttgttcttttccttatcagaaatggctgcatcgattttcctcacggttggagggaaacctagggtgtggatgcctcttgggtatccagctcgtacctcatttcctctgatagcccagaattgatttcctttaaaaatgaaaacgaggtccttgctagtaacttcatatgcggcatccacgcctgaaggaagagatggccaaaatgaagagatcaaatgcaattcaggttcaagcttcctgagggatttgcgccaaaagtgcctgtctttaaagatcaggatttctcccctcagagtgctgacagcatcaaaggacaaagcaggatcacagttggctggcgtcccaggttctggagggacaggttccgtgggtaccaggggggtctcaggggagtcagggggaggtccatagagggactgaatgccatttatatcatcttgagacaggcggaaccgag

SEQ ID NO: 151154 - DNA, 871 bp, Homo Sapiens
  misc_feature (45)..(81): n is a, c, g, or t
  misc_feature (739)..(791): n is a, c, g, or t
taccctcaactaaagggaataagcttgcggccgcatacgcggtcnnnnnnnnnnnnnnnnnnnnnnnnnnnnnnnnnnnnnccttaaacagaactttattttctcacagttctgggaggctagaagttcaagatcaagatgtctgcaggtttgctttcttctgaggcctccctcctggcaggcctctttgcagatggccaccttctcactgtgttctcacagggtctttcttctgtgcctgtccctcgcagcagtctctcccggctctcttttgaaggagattggagtgcagaattggctagtctgaggtttcagtgtgcaagacgtagtcagatggctcacatttggaaccctagtagtaatgttttattctttgtccgatggcattgggcgggttgacccagcctgcagtcaggatttccttgtaccgttcacccgggagttcagaatcgcactctggctgaaagttcagcaagagcaccattgtcagcctgactgccctgtcttgctggaccagccaaaagcttagttactttcctggcacagttggaggaaggagctggttcttaacagacgttcaattaggtcttttggctttctgtgttctttcaagcttcttccttttccctttgtaataatgttagtattgaaagaatagattttgccaagtgattgtcttgtgtctgctgccacttggcatgaaggtactgctggtgattgggggaaaaaactaacattnnnnnnnnnnnnnnnnnnnnnnnnnnnnnnnnnnnnnnnnnnnnnnnnnnnnnagccacacaatcttaacttcttaaacatatgaattttttatgaattttttaaccacactatgtagggtaggattatgtgg

SEQ ID NO: 151155 - DNA, 1207 bp, Homo Sapiens
  misc_feature (1113)..(1113): n is a, c, g, or t
  misc_feature (1192)..(1192): n is a, c, g, or t
gaggtgggtgcctctgccagaccttctctgatggatgacctctgtgaagcaaatggcacttttgccatcagcttatttaaaatattgggggaagaggacaactcaagaaacgtattcttctctcccatgagcatctcctctgccctggccatggtcttcatgggggcaaagggaagcactgcagcccagatgtcccaggcactttgtttatacaaagacggagatattcaccgaggtttccagtcacttctcagtgaagttaacagaactggcactcagtacttgcttagaactgccaacagactctttggagaaaagacgtgtgatttccttccagactttaaagaatactgtcagaagttctatcaggcagagctggaggagttgtcctttgctgaagacactgaagagtgcaggaagcatataaatgactgggtggcagagaagactgaaggtaagatttcagaggtactggatgctgggacagtcgatcccctgacaaagctggtccttgtgaatgccatttatttcaagggcaaagtggaatgagcaatttgacagaaagtacacaaggggaatgctctttaaaaccaacgaggaacacaaagacagtgcagatgatgtttaaggaagctaagtttaaaatggggtatgcggatgaggtacacacccaggtcctggagctgccctatgtggaagaggagctgagcatggtcattctgcttcccgatgacaacacggacctcgccgtggtggaaaaagcacttacatatgagaaattcaaagcctggacaaattcagaaaagttgacaaaaagtaaggttcaagttttccttcccagattaaagctggaggagagttatgacttggagcctttccttcgaagattaggaatgatcgatgcttttgacgaagccaaggcagacttttctggaatgtcaactgagaagaatgtgcctctgtccaaggttgcccacaagtgcttcgtggaggtcaatgaggaaggcacagaggctgccgcagccactgctgtggtcaggaattcccggtgcagcagaatggagccaagattctgtgcagacacccttttcttttcttcatcaggcaccacanaaccaactgcatcttgttctgtggcaggttctcttctcccgtaagaggagcattgctgtacatacctcctttccttctnactatcttgccttaa

SEQ ID NO: 151156 - DNA, 922 bp, Homo Sapiens
agtgtggagtacatttttccaatcacaggaacttcaactgttgtgagaaatgtttatttttgtggcactgtatatgttaagaaattttattttaaaaaatataaaggttaacgtccataataaatacttctctttgaagctaccttatcaagaacgaaaaatcgtatgggaagaatcccctatttatcactgctatattaaaatatatatattttaattatatttgacaggttttgcatctaaattgacctatttattcattcttgattaaatgcactgaaaagtaaagggtctgtttgtgtcatgttcatgaaaatgcggttagagaggtgctattcaagtgattctgaaggcaccccaaggtatatctgtaatttaaagattactgcaaatatctttactttactgtgggtttttagtacatctgttaatttagtgtttctttgtgtgttttgtagactagtgttcttccatccttcaactgagctcaaagtaggttttgttgtaacattgtgattaggatttaaactaattcagagaattgtatcttttactgtacatactgtattctttgatttttagtttgttgtcatactgtctgtgctgatggcttggcttaagattttgatgcgtacatgaggtcactgttgatcagtgttgtttagtggcttggcagctctttgtaaaagcatattgggttggaaaggtgtttgcctatttttcaaattatttaatagatgtatggtaccctttaaaagtggttgtatctgaatttactgtggggataacatacactgtaatgggggaaaattacctaaaaccaatttcaaaatggcttttctttgtattttggtttaaaaacccagtgcatgtctgccctctgagatgcaataaacaccttgaaccaagaaaatgcaaacgt

SEQ ID NO: 151157 - DNA, 523 bp, Homo Sapiens
  misc_feature (226)..(334): n is a, c, g, or t
  misc_feature (354)..(399): n is a, c, g, or t
  misc_feature (421)..(430): n is a, c, g, or t
atatttccaataggttcagtttattgtacatgtattatacttcaagaaaactgattacacattcttcctttcatcctcactagcagaatcctcattttgcttagcagcagcatggtctggcctgggaaatgtcagtgaaaattccttggtggtgcttcctggagagctctttgataggggcaaattcaggtggttacatgccttttgtcattcctctttgtcctannnnnnnnnnnnnnnnnnnnnnnnnnnnnnnnnnnnnnnnnnnnnnnnnnnnnnnnnnnnnnnnnnnnnnnnnnnnnnnnnnnnnnnnnnnnnnnnnnnnnnnnnnnnngcttgaacgcaggaattcannnnnnnnnnnnnnnnnnnnnnnnnnnnnnnnnnnnnnnnnnnnnnaaagagcaagaccctctctctnnnnnnnnnnttttttttaatgttcactggttttgatgcgggtaatagcctcccggccagtctcctcctcgttgatgctgtcactgctgaagatgcattttct

SEQ ID NO: 151158 - DNA, 919 bp, Homo Sapiens
actaaaaataaggggttacttgtggctgtacccaaaaatggtaaattataaccaggccagtattagaatttactgaattaaccaatgagaaagagaggaagtgtatctgttacgtgggatatatgggccagcctggatatacaacagagtagtaacgtttgacttggtctcgctgtcggttaacacagagattgtccaaacacttgtcattattggggcaggcactgcaggtggctcctctcttatatggccaagttgggtaattccctcctggtccgtagttgcatataaaatgtgctccattggaaagagcgtcaaagccagaaactttagggcaaaattgaactgcgcagccaactttgtaactatctgcccaaacaacctgagtgtagtggccacagacttttttgcatatccgagtcttgaagtcatagtcctggatttcgtcataccagtttgtgatggcggaagacacagaaaaaatgggcacagacccagtccagatgttctctcccagtgaagtgaagtttgggtgcagcttgtggggtggcttcagccgtgtattatgtgaaaactggcaattgctggcccatgcttttgcaatttgggctagtgctgggtcccaagtcatgtatagcatatcactggctgttggtttcacctctgatcggaacttgttatggattcgaacgcagtctttgatgaaatcttcattttcgatatctggcaaaatatttgctgtgtgtgaataattggagacaaaagaaaccatccaggctattgtagcaagtgtgacacgcatgctttgtctggcatggagccttgggaggctgcagtccagagccgccgcagtttctgagagtgtgattgcctgagtgctcagcccacagctttgcaaacctagccgacttcagctttg

SEQ ID NO: 151159 - DNA, 996 bp, Homo Sapiens
aacctgggaggtgaaacggggcccacagtgctcctccggggaagggggtaaagcccggcaagccagggccgggtgccagccgcgagggcctcggggctggtctgggcgggttagtaacagggggcctgggccaaaagcttggggttcatggccccagttccgaattagcgggggaggggatccccggggatggccaggggtagatgacacttccaagcacttcggagtgagtgaggctccagccccgaccccagcagcaggtaactggagcgctattcctggaacaaagacaagcactacggagaaatgaagagagagagcagacgggcgcgggtaggtaaggggaccggagggcaagggggagagcagtggctcctggcggggtgagggctgcggggagggggtggcggcgtgcagggccctcccccctcgaggcccgagggtcgagggcctaataatcatcctcctcttcttcgtcgtcgtcgtcttcgtcgtcatcccagccaaagcactgtttcatctcatcgaggaaggcccggtaatcacctaggatggggctatccatctcgatgtagggcaccacccactcctcggcttccccggtgaggaggctgattaggaatgccaccttcatggcgtcgttgcagaatcggttctcgttcacgagcatgtaagacgccgtctgcacgataaactcggggagccgggagctctcgccattaaacgtttcggggaagggcaccgggcagctcggcggacgtacctggcgcagcaggctggccctctcgcacaccagcagccgcagctgttccatgagctggctgttctcgatgctcagggcgcggtgccgcatcaggagcgcgtgcagcagcagcaccaactcatccaccattgcgaacggcctggaaggacaggactcggctcggttcggctcggccaaggtgcgcacggagcctcgcctcgtgccgaattcgccacccaggcctcgcgtccgta

SEQ ID NO: 151160 - DNA, 846 bp, Homo Sapiens
  misc_feature (43)..(43): n is a, c, g, or t
  misc_feature (652)..(755): n is a, c, g, or t
cagtgtaggaggaaacccagaatattaactccacaatcctgcnaaagtgccaggcctcatggggaggagcaggatgcaggcggtgatgttcagatctgggacggcttggatggatcgcagcaggaatgtgggatgctcaagaggccccccacaacccagatgagcacgcaggtgacccgggcctgcctccgccgctgctgcctccggctggccatagggtgcaccagcacgcggtagcggtcctggctgatggccaccaccaggaagatgctgatgaacaaattggccttgatgaccccgttgatgacacggcagaggagggctccgaaaggccagttaaactggttccagatattctctgcccagaagggcaagcccaagacaaacaccagatcagaggctgccaggttggccaggtagatttctgccacgttcagttgccgccggggcaggaggaagaccaacaggacaaaaaggttccctaggaggccgaagaaacagatggagatgataaatgtcggcagcactctgtgcagcaggtcccaggcttctggagcattgtcacaggccgtagcattttgagggaagagctggctctggttggaggattggagctctagagggggccaggatgatgccatgcacagtgacnnnnnnnnnnnnnnnnnnnnnnnnnnnnnnnnnnnnnnnnnnnnnnnnnnnnnnnnnnnnnnnnnnnnnnnnnnnnnnnnnnnnnnnnnnnnnnnnnnnnnnnncgacggactgagacctcaggcagaaaatgaaggcgttcacaactgtagttgggttttctgatagtgagagctgcttttggaggagtttctc

SEQ ID NO: 151161 - DNA, 863 bp, Homo Sapiens
acgcgtgcccagcacatgtgtgcacacgcagatgcaggagagaacacacaccaccgtctctttgcacacgtgtgcccctgtccggcccggggggctcatctctccttcacgtgttctgtgctcccgggcccccgctgccggccccatccccactgcccccactgtggaccccgccggccccgctgcatagcacctcggtgaggtcgtccatgatggcggtctctttggggtccagcaggttgaactcccgagcaaagaggatgaagtggacgtagagcgtgttcaagtgtccgtgcagctccagggccagcgtctccttgaagtgggcccagtagatgtgtgccagcacgtggaacaggtgtctgcagatcttcctcaccagggactcaaaggagctggggaattctctgccgtattttgtggggaacacgtcctcatccgtcaccagcttctgcacggagctcatgacgaagtcaacgtactgtggggccgtgcacttgaccttcttcccccgctcgtcataccagtagtactgtgtgttgcacacggccatcgtctgacacgtctctcctgtgcagaactccgagatggtgctatactgcaggttgatgtggtggaaaaacgtcgtggtgttgctggccagccactcgttaaggtcaatctcgcggggcagcaccaccagctccttgaactggaagtcggtgatcctggccttggtgtgctcaggctccaggtaggccttcctctcctccgcagcgggcttcttgccattgggcttggctttggacttccccatgagccagtccatggctgcgcggggccgccgcgcccgctgcccgacgcgatcggcctcagccccggcg

SEQ ID NO: 151162 - DNA, 981 bp, Homo Sapiens
ataaaatcataggtttattccaatattttaaaatattttctgtaacattccactcagaaggtagataaccacaaagttcttccctaaggaagggtgcaaatggaatgtaatacattactgtactctgtagaatacaaactgtgaagacaaggaaatttaattattcaattttttccttctacatcatttctgctggagaactgctcacttaacatcctagaagctatcctgttgagatttgctaccatgatacaggagtgatgaaccttcactctcagcataatgaatgtgacactgcctacatccatcctgtgggagagttaaaaggacaagccccctgcagcacacgccaaccaatctatcagagcaatcatgcatgtgactacttctgccaaaatcctccaacttaatttttaaatagctaaaatatgatcaaggtcatatgggtactgcatttgaaactacaaacatcctctgttcacaaatgttcactgttatagcaacagcactttggtacagtcaagggcacaatcacatttttaaaaatctagagcgaaaagtaaacacgaaagggcatttgcatgaggcagagaattctgtttcttggcagtagacagaaaactggctaaagaaataggctcacagataggtacaatctacaatttgattctctgagtattagtcttgaagacatagctatacacatcccaacatatagcctactattttacattagtagtttcttatataacagttggaagaaaaacatatcaaaaaccaacctaaatcatatttattaaccactttaataagcccctttatactttcttttttttcaaccactttactccaggtttggttagtataatcatgagactgtctagcctaatagtctagagaaaattctccggttccaagacgatgccttgctatgtagccattaattattaagctcctggtaaaccctgaattagatataga

SEQ ID NO: 151163 - DNA, 767 bp, Homo Sapiens
gtcccggcccctttcccttctccttgggattgttgttggagtcattgtccttgatgatgtcatactgacggcagaacagcccaattacagcagcccacatgagcaacaccaccacaatgatgaccacttccccagtctgcagtggccgctctccatccagaccttccactgtgatgtcacctgggcttgaactgtttgaaggtagccggtcagaacccttgagagttcggaagtgcacccggggccctgggggactctctccccgaaggccgatgctcctgacctgcactgtgtagtcactgtcttcagccaggccccagagggcacaggcccgggtggtggtgttcacctcccgaatcacacgctgcccggggccattctgccgttgctgggaaatggagtagccaatgacgatgttgccttctgggacgtcccaggacacagtggccgagttggctctgaggtgagtgaccgtcacattcacaggagagggaggccggtctgctcgcacgaagcccaggtcacagctgaccagcaggaggaccgtggggcttagatatggggaaaggggcaccagcgaagccatgtccccacggagtccgctggggggggaactgtggcatccgcttggcatccgcttgacatccaggcggggctcctggagatggcaggagttgtggggggtcaaggactgcccagaacgcacggaggtcggggggcagcagctctcctgggctccccacagctcacaacagccctattttctc

SEQ ID NO: 151164 - DNA, 856 bp, Homo Sapiens
ccccagtctgcagtggccgctttccatccagaccttccactgtgatgtcacctggggcttgaactgtttgaaggtagctcggtcagaacccttgagagtttcggaaagtgcacccgggggccctgggggactctgctccccgaaggccgatgctcctgaccctgcaactgtgtagtcactgtctttcagccaggccccagagggcacaggcccggttgttggtgttcaccctcccgaatcacacgctgcccggggccattctgccgttgctgggaaatggagtagccaatgacgatgttgccttctgggacgtcccaggacacagtggccgagttggctctgaggtgagtgaccgtcacattcacaggagagggaggccggtctgctcgcacgaagcccaggtcacagctgaccagcaggaggaccgtggggcttagatatggggaaaggggcaccagcgaagccatgtccccacggagtccgctggggggggaactgtggcatccgcttggcatccgcttgacatccaggcggggctcctccgccggtcctcgcggttggtcaggcctcggggggctgctcggtgcccagagggcggcccatcagcccgactcggtggcgctgcccctaccccatcccggcgcgggcccggcgacgcgggcagcgcaggggccgagctgcagggcggagcagggcgcagggtctgcaggagcaccccagggctcgagcgggccacggagtctgtccgggagcagggggcgttgcccggacgctggcctgggtccccggtgcgggaggcagtgcggcggcctccgcccgcgcctgcagcgggatgtgaccgtcccggagagccagc

SEQ ID NO: 151165 - DNA, 827 bp, Homo Sapiens
  misc_feature (666)..(666): n is a, c, g, or t
  misc_feature (766)..(767): n is a, c, g, or t
gccaagcgctggtccgcgccgggttccgggatatcgtcgaccacgcgtcgatgacttccacggctgggacgggaaccttccacccacagctatgcctctgattggtgaatggtgaaggtgcctgtctaacttttctgtaaaaagaaccagctgcctccaggcagccagccctcaagcatcacttacaggaccagagggacaagacatgactgtgatgaggagctgctttcgccaatttaacaccaagaagaattgaggctgcttgggaggaaggccaggaggaacacgagactgagagatgaattttcaacagaggctgcaaagcctgtggactttagccagcagacccttctgccctcctttgctggcgacagcctctcaaatgcagatggttgtgctcccttgcctgggttttaccctgcttctctggagccaggtatcaggggcccagggccaagaattccactttgggccctgccaagtgaagggggttgttccccagaaactgtgggaagccttctgggctgtgaaagacactatgcaagctcaggataacatcacgagtgcccggctgctgcagcaggaggttctgcagaacgtctcggatgctgagagctgttaccttgtccacaccctgctggagttctacttgaaaactgttttcanaaaccaccacaatagaacagttgaagtcaggactctgaagtcattctctactctgggcaacaactttgttctcatcgtgtcacaactgcaacccagtcanngaaatgagatgttttccatcagagacagtgcacacaggcggtttctgctattccggagag

SEQ ID NO: 151166 - DNA, 569 bp, Homo Sapiens
cagggtgcccgtgcccgtggggctgggccccagcgtgcctgtgcccagcaggtccggctgcccggtgcgccagatctcccgcaggatccgttcgcgctcctccagccgctgcgcccgctccagctcctccgccgacgtgaagacgttgacgttgaggggcccgtccggctctgcggacagctcggggcccggcagcgtgtcgtcggggcccagccgagtcaccgtgtcctcctcgtcctcgtcgtcgtcctcgggctccagggtgctgctgcgggggtcccggcgctgagccgggccccggggccgcgggcggggcgcccacgagatgctgatgacgagcaggcagagggtgagcagcaggccgaagcagacgcccagcacgaagtagaggccgaagctctcggggttggcgcggatgtgcgcgtaggcagccaggctgttgctgagcaactccatgtcccttcgcggggcatccatgctgctctggggggcagctcccctaccagccgtcagcgccccgcttcccggctgcccggccccagcgcgtcccgcggccgcatacactgggt

SEQ ID NO: 151167 - DNA, 930 bp, Homo Sapiens
caccgggctgtacccgagccgccgagccactgcctcccctccggatcctccccggaggctctgcgtgccgggcccccgcgccttgctgccccatgcagccctgagccccacagcaagtctgccatggtgccgcggggccctgtgtcccctcgtgaggccccggtgggcaggcgtcgagcgccgctggcttggagcctgcgctggtcgccctgtgcctcctccccgcgctggtgctgctggccctggctgggggcccctggcggtgcctggcctggagcgcagctgcagggagacgtcggctgcgctgggcctctcggcggtccccccacatcccgggatcccgggacccacttggccccccgacatgacgccagctacacgcatgactccatgccatggctgcgcgtgggaccagcttcaagccgtcaccgtacagggatcctcgtccttccgcgcggaacgctgctgaggcccagcggcgagacggcggacggtgccgctagactagccagccgttccggcaatgtgagagccgacgtagtccccgctatcaggctatccagcgagcgtggacacccagaggcagcccaggcgacgctccggagtaggcttctagccgcgatcaagccacgacgagactgcctagggactccggcgctgcgagcacgtgcttacgacagggcccaacgggaggcacgctggcccagcgccgtagctgaccgcccagcgaacgcgcggcagtaccacgattcgaacgaacaagccgagatactcgggatccatggtgaccccaagcgcgactagcagcgcagccaacgaaaggggtgaacccggtaccagagcctggacctcactggaagggcaatactacctacatgcacagcacaagaaggcgctgagccggacggaacgaggcacataaggggagca

SEQ ID NO: 151168 - DNA, 852 bp, Homo Sapiens
gggcaggggcctctgccctgaaggcggggccaagggaccaatggggaagtctaatgtggaccaacccaagttccccaaccaacttccccacttctccctccgtccaaccaagaaggggggaaaaagggagaggccacagggcaaaagagtgtattagggcctgagctgcagctgcctctcagaagggagagtggcccacagccttgcctcccttcaccttcagcccactccccagactgcatctggaagcggctagaggcctgctgagatcctcctctccctctggcctcctctcggagggagactacggagggccaaagaatagagaagcccaggccccgggatttattctaactcctgccaaaatctgtttggctttttaaaaaataatcacaatttgtgggttaaaaaccaatttgcaaccaggcatgagccacaatcagaaccaccccagcgggagagcggagttccagacagggcattgcagccccatctctgttgttcccttaaccctctagggtccctaacccgatcagtccaaccagtcctgggtactaactacccaaatgtgggatggctcctcttgggaagagggtaggggacatgtccagcaagtgccagagaacttggctcagggtcacctccacccgtgtcagtcagctctgctcccagcccaggtcgcggtcctccagcttggctcctgggagtggtggtgcccgcatggaggggggacggtacatctctttaggatgtagaccaggcaggtgggcacactggcatgacagtcccacagaggggcagtgacaccccttcccctccactgacaacctggggcacagaggccaccctctc

SEQ ID NO: 151169 - DNA, 355 bp, Homo Sapiens
gctatggaggtagtcagtggcgcacaaagggtaacaagcagtgatagtggggatgctttccattttaggaaacttttcctaaaaggaagtggcaattttaactaatctcccctccgccgctcccagctgccactccagatgctgctgctgccgccgcggccaccccaccctcggtcctcctctccggaggccatggacccaccgccccccaaggctccccctttccccaaggcggaaggcccctcctccactccttcctcggcggcggggccccgacccccgcggctgggccgccacctcctcatcgacgccaatggggtcccctacacatacacggtgcagatggaggcggagg

SEQ ID NO: 151170 - DNA, 1260 bp, Homo Sapiens
  misc_feature (42)..(42): n is a, c, g, or t
  misc_feature (784)..(784): n is a, c, g, or t
tgcctgggtctgaggacaaggcatctgggcttgaggggtagntggcaccgagggtgtgaccagagggcatggttaggtggattccaggcaaatgagtggtgtctgggtgccagcgacccgggtgtctggaaacatgggggactggtgggcagggaagagctccggatatttggttgagatcatagggggctggtgggcaggaggctgtgctgaatgagagacagagagaataccgggttggtaggcagaaggcagatctggatagttggctgcgatcacggggatctggtggtcacgggacaaagctgggtgtgtggcagggatcacaggaggctggtgggcagaaggcagtgtgggatgcgtggcagagaccaccacaggccgggtgacggagagcactgaggagtggtaggggaccctggtgcagccccggccatgtgtccagcgccccatactccatgaggggggtctgcaccccatcacacgctggttctgcaggtctgcacccctgtgaggctgcccctggggggcatgggttctgttgggctcttgctcccagcatggatgacccagcggtagcagtcagtgatgcgcttgttgggtgcatgggggccacagcgggtgcagtacacgatgcccagtgcaagcaggaccaccaaaaagacacacgttggcaccaggagtgccaccagcagccaccggtcatccctctggctgtgctcggcaagaccagcctcccccagggctgttggggctgctgtgggagctggtgagggcagccacnagggccaacttgggactggggccatcttcccttgggatttggggggctttggaatggggatgtgtagggctgatgggtgaggtctggttagtggggctctgagagggcaggagggtggggagggctgcgggctgggtggcagcaggcacagagatttgatgggcaggagacacaggggacctggaggtggtggtcagagagggctgggcagttgggataatgggaagctgggtggcctgggttctgaggacaagggcatctggggcttgagggggtagctgggcaccgagggtggtgaccagaggggcatggttaggtgggattccaggcaaatgagtggtggtctgggtgccagcgacccgggtgtctggaaacatgggggactggtgggcagggaagagctccggatatttggttgagatcatagggggctggtgggcaggaggctgtgctgaatgagagacagagagaatacc

SEQ ID NO: 151171 - DNA, 459 bp, Homo Sapiens
ttgacttgagattctgaagtgaatttattcacactgattgtgccctctactttagtaaggttctggcttacagagccctcttcccatcctctgatgttcaattttaatatacagcaatcaactcttagaggacaaagaaatctggaattgggtagcatgagccacagctatatagcccacactaatgcatgttctgtagtataagaaggcagttcttccctttcttttctgggggcttgttcctttgtccacttgcagctaaattctttctatagatttatcacagataagaaggaggttgtttttggataacaaataagcatttgtgctattaaacaaacaaaaggtaataaggatactgtcttttccctcaaaatagaatcctgccctaaagcaacgcaagtagagcatacttctgtgcaaagccagtgatagagaagcagccttgccagagtcact

SEQ ID NO: 151172 - DNA, 1090 bp, Homo Sapiens
  misc_feature (328)..(328): n is a, c, g, or t
  misc_feature (338)..(338): n is a, c, g, or t
  misc_feature (346)..(346): n is a, c, g, or t
ctactccaaaaatcagcatgtttaatggggcccctgtgcactgccctctgccccctctgaggttcgcacaccgtgggcacggactcgatacaagcacgtgaaacgggggtggccccagttgcttagaatctggatcttcaccttgggaaaggcagctggggggtcattctgcaggtggaaagtctgaatctccgatttctcaacatcgaaggtgaatttccccaaggaaacttcagtttcatcataaacctggaggccaaagaccgtgaaatcgcggggggcgctgttggctccttcggtgtgctccacgctgggcggtggatgctgnagagtgatgntttttagntgcacttttcccggcagttggatcaccacctggccttggtcgccttcaaaagcccagcaattcccagggaacacgtggggctccaggataaccgtgggcggccgtgcgtagttccagaagctgaagcgattccagaagtaggcagtgttcctgtctgcgtaatcgtgggatgtcttctgcaggtcgatggaggctcccacagagctcaaagcatagtcgggcttccgcacaaaatcctcattcagcctctggaacacgagcttggccactctctcgctgttggctgcccgaacagtggacacctccttgtggagtttatccagctcggcctggagctgctgcagctgctgcccctgggagcgcacgcgctcgtggtactcacttagagtcagcatctccttaggttcattctccaaaggagagaccaggtacagaagccccagccagaatgctgacagaaagaggctcagcagcgacacagccgtgaacaggaagcggatggaacagacctccctgtacatgctgaccagcacgtctcctgccagggataacaacacgctcagcccctggaagagcaggcctcagatccagggtcgggagaaggtcgagcggctcctcagagactactggagacccagtcggttctgcgggaacccaagggctccactggggccttgcggaccacagacctattttcccctcgagaccgggccgcagattgcgcagaccacaagccagacagct

SEQ ID NO: 151173 - DNA, 824 bp, Homo Sapiens
  misc_feature (101)..(101): n is a, c, g, or t
  misc_feature (109)..(117): n is a, c, g, or t
ggggtcagagtcctgggaggcagcgagatggggaacatctgtgctcagaagagggggtgtatgggtagggtgcatgtgcttctgtgcaaatcctggtcccngaagattnnnnnnnnncgcagagtgagatcttcacagtttccagaagggttgaccccacagggcaggggggcccctcctcatgagtccaagatctggccccccattccccttagttgcctcctggagctggggaggggggcacctggccggccagggcctcggagtgaccccagcaaagggcaggaaaggcgggtggagatggggaaggaaggcagaaattgggaggagccatggggaatccaggggggtccctggggggagactgggagggttaggaggatggtgatgcggagagaagaccattggagctgaggcggctgctgctctcgggggaggtgttggcgctccggtcaggggaggggtctggctgggaggtggaagcaggccgggtggccttccccctcaggatgtcgatgaccctgcggctgcgcgccaccatgagcggcgtgtcgttgtggcagttcttgaggctgctgtcagcgccgctgcggaccagcgtgcgcaccagcgggaggagcccgcggccggacgctgagtgcagggcggagctgccggagtacatttgcgcgttcacgttggcgccgtgctgcagcagcagctgcaccatgctaaggctgttgttttccacggcgtggatgagcggggagcggccgctcttaatgtcctgcggcggggagggaaggtcttagtttctcccaagctctgctccagcagccggcgac

SEQ ID NO: 151174 - DNA, 1029 bp, Homo Sapiens
ccatcaatctgctctgacaaccctgaggtttgctgacttcgcattgacctcgggctaactcttgcttcttgagttgatcttcgaaaaacagtaactgctccgatttctagctgctgctggcgcatctgagcaatcccgcttcctttctgcctctatcaatctctgatgctccaattttttgagaatttcagctttatatttgtttttgctttgcaaatattcttggtattctacgttatatttctttaaaaggtcgtttttcaattcatctgtccttgggaatgcaatctccttcagtttcttcataatatcctgcttttcaggtactgcacattgctggtaatctcgatggttaggaagcttttctacaaataaggttataaatttattataaagaacaaaggcattttccaaatttccttcttccaaatacacagacgccatcctctccatctctactccagacctaaagtaacgtcgtggagtgatgtcttcactgatggtgatattacaaccaagcttgcttagggcacggactcgctcttctgggcttagggaaacatctgtatggtcaggcatagcagctaactttttcagagaattcacagtaaaaggctgatccatgttgtcttatctgtgaaatgaggatgttcactgtttcttctcaatcacttcattagcaacccttggtgtccgcagcccgtgtgggacggcgactgcgacggctgcccccgtggctgccgtgtggccttggcatccgtccggctgctgcaacccgggccgcggtggcttttgctggaaggcgttgcagcggggtgataccggcacccggcgacgaggcgtccgctcgtttgcctcggccgtgcctcctcccccttctcctctgccgacagatggagctttgctggttccagtcgcgcgggctccgtgcgtcgttctcctcctcgctgtcggacaccccagcgcagggacgaacagcgtcctcgcaagcccacgcgcaggccggccgaccccgaacctgcagcaacc

SEQ ID NO: 151175 - DNA, 825 bp, Homo Sapiens
cgggtgcagcttaaagtggggccgttagcccttcgtagacttgggcccatgagggcctgggaatatcgggagtgcccaagcccccagagcatggcccacttcattggctgcaatgatgcgcaggttcaccccacggtaggtcccctcagtccagaactcgtcttcgtcgaagtgcacactgcccagctctgggatgtcggcatgggccaggactctcccaggcccatcaaaagtattggaacagtacgagctttggcggccatggaaggagaggcggatgtcagccgcaccagcctgcacctcttggaaggtcaagggagccacattgctccagtcctggaaggcttgacgcagggctgcccgggctgtgtggggtggaagggtggagggcaggttcaagatgcggaaagtcaggtgcttctttctccagcggcccagcaacaggtatttaagggtcttctggttgaagggatcctctaggccacaacgaggctgcctcatgcgggcccttgtggcatcatccagctgacctgagactggaagttcagatgcttcctgaaaagctctcagagcctcggtgatatcttctggcttgaagttattagatccttctagaggcttctgtaggtacccatattgtgacaggtagtccacgggcgccacctctgcaagccccaggacccggcctgagactgtcatggggagtaggaagcccagccacagctgctggcagttcatggtcccaccagacgagagctccagagcctgtccgtgcctctgacctgagatttctgggagccttgggggagcagtgctaggcagagg

SEQ ID NO: 151176 - DNA, 702 bp, Homo Sapiens
cccaccttgaaagcataggtcttcccacggggccccagcatcatggcatccagttcactactgcaagggtctggcatgggactgggttctgtgggcactgggggcacagtgggcagctctgtctcttcttcttcctcatcccttatcactggactcttcttgccatagagagcctggatccctgccacatcatctgggtgcagcttaaagtggggccggtagccctcgtagactggggccatgagggcctgggaatatcgggagtgccacaagccccagagcatggcccacttcatgggctgcaatgatgcgcaggttcaccccacggtaggtcccctcagtccagaactcgtcttcgtcgaagtgcacactgcccagctctgggatgtcggcatgggccaggactctccctcagagcctcggtgatatcttctggcttgaagttattagatccttctagaggcttctgtaggtacccatattgtgacaggtagtccacgggcgccacctctgcaagccccaggacccggcctgagactgtcatggggagtaggaagcccagccacagctgctggcagttcatggtcccaccagacgagagctccagaggctgtccgtgcctctgacctgagatttctgggagccttgggggagcagtgctaggcagaggggctcttacccccagttctttttactctccag

SEQ ID NO: 151177 - DNA, 1431 bp, Homo Sapiens
  misc_feature (92)..(92): n is a, c, g, or t
ggcggagtgtggagcgagcggcagcgggagcagcggggacagtctggacaagagcatcacgctgcccccccgacgagatcttccgcaacctnggagaacgccaagcgcttcgccatcgacataggcgggtcgttaaccaagctggcctactattcaacggtacagcacaaagtcgccaaggtgcggtctttcgaccactccggacaaggacacagaacgtgaacatgagccgccctatgagatttcagttcaagaagagatcactgctcgactgcacttcattaagtttgagaatacctacatcgaagcctgcctggacttcatcaaagaccatctcgtcaacacagagaccaaggtcatccaggcgaccgggggcggggcctacaagttcaaggacctcatcgaagagaagctgcggctgaaagtcgacaaggaggacgtgatgacgtgcctgattaaggggtgcaacttcgtgctcaagaacatcccccatgaggccttcgtgtaccagaaggattccgaccctgagttccggttccagaccaaccacccccacattttcccctatcttcttgtcaatatcggctctggagtctccatcgtgaaggtggagacggaggacaggttcgagtgggtcggcggcagctccattggaggcggcaccttctgggggcttggcgctctgctcaccaaaacgaagaagtttgacgagctcctgcacctggcctcgagggggccagcacagcaatgtggacatgctggtgcgggacgtctacggcggcgcccaccagactctcgggctgagcgggaacctcatcgccagcagcttcgggaagtcggccaccgccgaccaagagttctccaaagaagacatggcgaagagcctgctgcacatgatcagcaacgacattgggcagctggcctgcctccacgcacggctgcacagcctggaccgcgtgtactttggaggcttctttatccggggccaccccgtgaccatgcgcaccatcacctatagcatcaacttcttctccaagggggaagtgcaggcgctgtttctgaggcacgaaggctacctgggagccatcggagcgttcctgaaaggagctgagcaggacaatcctaacccagtacagctggggagagaactatgcaggcagctcccgggctgatgagtgcatcacccgaagctcggtcccggcgcagcggggcgcgggagtgggaaactttttggaccttggctcggaaaattggaacccggacctgggtaccaagggccccacatggggtttgggacacctggccccggcactccccttcccctggggaaacccgccggcccctctccccttaaacggtgttgaccccctgcaaaaccaccgggggaggggggcaacaccctcttccaaccccccccaattggtaatcagt

SEQ ID NO: 151178 - DNA, 1148 bp, Homo Sapiens
caaataaaaacataatataaataccagcacaacacaaatccctccgtaagaagagtggggggccggaattttcgggatgcggaggcagagaccgaggctgcaccggcagaggctgcggggcggacgcgcgggccggcgcagccatggtgaagattagcttccagcccgccgtggctggcatcaagggcgacaaggctgacaaggcgtcggcgtcggcccctgcgccggcctcggccaccgagatcctgctgacgccggctagggaggagcagcccccacaacatcgatccaagagggggggctcagtgggcggcgtgtgctacctgtcgatgggcatggtcgtgctgctcatgggcctcgtgttcgcctctgtctacatctacagatacttcttccttgcgcagctggcccgagataacttcttccgctgtggtgtgctgtatgaggactccctgtcctcccaggtccggactcagatggagctggaagaggatgtgaaaatctacctcgacgagaactacgagcgcatcaacgtgcctgtgccccagtttggcggcggtgaccctgcagacatcatccatgacttccagcggggtctgactgcgtaccatgatatctccctggacaagtgctatgtcatcgaactcaacaccaccattgtgctgccccctcgcaacttctgggagctcctcatgaacgtgaagagggggacctacctgccgcagacgtacatcatccaggaggagatggtggtcacggagcatgtcagtgacaaggaggccctggggtccttcatctaccacctgtgcaacgggaaagacacctaccggctccggcgccgggcaacgcggaggcggattcaacaagcgtggggccagaactgaatgcatccgccagttgaggaacacgcttcgatggcttggacaacggctcaaatatgcaggggaatgctgctgacgggcacatccatcgcgaagacaaacacccctaggagaggatacgtcagtaggttcatgcgcggcggggccctactgaggacaaccatcacgctcaccgtgcgtataggtagtcagatatgggagcagccgagtataactaaaggcgaggcagcgtcaacgacccagtgtcagtctccacacgctgagcat

SEQ ID NO: 151179 - DNA, 1017 bp, Homo Sapiens
  misc_feature (265)..(304): n is a, c, g, or t
tcccccaaaggcccccccctcaaaaacaaggggtttcttccccaagggtcccctcccaagggggccaaggtttccccacccttgcctggttatttcggccccccagtaattccgggccccctgggcccgggaatgccgggccggccagggcccagaaacccccggcggcagcaacagtggggtctgccacagtcaagggtcccgtgccctcccaggtagtcatgatcccagtgcaggtcagtgaggaagaggatgcggctgacannnnnnnnnnnnnnnnnnnnnnnnnnnnnnnnnnnnnnnnggctttcggcacagtaggcaaagagatgttccaagatgagaaaatgtcccagtgcccacaggtggagcccaggagcaggccacaggcctcagatgggctcagcactgagcgtctccacacctccaccatgtcatcctcaaagaggtggacaatggattggcacacggcaggtggtgctatcttcagcagattgcacagcttgatggccacggagcccacgcgagccacattgggttccttcttcagcccgaggttgatggcggtgaatagacctttgcagattgggcaggtgaggttcccccacccaaagacatctcggagccggggcactatgcgatgtaacctggcaggatggccttggggagaaagagggtgagcctctgccggagcccagagaacccgagagtcagacagagccagcgccagcgccagcgccagcgccagcaccaggcccatccaaaggagtccgggggctccggcggtcccgtcttgtccctgctcccggccggacctggggcagctctggcggagtgacgctccgtagcggggcattgtcgcgcttcctacacggggctggttcgtctgtcccgtcccccccggcctggaccctagccagccctcagggccccgggcggcgccggggacacccgattacccttctctgtagtcggctgactgctccgcgccgtccgcaaagcagctccgccccttcc

SEQ ID NO: 151180 - DNA, 1468 bp, Homo Sapiens
tatgatggaggaagggatgaaaaaaggggaagagaatggcttccagccaacctgcggagtttgccccccggtgcttttcctgtaccaggctccgagacatagagcaactcacggggaagcactggaagatgcctccgataaggttactgaggcccagggccaccagcttcctggttgctgtccacccggtagccgtgcctcagggcgaagatcttccccagtgagatggcaatggcaaacccaaccacagcgatggtgaaggcgctgcccacgagctttgagaacagctgggtgttgggggccactgggggcaccagccctgcagggatgttgcccacgacatctacctcaaatctgtgctttagacccatgccataggagatgcctgtggccccgatgagcgtgagcagctccccgggtatcggcatgggcagctgctgctgcagcttgtcattcaacagcttcaccaccacgagcaccaccccagccacagctgcagtgaccacggtgccaaccttgctctggggcagcttccagcagacctccagcactgtatagatgagggacagtggcccagagtggctgctcagatggaggccaaacacatacttgagctgtgagacgaagacctgcacagctgcagctgtggtatagcctcggacaagaggttctgacaggtaggtgaccatgaagccgaagtggatcaggcccagccccacctggaagaggccaaccaggacactgagtgtggaggccacctgtacccgggcagcatctctggctgtctcattgatcatggagtcgttcaaggcctgcggggccagggattctgtcacactgcccaccatcacagacatgacagcaaaggtccccacggagatgtgccgggaagtgccaaacaggaagtagatgaagacagggtagaaggagctatagaggccaaacacggggggcaatccagccaggagggcgtaggccaagcctaggggtagaatggtagcagtgcaggcctggagagcagatcctgcggaagctgcatgatggccacactcaggccggataacaggtcacccaggagccagtcacgcacaggataccggggtaaccagaccaaaaccgggaggtgttggagcagaagggcataggcccgagcacgggagcactgcaaccaggtccgccactggtgggtcctaggtgctgagccccagcgccccagctcctccaaatgctcctggttcagcagcggccgttccatgtggtagtctcgcctccgcaggtccattgcttgtgttgcagacagcagtgcctgtgtgtccctcggtctgatttttccaggccctaagatcaaggtacagtattccagcccccagctggcatctgtgggccacatgtccaaactcagacaggggcagtacctgaactttggctggtgcctcgtgccgaattcgccacccaggcctcgctcttt

SEQ ID NO: 151181 - DNA, 846 bp, Homo Sapiens
  misc_feature (317)..(361): n is a, c, g, or t
  misc_feature (704)..(704): n is a, c, g, or t
  misc_feature (789)..(789): n is a, c, g, or t
cgcaatttgggctggacgaaaaagacggtcttgctttcccggtcgccgctgtcgggaagggctgcagggtgtccgcgagacccgcggcccggcgagctgaccccgcctcgcctttcctgcctagccctcattccacggagccggtcgcgcccggtccttgcgcgacgcttcccggcccaggccgcctggtctggcgctggaggccggagtcccgcggcctgtgctggatccgcgcacacccagtggcggcggatgggcggccggggcggccggtcctgagcgcggcccgggctgtcagacagggtctcactctgtgnnnnnnnnnnnnnnnnnnnnnnnnnnnnnnnnnnnnnnnnnnnnngctgcctggagctcctgggctcaagtgatccttccacctcggccccaccgagtagctgagactacagggctggctgctggcgggatggacaccctggaggaggtgacttgggccaatgggagcacagcgctacccccacccctggcaccaaacatcagtgtgcctcatcgctgcctgctgctgctctacgaagacattggcacctccagggtccggtactgggacctcttgctgctcatccccaatgtgctcttcctcatcttcctgctctggaagcttccatctgctcgggcgaagatccgcatcacctccagccccatttttatcaccttctacatcctgntgtttgtggtggcgctggtgggcattgcccggggcgtggtatccatgacggtgagcacctcgaacgctgcaactgttgctgatangatcctgtgggagatcaccgcttcttcctgctggccatcgagctgagtgtgatcatc

SEQ ID NO: 151182 - DNA, 1283 bp, Homo Sapiens
ggactctgggactctgggacttgtgggactgtggccgttttcgcaatttgggctggacgaaaaagacggtcttgctttcccggtcgccgctgtcgggaagggctgcagggtgtccgcgagacccgcggcccggcgagctgaccccgcctcgcctttcctgcctagccctcattccacggagccggtcgcgcccggtccttgcgcgacgcttcccggcccaggccgcctggtctggcgctggaggccggagtcccgcggcctgtgctggatccgcgcacacccagtggcggcggatgggcggccggggcggccggggcggccggtcctgagcgcggcccgggctgtcagggctggctgctggcgggatggacaccctggaggaggtgacttgggccaatgggagcacagcgctacccccacccctggcaccaaacatcagtgtgcctcatcgctgcctgctgctgctctacgaagacattggcacctccagggtccggtactgggacctcttgctgctcatccccaatgtgctcttcctcatcttcctgctctggaagcttccatctgctcgggcgaagatccgcatcacctccagccccatttttatcaccttctacatcctggtgtttgtggtggcgctggtgggcattgcccgggccgtggtatccatgacggtgagcacctcgaacgctgcaactgttgctgataagatcctgtgggagatcacccgcttcttcctgctggccatcgagctgagtgtgatcatcctggggcctggccctttggccacctggagagtaagtccagcatcaagcgggtgctggccatcaccacagtgctgtccctggcctactctgtcacccaggggaccctggagatcctgtaccctgatgcccatctctcagctgaggactttaatatctatggccatgggggccgccagttctggctggtcagctcctgcttcttcttcctggtgaggttcaggctggggcagctggggtggctggggccttagggccaggtagggattggattcctgggtttctggctgtgggtctgggctggcgcccccagcaccttctcagccctgcctgtctctgtaggtctactctctggtggtcatccttcccaagaacccgcgtgaaggagcgcatctccctgcttgtgagcaactggccggcggtctgggaccaggcggggatgggaaaggagtctaaccggccatgtaaaactggttagctgggagctggagtgtaaaattccaggtggaactgaaaccg

SEQ ID NO: 151183 - DNA, 1262 bp, Homo Sapiens
ggcccccggcaggggtccaccaacgcccgctccctgccccgtccatacgaaagggggggattgcccccccattcgtggagggggaggggtccatggcagggggcttgttgcgcggcaagcccccaaaacccgtagctaccaggttgctgggaaagggccttcccccagttcaccccttccgggagggcctgggtctgcggaggaaccggggcttaggggggtctccgagggttagagtgctccaggctcgggtggggaggaggaagatgtgttcggggtgctgagggcctcctgcgttgggcccagagggccaggctgcggccactgccaggtgggcagctcatctctctggcagcagcacgaagaaggcagccttcaggaagcggccgaagctgcagagtgcagccaccagccagtgggagcggaggccagggtctgtgctgaccacacacttgaggacatcagtccatccgccgcgtctccgcagccaggttgccagggtcttgcgcacgaactcccccaggcagtccacgagggcgtggaccatggcaggctgggcctgcctcacacagtccacggccagccccgcggccaccgcatacagggacaccaccttgccccacgtgatgcctgcagagaagatgtggccagccacggccaggaacgcatcggtcaccacaggctcagactgcagggagatgtgcagctgacgcgccacgttgcggtagacgctgggccggatcatctccagctcatcgcccaggcgcagcagcaccgcgcacacctcagccaggcgtcccgggaccggcgcggcacgctcgggcgcgctccaggagaggccggcgcgcagcagccgcgcgtgcacgtactcccggcccagcgccttggcctgggccaccagctccttgtctgtgggcgagcggtcaaaggcgtccatgatctcggcggcgaagaccgaggagcgccgcagcacctccatggcggcgacgcgggtggggggcgccgcacctctcccgccgcatggcgcgggcgccggggtggagttctggcttcaggatctgctcgccgccgacgacgacctcgacccttccattcagacccgcgaggacgcgcgccccgccccggcgcccgccccgtccacgcccgagccgggagcgccaggtccacggggcttcccgcgctcttggggggctcctgccgcggcgtcgggggcctgggcagcgaggtgggcagcgcgcgactcccagctggcgagaggctgg

SEQ ID NO: 151184 - DNA, 742 bp, Homo Sapiens
  misc_feature (17)..(17): n is a, c, g, or t
  misc_feature (323)..(323): n is a, c, g, or t
accacagtaacagtaanctgctgtcggtgctcagatgtccagcatccaagtccagccccttcagtccatatggcagagaaagcttcatacccagcatggcccgggcatagggcccttcttcagggcacctcccctcttggtggcgatcgcaaagacacactggcggcatacccaggatgtgccctctccctctcccagggggtggagccctgggaacatggcagtcctggtgataagcatggcgacacttctcacagctgaccagccggttcccagggaccacagtctcagagcgacagacacaacagaggagttcctctccnagggagggcagcagggctaatgtctttccatagaaccagaaactgcgaatcatcctcaaactggaccagacacacctccctagcactgtccacctttttgatggtacccaagtatagcagcccatcagtccatctggccagcacatcttgaccctcccaaagccgaggcctggggccagaggtgggagcaggagaagctgggtcccaaagtgaggaggcaccagagcggctcagccgggggggctgcgccattgcatcctgggggggccggtgacagctggggccgccgggagccgggcaggggcagacgtaggagacctaggcgagtcccccgcgcggagagggcacgtccgggcgtgggggggcgtgcaggcggaggccggggggtccccaggcccagcccctccgtcccggcggct

SEQ ID NO: 151185 - DNA, 1350 bp, Homo Sapiens
  misc_feature (40)..(40): n is a, c, g, or t
ttccctgggttgccgagggccatggagtcgtagatgagtntgcaggtcttgagcaggatggagatcttcttctcaggtgagtaggccttgtgcatgctggtgaacttctgcaggatcttctccatcatgggcacctccggcacgctggtggtcacacctaggtcagtggtggtggtggccaggatcactaactggttctccttgagctgctgcagcgaaccatccttgctgtggatctgatgcaggcatgagttgatggcttcctttcaggggcttcaggacacatttgtacaaggcagactctacaattgctttcgagcttcctcccttccggagtgcagggcggggtccaccagggccttgagctcggtgctctgcagcaggtagctcttgagctgggtcatcatggtgcgaatctcctgcagcatctccgtgctggaggtctggcgcgccatcatctccaggctgtacaccttgtagtcctgcaccaggctgccaaagtacgagcccttgtcctgcgccagctccaccaccttcttgtacagcttgcggttgttggagaggaaagcgtggaacatgctgctgaaactggcaaagctcagccggtgccgagccttgcccaggatcatggagggcttcttcttcacgctggggctgctgaactgctccagctcctcctccgtgctgctggtggagtaggagtcctggtcggtggccatgacagacacccccaagctgtctgagagggaggccagggagcccttgaactctggagagctctgggaatgggcagtggcctgggcaggagggtgctgagtcccagcctgagaagcagggctttggccctctctgggtggacccggcgtgggttgtctccaaggccatcgcctgtgtgcagagctcagcgttctctaagggagctgggagggtcgaggccagttgtcgagagatccgttttttcctggggggcgggactgggggttgtttggctgtcctgggcagctctggcatgctgtgaggatcgctggctttcacctctgtgtcctggccttgctccgtgctctcccggggcgtgtcctcagggccgtctgaggtcccttggggaggcaggctgagctggtccccctctgccgccatccccggactttggtcttctaaggacaccctctcggaaacgcggcgtctgggaggggcagtgggaaggttcttcttcgcaggcagtggcggggcggggacctgctgcaagggactggaggctgccctggcttcatcgcttcctccctgagggggcccaggcctgcagtggggcatgggagtctctcgcaggtcatcatgggcggctggttcgat

SEQ ID NO: 151186 - DNA, 570 bp, Homo Sapiens
  misc_feature (29)..(29): n is a, c, g, or t
caagtgatggagatcttccccctcacctntggggagaagccggcactcaggtccgtgtacctccacaacaaccagctgagcaacgctggcctgccccccgacgccttccgcggctccgaggccatcgccaccctcagcctctccaacaaccagctcagctacctgccgcccagcctgccgccctcactcgagcggctccacctgcagaacaatctcatctccaaggtgccccgaggagccctgagccgccagactcaactccgtgagctctacctccagcacaaccagctgacagacagtggcctggatgccaccaccttcagcaagctgcatagccttgaatacctggatctctcccacaaccagctgaccacagtgcccgccggcctgccccggaccctggctatcctgcacctgggccgcaaccgcatccggcaggtggaggcggctcggctgcacggggcgcgtggtctgcgctatttgttgctgcagcacaaccagctggggagctcagggctgcccgccggggctctgcggccgctgcgggggctgcacacgctgcacctctat

SEQ ID NO: 151187 - DNA, 792 bp, Homo Sapiens
  misc_feature (14)..(14): n is a, c, g, or t
caagacattcctgnccatcctcttattatctgggctgtagagaagaaactcccgagagaggctgagggcacacgaaacatttcctgcccggaaataagcaaaggccaagtgatccaaggcatcttctagacttgcctcatactctgtcttccactctccgtaagatcctcggaagagactgacagcctcctccagccatggaatggcatggtaataatcccccatgtcataggccaccttgccaacttggaagcagtcatcccctgtgagagaaaagagccgtttggggctgtacaggtcagtgatggcagagccagtgactctctgaaagacacctcgggccaggcctttcacattgagcatgtacacgtcctgcagccgcatcagggcccttgctgctccctcaaggtcctcaaaggctggaaggtcttgctccaccttctcatagccatccttcagagctcggatgttctcactggcctccagactatgtaccacattcctccagtcagactgcaggcgtttgatgagagtaaatgcaagcagagggttagccacaggggttgttgaatcctcatgcaaagaaagtaccttgtcgtagaatctagtcaggtcccgcagccgcgcctcctccccgcgcaggtaccgcctcagcagccccagcagccggcgctcgggcgccagggcgcgcgccacgctggtcagcgccgagaacgtgtcgccccgagccgcagccctttctgggtctcctgtcccgagcgccagcaccgccagcagcgccgccagccgcgc

SEQ ID NO: 151188 - DNA, 1111 bp, Homo Sapiens
  misc_feature (87)..(87): n is a, c, g, or t
  misc_feature (105)..(105): n is a, c, g, or t
  misc_feature (207)..(207): n is a, c, g, or t
aaagaaaagaaaagttcccctggggggttgtctgggttgaaacacaggttttccaggccccccttgggtggggggtgggggttaagnaaagcagcccccttggangatggggggccttcccgggcacggggccttgcctgcgccttccttctctgaggcttgcccacctgggggcttgcaatcccttcctgaggggtccagccggtngcctggagttctcagtcagccctttggggctctggggactctctgggaggtgaccagctggggacgcctggggctctgccccatggcggcagccctccttctggcactgcaaggcctccaccttgctcacctgggccaggagtttctttttggcccgtggtgacatgattgccgtgtgtccccttgcagtagaagctggataggagccgcttgtaggcttcaggacagccgctggcacccacaaaggacccagaagacccagaggccaggccctgctgttctgtgctgttcctggggggctcctggctgggaagtggtgctgggtcagcagcatctgctttggtctttcctggcatcatctggtccatgcgccgctcctccttggccttcttcggcctctcggtggccccatcatcccccctgttctccttagccatcttgtactgtttcctgggcttggaggtgggcagcggcttgtcatcctcccccttcaggtgccgcacgtatggcaggaccagcctctcgtagtggcggcgcgtgcacgtggccgcgctggtgctgcctgggctgccccccagctcgtcgtacacgttcttccagaggcggcgcccggtcaccagctcataggcccccagcttctccactgctttgtagatcttccacaggttaactccagcgagatggggttctggattccgttctgcttgccagcaggtttgggggatgcaggtgggtctagggcgtcaccctccgtggactgcttcctgttccctttgacaggggctgccatggcccggagaggtcccgcggcgcccgccccgagaccctcagcgcgcggctgtccggaccccgcgctctctgagatactggctcgcggcgcggcccgccggcccctgtgccgaat

SEQ ID NO: 151189 - DNA, 694 bp, Homo Sapiens
gaatggtgctgggtcagcagcatctgctttggtctttcctggcatcatctggtccatgcgccgctcctccttggccttcttcggcctctcggtggccccatcatcccacctgttctccttagccatcttgtactgtttcctgggcttggaggtgggcagcggcttgtcatcctcccccttcaggtgccgcacgtatggcaggaccagcctctcgtagtgcggcgcgtgcacgtggccgcgctggtgctgcctgggctgccccccagctcgtcgtacacgttcttccagaggcggcgcccggtcaccagctcataggcccccagcttctccaactgctttgtagatcttccacaggttaatcgtgcttgaagccgagatggggcaccctgctgcgatgggcgtgtgtcgctcacttcatgaacttgtagagtcaatgaccaggaaggcagtgctcctcctcccgctcctgctcctcctcccgctgcccccgcctgcctcgggggagtcctccagcgagatggggttctggattccgttctgcgttgccagcaggtctgggggatgcaggtgggtctagggcgtcaccctctcgtggactgcttcctgttccctttgacaggggctgccatgggcccggagaggtcccgcggcgcaccgccccgagaccctcagcgcgcggctgtccgggaccccg

SEQ ID NO: 151190 - DNA, 1018 bp, Homo Sapiens
  misc_feature (83)..(85): n is a, c, g, or t
  misc_feature (88)..(88): n is a, c, g, or t
  misc_feature (119)..(119): n is a, c, g, or t
  misc_feature (758)..(794): n is a, c, g, or t
caggccccttggggggcctcgggggacttctctgggaagggtggaacagctgggggacggcctgggggctctgcccccatggnnnggncagccctcctccttggccactgcaaggcctnccacttgtctcacctgggccaggagcttctttttggccaagtggtgacatgatgccgtgtgtccccttgcagtagaagctggataggagccgcttgtaggcctcaggacagccgctggcacccacaaaggacacagaagacccagaggccaggccctgctgttctgtgctgttcctggggggctcctggctgggaagtggtgctgggtcagcagcatctgctttggtctttcctggcatcatctggtccatgcgccgctcctccttggccttcttcggcctctcggtggccccatcatcccccctgttctccttagccatcttgtactgtttcctgggcttggaggtgggcagcggcttgtcatcctcccccttcaggtgccgcacgtatggcaggaccagcctctcgtagtggcggcgcgtgcacgtggccgcgctggtgctgcctgggctgccccccagctcgtcgtacacgttcttccagaggcggcgcccggtcaccagctcataggcccccagcttctccactgctttgtagatcttccacaggttaatctgcttgaagccgagatggggcaccctctcgatgggcgtgtgtcgctccttcatgaacttgtagaggctgaccaggaaggcctgnnnnnnnnnnnnnnnnnnnnnnnnnnnnnnnnnnnnncctgcctcgggggagtcctccagcgagatggggttctggattccgttctgcttgccagcaggtttgggggatgcaggtgggtctagggcgtcaccctccgtggactgcttcctgttccctttgacaggggctgccatggcccggagaggtcccgcggcgcccgccccgagaccctcagcgcgcggctgtccggaccccgatcccgggaattccggaccggtcca

SEQ ID NO: 151191 - DNA, 963 bp, Homo Sapiens
  misc_feature (314)..(314): n is a, c, g, or t
ctgtctcaaggagctttggggtctcgtgcagcgagattctggtcagccttgcacctgctccaggctataatggtagagaagggcccccctcatataccctcggtctcgcaggagacctccaggcgattgctgctgaaggagggagtagacccttctccaaatggaagctggcggtacttgtcagtccgagagaaggccacaaagtttttgaggatataggtgtccagttgctcagtcaggcggctcaagtcaaacagctctgccagccggtagacatcgagaatgttctcttcgtccacccaggacatgagganaatcacagcagaaatggataatttctcgggatctgaagctggcaggcagccaccagtgtctcttgtaaccttgctcaggacttgagctgccatgctccggacgcgtagtatacttgtacaatagtgacgagattcttcggcatcattagcattctgtaggaatcagcatcaccgatcggactacaaggaccgtcgttcctcagttgccgactcctcgactctcaagatcgctccccacagcagcactagttcgctcgtgaaagtgagactcagcatggacaccgcagaccagcatgcgaatcgcgactagaggacctctgaatgtagtatgctccgtccagccatccagcagcaatcactgcgaatgagtgattgcctgctgatcccgtgagatgccagacatgccctacggagcagagccatggagagtgctgtgcgctccggtagctgttgttcaccacagtgtgggtttgaggcctggtgcaggcaacttgcagagactgggagaacgtcctgcgtgcctccgccatcctgacagccacaagatcgccttacaaactgaaggccagaggccgccgccagccgaggccgcacatcgcagtctggagggaggcgggaggcgggaggccgcgaggcgggaggctgggcg

SEQ ID NO: 151192 - DNA, 855 bp, Homo Sapiens
  misc_feature (727)..(810): n is a, c, g, or t
aggatggagatggagctgcgcgcacccttcctgtggagggagatgtagtccagccgcacgcccgcctccccagtgaagaagttggtaccgtcgtggcagtggcgcaggaggccccagctcagcggggatcgcggtggggtgtggaaggagtcgccggggcctcccagccgcagggcggggctggcggcgcgcagaccctccgagcaggcatcgtagtagttcaggaagccttgcatggtcatggagacgttgtcaaagtcgtggtggtctggctcattccacgtctcgaagttccacttggaaacatgcgccagtccgtacctaccgatgtatctcctggccaggctggagaccaagtccttccactcaaacacctgctgcttgtcctcaaagtcagtgaagtggcccgaggcgctgcccatcagctcaaaccctgggaggagctggttctccctgagaaggtccaggtacccgtccaggtgggtgaagttgtagctcaggccccgtccagtggaccccctggtggtgacaagctccagcagccagtgggtccggacctgcttgatgccgcggtgagggacggcgcccacataggcgaggttgagctgctggtcccagctgaggacgtactggtcagcctggctgtgtggcagcggggggcagaagcctgtgctcctccagaagcgccgcaggggccacagcgcgcgggccgcgtccacctgcaccnnnnnnnnnnnnnnnnnnnnnnnnnnnnnnnnnnnnnnnnnnnnnnnnnnnnnnnnnnnnnnnnnnnnnnnnnnnnnnnnnnnnggacgcatggccacgcgatcccgggaattccggacccggtaccac

SEQ ID NO: 151193 - DNA, 667 bp, Homo Sapiens
cggcgagtggcgcccaccatctctgcttgctgaaaagctgcagaggccgccaggagcccacgcacctggagacttttacctttacccagaaaggaataaaagaggtcagatgatgacagctgtgtccttaacaaccaggccccaggaatcagtggcttttgaggacgtggctgtgtacttcactacgaaggaatgggccatcatggtgcctgccgagagggccttgtacagggatgtgatgctggagaactatgaggctgtggcctttgtagtgccacccacttccaaaccagctttggtctctcatctggagcaagggaaagagtcctgtttcacccagccacagggagtcctaagcaggaatgactggagagcaggctggataggcgtcttggctccggagaaagctgcgtggcaagaggcggccagtgatagcgttctgcctcttgatgatcctatctgcgatggctgtcacccgctttcccccacagcgtccatccgccggcccagaccctggtcccatggagcctcagggggtaactggcgcccctgcaacccatatccggcaggctttgagctccagccggaggcagcgggcaagaaacatgggcttctggagaagccgtgctttgcgcaggaactccatcttggtctgtgctgaggagca

SEQ ID NO: 151194 - DNA, 1155 bp, Homo Sapiens
gtgggaacaacgcacttgtcactcggctccgttccgtctccagtgtggcctggggacgtatcagtggctgcagcaggaaattggtggcgacatttgaggtcattgtttgaagctctcagggcttccaaagcatcacctctggaaaatcccatctccatgagccgggcgacctgttcctcagaaaacttctagaggggcgctgctggctcagactgccgacccgccctgatagtttacgtttgtcgctgacgtaaaggaggaaaaagacgattccaattgatcattcctccctgctgctgtctctgtcgcctcccttgtgcaaactgagagaacatcagctgccggtccagcagctccattctctgctgtctctggatgtccagcgtggctcccatcccaattctggcttcgctggtgggttctgaagaagagaagatgggttcaagtgtccaagaaaagaattttgccatccagctggggatgcagagcacctgatgcacctggaacattttgctgtcgtagcacagaccggacataagtccacttatggctacaatccagatgtaggaaccagaggtgaaaagctgcagtcccaatatataaatcaatgtcttgtttgtgatggacaacggacccagaatttgtgccacttggactcttggtatggagcagtaaaatggtacaaacagagcaaacacaggtgccaggaatccagaaggcaaattactagctgcagtgatgccaaagaaatactgcatagcttcaatgaggagaaagtcaaataaggctgacaaaacccaggaacccagcaaaaaggatgcaaattttctgcttccatatcttctttcaaatatcctaaaattataaataagcagactactgcagaaagtatctttcaaatcaaggcaaattattcttccacatatcaacctccaaatctggaagtcgttcttgactgcgtgaaggtcatacacaaagagcttctggcagtgaggcaggaggagggcgagcaggagggagagggcactggggaccagcagaaggctcttcgacagaggcgccttgtagagcccactggagccggtgctggtgaacatggtcccgccgggctcggagccccagagggcgccgggggaggggaagctgaagtgcgag

SEQ ID NO: 151195 - DNA, 869 bp, Homo Sapiens
  misc_feature (24)..(24): n is a, c, g, or t
  misc_feature (746)..(794): n is a, c, g, or t
gctcaggcgtcatgtaatcccacntgaataccaagttccaatcaaaaccgcccttcaagtcagcagatgcccccacatactgaaagttgtccatattaatgacatcgatgatgggtgacacaacccgagtcctgtcctccgccaccctttccaggaggggctccagccagtgctcattacactcgcagtgactgtccaggaaggtcaggaccttggcttgggcagcatcggccccccgaacccgtgagcgcatgaggccttctcgtcgatcatttctaagaactcgcactttctcaattttccccaagagagccccgtcctcaggatcattgctgtagtcatccaccaagatgatttcttttatgagatggggcgggcttttcttaagcacgctgaccacggtcctgagtagggccgacctggcttcattgtgaaacgtgatcaccacgctggtggccggcagatccacccgccactgcttccgctgacactggtcatgccgggtgtcagggatggctctgtccattcgaagcttatcactctccacctggttgaacttgttgcgggcgtaagggtcctgcccggagcggaccatcgtccctccaacataagcttcctggttaaagtctggccaccgtactttccctggagggagggtctccatgctttgtgctttctcttctccattgctgtgatgaaggtctttctttttaatggggtcaatttcattccagtcctccttcctnnnnnnnnnnnnnnnnnnnnnnnnnnnnnnnnnnnnnnnnnnnnnnnnntacatgtagtaggcgatgcccagcacccacaggaaggcgaagcagagcagcatccgcgagcgccgccgcattatc

SEQ ID NO: 151196 - DNA, 892 bp, Homo Sapiens
  misc_feature (68)..(100): n is a, c, g, or t
  misc_feature (843)..(843): n is a, c, g, or t
tttgaagaagaaggaccaagagaaaccagatgcttctttattattattactaattgagatggagtctnnnnnnnnnnnnnnnnnnnnnnnnnnnnnnnnnccttctcaaaccttgaacaaagtgatctggttcagattaacagctttaaataacaaggctaggccaatttccactttttaggaataagtgggaaagacactgtgggccttctagaacgttatagccttcctttaaggagatactacaggctactcaccccagggcccagctactcgaagaacagccaatggattggaacgtcctaggacagatgccacggctttgacccaggtctgggggtgcacggatctcactggggttagttggtcggaggggaaagccccatgggtccaccaggatgaggtgtttaactctatcagggtacttgattgagtaagaagtggccaggaatcctcccaaactgtgccccaggaggatcatgctggggatccccatggtctcccgccatgtctctatcgatgtcacaaactcatcctcagccccctccgggtcccttgggagtgctggccttgagcttcgcccgaagccaagcagatcgaaggtgtgcagtgtgcggcgggcactcagtgagtccatgttgaggatccagagacccacgccgcccccaaaaccatgcaccatcaccaagggggtgcggtcgttttgctcggggctcacagtcaccgtccagatcttattctggtttgggagggatacatatctggccaggaacttattctggagacactggaggatcctggcttccacattcttcagctgagacatggaagtggggcgccacngtgggcagccagctactcagccagccttgagactgctgctccagatcat

SEQ ID NO: 151197 - DNA, 671 bp, Homo Sapiens
  misc_feature (637)..(638): n is a, c, g, or t
tgcggctcagagcgggggggagactgaccggagcgcggatcgggacagcgggcgggacagcggcgagacgcgcgtgtgtgagcgcgccggaccaagcgggcccagaagcgggtctgcagcccagagggcaccttctgcaaacatgtctgtggatcccctatccagcaaagctctaaagatcaagcgagagctgagcgagaacacgccgcacctgtcggacgaggcgctgatggggctgtcggtgcgcgagctgaaccggcatctgcgcgggctctccgccgaggaggtgacacggctcaagcagcggcgccgcacactcaaaaaccgtggctacgccgccagctgccgcgtgaagcgcgtgtgccagaaggaggagctgcagaagcagaagtcggagctggagcgcgaggtggacaagctggcgcgcgagaacgccgccatgcgcctggagctcgacgcgctgcgcggcaagtgcgaggcgctgcagggcttcgcgcgctccgtggccgccgcccgcgggcccgccacgctcgtggcgccggccagcgtcatcaccatcgtcaagtccaccccgggctcggggtctggccccgcccacggcccggaccccgcccacgtgccgtgctcctgctcctanntgccgcccccgccatgcctcagccacgcccctc

SEQ ID NO: 151198 - DNA, 1529 bp, Homo Sapiens
cggatctcatcctgcccctgcatggactgaggaacgtcaaagccatcgactatgacccactggacaagttcatctactgggtggatgggcgccagaacatcaagcgagccaaggacgacgggacccagccctttgttttgacctctctgagccaaggccaaaacccagacaggcagccccacgacctcagcatcgacatctacagccggacactgttctggacgtgcgaggccaccaataccatcaacgtccacaggctgagcggggaagccatgggggtggtgctgcgtggggaccgcgacaagcccagggccatcgtcgtcaacgcggagcgagggtacctgtacttcaccaacatgcaggaccgggcagccaagatcgaacgcgcagccctggacggcaccgagcgcgaggtcctcttcaccaccggcctcatccgccctgtggccctggtggtagacaacacactgggcaagctgttctgggtggacgcggacctgaagcgcattgagagctgtgacctgtcaggggccaaccgcctgaccctggaggacgccaacatcgtgcagcctctgggcctgaccatccttggcaagcatctctactggatcgaccgccagcagcagatgatcgagcgtgtggagaagaccaccggggacaagcggactcgcatccagggccgtgtcgcccacctcactggcatccatgcagtggaggaagtcagcctggaggagttctcagcccacccatgtgcccgtgacaatggtgggctgctcccacatctgtattgccaagggtgatgggacaccacggtgctcatgcccagatccacctcgtggctcctgcagaacctgctgacctgtggagagccgcccacctgctccccggaccagtttgcatgtgccacaggggagatcgactgtatccccggggcctggcgctgtgacggctttcccgagtgcgatgaccaaagcgacgaggagggctgccccgtgtgctccgccgcccagttcccctgcgcgcggggtcagtgtgtggacctgcgcctgcgctgcgacggcgaggcagactgtcaggaccgctcagacgaggcggactgtgacgccatctgcctgcccaaccagttccggtgtgcgagcggccagtgtgtcctcatcaaacagcagtgcgactccttccccgactgtatcgaccgctccgacgagctcatgtgtgaaatcaccaagccgccctcatacgacagcccgggccacagcagtgccatcgggcccgtccttggaatcatcctcctctctctttcctcatgggtggtggcctattttagtgggccagcccctgggggtgccaccgctatgcggggggaccacgggggcccttcccccgcacaaagtattttcaaccgggaaccccccaccgtgccccctcaatttcataacaccccgggcggatttccaaacatggtcccctttcaaacggcctttcccaggtaagaaattccttgaatcaacccccgttgacccaggagaggg

SEQ ID NO: 151199 - DNA, 901 bp, Homo Sapiens
  misc_feature (871)..(873): n is a, c, g, or t
tcccgggatcgctgccgccggggacgcgcaggcgcagcacccctgtttgtcggccccccgacgagaagaggtacggtcgaagccaggagccaggccgagcgggagctgaccaggcttgactcgggtacagaacgaggcaccagtccccttgcgaaccgaagggcctcgcagtggatggaggaggcccagccctgaggtcaacgccaaccaggctagcctggcacggggcctacagggtgggtaggcgggcgtgccgcagccgtccagggccttccctcaggtcccgggcgaggggcctacgctgcggcccggcaacaaggcccgactcggcccctcgggaccagagccccacccgatcggaagcggatcctttaccagggccataggccagtgactaggccgggcctgggcctcccatcggggccggactaggacgaggccccggggaggcccctggcctaccagacccttttctcaggccgacagccgccaggaagatgcaacgtgccctgccaggcgcccgccagcacttgggggccattctggccagcgccagcgtggtggtgaaggctctgtgtgcggcggtactattcctctacctgctctccttcgccgtggacacaggctgcctggcggtcaccccgggctacctctttcctcccaacttctggatctggaccctggccacccatgggctgatggagcagcatgtgtgggacgtggccatcagcctgacaacggtggtggtggccgggcgtttgctggagccctctggggggcttggagctgctcatcttcttctcagtggtgaatgtgtctgtagggctgctgggggccttcgctacctcctcacctacatggcttccttcannnctggtctactgttcactgtccgtatcac

SEQ ID NO: 151200 - DNA, 1771 bp, Homo Sapiens
  misc_feature (53)..(103): n is a, c, g, or t
  misc_feature (315)..(315): n is a, c, g, or t
gccgcggtggtggtgtggggtgtttttgtttccctgaggtagccatatttttnnnnnnnnnnnnnnnnnnnnnnnnnnnnnnnnnnnnnnnnnnnnnnnnnnntgcgtgttgtggggggacggcgccactttttcttcgcccccgttttatatagagccccttgggctcacccggtttttccatgtccctttaaatgaaaaatttaggggcacggcttctttttgcggggaaggggtgcccctttttctgggccgcgtgggccccgtgaggttaagaaaccccccccgttttctggccgcgggctccaggggggnggtgtgctttcccccctttgccacccagttttcttggggggaaagccccgcgcggcgggaaaaacatccttcggggggaaaaggtgtccagggggccccaccggaagggggaaagtcccccaggccacgcccgggaatcaaaaaggcctccaaggggttgcccccacccagtgaggccagggttccccagtttcggggtgggcggcccatcttgttaagggtctgggagattcttgttggggggaccagagttctggagtttctggcagctgctggaggcagggttcctgttggcattctccagggtctccaccttctcccacagttcattgttctcagatgtaaatgtctccaccttcttttctagacactccacatactccttcttcttacgacggctctcctgggctgagatcttgttcttgattttcctccggactctcttcaaggccttctcctcggctttggtgagggggagttttgtggggaatggggtagcccctcagcaatcagggttccgcttctcctccttctgtcaggagcagtggccctgatgtcccctgtaatttgtgaggggcagtgaggagtggggaggtggagatggcccgtggaggagcgcgccatgggcctgacagggctggaggggggcagagagcggggactctgggagccgtcgctgtcactgccatggctgctggggggcgtcggaggcatctgcaccaggtcctccggtgtcactttgaggaactggttcacctccagaggctctgctttgatcactggcagctgagtcatctctcccggggcctggtgggggatgggcagcctggacaaggggctgaggcccagcagcggggtggtggccatggcggccgcggcagccatggccgagggggcagccagagggtccacgggcagctccgggctctgctcctgcttcaccatgatggagcacagtttgtgtcccagcgcccatgctccatgctctgcatcttgggtggtgtcctccatcttgatgggcacaagggggctctggggcgctgagtcgccgctcagggagtagctgtgctccgcctggatgcctggcgtaggggagtccagttccatgtccaatagagggctcttctcatccagcacagggtcatcaaagaagctgctgaacaggtcattggagaagtcctccatgttctccgtaaagtggtccaggtgctcaggaaagtgcgcattgttgaggaagtccgactcgttcagatcccccaagtccaggaagctggatccggggaacagcctgtcggccgggaagggttccaagacggcgtccatcgcagccggctcccgggacccccttccactgggcttccctcactccagggcggcggcgcgcccagtccagagctcctgcctgagcgctggcaaaccctcgtgccgaaatcgccacccaggcctcgctaccttg

SEQ ID NO: 151201 - DNA, 1035 bp, Homo Sapiens
  misc_feature (79)..(206): n is a, c, g, or t
  misc_feature (612)..(650): n is a, c, g, or t
  misc_feature (821)..(821): n is a, c, g, or t
  misc_feature (973)..(973): n is a, c, g, or t
  misc_feature (1016)..(1016): n is a, c, g, or t
gctccccatggaagccagctgtgccccaggaggagcaggaggaggtggagtcggctgaatgcccacggtgcgcccgggnnnnnnnnnnnnnnnnnnnnnnnnnnnnnnnnnnnnnnnnnnnnnnnnnnnnnnnnnnnnnnnnnnnnnnnnnnnnnnnnnnnnnnnnnnnnnnnnnnnnnnnnnnnnnnnnnnnnnnnnnnnnnnnngtttgccagcgctcaggcaggagctctggactgggcgcgccgccgccctggagtgagggaagcccagtggaagggggtcccgggagccggctgcgatggacgccgtcttggaacccttcccggccgacaggctgttccccggatccagcttcctggacttgggggatctgaacgagtcggacttcctcaacaatgcgcactttcctgagcacctggaccactttacggagaacatgggaggacttcctccaatgacctgttcagcagcttctttgatgaccctgtgctggatgagaagagcccttctattggacctgggaactgggactccccctacggcccaggccatcccaggccggaaccacaagcttacctcccccgcaagccggcggaactccaacctggnnnnnnnnnnnnnnnnnnnnnnnnnnnnnnnnnnnnnnnagcaatggtgtaggggacaccccaccccccaaaggaatggcgaagaacgcattgggtcaaccccctggggccccgccttgagtggaacaccacaaaccgtgggtgggcctccacctctcgagtggcgagaaaggcccaggcaacccaagaaagcctccggggagagtcttnctccctgatgggaaaccccaccgcgggggaggatgggcacccgccaccgccgggatgaagaggggctatagcgcggaaggtggatgaatccaaccgatcgagaaacagcacgtcgcgcccccccgcgccgtctgctggacaaactcttcctntacagcacgagtcttaagagctcaccgaatggcctaccgcgcngcctaccgactacccctac

SEQ ID NO: 151202 - DNA, 1292 bp, Homo Sapiens
tgaggtttatgggctaccagtgagtggtttgtctgagaaaggacggatggatgttggtgggaaggagaatgagaacagagtggtcggccaagggaagagtccaaatgtcaggggcaaggaagggctgggaagtggagccttttctcctggaatgggaagctccaggaggcaggggcacgaggcggatccgggttagtgagcaagaactcctcttctgggtaccaggggtccgtcctatgtcctgggtcttggcatggcctaggagagtttgatggtggtgttggggcccagatccctgtcgtggaaccactccttggagtgggagaagtcggggctggtgcggtttccaccgtctttaggccagggctcactcaggtacttggtggtctcgtgggtgctgtccaggtgatcatgctgcaggtggtcccggggccgctgctctgccggccccccggggttgatttcccagccatctgggggctccatgggcagcagggtgctgcggccatcttccccataagcctgccccgtcatcgtagaataggaggcttcgggaggggcatctggctggccgtgtagacgccgtctgcggccagggggtcttccttcacagtctgggagccggaggagaactcgggaaggcagggcacgagggagcccagcaccagaacaaagcacaaggctgccaccatgaggcaggtcccagtctgggtggcggccatcttgtaaggtctggagatcttgttggtgaccagagtctggagtttctgcagctgctggagcagggtcctgttggcattctccagggtctccaccttcttccacagttcattgttctcagatgtaaatgtctccaccttcttttctagacactccacatactccttcttcttacgacggctctcctgggctgagatcttgttcttgattttcctccggactctcttcaaggccttctcctcggctttggtgagggggagttttgtggggatggggtagccctcagcaatcagggtccgcttctcctcctctgtcaggagcagtggccctgatgtcccctgtaatttgtgaggggcagtgaggagtggggaggtggagatggccgtggaggagcgcgccatgggcctgacagggctggaggggggcagagagcggggactctgggagccgtcgctgtcactgccatggctgctggggggcgtcggaggcatctgcaccaggtcctccggtgtcactttgaggaactggttcctcgtgccgaattcgccacccaggcctcgctccttaggacc

SEQ ID NO: 151203 - DNA, 1021 bp, Homo Sapiens
  misc_feature (585)..(585): n is a, c, g, or t
ggagcgaggcctgggtggcgaattcggcacgagggtttgccagcgctcaggcaggagctctggactgggcgcgccgccgccctggagtgagggaagcccagtggaagggggtcccgggagccggctgcgatggacgccgtcttggaacccttcccggccgacaggctgttccccggatccagcttcctggacttgggggatctgaacgagtcggacttcctcaacaatgcgcactttcctgagcacctggaccactttacggagaacatggaggacttctccaatgacctgttcagcagcttctttgatgaccctgtgctggatgagaagagccctctattggacatggaactggactcccctacgccaggcatccaggcggagcacagctactccctgagcggcgactcagcgccccagagcccccttgtgcccatcaagatggaggacaccacccaagatgcagagcatggagcatgggcgctgggacacaaactgtgctccatcatggtgaagcaggagcagagcccggagctgcccgtggaccctctggttgggccccctctgggcatgggcttgcggcgngccgcccatggccaccacccccgctggctgggcctcagccccttgtccaggctgcccatcccccaccagggccccgggagagatgactcagctgccagtgatcaaagcagagccctctggggggtgaaccagtttcctcaaagtgacaccgggaggaacctgggtgcagatgccctccgacgcccccccagcagcccatgggcagttgacagcggacgggctccccagaagtcccccgcttctctggccccccctccaagcccctggtcagggccccatgggggcggctccttccacgggccattttccaccctcccccaattcctcaagtggccccttcacaaaatttacaagggggaacatcagggggccactgccttcctggacagaaggggggggagaaagccggaaccccgggattggctggaggggccta

SEQ ID NO: 151204 - DNA, 878 bp, Homo Sapiens
  misc_feature (676)..(803): n is a, c, g, or t
gggggggcgcggttccgtggtgcgcaaatacggcgtcttgatgtgtccccccactccacgggggcggcttgtatttgacctctttgggggttccgtagggccaacgccatggccccaagcgggggcgccagcccaggagggttcccacgggggcactctccggggtctttgtttccctgctttcaccctggaggggagccacagtttgttgtcccaggcggcccatggttccatggtttggcatgttggggtggtgtctcccatcttgatgggcacaagggggcttctggggcgttgagtcgccgctcagggagtagctgtgctccgcctggatgcctggcgtaggggagtccagttccatgtccaatagagggctcttctcatccagcacagggtcatcaaagaagctgctgaacaggtcattggagaagtcctccatgttctccgtaaagtggtccaggtgctcaggaaagtgcgcattgttgaggaagtccgactcgttcagatcccccaagtccaggaagctggatccggggaacagcctgtcggccgggaagggttccaagacggcgtccatcgcagccggctcccgggacccccttccactgggcttccctcactccagggcggcggcgcgcccagtccagagctcctgcctgagcgctggcaaacgggnnnnnnnnnnnnnnnnnnnnnnnnnnnnnnnnnnnnnnnnnnnnnnnnnnnnnnnnnnnnnnnnnnnnnnnnnnnnnnnnnnnnnnnnnnnnnnnnnnnnnnnnnnnnnnnnnnnnnnnnnnnnnnnngggcgcaccgtgggcattcagccgactccacctcctcctgctcctcctggggcacagctggcttccatggggagc

SEQ ID NO: 151205 - DNA, 1786 bp, Homo Sapiens
  misc_feature (117)..(174): n is a, c, g, or t
  misc_feature (219)..(227): n is a, c, g, or t
atgcagaccgtaggtgaggtgggaggcgggggtctgttgcccgtgttgcgccgccgcgtggcgagagagggcgggggggtggttggcgtctgcgggcaaaacgtctccttccgcccnnnnnnnnnnnnnnnnnnnnnnnnnnnnnnnnnnnnnnnnnnnnnnnnnnnnnnnnnngggtggtccgcggtgcgcgggtcaacggccccggccacccgggtnnnnnnnnngataattgttgcccccccggtgtccagggtttgccagggggagttcgtggggcaaaggggggtggagcccccttccccacccctcagaccctctgctgggcactttactcccccgccagtccccagcaaggccgcccttcccaggctgcaccctcttcaaagcggggtccagcctctccatccttcaggtccccgtgtttcactccagattggcccgcagcggcctcgaggtgcaggaaataaccctgcagaggtgggaggccagctcctagtgtacaagggtcaggcggcacttaggtgagtagaacgggccagctggggcccttggtgactggggaggcagtgtcccaggtagtgttgccacccgaagagccgggcgtagccaggtggtcattctttcaagagaagctgtggattctggacttttatgtgaaatctaccaatttttaaagggttggctcagggtataaaccacccaggccaaagaaaacatgtcggctgggtggggccgggccaggggccccagtcagagagttctgctgaggccccgccgtggacaggacctcggaaatggtgggcgtaagccagtggttttcaaagtcatcattccatttgctccagttggctttcactgccttgatgtcactcacgaggttctgggccaggcagatgccaaagatctggaggagggcgatgcccatgaagactcccgccaccacaatcaggttgtcctgcagccacttctcaaactggcccacgcagcctttggtgtggatgaagccctgctgctccagctccagtttgagccggacgtcgtagccacactgggtgttgaggacatcctccgcagggtccctgacgcagcaggagaagggcaccccgcagcgctcccggctggggttcaagtcagtgcagttgaagtagatattgaggttccagtcattggggcctcgggctccacagcaagaccagtattcctgagcaaagtcaatgaggttctggaggtcaatgtcgtcccggtaggccttgacgttgttgttgatgaagaggttgagctggtctcgaatccagtccttgaagacaaaggccaggatccctgttgccagctccaggaagaagatgagaccgaggaacacggagaaaaacttgagcaggaaggtgttctcccggagggccccaatgcagccagcaaagcccagcaccgacatgacgcctccaactaccacaaacagccacacggggtcaaggcctcccagatctgtcagcgctgagatgttcgagagaacgcccttctcaccccaggcccagaggccgatagccaggaacagggctcccagcacccagaagacaatgttgaagccaaacaggaagtatttcccgcagcagccgacctcaggttcctggaaatgctggtgcttgccgggcatggtgagcggccacccgccggcccggaaaccggagccgggagccaggcccagcgccccgcgggccgccctgggctagagccgcccggggcctagccgggcggctgcggcttcatggcctcggccacacagagc

SEQ ID NO: 151206 - DNA, 1517 bp, Homo Sapiens
  misc_feature (72)..(72): n is a, c, g, or t
  misc_feature (404)..(406): n is a, c, g, or t
gcgcaaggagggtggggtcgtcaaccgacacaggctgactcgcgagacctcacaaccatgcgggcggtgtgnctttatcaccgctccttttataaaaggcgggcggcgtgacggtgtactatgtgggactaaggtgtgggaggtggggcgccaggggcgagtggttctcgcctcgccccgcgaggggtgggcccccttcgcgccccgcttataaatgtgtggcgcgcagtcctcataatgggcagagggcgggcccatccaccccagggcgtttttggtcccccttctcttttttccgagggaagactttaaggcttgcctttgggccacccgccccgagccccccgggcccacgggttggaaggggccccctcctttcccctttttttcgggtggggggttgnnncggccaaagcccttttttttccctgccccccacatcaagggcgggtccagcattcccagttggaagcgccgcgctcggaaggccgccatagaagctcttaaagaacttttcgccctcgaccatctccaccgtgtcagagggctcggggccccggtaccgctccagcagccgccgaagggtggcgtccaccttgtttcggggcaggcactgcagcaggacctgctcagggtcccggcgccgctgcagagcgatgaggttcacacggtgcagccgcagccgctcccaggccttccgagccaggcctcccacacagttcttggtggtgtaccagagccagtaccaggagaagtgtgtgacctggaagcgtgcgtacaggtgggtgagctccaggaccacctgagctgtgatgtcatcccaggtggctgcaggaggggcccagtacaacaggtgcaggcgggagcggtccagactgaggcctgtgatgccagagggcagaggcagctgcacggtgaccggttggaggaagctggggggaccgctctgtgacaggcacagcagggggctcactgcagcctctggttctcccaggagggcctgcagctctcggccagccatgcgcaccacctgcgtggagactcgacgaggctcctcagtggccccaggggggaagatgactttgaccccaggatgacccgaggagcacagcagtgtcccctccggtggcaccaggcaggcattggacacagggcgggaaaccacaaggaaccaggagaagtggggcacctggcagtgagcccagagccgctggggtgcctcttcctccaggtaggtctccaggtcaccccagctgttgtcattccgggtcctgaccaccacttcacggcagcgccgggcctgcggtggggtgaagagcagccacagccccacatcctgctggaaggccaccccatggggctgcagctccagcacatggctgagcagggcgtcatgaggacccagggggacgaggcctggctccggcagcagcagccgatagcggatggtgatgggggtggcggtggctcccgctgggaactgcaggcggacgccacaggccagggtcactgagcag

SEQ ID NO: 151207 - DNA, 1307 bp, Homo Sapiens
acccagagacccccaactgaggccccgcggtggctgcagctgcctctacttttttgtagttgccaaactggatggccaggcggtcagtgacgcagcggaaagtggccggctgcacctcccagtagggcacggggttgttgaagaggctgatgccgttgtagtaggcccgcttcaccccgaagcccatgggacagaagtcgttgacacccactttggtgatgttgttggagtgcagatagaccacctggaggagcttgaggtctgggagccctgagggcaccctggccaacttgttgttgtccaagtggagctcccggagggtgggcaggaagctcaggctcccgttctcgatcatcctgatctggttgtggcctaggcccagcctgtacagcttggagtagcgaagcaggtcctccagttcgatggcctggattttgttgtggtctaggtggagttcattcagggtctcagggaggtctttggggatgccagtcagcttggcctctgagatgcgcaggtagttgagcttcaggccatcgaaggctccaggttcaaagccactgttctccagtgggttcccgcccatctcgatgcagttcatgttccggagcccactgaacactcccttgggcaccttgcggatgcggttgtcgtggatgcggagctccaccagggagctgggtaggttgggcgggatctccaccaggtggttcttggagatgtagagcttctgcagcttccgcagtgggctgaaggccttctcatggatcttggagatcttgttgttcaccaggacgagggcgtagaggtgctggagacccttgaagtcatccttgcggagctcggagatgtcgttgttctgcaggtccagcagcgtggtgtcaggggagatctctttgggcacagacttcagacccaggtcggagcactgaaccacccgcaggtggcagtggcagccgaaaggacacatggcgctgtaggtgggtgtgacagagtccgggtccaggacgcccgaggtgtcagcgcccgaagcttcctcatcgttcatcatgaatggcccatcgtccagggtgaagtcccagaagcctctctgctcaaagggcagggcctggctcagggccagcagagacacgaggcgccacaggggccacatggcggatggacctggagaggggaggcgccaggcgcaggctgactagttggcgggctggggtggtggccgtccgcacgtctatctgtccggctgtgtccggcggaccgaaagcagctactcactcactgggcagtttgtggagagagggagacag

SEQ ID NO: 151208 - DNA, 789 bp, Homo Sapiens
ggctcctcctgggctcctctagcgccttccccccggccgactccgctggtcagcgccaagtgacttacgcccccgaccctgagcccggaccgctaggcgaggaggatcagatctccgctcgagaatctgaaggtgccctggtcctggaggagttccgtcccagcccgcggtctcccggtactgtcgggccccggccctctggagcttcaggaggcggccgtcagggtcggggagtatttgggtccggggtctcagggaagggcggcgcctgggtctgcggtatcggaaagagcctgctggagccaagtagccctccctctcttgggacagacccctcggtcccatgtccatgggggcaccgcggtccctcctcctggccctggctgctggcctggccgttgcccgtccgcccaacatcgtgctgatctttgccgacgacctcggctatggggacctgggctgctatgggcaccccagctctaccactcccaacctggaccagctggcggcgggagggctgcggttcacagacttctacgtgcctgtgtctctgtgcacaccctctagggccgccctcctgaccggccggctcccggttcggatgggcatgtaccctggcgtcctggtgcccagctcccgggggggcctgcccctggaggaggtgaccgtggccgaagtcctggctgcccgaggctacctcacaggaatggccggcaagtggcaccttggggtggggcctgagggggccttcctgcccccccatcagggcttccatcgatttctaggcat

SEQ ID NO: 151209 - DNA, 1082 bp, Homo Sapiens
  misc_feature (495)..(504): n is a, c, g, or t
  misc_feature (639)..(639): n is a, c, g, or t
aggtgggacaagtcttttttctctagggcgggcctcagagttccccaattggttgtcatttcaggggtccccccccaaccgccatcacagcttgccttgaagggggttccccccatatggacccggtgtcccgaatcgttctttgcaaaaagtgttgcccccatggaaatgagggtaagtggggtttgctttacacgcattagtccagggaggaagggggcgttcctgggccctgggggttgggcccatgaggttcatggggcgaaaagccatgtagcggggcttttagtccggggcagcccaggtggggcgccgcctccagggacagggttggccaccagtgggatggggaccaggccttggtcacagccccgttcgcaaggagtggccggcgggaagcaggtcaggttctggcaggggccctggtcgtgggagtacgggatgcctagaaatcgatggaagccctgatgggggggcaggaaggccccctcaggnnnnnnnnnnaaggtgccacttgccggccattcctgtgaggtagcctcgggcagccaggacttcggccacggtcacctcctccaggggcaggcccccccggggaggtgggcaccaggacgccagggtacatgcccatccgaaccngggagccggccggtcaggagggcggccctagagggtgtgcacagagacacaggcacgtagaagtctgtgaaccgcagccctcccgccgccagctggtccaggttgggagtggtagagctggggtgcccatagcagcccaggtccccatagccgaggtcgtcggcaaagatcagcacgatgttgggcggacgggcaacggccaggccagcagccagggccaggaggagggaccgcggtgcccccatggacatgggaccgaggggtcgggagaccgcgggctgggacggaactcctccaggaccagggcaccttcagattctcgagcggagatctgatcctcctcgcctagcggtccgggctcagggtcgggggcgtaagtcacttggcgctgaccagcggagtcgggccggggggaaggcgctagagggagcccaggaggagcc

SEQ ID NO: 151210 - DNA, 1458 bp, Homo Sapiens
  misc_feature (190)..(190): n is a, c, g, or t
attcggggctggggagacacattagtttcgttcgttcgggttcccggagtaagcggggggaaattttgattccggaaggcatcttttcaaatgttccatgaaaaggttgcaagcccgagagtaaccgcccctgctgccctgagtggtccccgtggttttcagagtgtgagaaagccacagagagtttttnaacacggagccacttaaggcctcctccagcctgagaccactgggcagaaaaagaacagcacgggttcctcctcctccaggccgggcctacaagcaccccccgttccgacagagaaagtctcttctttaatggtacgcatgtgtcttactgtagctcccagttagtcccttaagcgtgaaccaccacccacccatgctgctcccctcccaccatctctccataaacaggacccaacgcagccaaaaactcatggtcatgtgaccttggcatcagcttgctcgttaggaaccgtgcctggaggtgctctgagcactgactgccaacctcagcagggccctttgtggtgttgaggtgtggtgtccgcagggcagcctgcagcctgctggggtccagcctggggcctcaggtcctgggaaccctggttgaggctgggctgcctcagtgcccctccgcagcctgctgcacccaagcactctgagaaaaggagcaatcacccaacttcagtctgaaaatgagaatgttgagaagggcatgatgaggggaagcagaccagagcccaccggcaagggtagaacgtcagccccgccctagtgggacagacaagagagaagcctcctcacaccaggaggcagtatagccggagccttccctccagggctctcaggagagcctgtgctggttcatgaaaaagtgaggcctctgggctttgctgctgcagagtgaggtcagagcccacaggccccacagatcatcctgcctgacaagcacaggaggcaccactgcttgaattcagagggcagctccgagggtcctaggtcccctgtgaatctccacagaatcctgggacctcagagcctgcatcagttggtcccccatgcagggacttagtgactctgcagccccagtcagggcctgctctgtgccaggcattgctctgcagacccaaagggactccaggccagtcctcatcctcagggcccacagtgtaacacagaggccgtgccgcaggctctgctcctctgccagcaagctgtgcagtcttgggcaggttacttcagtgctctggtctcagcttcctctgcaagtggtggcagggctgtgctggaggcatgagaggggtgtgggagctgcaggctctggcaggtggcacgctggggttcttggagaggggtgtgtggctgcccaggggactactgctgtcattgccatctgtggtttccagcgggaaaggggtggcaggggtggctcgccgcatgcccaggctctgc

SEQ ID NO: 151211 - DNA, 1521 bp, Homo Sapiens
  misc_feature (407)..(407): n is a, c, g, or t
  misc_feature (1083)..(1130): n is a, c, g, or t
cggcaatccattgagcccctccgctgctatggcaccaagggtcaccctgcctcgagacaggacactgtcctccgggtgtccacagcctccccactgggcctgcttcccacagctccctcacagcctgcctaagcccggtgcagctcgggcctccctctcccggcccctcaatcttgccctccccgggaagggcggcccagtgccccatcaggagcagcttggggaggtgacctggcgggcccctcacaagtacattttcatggcctcgtgcgtcgtggggcagtagcgggcatgcagctgggccagcagtgccctggatgtggcctcgaaccgcgtgccctggctcttcttgttccacacgtggacagcataggtggcactgagcagccgcggcagctcctccggtntgatgtcctcaaagtacttcttccagtcctgccaggggatggggtagaaggcctcaggggggcagggtggtgacgccgcggcaggcgcggctctcggccaggctgcggatggaacaccacttcttgaagacccgcgtgagcagctgcgggccctggtgaccccagatccagccgttgtagtggtccacgaagtcccgcatgcacagcgccatgaactcgtgccggcgctcgaaggccaggaacgcgccgttgaggacgtagcgggactgggtgcccagcacgttggtcaggttccgcaggttcttgagaacaatgaagtccgtgtccaggtagatgccgccgaacttccacatgagtgcgatcctggaggcgtcggagagcacgggcagcaggtagggctcccagcgcccctgcacggccgcgtaccagtcggccaggggtgtgtcccggaacagctcccgcaggtccagcgggagcatctggacattcgggaagcagctcagaagtgagatgcccaggtgccggggcagagaggcgttgccacccggaagccctttcatcaggaccagcacgtgggattcggggtgagttctggcggccgactccaccgagcacatgaacaggaagttggggttggtccggtctgaagtctccaggaagaagatgttgcctggannnnnnnnnnnnnnnnnnnnnnnnnnnnnnnnnnnnnnnnnnnnnnnnatcccttgctggcaggttatagagctgccctttctccttgggctctcccactacgtgccagtagatcatgatggagacgaaaaacgtgaacttgaagccgatgatgaacagggtgcagacccgctgccttggggcgccccggagcagccgcagcaggaggtcggggggcttggacatggtatccccagatcagaccaggagcttccagcaggaaccggctggtcagcctgggcagcccattgcagagaggtggggatcctggcagcccacaggcctccgggagacacgccctgggctcagcagccgaccttctttgccaacacgaacacggcccttccacacacttgcagcggctgcaaatccatctctagctccagcggcggcgggcggc

SEQ ID NO: 151212 - DNA, 842 bp, Homo Sapiens
accggttagtacggatgtggagatgctgggaaattgtaagtccctgccctccagaatctcagtctgggccagggagggattaaaagatgagaaatagatgcttgcagtcagtgtgaccagtgctgggctgagggcctgtgggaataggacagagctctcaatagccaggccccctgcctgggagttgggtctgtgtccatttggccctttccttacctccgtcttctctctgcagtcccccagggcctcctgcctccttttcctccaggcatgttcccactgtggccccccatgggcccctttccacctgtcccgcctccccccagctcaggagaggctgtggctcctccatccaccagtgcagcagccctttctcggcccagtggagcagctacaaccacagctgctggcaccagtgctactgctgcttctgccacagcatctggcccaggctctggctctgccccagaggctggccctgcccctggtttccccttccctcctccctggatgggtatgcccctgcctccaccctttgccttccccccaatgcctgtgccccctgcgggctttgctgggctgaccccagaggagctacgagctctggagggccatgagcggcagcacctggaggcccggctgcagagcctgcgtaacatccacacactgctggacgccgccatgctgcagatcaaccagtacctcaccgtgctggcctccttggggcccccccggcctgccacttcagtcaactccactgaggagactgccactacagttgttgctgctgcctcctccaccagcatccctagctcagaggccacgaccccaaccccaggagc

SEQ ID NO: 151213 - DNA, 1089 bp, Homo Sapiens
  misc_feature (902)..(902): n is a, c, g, or t
  misc_feature (912)..(912): n is a, c, g, or t
aacgcgctgatagcctccatggaccgtcccgcaggccgctgatgccgcccgcggcgaggtggcccggaccgcagtgccccaagagagctctaatggtaccaagtgacaggttggctttactgtgactcggggacgccagagctcctgagaagatgtcagcaatacaggccgcctggccatccggtacagaatgtattgccaagtacaacttccacggcactgccgagcaggacctgcccttctgcaaaggagacgtgctcaccattgtggccgtcaccaaggaccccaactggtacaaagccaaaaacaaggtgggccgtgagggcatcatcccagccaactacgtccagaagcgggagggcgtgaaggcgggtaccaaactcagcctcatgccttggttccacggcaagatcacacgggagcaggctgagcggcttctgtacccgccggagacaggcctgttcctggtgcgggagagcaccaactaccccggagactacacgctgtgcgtgagctgcgacggcaaggtggagcactaccgcatcatgtaccatgccagcaagctcagcatcgacgaggaggtgtactttgagaacctcatgcagctggtggagcactacacctcagacgcagatggactctgtacgcgcctcattaaaccaaaggtcatggagggcacagtggcggcccaggatgagttctaccgcagcggctgggccctgaacatgaaggagctgaagctgctgcagaccatcgggaagggggagttcggagacgtgatgctgggcgattaccgagggaacaaagtcgccgtcaagtgcattaagaacgacgccactgcccagggcttcctggctgaagcctcagtcatgacgcaactggcgcatagcaccctggtgcanctccctgggncgtgatcctggaaggagaagggcggggctctacatcgtcactggatacctggcccaaggggaacctttggggactacccggggggttcatagggggccggcccaaagggcttgggccgggaaaaaagggcctcccccaaagattctctcccccaaaaaaagtcttggccaagggccc

SEQ ID NO: 151214 - DNA, 676 bp, Homo Sapiens
tagcacttcccataaaaacaagtattgtttcctacaggtaggaaggtgctcaacagctgctctgtggcgacaggtttgatctctgtccgaagattaacaaatctgccaactaccaagggggctcggtggaaacccagaatcctgtccaagtgaaaggctgctacctctgcattgtgtctatcataaccagcatacggttccccttccaccacatggtctcggctataccgcttaggtttgaaaacaactttctggcctccttcaagtatcagtaaggctttcagctgtgtccctttataacccacatcagctttaatgattttcttggtggccatggcatgcatgactgcccccagctctggtgtctcttcagggtacacttcccggggaaccacccactgggctgcaatctcccagggagactgcaaggtatggtccagcttgggtgccagctccacccgcaagccagtcatcattcggtgaaaggccctctggtcctcccggttggcagctgatgtatctaagttgtcaatcaggaaaactttggtgaagataaaaatgacaaggagaattgctaacagcacgactcgctgctttagcttcatgttgacctcttttccttctcccctgacccactcttgctcatgtattaaggagagctggtggtgatgagtag

SEQ ID NO: 151215 - DNA, 1331 bp, Homo Sapiens
  misc_feature (1074)..(1092): n is a, c, g, or t
gggccaagaggacccccaggggtcatcgaaaggcccagccatcgcatgagttcctagcagaacccactgactcatctttggcttgagatggggcctcagggcaaacaggaggagcaaaaagtcacaggagcaacggtgtggcttttcgctgtggggtttcatcaccccatttccttcggtgtctctgtccaatctttggcaacgaatttctgcagctggacagtgggccttggggtctgagtgagtcgggggctgagctctcccctccccaccaggcagagggcaaagtgcgaagcagcctcggattggctgggtgagggcggaggggagagggaggcaggcgtgctccgatccgaccctgagaggctgtaggctgggcatctggcggcatcttggagaagaccacgaggctggactcagcgagctcaccttgtcctcaggcctgactggaaggagggcccacagtggtggccttggtcttgcctgcagccagtcactccttgcgcttcttggcacgtccctcggcctgcagggtgcgggtgcagcgctgcacacactcggagaagctgaggttgctgtggtcggcactgtagtcaaggtcagccagccgcgccagggacaggatgtagttacaggcgatcctcaggatggccagtttggacagcttctgcccatatgagtagcacggcacctgcttcctgagcgcctcgaaggctgcgctgatggtgtgcacccgcgtccgctccctggcgttcgccaggagcctccgggtctgctgcagggctttgatctcggaggaggcggcagtcgcttcgcccggtcgtttcctaggcgacgcggaggaatcctggtggttattgtaaattacgtgtgaaattgacgagtaggaactttccccggggcgcgtcgggggcgcagggcgcacagtggactccgggggcgctggcggtgctgggggtgctgacggcgcggggcgcgcgggcggtgcgcacagcaagatgcgaggacgcggacccggctcccggaaaggctgtgcctctgggcccccaggtgcctggctctggggcgcaggannnnnnnnnnnnnnnnnnntggggagtcctggccccactgcgcctagggcgaagcagcgtttccgcgcgtcggagacctcgggcgcccgagagcccccgcgctccccggctgtgtccgtgccccctcttgggggaacggccggcgccactgggactggcaccggcaccggtaccgggaccggctgcagccgatgggtcctgtcccgcagcccgttggtggctacggcgcggggctcgggcgcttccaagtccagtcgg

SEQ ID NO: 151216 - DNA, 821 bp, Homo Sapiens
  misc_feature (54)..(54): n is a, c, g, or t
gtgtgcgtgcaggagggaaggcatgaccaaaacaaacgccctgtctggaacagnccgtcgaggacagtcaagtgctggaacgatgccttggctccaaagctggaggggctggggcaggtgcatgggctgggctgtgcattcaggtgacattccctagtgactcaggtcactaaacccactccacaggtggggaagctgagatcagaggtgaaatgcttctgtccaaactccaagcaagccggtagagaaatggggattcactccagagtcccggccccaagcctgagatcctaccaacttcccgagcttgctctgcgtactgtgcccatcacacctgcgctgcctgagctgttcgcctcttcctgaccccctcccagaggccactgttgcctggcttcccccaaaaggagtggggtggagcacatgcgtctcacacacgacccagtctatcactctatccgctcacaggaagagcaccagtcaggagggtcctgcttcccgagaaaaccaccagccagcccagggtgcgggaaccccaccgcttcaattctcacgcggtcccacggctgtcccctacatctgctgtattcaggctcgttctctctgtttttggtaagacatgctcagcttcttccatcatggcactgacaaatatgcaggtctatgtcacactctctacataaagtgctggggggtggctggactgggccccccgacgaggtgtgcgttctggtcaaaaggccggatttccaaagtgcatgctgcttctattcacaggtcagagttcagagccccagagccacccgggatgtggcggcaag

SEQ ID NO: 151217 - DNA, 683 bp, Homo Sapiens
caagtcacgactacagacgactaaaatccaggccgggctatacccacaaaattgtgtctctctgtggaatgtggacccttcccgtcctgatgaaaagggaggccgggctcatccggggtggccgggggacgaacacagcctgtctcttcggccgctccggaggcgagcagcgccccggcggcggcctcgtagtccgggaaggggttgacgaacgcccgttcctccatttctgcctcccctcccaggtggagcttcagcctctttgacatggtctcgcccatctccgccgcggtacggcgcgcgggcggggacaaacctcctgtcccggcgctgcagctcgccccgccgccgcctcctccgagggcccgcgcagagagcgtcctctaggaggagcgaggccgcgcgctggcgggaggagcggggcgtctgagcgtgcactgcctcgtcgcgggctgctcgcacatcaggcggccgcagaggcggtgggcgctgtgcctctgccctgttcctggcgcctttgccctgctcccgacggagaggagcgggctcgcgggagcgcccagcggctcacagcctgctcgcgcctcctcgcaccttccccgtggcccgcagagcccgtccgcggcgacgcgcacggccggggctggagtcccggggtggggatcgttgcgcccggccagccc

SEQ ID NO: 151218 - DNA, 1212 bp, Homo Sapiens
  misc_feature (69)..(69): n is a, c, g, or t
  misc_feature (457)..(468): n is a, c, g, or t
  misc_feature (487)..(518): n is a, c, g, or t
aggcgatgccacagcgcgtcgcgtagcgcagcgagacaccgcgcggtgccgcggtcgcgccaccgcgcnggggcgcggcgcccggaacgccgcccgcgaagactcccgccgtgcactctatacgacgagctgcgaccgccacacgcagcgccgtgcaggagccaggccgcagcaccgcggacaatgggacaacaccatgcttaagacctgtcgtaccacatcgtcgcgcgttcgccgcgccgccccccgaaaccgtccgccgagccggcacacgcctgcgacacacgcatgcacaccgacccgacccaagatcctctacccataagacgtgagatccgggcgcccactccgagagagggcaccccgcagaacggcgaggatcgccccacgccgcgtcacgtatcctcaacgtcggcattgccggtccgctgccccaagctcggggggcacggggcgnnnnnnnnnnnntcggccaacactcggcgannnnnnnnnnnnnnnnnnnnnnnnnnnnnnnngccgcactggcgcgggaggagccgccccccatcccaggttgatggcgttgaccacgtcctgtttcagcaggaactccgccatttcccacaggttgatgccacgctgctccgtttggccgtctgcatgaaagagcaccagctgccctttccggtcgtggccaatggccgtcctggctgatatcacattcacaaatttgctaaaggaacctgtctcctgtgtctcgtcacactctgtggcttggctctcgttgatgtagatgcttccattacgaatcagccacacgaccccactcagcagctgcacaaatgggttctcagtgtccagcacctcctcctcagacaggtacccggtgaccagggtcccgtcgcggcggatcccgaactgcgcgttctgcagccccccggagctgctcacccgccgctcgtcgctcaccacgttccccaggcactcgcccgagttcatgcggaagaagccgccgttctgggcgacacggcagtcggccgcccgcgccgtctcctccacggtggcgcgtcgtctcgccgcgcagccgccgggcccaccgggctccagcaccgagaaggtgcgcaggggctcaacggcccgcgtcaggtggccggccaccgcgcggtccctgaagtgcgacacgaaggtgcgcacggccagaccgccggcgccgggagtcgcgggaggcag

SEQ ID NO: 151219 - DNA, 1108 bp, Homo Sapiens
  misc_feature (290)..(290): n is a, c, g, or t
  misc_feature (328)..(328): n is a, c, g, or t
  misc_feature (997)..(997): n is a, c, g, or t
tttttcccgaggagccccctgggggaaattccagggtgaaaaggccagccccaccctgttgaggggaggcccccaccccgttttttcaccccagagggggttgggggccgggcgaaaaagaggcttggcttgccaggaggcagcctttaaggtgggaagttcccccacccattcccgtgggacctggaggctgggctacaccactgtgcagcccggggctgctgcgacagtgttttccaacatggcgctaattctaggtaactaagtttggctttagaaataccgtcacntggagccacagggcttgctgacagaaattccccagcancttggcattgggcaaggagcccttagggggtgaagggcaggcttattcagcggccttggtgcagtgggcacacagggcaccggccctgggagcctctgtcttcctcttgcaggccagggttgcctcctgattgtgggttcctgtctgtctctcaggcccccagccagggccagcccaagggagcagggggtgcagagcacaaccaggaggatggagccaatgggtgcctggagcaggggcacagagagggagtccaacccaggagcccagcaaggcgctgcagctaaagaggtcgagggaaacatgcagggagactgccatccctccccagccccagctgccccatagcaggagtggccttggcatcccacctgctccacatagcacccaggccatctgagcagagtgaagatgtcaaagagaaaaccaaatcggattgaggctcctgctcccccttaatgaggttcattatcagcagctctgatccttgtaaaacccagcaggccggattaggggcaggctctctaatcctggctgactcctccccaccgagtggccaaccctgcagctctgacaaacaagcccttgcttcctggaggagctggaattaggcaggtgcagacaggcttctccctcaccagcccagggcactgaggcaggagctctcangggaggattggggcagggggtggcaaggctgcacatccagaggcctgtctccgtgcatgaaaaggccatggggtttgggatcccgggaattcccggaccccggtaccagcc

SEQ ID NO: 151220 - DNA, 1103 bp, Homo Sapiens
cgtggcttgtgggttgcgtggcttggctagctgcgcggctggccgtggctaagtgctgctacgaagcgagcttgggaggagcagcggcctgcggggcagaggagcatcccgtctaccaggtcccaagcggcgtggcccgcgggtcatggccaaaggagaaggcgccgagagcggctccgcggcggggctgctacccaccagcatcctccaaagcactgaacgcccggcccaggtgaagaaagaaccgaaaaagaagaaacaacagttgtctgtttgcaacaagctttgctatgcacttgggggagccccctaccaggtgacgggctgtgccctgggtttcttccttcagatctacctattggatgtggctcaggtgggccctttctctgcctccatcatcctgtttgtgggccgagcctgggatgccatcacagaccccctggtgggcctctgcatcagcaaatccccctggacctgcctgggtcgccttatgccctggatcatcttctccacgcccctggccgtcattgcctacttcctcatctggttcgtgcccgacttcccacacggccagacctattggtacctgcttttctattgcctctttgaaacaatggtcacgtgtttccatgttccctactcggctctcaccatgttcatcagcaccgagcagactgagcgggattctgccaccgcctatcggatgactgtggaagtgctgggcaccgtgctgggcacggcgatccagggaacaatcggggggccaggaaaaacggcctgattcccaggacccccaaaagctccacccgtagcttccccaagggggcccaccctgaccatgggaaccccctcgccccggggaaaaccaaaaaggccacccagcctcgcaccccgggggccaatggcccgcaacccacaaagaacgggggcagacgatccggcgaccctggggggtcgcgggaacccgccaaacacacccgttcggcggcccacccacgggtgggaccgaaagagcgccactatccccggaggtcaacgaacagggccgcagaaatcaagggcggcgcgacgctagacactatacgagccgcacggcaccgctc

SEQ ID NO: 151221 - DNA, 668 bp, Homo Sapiens
gacagctgcccggacacgaaggagccgaggagcacgcctacgaagaacagggaggtggtgaggggcaccttccagttgtcctcacacaccagattccactcggtcacgacggtggacaggtagacgtcctggctgaactcccagccatccaggcagctctcctgctccagctgccccaggtccacgtcgcgccccggctccagcccgagcgccgagaagttggcgatggtggcgagccggtagcggctgcagctgtggggcacctcgcggccgtcccgcagccgcagcgggacactgttgttgcgccaggcgctgctcaggttcgcggcgtccggcactcgacagcggtgctccggggtccccgccaggaacacgactgacataccattgaagccattggggatgatgctggcgctgagcaggaagaagatgaggcgctggaagggcccccactcgcccaggaaggcgatcacctcgtcgtagtcccgcatgcttcccactgccgctccgaaacttgcaactacgggtgatgacagcgttctcaggacagtgtcttgtagctggggcgctcccccaaggatgttagaacgttccccgggggaccaggcaggctgttagaaattggggcgcgaagccggggaccgttcctgggaaacaggctgaaggcg

SEQ ID NO: 151222 - DNA, 704 bp, Homo Sapiens
gggttagaacctgcatatgaagaacacaatgtggaaacagctgaagattccgaaataagatacttatctgcagattcaggagatgccgatgattcagatgcggatttgggttctgccgtgaaacagcttcaggagttcattcctaacatcaaggacagggccaccagcacaatcaagcggatgtaccgggacgacttggaacggtttaaggaatttaaagcacaaggtgtcgctattaaatttggcaagttttctgtaaaggaaaataagcagttagagaaaaatgtggaagactttctagccctgacaggcattgagagtgcagacaagctcctgtacacggacagatatcctgaggaaaaatctgtgatcaccaacttaaaaaggagatactcgtttagattacacattggtaggaacattgcccggccctggaaacttatatactatcgagcaaagaagatgttcgatgtcaacaattacaaaggcaggtatagcgaaggagatactgagaagttaaagatgtaccattctctccttgggaatgactggaagacgattggtgagatggtggcccgaagtagcctctccgtggccctcaagttctcacagatcagcagtcaaagaaatcgtggtgcttggagtaagtctgaaacccggaaactaatcaaggctgtcgaagaagtgattctgaagaagatgtc

SEQ ID NO: 151223 - DNA, 805 bp, Homo Sapiens
taagggcccgaatgttgcctgggctgcccgtctttcattgatggaaggccccacggctggaagaaaggagaagcattttggtttgcagccaacagaccatggggccagaaggtgagggcatcctctcgcacgcttttctcaaagctctctgttgttgggtggcagccagagccctcctgcaggcagcctaatggctcacggggatcacccacaccacctgactttccagagtccccgtttaccacagaaggtctctctccccctgctgtgccttccatgttggaaaccattccagagttaagcttgtcatgcacttgagcctcttcattccttttcacaggaggatgctcaagcggtttcgtgtaatccttgaggattctgcgcactgtactctcatcctgcccctgtctacgcatcagctctgctgcccactcaacactatgctgatacctctttgatgtgatgataggcatgtttgtcttcatatctttccatttagcaaccagtttaggatctgaaattgtgaagcttggacggcttcttgaaagaataccttttccaaaataacctttcccatagagctgctcaatgtcctccgcattcctcacaatcacattgttgttaatcatttcagcacggaatatcttgaattctttcagaggaccatggtcctgaccaaaagggattggcaatggagactcgtaagtctcatacactcttcttttcctctttggggcatggaaaactgcttctgccatttttcagaggaggtattctttcttggctccacgcgctcgccgttccc

SEQ ID NO: 151224 - DNA, 482 bp, Homo Sapiens
tggtgggccagatgtactgctaccccggtagccacctggcccgggtcgctgactgcgggcggctggctgctgtgccctggtgctggccctgctggtcgggcctgttcctgagcggcctggcgggggcgatcccagcgccggggggccgctgggcgcgcgatgggcaggtccctccagcctcccgcagccgctcggtgctcctggacgtctcggctgggccagctgcttatggtggacggacgccaccctgacgccgtggcctgggccaacctcaccaacgccatccgcgagactgggtgggccttcctggagctgggcacaagtggccaatacaatgacagcttgcaggcctatgcagccggtgtggtggaggctgctgtgtcggaggagctcatctacatgcactggatgaacacggtggtgaattactgcggccccttcgagtatgaagtcggctactgcgagaggctgaagagcttcct

SEQ ID NO: 151225 - DNA, 914 bp, Homo Sapiens
aggagctggagcaccgtggaggaagaagcgaggttctttttaagagttcagctgcgagatatcaaacaaagaattactctgtacaaagccagaacacatatatcaaagtaatcctgaagtatcagaacaaaataataggctgtaacagaggaggaaatgattttgaatagcctctctctgtgttaccataataagctaatcctggccccaatggttcgggtagggactcttccaatgaggctgctggccctggattatggagcggacattgtttactgtgaggagctgatcgacctcaagatgattcagtgcaagagagttgttaatgaggtgctcagcacagtggactttgtcgcccctgatgatcgagttgtcttccgcacctgtgaaagagagcagaacagggtggtcttccagatggggacttcagacgcagagcgagcccttgctgtggccaggcttgtagaaaatgatgtggctggtattgatgtcaacatgggctgtccaaaacaatattccaccaagggaggaatgggagctgccctgctgtcagaccctgacaagattgagaagatcctcagcactcttgttaaagggacacgcagacctgtgacctgcaagattcgcatcctgccatcgctagaagataccctgagccttgtgaagcggatagagaggactggccatttgctgccatcgcaagttcatgggaggaagcgggagcgagcgacctcagcatcctgtcagctgtgaaagtcatcaaagccattgctgataccctctccattccgtggtcatagccaacggaggatctcatgaacaacatccaaaaagtattcggacatagaggacttatcagacaagccacgggcagagtataccgtgatggtggcccgagaagacatgtggaacca

SEQ ID NO: 151226 - DNA, 1043 bp, Homo Sapiens
  misc_feature (125)..(125): n is a, c, g, or t
  misc_feature (139)..(143): n is a, c, g, or t
  misc_feature (145)..(146): n is a, c, g, or t
  misc_feature (154)..(154): n is a, c, g, or t
cccgcccttctgccccctgggccccttctcggtcattggttgcggccgtgggcctccccgggggcttttccgttggtggccttcggcgggggtccctctcctgggttcttcttcccctttttttncccttccctcccannnnntnnctgctttntgcatcctcctcatctcccgagcagccctgctctgcccctgccttctggctgtaggtgctatccagccggacctcagggatcacgaaggctggcctgggggccgcaggtgggtccccagtagctgctagtaggtccccggagctcatggtgtcctcagtaagggccttggctggcagggagacctggctaggaggcagatcttgacagggtggaaggtcccgggtgggggattcctggatggcagggaggtctttggtgagtagagggtcctggtgaggcaggggttcttgaccagcaggtaggtcctggcagggtgagaggtcttgggctggagggggttcctggcatggtggcacatccttgctgggcggagcatctgggcctggaggggatccttcagaggtagctgagtctttgctggacagtggttcttggctgggagcgggttcctgcccagaaggggagtccttgttgggtggaaggtcttgtcctggaggaagctcctggccaggagagggctccttgctgggtggggaatcctcggcaccaggccccttcccttcctccaaggccatctccctcttctcatctgcctccgtctcaaacatccagcatactccagcagggacccaggcgactcctggctgccgctcctgccagctcgcccgcccaggtttccacccggctcctcccgcaggcgggcggccgtggctgtggcagctcctggcggccgtgtcaagcggctgccttccccagacagagctcctttgtgtcagcagagctatttatggacttacccaagttccccaggggagcgataccctgtctagccggccaccgccactctggagcctcgtgccgaattcgccacccaggcctcgcttcctt

SEQ ID NO: 151227 - DNA, 617 bp, Homo Sapiens
cttggccccgttctccgagtggtgctttgattcgcggtgagggtcgggtgccgggctgggatcccggcccgtcctcgccctgcacatagacgctcagcccctcgtgactaggctccttgccgcaggcctggcagctacagtgcaggatcttctccaccagcttgtccaccctgggcacctcctcgtggcccgggcactccagcgtcacaatctcccacatggactgggctggcatgcaggagtcacagtgaaccagggactctgtggactgtgggaaggtgttggggacgctgtagctgaagcactgtcctaggcacgccctgttctggatggacttggcctcacagccgctgtggcccacgatctgggtgatgttcttggcttcgcaccaggcactcttatctgggaacagtgccagcttgttgatgggtggtggggcagccagtagcatggcagggaggacagcccccaccaggacccgaagcatcatgcccgtggcctccagagcccgcgcgcgcaccgccggtcctgcggagctgggtacgggggtcgcgggcccgggcgcgccaggaggctcggcgagagcacggcaggacgggggcggccccgcgacgctc

SEQ ID NO: 151228 - DNA, 758 bp, Homo Sapiens
tggccgtgcgccggaggcagcggcggcgtggcgcagcggcgacatggccgttgtctcagaggaggactttcagcacagttcaaactccacctacagaaccacaagcagcagtctccgagctagaccaggaggcactgcttgagaagctgctggaccgcccgccccctggcctgcagaggcccgaggaccgcttctgtggcacatacatcatcttcttcagcctgggcattggcagtctactgccatggaacttctttatcactgccaaggagtactggatgttcaaactccgcaactcctccagcccagccaccggggaggaccctgagggctcagacatcctgaactactttgagagctaccttgccgttgcctccaccgtgccctccatgctgtgcctggtggccaacttcctgcttgtcaacagggttgcagtccacatccgtgtcctggcctcactgacggtcatcctggccatcttcatggtgataactgcactggtgaaggtggacactttctcctggacccgtggcttttttgcggtcaccattgtctgcatggtgatcctcagcggtgcctccactgtcttcagcagcagcatctacggcatgaccggctcctttcctatgaggaactcccaggcactgatatcaggaggagccatgggcgggacggtcagcgccgttggctcattggtggacttggctgcatccagtgatgtgaggaacagcgccctgggcttcttcctgacgtgcaac

SEQ ID NO: 151229 - DNA, 1045 bp, Homo Sapiens
gaggagggcgcccttcagcaggtgtgcgatgtagtacatgacggcaaggccttcgatggggtggccctggctgttgatgaagtagtagttgatgctgtggaagaggagagagatgctcttggtgaaggccaaggccgccatgagccagtggatcttgaagacgctgtacgtgttcctgcagaggatggacacccagaagatgccagcggccaggaagcaggcggacatgaccatgtagagcttgaaaaggggcatctccgctgccgacaggaagccatcggggttcttctcccggatcatcaccgtgatgtcgaatggatgctcctttcctggcactgaattgttgcagttgtggaagttcaggctgtactggccttcttccgcctgagagccgatcaccacgtggaaactgaagttgtaggagttgttgaggtggctcaggcccaacaccaggtccttgtccttcccactaggaccctgaatcactgcgggtgttgacttgggcttgctggctgcagaggtccctccgccatccaccttgcgggggactgtggcctgtggcttcgggagccctggtttggagggtgcttccgggaggagcccgggaaagataaacaacgtcttctgctctccatacttccgcacctggacctgcagatccttggtgttgatgaggaacaggaccaggaaactgctactgtttttctggagagggcagtcctggaaatcccgggttgaataggagcgaactctgccagaccgaacccggctgagactgaaccccaccagcagggacttctcttctgcctcccggaggcccagccgcaggacgctcaactccacctccagagagccattggtgtagaaaccgaagctgttcagctggatgtccgctcgcttctcccccgtcagcgccagccggtggatgcgcccggagcagccacccaacagcagcaccagaagtagccgctgcccccactccgcggggctcccgcggccgagccccctcctctcgctcactgccatctctggagccacctcctcc

SEQ ID NO: 151230 - DNA, 1575 bp, Homo Sapiens
ctgcgctgaccgccaggtgcaggtgcccgcccgcgtagacgcacccggactgaccccgcgccaccatgtaaacggcgccagcaggcggacgctggcttctccgcctgggacccctcctgccccgaccctgggccccgcggccctcgatgaggacacaccatgctgaccggggtgaccgacggtatcttctgttgcctgctgggcacgccccccaacgccgtggggccactggagagcgtcgagtccagcgatggctacacctttgtacgaggtcaagccctggccgcgtgctgcgggtgaagcatgcaggacccgccccagccgctagcccaactccaccatcatccgcatcctcggatgcagcccagggggacctctccggcttggtccgctgtcagcgccggatcaccgtgtaccgcaatgggcggttgctggtggaaaacctgggccgagcccctcgagccgacctcctacacgggcagaatggctctggggagccgccggccgccctggaggtggagctggcagatcctggctgtggcagcgatggccgcttggcccccggcagcgcaggcagcggcagcggcagtggcagtggtgggcggcggcggtgagccaggcgccccaagaggaccatccatattgactgtgagaagcgcatcactagctgcaaaggcgcccaggccgacgtggtgctctttttcatccatggtgtcggcggttccctggccatctggaaggagcagctggacttctttgtgcgcctaggctatgaggtggtggctcctgacctggccggccacggggccagctctgcgccccaggtggccgcagcctacaccttctatgcgctggctgaggacatgcgagcaatcttcaagcgctatgccaagaagcgaaatgtgctcattggccattcctacggtgtctctttctgcacattcctggcacatgagtacccagacctagtgcacaaggtgatcatgatcaatggcggggggcctacggcgctgggagcccagcttctgctcaatcttcaacatgcccaccctgcgtcctgcactgctttgtcgccctgcctgggcctggaagcttcctcaagggccggcttcgcccggccaaggagccaaggagaagcagctgttaaaggagggcaacgctttcaacgtgtcatccttcgtactccgggccatgatgagcggccagtactggcccgagggcgacgaggtctaccacgccgagctcaccgtgcccgtcctgcttgtccacggcatgcacgataagtttgtgccggtggaggaagaccagcgcatggccgagatcctgctcctggcattcctgaaggctcatcgacgagggcagccacatggtgattgctggaatgccctgagacggtcaacacgctgctccacgaatttcctgctctgggagcccgagccctcgccccagggctctaccggagccactgccgggccctcccagaagaacagaagtagccgtgggccggcggggcttcgcttggtgaagcacagccgcagcaggagaggccgagctgggccagggctgcaggaaaca

SEQ ID NO: 151231 - DNA, 1386 bp, Homo Sapiens
  misc_feature (413)..(424): n is a, c, g, or t
  misc_feature (530)..(530): n is a, c, g, or t
cccaaggggggcgcacttcttacacggcgtccccccaacgccccggctgtaacccctccctagtgggctttttaccacttgtcccccccaggggggtggggccatcttgcgggattattattttgtatttggggccccacttgttgggtttccacaaaacaaaaaaagtcttccctcttatgtattctgctttttttatgacgcacgcgaggagtcccaaggaccctcgttccacaaaaattttataccgggcggcttttagggttcctgcatttgagcccatttccccccctggttgtagcggggcctcacagacccacttttccgcgagaacccaagggcgcgttcccccgggtgtgttgccccaggctctgtgaagggatagggcccagggggtttaccctttctccgtnnnnnnnnnnnnttttgtagcgaatatgggtagtcgctgggatgttttgtggggctgcgtaaaaaaaaccgggggtctccgtcccttgtggggcgatttcccttcagtgtcggggggnggcaccccggggggcttttccccttgtgggcccttttgtttccaagccaaggaaaagtgaaggtctggggggatcagatttccttgtctttttgggggggtgggcctttgccttcccggggaaggcttttcctttttggggttcacagtccggggcggtaggcttgccttgtttggggagggtgtcctggcttgggttcagggccgccccggtctggggggcagctttttgggttcatccttcttgggctgtgtcaggcctcctgtctgcccggtgcctccctttgccctggcattggcattggtggcccccccaccatagctgtgaccccctggcctgaagacgttccgggccagggggggcctctccttggcctctgctttggccaatcctggcctggtcccctggggtctctggcccaagtcaggggcacccaacacagtgcagatgaattccaggtccagccaagccaggtaccaaagcaagaaagtgaggagtttggggagtctcatcctctggccagccgctgaatgacaccaaagagaacagcggcagcagcaaaggtgcctctggtttggcaggaaaaaccatgaaaggagtggactttcaaaagcagcggcagcagcagtagcagcagaaggaaaggctttctcctccagtctgagactcttgaagtctgccgggtgtgtgtttgtatccagtcccatagtggaaatgctctcgtatccagacgtgcaccgtctccagtcagcagctgaaaataactcgttcttgaaaggagaaagccaaccctcgtgccggatacgccacccaggcctcgttacttaggaccgttttggattcttcgcccccctct

SEQ ID NO: 151232 - DNA, 657 bp, Homo Sapiens
gtgactgtgtgagactccatctcaataaaaaacggaggaaaaaggtcttgtgagtaataaatgttgtctggagcagacctcaggagaagaggtgagagtctgtctgatgctggtatcacctccaatctccttccctgtgatctcagttcctcttccctggttgatgagattcttggggatgggattcatgatgatcaaatttcttttgaggatttgtttttgggcagatgagggaggctcagagaaaagcctctccctgcatgtgctatttcccaagtgctctcagtttgaagtcagtggcaaccagtagcatatttcctgaaggccttcagcatccactaaaccagtcaactgttcccatttgtttcctgaatagcaaacacttccttgaaatccttctcaaattcagcctccagtctaagtcccatttggccaaaatccttatacttgtaagaggccctgtggttctggaagatgaggcgcatgtcttgtacaaacccctccacttgggggtaaccgtgctcattcagccttttcttgattttatccaaccacatgggctccttcaggccttgcgacgcgtgggtcgacgatatcccgggatatccggaccggtacagcctgctttttgaacactgttcataggtacctagggcg

SEQ ID NO: 151233 - DNA, 1124 bp, Homo Sapiens
ctggtttcgagaaacagaaatctaccaaactgtgctaatgcgccatgaaaacatacttggtttcatagcggcagacattaagaggtacaggttcctggactcagctctatttgattactgattaccatgaaaatggatctctctatgacttcctgaaatgtgctacactggacaccagagccctgcttaaattggcttattcagctgcctgtggtctgtgccacctgcacacagaaatttatggcacccaaggaaagcccgcaattgctcatcgagacctaaagagcaaaaacatcctcatcaagaaaaatgggagttgctgcattgctgacctgggccttgctgttaaattcaacagtgacacaaatgaagttgatgtgcccttgaataccagggtgggcaccaaacgctacatggctcccgaagtgctggacgaaagcctgaacaaaaaccacttccagccctacatcatggctgacatctacagcttcggcctaatcatttgggagatggctcgtcgttgtatcacaggagggatcgtggaagaataccaactgccatattacaacatggtaccgagtgatccgtcatacgaagatatgcgtgaggttgtgtgtgtcaaacgtttgcgagcaattgtgtctaatcggtggaacagtgatgaatgtctacgagcagttttgaaagctaatgtcagaatgctgggcccacaatccagcctccagactcacagcattgagacttaagaacgacgcttgccaagattggttgaactcccaagatgtaaaaatctgatggttaaaccatcggaggagaaactctagactgcaagaactgtttttacccatggcatgggtggaattagagtggaataaggatgttaacttggttctcagactctttcttcactacgtgttcacaggctgctaatattaaacctttcagtactcttattaggatacaagctgggaacttctaaacacttcattctttatatatggacagctttattttaaatgtggtttttgatgcctttttttaagtgggtttttatgaactgcatcaagacttcaatcctgattagtgtctccagtcaagctctgggtactgaattgcctgttcat

SEQ ID NO: 151234 - DNA, 924 bp, Homo Sapiens
cgccccggagacgccggggagacaatgcgacgcgccctaaatgttggtgcccggagtgcggtcgggaacaggtgcccccccaagcctcccatgatagagaacacaaaaagacgccagaaaaccaggcctggcaaaaggcgtcacaaaataagaaagaatgacctgcaaggcaggcccaaggtgtaagtccggcaacaccctatggatgcagcacgctctggggggtcctcaaagatcaagacaaactggtcctgggtacccccacacttaaattccctgggcagaattcttccgagtgcagtgaatccagcctggagagacgccttcaacatggtcagtgttggctctggcgctttgcaatctcctcctggatacgcaacttgagggcttctcgcatgggtggatccagaggcgtggtgtgccgacaccttctcactcacctttcctgggtcatcaccctgatagacgataactgatgtgacctctccactgtctgcctcgtattctaagcagaagagctgatggccagaaggctccagctcagagcctccactactgctgctttcaccggactcttcatagtctgggttgcgtgggtgggcagagacatctcggtgtcgcggcaggtacacctgcaggtctggcttgcggggccgcgtcggcgcgggcgtgtgccgcctcctcaccttctccttggccgcctgcttcaccttcttgtcatagtcgtcccgagcgatctggttccgtcggatatggtgcacgaagccgtggttcatgtccagccgccccccaggcttgcagcagtgccccggccggggatgcggccccgcctccatcaggagccggggacgcagagtcgccgccgcctcgacggccccaaccgacgcgtgggttcgacgatatcccgggaattccgaccgtaca

SEQ ID NO: 151235 - DNA, 1175 bp, Homo Sapiens
tgttgtgtagggagctggtacaccgtgggtggtgtcgtcttgttgtctgcttcttgttgtgtgtgcttctctttttcgcgctgctgcgctttactcgtactgctgtgcctgtctcgttgcttgtccgctggctttggggcgttgtttttgtttgttgttcgtttcttgttccttgtatcgttgttgtcttttgggtgttctgttttgtcttgctttttcttctgctgtttgtgtggcgcactgggttgtgggtggtgcgtgtgcgttgtctgtattgcttgcgtgccttggtggagtgtgccttggtgcgcaggtgtggggcattgagttccgtgctacggtgctcaggctgtcctgggctgctgatatcttatctctgtttctgtgagttcttattactcgttgaatgtctctataatattgtgtccataagatcatttcaatcctcctgttagtcatgtggacatgcctatactgatatgcccatgcttgtcccttttcactccgcccactctagacttgcccatggtatcccagtaccctacactgttctaactggtggtatacatccttcccaggatccgatcagatctcactcccatctcagaaatttcccttacaccgacccatcggctgcgttgggcctcaaggattaatgactactactgactgttttattttgctctacaggcaaacttttgaaatctggtattcttgtgtaacccccaggacgtttgatttgctttaattccaaatttccatcgagagccgattgcacctgggaccttcctccactttcaccccaagttaacaccctcacatgcctatgcaactgattgctgtacctgaagaaatgaatttgctatgcatgtattgcctttgttgcatttgtaagttctcacatctcatcatgttcaaggatggcattgattttgctgcctctttttgtaaacagtctgcacctgactgcagaaatgttgttcttgagccaagtagaaatgacggaatggagcacacataggcatgacagaaagaacgtagcacgttctggtgtgggaggtcagttttcaatggcgttgactgtgatttccagtgacactctaggaagggcctgtttactcagcttcgacgcgtggcgacgcgtggtcgacgatatcccggaatccgagcgtacc

SEQ ID NO: 151236 - DNA, 857 bp, Homo Sapiens
  misc_feature (412)..(441): n is a, c, g, or t
acatatccagtgtcgttttaacaggtggcaacatcaccacaggtagctttgattatgtaatcaacacttttaactttccctacacatgtacatcaaatgtgaatggtggaatatacaatttaaccgtcctccttcaaactagctgaaaaactactctctcttatttcattttgcattttctaggcagtatttttccatgctctttaaaaacagacgcaggagctttggaagagcagaaatgcaattacttacatacaatatgatgagaagtgtttcatgatatacaaattgacataggacaagttattaacatagtacaagtttttactgtgtagaaaaaataaacttacaagtgaataaataaacaggctttctatatcaagttatgtatggagtataaaaagtagttacnnnnnnnnnnnnnnnnnnnnnnnnnnnnnnaatgtgcatgttctagagtataaatatactatatacttaaatatttcacgtgacagaacattatttcatctggtttcagttttgtacattaaaatacatctggcagttggggtctcccctgatctctggagacccagggatcctcttcccattccaagggtagacgcaccagcagagtcccgcctctccatccatggatgtctcacactgtctgctgtgataaaatccattcttgttgcagtttggcaggtaaaatttggaaatttcttctcctgatgtctcctgtgccttggctaaactctctacgactctgtagagttctattcggcagggctccttccatttttcgaacgcgtggtcgacgatatcccggaattccggaccgtaccagccgctttatacccactttaatttcc

SEQ ID NO: 151237 - DNA, 974 bp, Homo Sapiens
caaagtgctgggattacgggcgtgagccactgcgcccggctgaacggaactttttaatcttaagagcctagagtccgtttaacactgtcacctggacagttctttgcggtgaatagaagtggagcatccaggcctccccgtgccgtgggaagcacgccgccagctccgcacagtcaagtgatgtttgtgtaaccaccgactatacccctaggatccccaaggaaggagccacccctcggccagtcaccatgtctgcggtgctcctctcacgcccttgtccccttgggctcgggcatcacccctgctctcccctcagacctgggagtcacccctgcactccgaggtgggcgcagggccagctgtacccccgcaggcctgcaaggccccctccagcaacaccgacctgctcagctgcctccttgggccccctgaggccgcctcccaggggcccccggaggatctgctcagcgaggacccgctgctcctggcaagcccggcccctcccctgagcgtgcagagcaccccaagaggagggccccctgccgctgctgacccctttggcccgcttctgccgtcttcaggcaacaactcccagccctgctccaatcctgatctcttcggcgaatttctcaattcggactctgtgaccgtcccaccatccttcccgtctgcccacagctctccgcccccatcctgcagcgccgacttcctgcacctgggggatctgccaggagagcccagcaagatgacagcctcgtccagcaacccagacctgctgggaggatgggctgcctggaccgagactgcagcgtcggcagtggcccccacgccagccacagaaggccccctcttctctcctggaggtcagccggccccttgtggctctcaggccagctggaccaagtctcagaacccggaccatttgctgaccttgggaactcagtccggctcaagctcacagtggattcctctgg

SEQ ID NO: 151238 - DNA, 762 bp, Homo Sapiens
agactccatctcaaaataaaaagaaaagattcagttcctagttttgggggaggagggataaatcaactccatcctgtgctacagcccttttgactccctgacatttgatttgaggaaagagaaggggcatcaacgttggaagggcctcctcactttcttccgccgcttaggtttggcttctcccttgggtactgtgctgttgggcttagaggctgcagcggctccaggggcaggctgaggagctgcaaagaagttcccattgggcatctgcctgggggtacttgaaagatccgactcaagaaatcctgaagatcagcaggaggggcatctggggtggctctctgccgccctctggtgcctggaatccgagaaccaaatgagatgtgataggggactctgtgggtatctggggagatacctacacgctggcatccagcccactctgtgatgtcatacacctttccatccatcagtgcaaagtaggtgatcttgaggcccaacatgcttgactctgcccaaaagtctccttcctcagcaggatgcagcctattacactcagcacagtatctggcactcttaggttcccggtccatttcaaacctcctatgctttccttggcatcggctacacatcatagtattcattgcctccttgaggtcatcttgcagcttggacagaaactcatcggacgcgtgggtcgacgatatcccgggattccggaccgtaccagcctgcttttttgaccagtgtcataggtcccaa

SEQ ID NO: 151239 - DNA, 557 bp, Homo Sapiens
ttttcttctttgagggagactttgaaggtgagccctctgtgggacatggggccgctggtgaccgactcggattttgtccttagaggtatcaacatccgtgtcagacactggtggtcatctggctcaggcctttgctgaggatttcctctgccgtctgctcctcctccctcccgttgaccaccaccccttccggcatgggttgtttcgggctctgtggtggcggctttgcgttgtttctgtcttcttagtaccttcctctaaagacttggaaggagagactaaagggctctttgtctctgcctccttcgctgggctctgcgctggagaacgcaggtgcagactttgcaggtgagccaggctcttctgggagcagtttctttctctccatcaagttctagtttcttccgtctccacctctttcttgtactcctccaactcctggtcagtgagttggctgaaggggttgggcaccggtctcctctgaagtcgtctttggtatcctcgtctcccttggacatcagctggctctctgtagacgggcttcggctcttctcggc

SEQ ID NO: 151240 - DNA, 1282 bp, Homo Sapiens
  misc_feature (334)..(334): n is a, c, g, or t
gggaaggggttttcccttcccaaggattggatttccttaaattcccgggcccagttatccgggggagggagacaaagggtggtttcttttaaaacgggcccagttttccactttccccctgttcccaggcctcggggtaactttttcccccctgggggttgaccaggttttgccccccattttccgccaagagtaaaggggggagtttcgtgccataataaaaatccctccttcatgtctgaggaaaagcaattctttggtgccctccagccggtctgcaagtgtcctcaggaagccacttaatcgtcttgtagcaacagttgtggattccacntgcaggagcagctgccggggtatgccggtccgtaactccacgtcttcctttgcagtatcaaatacaagccccgagatggtatccaaaaggaaatctccccatgaattgttctggtaggtgctgatggtcacgtgagtcgagtgggccagccccgcaggagtgtcccgcttgatgaatggttcctcttgggaaagtaccaacaaatcacccggctttcagcataaactcatgcaccggcctgccgatccttttcctcggcctccacgctgtactctcgtgccaggggcacagtggggtggtagaggcgccagtgtttctctccctccagctgcaggatgaaaacctcgacatcatcataatggggcggcaggccctgagatcctgcgggagttatgtacacattcgagccaaccaaggagccaaagtaacattccagcttctcctggatcctccaaagctcatccttaaatctctgaggttggtgaaactgaatcgttgcccttttctgatcaaaatcttttctcagctgaagaaagtgtgctttgccatctttatttaaaaccttcttcttcccattgacacaccggcagacattcacatctcttccatagtacatcccccggctgcacagactcttcagatctgttagcttgaacagggacccatagtatgtggccagtgcagggtcatctctctgaatgagaaggggcttctgctcccagaattccttgaaaaaagtctctgtcttgatgggcgagattaaactttcaaagagactactgggactgtcaaagtttaaagctgaaggccccccagctgcttctaacttcatctgcttacagggagccggcccctcttccttcccactccctgtaggctttgctttctttggcatcgcgacgcgtgggtcgacgatatcccgggaaatccggagcggtaccagcctgc

SEQ ID NO: 151241 - DNA, 1283 bp, Homo Sapiens
gttctttcttgggggaacggtgaacatttttcaaatgaggatggtttgccttcccccaaagccggcatgtttcgccgaagctgaagttgattcggcgttttcattcctccaccatccttccccaggccctctcctttcttccaacccatcttctccaacatcttccgacctttgttgctatcagtaatttcagaatgaacagatgcaggagcatcatctctttggaaagttccttcacttccaacctgctccctacgttttgctctatctttatattttggattcttaaatgtcttttcatcttcgtattctgtatttctgtaaaccatattttactcgtattttctttaattcttttctttctttccaactctttttcctccttacttaagtgttggaccaacaaaagattcatctttcttatcaaggcgaaggtgggctctaacctgccctggttcacagccatcacaggtatcactgccaggatgaatgtgaaaggataagacagtttctccaattttgacttcatctccatgctcaagtacgtaagggtcacatttagttttcggctgaagaatctgttttcccattaacaattgtgccattttgactgcccttgatccacaaggacataactttgtaagtcatggtcaaaataaatttctgcatgaaacttactgacaccaacttcagggattcggagagtatgttccatatccttttctcttccaattgtagcagggtttacagcagtaatgataaagagtgatcctatctgcaacacaggtgatctaatgacaattactctaatacatgggggccaaattttgtcttcatcttcatcctcactatcttctgcagttacattgccttcactggtaatggcttcgtcataactatcctcagtctgagagtctgtaatttcaccttcctctggttcactatcagtctccatgattttctcatctttaaatgatgttgaattagagatgttttcatgaagaggagactctatagtatttccactagttggaacagtgactttggggggactatttttgtgatgaatgcctattttggccttctttttcatatttgcgaaattttcttcctccttgcagcttgtatgttcaacagctgaaggctttttgatcctctgagttcaaatccttcgactgcgtgggtcgacgatatcccggaaattccggagccggtagccagcgctgctttgtgttaaaccacgtgttctatagtcacagtaggcgcgtatgggtgtgtgtcgt

SEQ ID NO: 151242 - DNA, 1785 bp, Homo Sapiens
  misc_feature (496)..(496): n is a, c, g, or t
  misc_feature (922)..(998): n is a, c, g, or t
  misc_feature (1181)..(1413): n is a, c, g, or t
  misc_feature (1436)..(1469): n is a, c, g, or t
  misc_feature (1557)..(1617): n is a, c, g, or t
tcgcgagcagcatgacgcgcgtcagcgtgcgctgtgagcgccgataccactatcggatgcgatcctcgctgagcaacacccgcgcgcctcgcgcgccgccccactgcgcgcgggcggtacacgcatgcaggtgcgtgcgtcagatggtggccaaggagcgtcgtcgtggggtgctcgccggagatacatggcacacactcctcatagatcagctggtcatagaggagtggatgtacatggtgaccggatagttacattatggctcggggtttatgtgggtatcagagcccgcacgcgttgtgctgtgagcgagcgggcggttggggggcgtcacgcgcggcaagacgacaccgcccctcacgcacacgcgaaacccgcccggaatcataacgcaacacagaaaaaataccgataagccgagtgcacacgcgctaggggaggatacgctagtgaggaatcggtgggtgggataaggccggggcgcgaatcgggaganaggcgggcggggtgtcgcatcgccaaatacggccgcgagcacgctactcctctataggcacgtcggccatggagtagtcgatgagaggtggaccgccgtactgcgctcgcgaggaagaagttcagaatatgatcgacacggtcacgggcgataaacgaagagcggcggcggcagcacaccccggcgccccgccgcgacctaatgtaacgaacgaggcacaccgaaccgggtcgcgatgtgcacggaggtaaggggctgtcccatgcgacgcgagtgcgggatgcatgaaaacttgataaacgcacacagacgcgggaatccgcagacgatgcgtgcgctcacgggggcgcgccggcggcgacgcggatgttagtaggcgatgtccggtcgcggggcgggagattaccgtagtgattttgtggttcnnnnnnnnnnnnnnnnnnnnnnnnnnnnnnnnnnnnnnnnnnnnnnnnnnnnnnnnnnnnnnnnnnnnnnnnnnnnngcgaaagacactcatttatttgttgataacacaagccaaacaaaaacatatctggggatgaatctgcgaaacctactagggttaaaattttacttctcttaattgtttggcttccaaaacatatttggcttccaaaacagattcaaattcaaaaaatatttacggccagctgtgtggctcatnnnnnnnnnnnnnnnnnnnnnnnnnnnnnnnnnnnnnnnnnnnnnnnnnnnnnnnnnnnnnnnnnnnnnnnnnnnnnnnnnnnnnnnnnnnnnnnnnnnnnnnnnnnnnnnnnnnnnnnnnnnnnnnnnnnnnnnnnnnnnnnnnnnnnnnnnnnnnnnnnnnnnnnnnnnnnnnnnnnnnnnnnnnnnnnnnnnnnnnnnnnnnnnnnnnnnnnnnnnnnnnnnnnnnnnnntgacagagtgagactctgtctcnnnnnnnnnnnnnnnnnnnnnnnnnnnnnnnnnntgtacaagtgcccactaggtagaaggtatatatcattagaatgagacatgcctattaaatgttattgttgccgggtgcgctggctcannnnnnnnnnnnnnnnnnnnnnnnnnnnnnnnnnnnnnnnnnnnnnnnnnnnnnnnnnnnnaaccagcctgaccatatggtgaaaccctgtctctactaaaaatacaaaattagctgggcatggtggtgtaataccaactactcaggaagcgacgcgtggtcgacgatatcccgggaattccgaccggtaccagcctgctttgtttaaacgctgttctatattcaccat

SEQ ID NO: 151243 - DNA, 985 bp, Homo Sapiens
tgtgcctttctgctgtttgctgctgtgttgccccttcttttgccttgtttgttcgtttgtgtattcgcttgttggtccccgcttgtggccgtctggggtgcagtgtttactcgtggccgcttatactcggcctgtttggtcccgcttcactccgcacttcctgggttcgtgtctccgctgtcatgcccttcctctttgactgttcttggcattaggcctgaacttgctggctcgccgtgttctggacatgtgacccgacggcctgtgatccttgtgcttgacagcaggcagtcaaaacgagctgcggcactggggagtagagcagagtttatactggtcccagcgggctccacagtatgaacactcttgacaccacatcactgttgtaggacagagcatagcgttcatcaaaaacatactacttccctttgtaaaagccatcaggtaactccttccaggtacttgtggatgccacccttgagctggaacacctccttgcacactcccttggctttgaggtaggctgaaccccgctcacagcggatgcccccggtacagtacatcagcactctcttctctctgaaaagttctagatttttgtcaacgtagctagggaagtaactgaatttcctgatgtctggggctaagcagccttggaatcgtcctattttgctttcatagaagtttctgcaatcaagaaggatagtatcactttgttcttgatttgcctgagataaaaacttttctacttctttatgaaattcacctggggataaatggattccaggcttcttgtaggagatctttttggggctgatccccatgggcacgatttcttctaaatacaccacacgctattctggaaaacagtgagctcctcctttgctggtcgtcagatcatctttacacaggtcatccttaaacgatgggaaggatagcacggacgcgtggtcgactatatcccgggataccggccgggtaccag

SEQ ID NO: 151244 - DNA, 1042 bp, Homo Sapiens
gccgccgatgcgtataggccgcttattaatcgaataccaggagtgccacaattaccggctccgggcgcatccccagggcgctcaaacccagcccgttcccagcgccgtgacgcgctgctcgtaaccgccccatggccctttgacaaacggacgcgtaagttgccccccgaggatctcttgcgcccacacatgaggttcaagtgcaccaattggtaaggagaagcaaacactgccaaggagggggtcctgggccaaggtggtgagccaagtgggccaggtagagggcacgcttgcggaagtagcgctggttcagcccgtccttgtcctgtaggatttccctgggcatggtcagtgccacatccacattgatgtctggtcggatgccaggtgcccagaaggtagctgcccacaacagtaacctgggctgggggcaggaagcggaaacagcccttcacggcatagggcacttggtggaggggcactcgaaccccagctgggagccatgcctggtcagtgagctctgtctcagggactgagggcaccctcacaaccccgctggttgacctcccgtaggaaggcatcaatccgatccttcttcttctctgacagccttacttcctttagtagctcctctacctgtaaacgaagcaagctggagtggaacaagatctcagtctcccgaaggcgattaagctcctcacttggtaggctccttgtacagttctgccctgctgagcttcactggctgcaggaggccctctcgctggaggttcagccaatgtacgcttcctggaggatgctttcttcccctctttgcctgtgcccctcccagggctggttccatcacctctggctctccatcgcctccgcgaagctgctctccagctggcgccggccccatcactcagggtccagcactctcccgcacttcagattctagccgggtctatacctcatcgacgcgtgggtcgacgatatcccgggaattccggaccgtacagcctgctttttgaccactgttcatattcactatgcgcgccgg

SEQ ID NO: 151245 - DNA, 1063 bp, Homo Sapiens
tctcgtacaggctgcttctgttcctgtcgggcgggtgcgtgcgttcgtgttttgttggggctttttgtatgtcgactgcgctttggaatcgtcgtatacgttgtgcagttgtgtgttgcggctttgactttcgttttatgctggttcctcccatgtgctattccggtattgtgcattacccgtgtccttgcgtgtcaccagtggccgagcgagtctgttcgccgacctgagcgtcatgaataaatccatgcgcacgtaaggaaccattgatgatgctgtcagagcaattcataaagctatcactggaggcagaagtacctggacgcgagtgcctggagtcagaccaacaggcgacaggtgtaatcgttcttagaatccatcactgagctaaagtgcctacgataccaaaagaccagcaaggagtacagggtacagtcacagacaaatgggtttccatgaaggtagatgcctctcagctgttttcctggcactaaatttatgtggtgcattggcatggaaggaattcggttataagaaacatctgatgacatcagttctgccagcttgaaccttccaacatacaaatccatcggaaactgtgtgagaaaatttccacttaagtagagtttctgcaactgggagagccctccaaacgctgaaggatcgagataggatatgtgattgttgtaaagcagaagcacttccagaaccttcaactcttggaatacagcatttttcaccgtcttcagcttattggacgataagtcaagacacttcaaatttggagttgtggaaaaactgcccgtggaaatgctggtgatgttgttatgacgaagaattagggtgttcagctttgcaaacgatactggaatccactcagaatccagaagcccaattctgttataactcaggtccagtctcttaatcagtctgaaaaggttcccaggcaccttggacaggtttttgttggtgcagctgaccggacgcgtgggtcgacgatatcccgggaattccggaccgtaccagcctgctttttgaactaactgttctatagtcacatgca

SEQ ID NO: 151246 - DNA, 833 bp, Homo Sapiens
cgggccttgtggacatgtatgtagtgaccaccgctccggtcagtgatatccgagtccatgcgttgtggttcattgggtatccagcaacaaggcccccagctgccgaggtgctgcctccatcaccctagctggccctccgggaggcacctggggccggtactgtccagcagcctggcgtatagctaccagactctcagggctgccatgcagtggccagcctgcagcgatggaagatgtgtgtgaagtgatcgatgggaaactgggccgagaccaacctgccggcagtgatgagggtggtaatgtaagacccggtattcctgcagcttcttcgtggcgggaaatacatactgcccccttctttgcgtcccaggtgcagcagggcttgatgtcctcaggtaccatgcggatgtccctgctgggggccaggaggcggtagtatggagctatgaaggtggacccggagcctttgacagagtaggtcatgccctgagttggatggagcgcaggtccaagatgtgggctttgggcaagtgcttcaccacctgcttaattgcctccactaacgtgacagtcttgccggtgcctggagggccaaagatgatgtagggggctggacgggtggtgcccgtaacaatgtgcctcatggcctgcagctgctctgggtttgactccagactccggtcgtacagcttgagtttcacatctgagggcagcagcgggtcgtgccgaggtgtcacaggaaagagcatgggccgcagcagccagcgcctgtcagctccagggcacggtgctgcgacgcgtggtcgacgatatcccgggaatccgagcgtaca

SEQ ID NO: 151247 - DNA, 1020 bp, Homo Sapiens
acgcttggaatatgaacagctggttaaaaaagcaggctggtacggtccggtattcccgggatatcgtacgaccacgcagtcgatggcctgcgggtcacagtctccctgaaggagctgcagagtaacttaggggtaccgccaggccggggaagctgcccgctcaccatgcccctgcccttcgacctcatctacaccgactaccacggcctgcagcagatgaagcggcacatgggagtctccttcaagaagtaccggtgccgaatcagggtcatcgacacctttgggacggaacctgcgtacaaccacgaggagtacgccactgctgcacggctaccggaccaactgggtgctactggaacctcaagcccaagcagttcatgaccatgtttcgggaaggagaagttcctgggcatcctgaacaaatacatggagatccatggcaccgtgtactacgagagccagcggccccccgaggtgccagccattatgtgaagaaccacgggctcttaccgcagcctgagtttcagcagctgctgcgcaaggccaaactcttcatcgggttaggcttcccctacgatggccccgacccccctggaggccatcgccaatggttgcatcttcctgcagtcccgcgttcagcccaccccacagctaccactcaaccacgagttcttccgaggcaagcccacactacagacgagggtgactcccagacatccctacggccggagaacacgtcactcggacagcccacacgtgtggacagccgacctacacaacacagaggacgtcgaagccagccatcaaggcccacacatacacaatcacggcttcacccccatagacatacccctaagtcagttccacctgcgcagtgcgaattcatcacacgcgactcacaccaatacacccaccaccacgggccactcgtgccatgcatccagacccgttccacacaaaaagggccacaagacagcagcagcccctatgttacagaccaccactgccatcaccctctca

SEQ ID NO: 151248 - DNA, 459 bp, Homo Sapiens
  misc_feature (110)..(119): n is a, c, g, or t
aatgatctataagttttcccaagggaacaagagttacttcatattgagccaaatagcaatcagctttccaaaggccttcttttcttttgtgctttcatatactgtcctcnnnnnnnnnnaggcctttgaactggccacaggtgactatttgtttgaacctcattcaggggaagagtacactcgagatgaaggtgagtccccttaaccatggatgtgtgtgcgtggtatttacactttccacattaagctaacatcatttgttagtaccgaagagccttagtcttgttagtgtgcaaaacatgtaaatcccagaaaagttagaaatataaaagacattttatattaggtttttagatattttctgaaagatactaaagagctctgtcagagtcaaaaggccacagttcacctaaaacttctgtgtgctggacaattttttcttcaacatctagttatctt

SEQ ID NO: 151249 - DNA, 1223 bp, Homo Sapiens
  misc_feature (623)..(944): n is a, c, g, or t
  misc_feature (1212)..(1212): n is a, c, g, or t
agtaaactacctacttcctccacctcaaagctgttgggatcaggtttccatgacagcttcacaagcgtgcaatttgtggcttggttccaagttcccttacaagtaaacctttcccgtccgtcaccacaggacaacatccaactgtcttagaattttttctctgtaaatttatacttgactttgttctaaatatgactggaggcatccactccttggcttggcattcaggctttttatgagctggccccaacctccttcttggggcttctctgtggatgcagtttagggataaaagcaacagcctccgtttctggagctgccactggagtgacaggctggtggcaaagaacacgcactgaccagcgcctggaacaggctgagctgctgtgtgagcctgggtaagtctcttctcctcaatgtcctcatctgtaaaatgaggacattcaggatacagacctcccactgttgtgaggctgcaaggatacgcccgtggcaggcttagcacagctggtgctcagttaatgatgatggttttcttacctgattttgaaacctggttctccacttaactgcctatgtgacgagcgacctaactgttctaggcgccaatgtgaccatatgtnnnnnnnnnnnnnnnnnnnnnnnnnnnnnnnnnnnnnnnnnnnnnnnnnnnnnnnnnnnnnnnnnnnnnnnnnnnnnnnnnnnnnnnnnnnnnnnnnnnnnnnnnnnnnnnnnnnnnnnnnnnnnnnnnnnnnnnnnnnnnnnnnnnnnnnnnnnnnnnnnnnnnnnnnnnnnnnnnnnnnnnnnnnnnnnnnnnnnnnnnnnnnnnnnnnnnnnnnnnnnnnnnnnnnnnnnnnnnnnnnnnnnnnnnnnnnnnnnnnnnnnnnnnnnnnnnnnnnnnnnnnnnnnnnnnnnnnnnnnnnnnnnnnnnnnnnnnnnnnnnnctgaccatacccaccacataacccacttacagggtatgaaaacagaagaggcctagtgaatgtttgtttggcggctgtggccaggatcgttcccccagaatgcatgctgcttgccccttaacttttaaaaatcagcctattctcactttccttttatttcagattaatgaagaaaggggggccttctccttcttctccgacgcgtgggtcgacgatatcccgggaattccggaccgtaccagcctgctttttcaccactgtcagtcangcgctaatcgc

SEQ ID NO: 151250 - DNA, 1078 bp, Homo Sapiens
tgggcagcacagtgctccccaatttcaagatcctccgaactttgaaaagaggcttgcggacgatcgactgcagcagtgctcatgctaaagtctcaacctcagtgtcttttttgtagaatcccaaaatccatccagctaatttaagtcattcagaaattcctgaacaagttcaacagcagattttgcttaccaggggctcgagccattcagtgacaccagtcctcaaaccatcagccaaaacaagaagaaatttcagttctctgtagagatgattcaaaggacctctgggctctcctgattccactttaatattcagagttgcagttgaagagattggagggttttgaagaatctcatccacaggactccaggaaatatccaaagcgatcgcagtttgtgatgctgtgattgtatcatccaaggcagaggacttaaagagctcatactgggcaaagcctttggatgttacagtagacaagtgatgtcttttcttgtgtaaattttttaggttttcaagatttacagaataatttttatcagctttacaactgaccacatataagacaattcctgtaatcgctgttgctttgttgtgataagctcagctcctagccaacaagtaccttcaggatgctgaactgtcacatcttaccccaaggggaggaagggcagtaactggcagattaatcttcaaatgggtcatattaggattgtgagccatggtgtaaagtcctattaactgccttgccttcccaactggtaaagcaagtggtccaacattttcgccagtagagaaatcagatatggcagtttcttcagattgaagttcttcaatatgacttgtttcttccttcttctaaaggcactttttccactatgaatactatgtcattttcatttagaatatttttcaagggtttggttggcctttgctgatcaactgcacttggacatcagcctcatagagaaatgggtctttacggattcctttcttttcttccattaaatttctgaaggagacgagaataaaaccgaacgcgtgggtcgacgatatcccgggaaaccggagcgggtacca

SEQ ID NO: 151251 - DNA, 811 bp, Homo Sapiens
cgcagttcagtttggcggttccggtaccgctctcacatggggcgggatgtgggagcggcgtgaactgcgcagcagaggacgttttattctcgtctccttcagaaatttaatgaagaaaagaaaggaatccgtaaagacccatttctctatgaggctgatgtccaagtgcagttgatcagcaaaggccaaccaaaccctttgaaaaatattctaaatgaaaatgacatagtattcatagtggaaaaagtgcctttagaaaaggaagaaacaagtcatattgaagaacttcaatctgaagaaactgccatatctgatttctctactggcgaaaatgttggaccacttgctttaccagttgggaaggcaaggcagttaattggactttacaccatggctcacaatcctaatatgacccatttgaagattaatctgccagttactgcccttcctccccttgtggctgataaaaattattctgtaaatcttgaaaacctaaaaaatttacacaagaaaagacatcacttgtctactgtaacatccaaaggctttgcccagtatgagctctttaagtcctctgccttggatgatacaatcacagcatcacaaactgcgatcgctttggatatttcctggagtcctgtggatgagattcttcaaatccctccactctcttcaacgtgcaactctgaatattaaagtggaatcaggagagcccagaggtcctttgaatcatctctacagagaactgaaatttcttcttgttatggctgatggtttgaggacttggtgtcactgaatggctcgagcccct

SEQ ID NO: 151252 - DNA, 720 bp, Homo Sapiens
gcccacagccgtcccggggtcgtcctgatgcataagagcagagacccggaagagaaacccgcctccccgtgtgatacagggctcccaaacgcttcccggtggaccctgctcccgaggacaccttgtctcgctccacggaacccttcccccagcaccccctggaaacacagcagccaggaacaaattctccatgccaggaacaaagcccttggctaaactggagactcatcagtgcacagatggtggtgaggggtgagggcaggccgtggggtggtgctcagccctggggacaccatcactgtcctgctctgacccacaggtgagaggaggatgctgtgctcccggagtgtggcgccgggaggatggctcggcaggacagaggcctggggctgaggctatgcccagggccggtgtggggagggacatgggggcctttgcagaagcagctcagagaactgaggttggaatcctgccccaagcacaggattttggggacagcgagtgcctagacaaggcaggtaacgtggcagccaccgggctggtccagaaaacaaggtgctgaagacgtcgttgaagaaggtggggtggtacctgcaggctcgctcacagtcggggttgaagtcgacgcgtgggtcgacgatatcccgggaattccggaccgtaacagcctgctttttgaacaactggttcatagttaccaagtgattgaactggggcagt

SEQ ID NO: 151253 - DNA, 893 bp, Homo Sapiens
gatttgtcctgttccaagaatgtgtggttccccttcctgagagagtattcgggttttcttcttcaggggcactgcctatcaacagttgtacctcaaggttcattctcatcttttcctggcagagtctccccagctttcaatcacttgaggattgatcttttttctgtaccagtaaatcgatgaggcaaagaagcagaccattccccatcacctgcattcagaactatcttcatctttgtcatagagtttggtaataatctccacagccattccaaaaggtgttatccacttcttgccttcctgctgtggctccactttctgatgtcatttggttattttctgtttccctttgtgtaataactcttgagtatggtggatccaagaacatacagtcatgctctccatcatattcgtgtcacattttattaagaggtcatctgagccactttcctcaacttccaaagcctctctccatctttgaacacttctttgtttcgcctcatgcctattaaaacctgtttcttggtccacctggcttgaacttatcagttttctaacttttggcctcactacctgttcaggagaacttccatggttcttttccctatcattggtatttcgttcactacctatatgcctggaccacaggctgcatcttcaggtgaatgctctgtctgtctcttcctggctatggtatttattatttgttgtttcgtactcaaccactttcatcttgagaagacctgccgtgaatttcctggctattctgatggacaaactcacggtatcaccagcagacgttttcactaatgggcacagatctaactgctgacgactcatcttatgcgaacgcgtgggtcgacgatttctcgggaatccggagccgtaacagg

SEQ ID NO: 151254 - DNA, 440 bp, Homo Sapiens
gcctggcttacctgtgaggtgctgttggctctgggtatgaggactgcaagtggaagtgctgaggccagtggttgtgttggagtctggtgtgagggtggttaaattgactaggaggcagagggaggggtgttaggagaagcgcaagttactgcccgtgcctgggcctgcccctgccatcccctgcagggatgcagccctcacccagctccaggaagaggatgctggtgtttttgcccaggtcgttggaggccgtgcattcaacacctgtctccaacagctccggggtcacgaggacattcagggtgctcaggactcgctgtggatcttggtcttgttcacttgccgtgccgttgacgttccaggagatggtgggccgggggtgccctgacgcttcacaagacagattcaaccgcatcacccgttcggggatcctcagagcg

SEQ ID NO: 151255 - DNA, 1048 bp, Homo Sapiens
  misc_feature (14)..(14): n is a, c, g, or t
  misc_feature (175)..(175): n is a, c, g, or t
taaaaagggataanggcagcccaaatttaaatgaattttggttgcagaaaaacatctccaggtattaactctcatcttcaaatattaagagcacataattaaaagataaagtttcttctcttaacaggaaactaagcagctattgtcatcaaatgtactttttacatgtactttntagtgaagggccccctcataaatataaaattaaattcttttgaggaataggtttgtgattttagttatgcaggatttacatttatcctttacattttgtagtaaaaaatgtgtggtctttgcttattttcatgaagtgatttcttcatctcagcaggctctcacatacaaacggcaggctgggttactcagcttgtttctgaaaggggaggcagccacatgtcatgtgctcttagaatccttgcaaaaactcctgtagctgggtgacaatctccgtatccactgtttccatgagggactggaaaccttgttctcctagcatctcctgctgtgccttgagcttctcgtagatgaactgctgcagtgacactgtatgaacagggtccttcagggccagcatctttttcctcttatcttgttctgtgggtggttcttcatcttctgttacttttggttcctcaagatgagacatcaacatacagtctttataagttcctgtttcaggatcttccgtcatgacatcatgcaggccttctactgaaatgtttataatcccacagaatttatcttggataacactattatcagatggcagaagagagagcaaagccaaagctgaaagttttcttctttcaggctgggtaatgttgtccattcgatcaacccacatttcaatcatatttcccaaaagctggtccatctcctgattaaatttatgggccatctcacttaagtagtgaagaaaacaaactagtgttttgtagtagaactcgaacccataactccaagatacgtggacatcactacagatacctctccccttctattataccccgacgcgtggtcgacgatatcccggtacttccgagcgttc

SEQ ID NO: 151256 - DNA, 918 bp, Homo Sapiens
tatgtccccaacggggttcgcatgagcaaggtctttccccagactcagccacaggccaaaactcaatccgccctttctcagaggatgaaaaacagcttttttctggaaccgccacttcacaaaggactgaattcccgcaaaaaccacaagagttaagattttcctgccctaaatggcatcaccttggcattgactacaccattggaaagcacagagtcttgtctatgtgggtctggaattcctgaactacagccttagaaggggaagggcgtagaaatatcatcattaactggctcacaaggaatagtcatcttgggcgaacacatgctaatacgtttcacagaatgaggggtgacagcctagaatccaaaatgtgatgtttggaacatttctcgccaaaccttactatgaaagcctgcaaccagtgagaggagaactgcaaagacggcagcagagaaacagcaaacagcacaaaagagataatttaccaagagactttccctcctttcagaggcaaccaagccagaaggagatgacagaagttcacgtgtacagagaacagaagggctaaaaccagaagaaggtgagctaatcatgaaagcaatttatcccatttttgttgttcaataacactggccaacctgctagggtcagatgtcttcttcagaaaggcagcatctctgaacctgggataaaggacacttgaactgaatgcatgagcagaaggacccaatggagaagcataattgaaatcatccttggactgcttaagaatttcttgaaaacttccaagaaagaaggttatctggatctgcagctatatggctgtataactatcttctacctgctcctcctggaagagtctttgcgacgcgtgggtcgacatatcccggatatccggacggtaccagcccttgc

SEQ ID NO: 151257 - DNA, 1279 bp, Homo Sapiens
tatttgctttgggttgttgctcttctttgtgtgtgcctctttgtgtgttgactttgtgtccgggtgtctcttttcttgtttcgttgtctgtccgttgtgtgccgtgtgctggggtccctgtgttggtcacttcgtggtgagggtgtccacgtggtggctttatttactgtattgtgctttccgcccgtgtttgtgctgggcctgtctgtgctttccagcgtctgtttacgtttcgccccgtgtttccatcagtcatcctcagtaattaacgttcttcaaaaggttcaatggtacatcccagtgtcgtctgataatgttagatgtcctcagcatccttcgctagtgtgaatgaaaggcatgatgaatccattccaaagcccagtgggtccacttactccagacgtttctgctatgaagatcagcacctccaagatcctcagcagatacttcttgccccagttccgcttgaaccaagggggtcctgccaagtatgtggtaccctgcttgcgtactatgatgttttcaatcatccatgtcaggcacataggctcctcctgcggtgcaggagcccatgaccactgcgatctgtgccatatttttagaagacataattgcctgattatagaatgtacggcctaagtggtctcgatctggttacacatctgcttgtcgaggtaagtatgctcctcccgaatcaactaagtagatgcaggggagcctgttttgcatggcaatttcttgggcccgtaattgttttttcacagtcactgggtagtaggcacctcctttgacggtggcatcattggcaataatcatgcattctactcctgatactcttccaatgcctgtaataatgccacctcctggcacctcctcattgtcatataactggtaacctgcaaactgggataattccagaaatggagaccctgggtctatgagattgtcaattctttctctgggcactagttttcctcttgatatgtgaagtgctcgggctttctcaccacctcctagttttatatgctccactcgttcatggagctgatttactagtgctttcatctgcttgtagttctcctggtagagggcagagcccaagtccggctgggtgcccagcgaggccaccgagtccccgtgataggcgcgcggcccggcgggagaggcgcgggcacacggccgcagggctaacctcaggacggcccacatggcggcgggcaccgagcgagagagcggcccacgctggcctggagccggtgctttcccctgccgcttcctg

SEQ ID NO: 151258 - DNA, 505 bp, Homo Sapiens
taccagattatatgacatgaggaggtgccaggaggtggcattattacaggcataggaagagtatcaggagtagaatgcatgattattgccaatgatgccaccgtcaaaggaggtgcctactacccagtgactgtgaaaaaacaattacgggcccaagaaattgccatgcaaaacaggctcccctgcatctacttagttgattcgggaggagcatacttacctcgacaagcagatgtgtttccagatcgagaccactttggccgtacattctataatcaggcaattatgtcttctaaaaatattgcacaggttaaagcggcaactggggaagaagtatctgctgaggatcttggaggtgctgatcttcattgcagaaagtctggagtaagtgaccactgggctttggatgatcatcatgcccttcactcaactaggaaggttgtgaggaatctaaattatcagaagaaattggatgtcaccattgaacgcttactaagagccttta

SEQ ID NO: 151259 - DNA, 1028 bp, Homo Sapiens
ctcttgacagcattttatttggttcaaatgtgaaactcaaaccctggctcacccacttctcatcgtggctggagtagatttgtcctgaggggggatcattggcttcttatcgggacatgaaaagggaagcacataggtcacatcaagtgtcagggcagggagaggcccaacgactgctggccgggtagggcttggccataagccaggaaagggatgcctggtaccaccttttagacacatgcagagggagaggagacaattcaggagtggtcttagggtttgggctttgagcaggcctagggcagagtcaaggctccggtccaaggggttcaggtgactgtgggccagaagacttggtccagctcacctgctctgctccttctgggactctgtcaccacctcgccattccgggtctctatggtcttgatcagaaccgtctgtccggctgtggtctgtcctggggaggctccacctcaggcacagtcgtctttatatgttaaggaggcacaagaatggacgggcatcggagatccggctctcctcgcccttccagccggttgcggtatgttggcgatctcgatgtccagggccatcttgacgttgaggagctcctggtactccctcaggtgccgcgccatctcctcttttagctgtcgcagctcctcctcgagccgcgcagcgcccgcctggtagccccccgcctccagggcgaactgctcctccagctctctcaactgcctgagcagcgcctcgttcgtccgcgcagcccgtccacctcgcacgttagactctggatctggcgtcgggactcgttcatctcctgcttggcctggcgcagggcctcgtggttccggttggcagcgtcggacaggtccgcgtactgagaagtgcggggtaacccaggctttagtcggtctggatcgcgcgaccgacgcgtgggtcgactgatatcccgggaattccggaccgtaccagcctgcttttttaaacactgttctatagttcactactgcgctattttttcctc

SEQ ID NO: 151260 - DNA, 987 bp, Homo Sapiens
  misc_feature (671)..(671): n is a, c, g, or t
gtaatgtgcgttgcttttcatgctaacttggggatgtgattgtgtgtgtccagagattgagtgattgtcccatgcgcctagtgtggtgagtactttctcagattgttacttgttagattcttgaatgcatggatcccgacagttcccaagacccagcactggtccccctttgggatgtaggtgcttatgcccatcccggaccggttaagtccctgctcgaataagtgacatcttagagcccccacgccttaggtaaatggagaagttcccttgcgactactgtcagccacgatgagagtcaccacgagcatccacacacatccagcaatgcagcggatatcctcattctccgagaagaagtggctaatctggcgacccagctgcccatcagggcctacagagccaatggaaaagccaccctccaggtggtgctcattctgccgattctccagattgaggcctaagccctgggtgaagtaagacggtgccctcagcatcacaggtgacaaatttgggccgcacagcactacataggcagctgtatttgaccacccctgatcctcgatcaactgtgaaacaccaaagctttccaccttccacatcggttactacaaactggccagatggcaaggctgtgataccccatggtttgctcagctggctcctgtgancaggccacgcagtggccatccaaggtatataccttgagggagttatcatagctgtcagtcacaccaatcagcccctggcagttcattgccactgagagaggagtgaggttgtggtagatctgccccaaggaagcttagcacaaagctatcaatgccactggggctgcggcggatttccttcaaaaagcctttgcgggtcaagacttgtatacgatagttaccacggtcagcgaccggaacgcgtggtcgacgatatcccgggattccgaccgtaccagcctgcttttatgaaccactgttctatattcacaatgcc

SEQ ID NO: 151261 - DNA, 1088 bp, Homo Sapiens
aaggagcgaggcctgggtggcgttctcggacgagggcaggaaccatgttcatgcccccatgagaagtgcccgactgagggaagtcagcttcccataggtgagggggctgttgccattatgggctcagaatctaaatcttactgatccctagtagtaagacaattgccaagaaattgtcctagcaggtactacccaagtgttacaggctctgcataggtcctcaaacactttaaaggacacgaaccatcaaattcaaaagagtagtgtttgttctatcagttctgaatgtccacagggagaggcaactagatttatgtggcaaaagtgctgtttgaaggagctgtgttttatttcgaagtgaaatgactttgggaaccagaacatttctgcagatgtctgaatatcaagaacctatctctaaaaggcatttatcaggaaatgttcgctcactccaagtgctttttaaaaattcaacatatggcaatgttttaatttttgtgctttcaagaggtaactaaatcgataggaagctgagggaagatcattccattatggactttcttgtttgggtgcaagacactatccacagcattgaaatctataatctcataaaagattcttataaacatataccatatttctcctataagaaaaactgagaactgtaccatgaaggcaaaatttgtttgcctactctcagaattccttggaatggcaatgtaccaggagggtgagtgaactgttggtgaaaattccgggtttgacatggcccagttctgatcacatcaaaaacctaaagcctcaatgattaaatgccaaacttcttccctgcatctgagaactgtattatgattatgtatattacccataccttataaataaaatttatatagacctacagtttcttccaaacaattgagtgatgttctcagtttgggggtggaagcaggaagaggtgaaaaaatcttattgttgcttctactctcaagttcttaaacgctagtcaaacaccgacgcgtggtcgacatatcccgggaaaccgaccgtaccagcctgcttttttacacactgttctatattccatttgc

SEQ ID NO: 151262 - DNA, 913 bp, Homo Sapiens
agaaagtatatgggttctacactttttgtggtaattcaaagtgggaacttggtgattctgcttgtcaggcatatcttatggttcgtatcacagatcgtaactatgacctgaagtaaggatgaagttgtcctcttttctataggggatctaacttgagccctcactggagatcaaatgttttggccagttcaattttgctaaatgtatgggtaaactctccaatgaatagtccaaatgttactgtgcacatattcggatattcattagcactgcaattatgctaattttgtgaatttaaacaatgtattctttttggcaagaagcactagatgtagaactattcaaacacgcatgaatgataccatgataccacgaacatgcacgataccatgaacttgcatcacggtgccgggctacgtatgtgtagctcatggattaccatggcatgaaaatgctagaagttatatggatacaatgatagtggaagttcaaatgtgagaaaagtcaggtatgtcaagaacaatccctggttagttcactgaaaagccccactctcgtatcagacagcaagacagaacaacagccactgacttggaaaggctgggtgatccataacgaccaatctttcaaggaccaataaaatacctgagtacacagtcagctatacagtaaaatgacagatatcacagtcttaaaattttcaggaaaagtagaaaagctgtcagacttttcaagctgtcgccagccttggacttctgtttctctaattgcagtactgaaatactatcttctaggctgtatgtagtgctacaattagcctagaagatagtatttcagtactgcaaaccagccattctgatgagttcactatgaatgtatctgcgatcacaaagctacttcgtggacacatttt

SEQ ID NO: 151263 - DNA, 1556 bp, Homo Sapiens
  misc_feature (63)..(77): n is a, c, g, or t
  misc_feature (140)..(149): n is a, c, g, or t
cactgggggccaagatggctccaggtgctctcagcatcaatgggaagagctgccagccaaagnnnnnnnnnnnnnnnggagaatgccttcctatgcttttccacagatataatcactatttcatgcctgcaaaacctagnnnnnnnnnngaagctcctttgttccagataacctgtcaattcggaattccaaataccattttccttacaggagtagaatatactatatatccatatccatcttcttattgaagccttgatgagattttagcttaaaaggagaatcaggatccagatgctgaatggtgcttcagcaacctcacatgaagtgacttttgggtttgccacatagtctgagtttcttcgttgtgagcagctgggccaggccattgaggaacaccaaaaagatggtcatggacatgacaatcacatagtggctgatgcttgtcccaatatcaagccagctgccataatccttgaccaagaagaaaaaatgcaaagccataatgtctgatatgacgagaacaatgagaaaaaggctttttgacgataactgagtagtcaactgaactgcttcaaaaggcacacataccaagaacaaaggggattaaaatcttccacatcatcagggctcccatcataaaaggactgaacacagtcagaaagcaatagacagaggcaagatcaaagctgttaatagaagctatatttccagttccaaaaaatgctgtcactaagaagaaaacaaggaaaaaggccctacggatgtcatccagatatagctgtcgaaactgagttatatcagtattataagagaactggatactggtgagcttttgtttacagcaaacaccagattgttgtagagtttcttgttctatgtttatccagacaaacatcagacaagacaacactagtggaaagagagcttcataccctgtgcttagaagtaggtaggttgacatcaatgaaagaagtatgctgaacaatcgctgaaagagaactggagaactcagtagtggcacaaccaaggaagaggctaatgttgcccagctaataatttgattcatgagaggcagtccttgcttcctgagtagactactctgagtgctatacacaacatacatggagagcactgtgctcagcacctgtaacagatgtaccaatagctcttcctttataaagctatcttttcttttcatgagagatgttacaacacacagggataacagaagaaccagcaagcctgcacccatcactagagagatgtctggctttcgacctacaaccggcatcagtgggaacactgccaggagcaaagagaagaaagtccaactcagtgaggtcatctttgctcgagtccacagccgagtgagaaatggccaagctgcaaaggcagtaagtccacgcggtaagcatatagcggtagaaaaaactgagaactaatacttcattcccagggtaaaggctaacaggtacccaacaaatggctcagaggataggtctacaccgacgcgtggtcgacgatatcccgggattccgacgcgtaccagcctg

SEQ ID NO: 151264 - DNA, 943 bp, Homo Sapiens
  misc_feature (830)..(838): n is a, c, g, or t
ttctagttatatttcaaagttagcatcaaggggatttgctgttggattagacgagagttgaaacagaagtagaggagtcaaaagcaactttcagtttttgacctgagcatctggaaggttgaagttgcattaactgagatggagaagaccacagaagagattggtttgaaatatgtcaagtctagctccataaataagggataagacaagtgcattatgaatccaatcatggttttaacttttttgtactgaagacaataaacatttttgtaaacaaattaaatgttagtcattgctttctagtgttggatgttttgtaatattttatgccactttttgttagatactataatggcacgtgttcaagccatctgaagattgtttaaaaattcttttctaacatgaaactcatgtagttttagttttctcaccatgaccacaatgaactttcacatatttaaaattctgctaaaacgtttcaagttcagctttgatggggtagctgtatttataaaaatttgccattgaccattttctacataacatgcattttgactaacaagcataagtggaacatatggtatacatgagtccttgagagttgaagctttttcaacttaagtaataatgctgtgcagggtctttttaccttagtaaggagaagaggaaatgaggggagaaaaggagtgtaaagatgaaaaatgggaattttacatgaggcctcaatggacttgagaggctgctattaatttaaggcaatggttcactgcctcttgggagtcatagccttctttccaagtttgctgtgagtgacatactcccacctcagnnnnnnnnntgccctgatattcaacattttgcttacacattttaggaaattcacggattcacagagagctcacgacgcgtggtcgacgatatcccgggatatccggaccgtacc

SEQ ID NO: 151265 - DNA, 1010 bp, Homo Sapiens
tatgagggtgggtgccgggatttgaagagggcgttgaattgggattcggaaagccccaagcggccgtaggggggagtccctgcggggggtgggcccgtgtgaactcccgtgtgccagctgaagaagaccccggtggagccataccgctggtggggaagccgtggctgccgctgtgtcctttcaggtaaggctgcagcatgttcccgcagtgggtcctggcatgctggaagtactccttgtgatggttgcggtagaagacggagaagcggagcatgcggcctgcgatctgctcagctttctcctgaagctgagccaggtgctccttggcataatccccagtgcagaactccaccgtctcgctccagccggacaccaggtactccccatcgctctgcttcactgccgtctgcacggccacactgtactccgtgcgggggctcaggaaccagtggcctctcaccgtcatgggcagtggcactgccttggccacgagcttggtggggacgtcccggtgcttgaacttgttggaattcttattctccttcttgttaaggtcaatgaagtaatgggtgaccctctccaggtcactgtcctccatggcccaggagatgcggaaggagtcgcaggtgatgttgttgatctcaatgctgtggggcgtggacagcagctccatgctcccgtcagggttgtctcctgtggggactggctccactgggctctgcagaggaaaagctcgcagggaggacagggagagacctctgcgtggatgagctccccggcaggggacagcagccggacgcctgggtcacgggcagtggcgtgcgcttgctcctctcccggctgccaaggaggctgcttccatgccccgcagccagctcctgtctggctgtgcagcgcgtcgctgctgcccctggtgagacgatgttcccagctgagcagcgcaagaagagaggcaagagcgaaatcaaagcagcgtggaggagagagaggcatcccgggaattccggacc

SEQ ID NO: 151266 - DNA, 1007 bp, Homo Sapiens
  misc_feature (289)..(309): n is a, c, g, or t
  misc_feature (345)..(345): n is a, c, g, or t
  misc_feature (413)..(421): n is a, c, g, or t
  misc_feature (479)..(595): n is a, c, g, or t
ttccccccccgttattccccaccccttcaggagggttaaggcaggcggaccccctgaggttccagagtttggaggccaagctgggccaaccagggggaaacccccttctttttcttaaaaatataaaaattagccaggtggggggggtccatggctaatccccagctacctgggaaggcgaggccaggagaatcacttgaacctcgggaagtagagggttgcagtcagcccaagatcgtgcccattgcactccagtctgggtgaacaggagcgaacctcccatcctttnnnnnnnnnnnnnnnnnnnnngaacgagaaacttaaaaaaagaccccaaatacatantgctggagtacacaatagaactaaaaaatttaacaacaagctttaacagaagactcagttctacaggnnnnnnnnntaagcaaacttaaaagtaagtcatttgaaagttcctaattaaaacttaaagaatgagnnnnnnnnnnnnnnnnnnnnnnnnnnnnnnnnnnnnnnnnnnnnnnnnnnnnnnnnnnnnnnnnnnnnnnnnnnnnnnnnnnnnnnnnnnnnnnnnnnnnnnnnnnnnnnnnnnnnngggggtctggctacgatcttatgtatcttcacattgtagggctcttttctttgctccagacaggtgaccaggtctgggttagagatagcaacacccagggagaccaggttcctgtagttctccaacatcacatctctatacaaattctgctggtcagggtccaggcatttccactcttctggagagaattctatggccacatccctgaatgttaagagttccatttccccacttctgaagtattcgggagtcttagctaccaatcatccaatacccgcaggtcacagagcgacggaggctgaggctgtggccgaatcaccaaggcctcccacaactgagaacgcagagagatgaagcccctaacccgccctcgtgcggaattcgccacccaggcctcgctaccttaggaccg

SEQ ID NO: 151267 - DNA, 1033 bp, Homo Sapiens
  misc_feature (57)..(57): n is a, c, g, or t
  misc_feature (82)..(86): n is a, c, g, or t
  misc_feature (88)..(88): n is a, c, g, or t
  misc_feature (90)..(91): n is a, c, g, or t
  misc_feature (93)..(97): n is a, c, g, or t
cagtctgtgctgtcgtgaaaattccaaagaagatttgaaagtaagatcatttatttncggtcccttagaataggccaaaaannnnnanannannnnngacttaaaaaaacgagggctgtcccctgcagactctggcaggaccctgggctgctctgggggacacaggccaggggcagttcaccgacttgattcacagtgattctggtttgcctgtttctccatgtggccacgagtcggggacgtgtccagcagtgggcatgcctacaccttgtagttaagctcagcgttcatctgggtgtacatctcgtagatgacatcgatggtcgccgtgtagttgactaggaagaggcggatcttctccaggcactcctcctccgtaacattctgccccttggagagcgctttcaggaagtcagacttatagggtgctgcgtacagtgctgcctggaagatcttctgcacgatgccagccatggtacttcttgagggccatctcgtaggccttggtggcgttgacacggatgaggttgggttggttctcgtcccgctccccgtcgcagatgctctggaggaagacctggatgaagcggaggcctcttttcagccacatcagcgccagtgtggcccctactttgggccactctgcttccatacatttctttctccacctccaggatgttctgcagggtccggaacttggctgggttggtgtcgtacacagctttgattttcgtgatgttgccgcttatgtctgccttgatgggagtcaacactggggacccaaggcaatcgaagaagggcggcaggtgggacaccgcctcgaggaagggcccggtctcgatctgcttgtccgcgggcagcggcattcagcaagtgttcaggccagcagcgccatttcggggtccgaggcccgcggtgatgaccaccggcgccgcgggcgtcgaccgacgcgtggatcgacaatatcccggatatccgggaccgtacagccgcttgtaaccactggttcaagacaactttctccctctccctt

SEQ ID NO: 151268 - DNA, 586 bp, Homo Sapiens
tagctgctccttggaaaacgaccgctactgagtcacaggatgatcagttctatctgctacccgaggtttagaagctgaaacatcttctgcctccagagagaaaatacttgcttgtctaatgactccctgtggaaacgtgttgctcttgcactgaggacattttcctggtggcgccatcgccagagtctgttccatgtgtggaaggcagcaggcagggctctctgctggaaatgaccatccgctctggcctgtagcagctgcttgtaccgcctcttctgagtatactgtagccacaattcgatacatttgcacagcagtgctattctgtagtggtcccaggcagcatgcagtaaggggagcagctctctttcctttttctgctcaatctgagaccgccagaggttccaggaacctgtgcagcagcgtgacaccatgctgctggtgagcaagattccttcttatttgctggagatgagcgtgggtcacattgtcttttagggctctaaagcaaaaatacagctggctgtgcctgtggtgctcttctgccatctcaaactgggcagcttcttctgcacacagtagcgaa

SEQ ID NO: 151269 - DNA, 984 bp, Homo Sapiens
ttcccttttccttctttggtttgcctctctgtgttgatacaatctgaagttagttgctatgaccttttttatcccataaatgcaatattgtgctcttctcttatcatgttggttataccagcgtttccaaggtcccacgccgtagattcagtattattcaatggtttggacattgtgctttgtatgacccagtatgaatttagagatgagtgtctgttgaagttaatgtttagtgcgtggttggttatccgcgtcgatagctgaacattggtcagaatcctcatcggctcctacatttcgtcagataaccctgttgatcccgggtcacccccggcacctcctactaccttcaagtcaggatcttaccatgctgtgaccacccaccacccagatggtgctcttatcctaggccttgatgccactcggctacagcgaagcaggcgacgttcatacgggggtccccggtctgaaaggacctcaactgcacctgtaaggcctgccttgggtggtctgcgggcccttgcatgcccgggactcgcaggacctgcggtgggtggctgaagaccacactccattagacaggtcaaacgtcaaggaatctcccgcggtggaggtccctgcagggcccacgtgcggtgcccacgaccccgcggggatcttttaagtctccgtagctgctcccagttgctgggaaaagtttgcttcggagaaggcaggcgagcgcgcccacctgcgcgcaatggttggtaacacttccctgaacccacaggccgacccaggcaaagatcattttaaaatcctccgccggtgggagctgtggcctttcgctcagcggaggctcaggctgggccgggagaagaaccgtgccattgtttgctttactggaagtggagtaccgtgtcgacagcgtgggtcgacgatatcccgggaattccggaccgtaccagcctgcttttttaaacacggtctatattccatgacttt

SEQ ID NO: 151270 - DNA, 571 bp, Homo Sapiens
gtttaactgaactctctcaagaaaatgttttatgaaaaatttcatttatagtttcagccataggcagggagttttaagggatggaaaagttttcacaaactttagacaatgaaactatacttttggatgtatgtgatcaactcaacagttgttgacaacacaaccgaacatcagaaactaaaccagcaaataggcactaaataaggcaagtgggttaaatagttgaaaattggttagaaaacatgcaaaaataatactgagttttcttttaaaaagttttaaaccgtcattaaatgtttctttttgtagaaatctgaagagttctgcgtctgaatttgaaattggactttataaagcctagaaaacagaggaggcggtgccctgcccttgtcagttgttgttctctttggtggtgatggtaaccagctgcttggcagccttggcgatgtcgtacgcacactggatgacctgctgcgtgaccagctgaacgtctgtgggtgaaccggggtcccctgggagggtctcctagcactcttactgcagtccgtaggcacttgacctcaataggcga

SEQ ID NO: 151271 - DNA, 898 bp, Homo Sapiens
  misc_feature (38)..(38): n is a, c, g, or t
acacaaaacacgcgcttagtaacaagaccagtgattanaaaagcaggctggtaccgcgtcggatatcccgggatatcgtcgacccacgcgtccgaatttcctatcgcacgtctgctgcagacagtctcctggtttctcctcctaccttctccatttttctagtccctgcagggcataattggaatatcatttggagaaagtgtcatggaagttctgcgtccacagcttataagaattgatggccggaattacaggaagaatccagtccaagaacagacctatcaacatgaagaagatgaagaggacttctatcaaggctccatggagtgtgctgatgagccctgtgatgcctacgaggtggagcagaccccacaaggattccggtctactttgagggcccccagcttgctctataagcatatagttggaaagagaggggacactaggaagaaaatagaaatggagaccaaaacttctattagcattcctaaacctggacaagacggggaaattgtaatcactggccagcatcgaaatggtgtaatttcagcccgaacacggattgatgttcttttggacacttttcgaagaaagcagcccttcactcacttccttgcctttttcctcaatgacgttgaggttcaggaaggattcctgagattccaggcaggcagtcctggcgacgtgctccatggatcatggggttgacagcagcattttccagaatcctacaaccgcttcatctacctcttgggatgttggtgcttttgagtgaggaagagatccagcagacatgtgagatgctacagcagtgtaaagaggaattcattaatgatatttctgggggtaacccctagaagtggagatggcagggatagaatacatgaatgatgatcct

SEQ ID NO: 151272 - DNA, 1223 bp, Homo Sapiens
cttggccactggagttgacattagctccagcaggtcctggattctgcagctttggtccctatcttctggctcaaggtcagctccgggctcgcgcctgtgcctgctgtcagggcctccaggaccgagcgggcctttctcaaaggggcgggatcttcagccggtacaggatctctgcccgcagatagtttgccaatgccattgaagaacctcctggtccaggagggcctcgcagatgggtccggtcaaaggccttatccgctaggtttcagtagcacattctccctgaactgctggtacatcctgcaagacaccagggcctcgcggctccggtctgccactttccgccacaaggttctccagcggccgaaccggtcggatagtccatcgaaacatatgggcagagcacgggggccacggcgggaccgtgtaaaagcgcaggtgggcatggcgtagacagctacctcgcggggcaccagctgaaaagagccggacactgccgaagcggaagaccagggccagtggctcctgctctggggctgggccccaggcagagggctcagtatcaggcgcagctccttgccgcgggctgaagctgagatagcggtaggcactgctctcaaagggcacctcagggttgcgtgctgacagatggacttctccacgcagccagccgaacaccagcgccctgcaggcctcattcacaaactggctggccaggtgcagctcggggccctcaggcatcctgagggaggtggcagagtcctccgccctccctgctttgccacttgcctctgtccccggcggttcggaatcggaggcgaaggtgtgccttaagtggaagggggcacttagcgacggcagacgcccgtaccttgccccctccacacctgggagccgccctggcctggcacccacagggctcgttttgcgggagaacgtgaggctccaaatcctagttttggggaggagcggcgctctcgggcccgtcctccccatgcccccgctgcgaccctgtcctcggttaatcctgactcccctcctcctcagggccccccaaagctcatcttctccttagccctacagcgcaccccccacaacccgatcctgcacgccccctccccgggaacccgcactccgttccgcttcgtcgcgacagcgtgggtcgacgatatcccggaattccggaccgtaccagcctgctttttaaccaactgttcatattc

SEQ ID NO: 151273 - DNA, 630 bp, Homo Sapiens
attactaaatgttattttaatgttcttgcctgtaacattggaaaatattgcttattgataaatacaaatgtaactaaaatcttatttttacccatatctttaaaaagcatggatggagaaaaacatgatataaaacacctcttcattttttttaccttattatcaatttaaatgtagattttggggaaatattatatattttgtttgtgaaagtatttgcattaaaccaatgatagtcttcaataagtcctacttgcaaagaaagaacaaaaaaagacatgttgagcagtttctacagttctgagatttggcatgcatgttcacactagtgcctgccaagcctgggtgtggcatcctacaggtaacatgacataccaggagcagctgcaacaacagcaccaacaaaagcaacaggtgttgttgggcctctggtttccaggagcttgagacacggcaggtgttccttcattttgggactgctgcctttttcgcatttcagctacttcaggacccagttggccggtcgcctggaggtgtgggcagcgcgccgatgggtccgggggagcggggctgggcggctcggtcctctagcggagccggtttgctgccatccgcccaacttcagcatgg

SEQ ID NO: 151274 - DNA, 1318 bp, Homo Sapiens
ggaacgactatgatcattgaccacgttgttcctgagcctgggacaagcctgctcgctgcctttgaccagtggagggaatgggccgacagcaagtcctgctgtgactactctctgcatgtggacatcagcgagtggcataagggcatccaggaggagatggaagcgcttgtgaaggatcacggggtaaattccttcctcgtgtacatggctttcaaagatcgcttccagctaacggattgccagatttatgaagtactgagtgtgatccgggatattggcgccatagcccaagtccacgcagaaaatggcgacatcattgcagaggagcagcagaggatcctggatctgggcatcacgggccccgagggacatgtgctgagccgacctgaggaggtcgaggccgaagccgtgaatcgtgccatcaccatcgccaaccagaccaactgcccgctgtatatcaccaaggtgatgagcaaaagctctgctgagggtcatcgcccaggcacggaagaagggagctgtggtgtatgagcgagcccgatcactgccagcttggtgaaccggactggtcccattactggagaacaagaactgggccgaggctgctgcctttgtcacctccccacccttgagccctgatccataccactccagactttctcaactccttgctgtcctgtggagacctccaggtcacgggcagtgcccattgcacgtttaacactgcccagaaggctgtaggaaaggacaacttcaccctgattccggaggggcccaatggcactgaggagcggatgtccgtcatctgggacaaggctgtggtcactgggaaggatggatgagaaccagtttgtggctgtgaccagcaccaatgcagccaaagtcttcaagctttacccccggaaaggccgcattgctgtgggatccgatgccgacctggtcatcttgggaccccgacgaggggttaaacatctctgcaagaccacacaagagtctctcgagtacaacatctttgacaaggcaatgcagtgccgcggttcccccactggtggtcatcagccaggggacagattgtcctggaaggacggagcccttgcattgtcaccgaaggctcagaacgctacaattccccgtgaaggcacttccctgatttttggttcacacagcaggatcccagggcacggagacagggtggattgaagctgacaagggtctccagcgtggcctgtattacggaccgtggctaagttgctggtaagcaaggaagacatgcagcttctgggaaagcgttcatgcagaaggggcactggcggacacg

SEQ ID NO: 151275 - DNA, 1490 bp, Homo Sapiens
  misc_feature (115)..(115): n is a, c, g, or t
  misc_feature (330)..(330): n is a, c, g, or t
  misc_feature (1353)..(1448): n is a, c, g, or t
ccacccagggcgggaaggcgtggaaggggggggaggcccagggtaggaactttgttggcggcttctctctggaaggggcgggggttccacccgttcgctgagcgttgttccagcntgttcagccccgaggggccacaaagccccagtgaggactgaccgaaggctgaactccctccagttgagcgagtttgcaatggacggcagtgaggtcacgcccagcagggacaacgtgccgagggccagcactcccaggggagaggtagatctccattcggccagacctccttcctcccacccagaggtggctcttgttggccaagacctgcttgnactgccaggttggaccaggtcgtagcggtgggcgcggcgcagcggcaagcagaagctgtagagggcgtgcagggcggcgcagaagaagctgagcagcccgatctgctttgggtgctgtagccagtggtccagccagtcggggaagcgctggtacttggtgccgcgccgcagctgcagggcagccgccagcacgccgggcaagtacacgagtgacagcagcacgtaggccacgcacggcagtgtggtgttgaccacggacacgggcagcttgaagaacttgttctggctttcctgcacatagggctgcagaacgtcccggacgaagttgtaggcatagaagcagacgaagagccccagggccagcagggtgggcaccttccaggccgggaggaggcgcaggggcatggcctccacctcccaggctgacgccagggatcccatgtccacgggcatgaagcccatggcgagcgccatctccgagacagcacgcttggcttctggctggtcaccgcagatgggcacctgcctgttaccatcccttgggccagcctgcagggtccaggcagagatgacattgaaggccttgaccactgtgcaagtggggaagagggaggccaggtactcagcattggactcacgatgctgaaggtgctcttgctctgtagggttgctcacatccaccaggatcttgcccgccagctggtcactgagactgtcacagtgaagagtagtgctcccggaacacagccacaaagatgacctccggggagctcactgcctcctcttggaaagtcacttggtccgtctgagggaaacagcctgtctgtgcgtttggggttgcggctccccaccaccactttgaagccagagcccaccaggcgtgtggccagggagcgggcaaagtccccgctacccaggatgcccactttgggggcctcatcggggaccttggcaaggctactatcgctgtccaccaggtggaggctgatcagtggcttgtccatctcttctggcattttggtnnnnnnnnnnnnnnnnnnnnnnnnnnnnnnnnnnnnnnnnnnnnnnnnnnnnnnnnnnnnnnnnnnnnnnnnnnnnnnnnnnnnnnnnnnnnnnnntctgcggcccgccgctcggagcgaccgcggcagctgaaggtc

SEQ ID NO: 151276 - DNA, 1020 bp, Homo Sapiens
accggtggtggtaattgttaatcgtccagccgctcacgagttgtccttggatgcaactcccctgcgtttcttcctttttcgaatatctttttcaacctgtgtttccgtcttaaagtgtttatatctgcccgtgtggatttgctgtattctgctcaaggtacagctcgttggctcatcggccaaacttttcaccacatgccgtctgtcagggcctcagaccaatctgttctgggcccattctgaacctgtgacgaagcggactaggggaaattgaccttgttggcataatcgcctggtaccagaaaggcctggccacagctccagactacctgtttttccaagagaattgagtttccagcgggagtttgcttcctcacctgtgcagggcactgtgacgttagactggaggactttcctcgggatcacagcactgttgacacaggctggggagggggcagtgacaggctgtggaggaggacgctgtcctgacttcgtgctagacaccccagcctccacccacagctgcactaccgggggtatgagacgctgggaaaggcaaagaggtctgttccacctttggacctcctgagatatcctgattggtcacctcccaggttatttggatgagagcaggcactgaggggtagggactggaatgaagatagcagattagtcctcagtgtgaaatactccaagaacacagacatctctatgattctcaacaaggacaggaacaaccccaaacaaggttttaaaaacacccaaatttctaccgttccatacccaagcaatgtgcacgtcacccagggttatgtacaaggtcacaaatcttaaataacggggagaagggcgtccattcatcctaacagtccagtaatttctcctgctgtgcaccaattgcacatgagcttctctttttaggatacatgtataagatactctttttaaaaaacacaatgcattattttcttcgaacgcgtggggtcgacgatatcccggaaatccggagcgatcagccgt

SEQ ID NO: 151277 - DNA, 643 bp, Homo Sapiens
gctggcaccccggcaactggtttggatgcactcagggccatttgaacccagtgcagagttatctctatgaggaggccccgggtctccagccccctccatctcccctggggttgggcatatttgacatggagccccatgccaagggatgcagctgttggtgtctgtccagtccattcaaggctagcctgcccatgcactgtggcaggggttggattggagggagagaacagagttgggaaaaacaacaggtttgagtcctataaagccataatttaactccagtagctgatgtcagacaagcttgtcctatgtcctatttgagtggcagcagcgccagcccagcaagaaggctgggggttgtcaaggttgtccccagaccttgcttgcagtggttggagaacccagggggctgccttgggccctctggccagagggaagcgggcagctctagtcctggagacttgtggtctaccttggggcttgtctaccgtactggagggcccggtcacctctcccatgccaccctcccttctctccttctaggggtcctcactttagggcgacctgtccccgaggcccacgcgtccgcccagcgcgtaccgcgaacgcgtggtcgacgatatcccggtattccgggcggtac

SEQ ID NO: 151278 - DNA, 1406 bp, Homo Sapiens
attttgcgcggcaaacccatgtgttacactctcctctgtttgggcccccgcttggaaagtggggccagtcccacggcaggcaaggggacttggtaccggcgaaacaccagagtcactctcccgcccttccaagatgggccagcctttcgtgggcccccccacacagcccccgggagtttggtagccgggaaaaccagaactttgtcttccaagcggccactgtggctcttttggccaagccggtaggggactaccaccaactgttgcctggtgctggtgggtacaaggatgagccctgttccttcagccggcaccaatcacttctaggcaccagccccgcctcctggaccctccttggggtggtaatgaaggaagttccacagtccatggccctgccacttccccctgcggagccgccggttcaggcgtggacggtggccccaggcagggcctgccccacagcttcctccaccacctgctgcaagggcatctacatcggaccgcaggactggggtgctcaggtcctggtggtgctggagccccgctttctgctgttgggttagtttctggggctgctctcggaggtcatctaaggttcgcagtccttcccggtaccaccggtcagcagtcttcacaccgaccccgaagatctgggtgaagagcttcatggtctggtacctctctgagcgccgaactctttccacctcctcacacactccatgctccagcagctcctggacaaccctagaggagtgttctccaaagtggggaacgcccctgcagctggctcagggttgtgacagggctgggaagggccttgagcaccgaggctgctctgcagaaggtgaggaggcggccctcactgccttcaaagcctgctagcctcggccagtatctccagagcctcggagaggccagtgttgtggtgtgtgaggggcgtagggcgctggcaggcataggcaggcatccctgctgggttcagagggccctttccttggcccagccacttccaggcggtgccggcactccacaggtacaggctgcccagctcccaggctctctgttacccagcttatgtccagcagagctgggggggtgcaacccgggggagcagctgccatcctgcgctcctgccagctgacggcctcctctgctgaggtctcttccatcacaacatgtgtcgcttcggagctgcaggcgtcaaggacgcggaagcctttggagcgcgccaggcctgtgaggaaggcccggcggctgcgacccatgcgaggctcgaccaggtagatggcgactcccgggaagcgcgtcgagggcggcgtggaggaagcggcatcgccgctaggggacccgacccgcgctcgccgccgtttggggagcattgggacgacagcctccagcagcgcgga

SEQ ID NO: 151279 - DNA, 982 bp, Homo Sapiens
ctgggggaaaggagacccatgtacatggtggggcgctggaatgaggacaggtccagtcgtgggacactgttcctaactcgagtgcggcctagatgcgactcgtcattctatccccagtggcagcgtccagtgtgttggtattgggcaagtctcgcacactagcccggacacagtgctatagtcctagattctgaccgagccaccctcagtttggttcccaagccccagccccgaccgcagcacccctctgccagggttcccattagaactcagttcccacctcaccattacccgaatcctgaggacagatgtccttgattgttcttctgggctgccttggagcccccgctagggatagaccgtacctcctgacttactgtgtgcttcttggtcaaccgccagagaatgcaggtgaggagcatgtgcccgagggatgaggcaatgaacacaatgaaagcattttcgtggatggtgaagtcctcggaggaggagacataagtgagcactagcaacgcgaggttctccacgacattgaggccgaagttgaggcggcagagcgggcgatagcaggaacacggggaggtgcagctgaggtagtggttccagtaggcgaaggccaccaagaagcgaggcgccgagtgcaggccgatgcagaaacgccacacgtagcgctggggcacctccccgccgatggctgagctcaccgagggcaggtaattgggcaccccacagtgtgtggccgttgtctccttgaagtggaagagcagggaccagaggatgcagaagaggaaggcgacaagtggacagcagaccgtgaccagggccaccatggtgaagcggagccgtaccagggtcccatcccgatccagtggtagtgggacctggtacatcttgtcagacctctcagctgcgttccatctaccatgccattctggggccgtccctctgattggcccgagctccctcagcccgagtcgcggcg

SEQ ID NO: 151280 - DNA, 1114 bp, Homo Sapiens
agcaccaaatggtggagctctctgccagctcagcttcttgggacctctcaggtaaaggtgatgtttgaggaccccacgcccatatgaggggtggagaggagaagccagcagcactggggtgagccttggcctacacccttccttcttacccttcccccatcttcagtaaggccaagagaggatgtgggttggggaagtccagaatggtttcgtgtttcttgtttctgggcagtgggctgcgtcctcccaagcaggactgaagggttcagaatcgcttttcctcaggttgagaggttatgagcagctccttgttcccgaagtcccaccaggccgtcatgtggaacgccatgttggttaagacaacagtgtactccaggatggcaaagatggtgtacactccagcctcacaatacatgttgtgccgaaagtagacagccagcgccgagaagaaggagatgaagttgatgatgaagagccgctgtttccagctgtaggacttgcgatcctcctgacttactgtgtgcttcttggtcaaccgccagagaatgcaggtgaggagcatgtgcccgagggatgaggcaatgaacacaatgaaagcattttcgtggatggtgaagtcctcggaggaggagacataagtgagcactagcaacgcgaggttctccacgacacttgaggccgaagttgaggcggcagagcgggcgatagcaggaacacggggaggtgcagctgaggtagtggttccagtaggcgaaggccaccaagaagcgaggcgccgagtgcaggccgatgcagaaacgccacacgtagcgctggggcacctccccgccgatggctgagctcaccgagggcaggtaattgggcaccccacagtgtgtggccgttgtctccttgaagtggaagagcagggaccagaggatgcagaagaggaaggcgacaagtggacagcagaccgtgaccagggccaccatggtgaagcggagccgtaccagggtcccatcccgatccagtggtagtgggacctggtacatcttgtcagacccacgcggtggtggcgagagtgccggcggaacccgggggcccaggtggcccggggtcgggggctggctctgcg

SEQ ID NO: 151281 - DNA, 930 bp, Homo Sapiens
cggaagaccgtgggtagctgcggcggggctgacccgtcccgagtgccaaagctggggttctacttgagatttccctcgtggtgccaggtccggcgagcatcacgccgaggcccattttccagacgaccacgacgaggccggggtcacctggcgagacgcactgactctgccagaggcccagccccagaactcagagaatggggcactgcatgtgaccaaggacctgctgtgggagccggcaacccctgggcctctccccatgctgcctcccctcatcgatccctgggaccctggcctgactgcccgggacctgcttttccgcggagggtaccggtatcggaagcggccccgagtcgtgctggatgtgactgagcagatcagccggttcctcttggatcatggagacgtagcctttgcgcccctggggaagctgatgctggagaatttcaagctggagggagcggggagccgcactaagaagaagacagtggtcagtgtgaagaagctgctccaggacctcggtggacaccagccctgggggtgtccctgggcttacctcagcaaccgacagcgccgcttctctatcctcgggggccccatcctgggcacgtcggtggcgagccacttggcagagctgctgcacgaggagctggtgctgcggtgggagcagctgcttctggatgaggcctgcactggggggctgcgctggcctgggttcctggaaggatcaccccagttcgggcagctggtctaccctgtttggacggctcccaggacaggctgcgtttccaagaggtcgttctgaccccaggtgacatccccaataccttgggaaacctgtacgcatccaggctccagggacctgtccggcaagtggtgacatgcaccgtccagggagaaactctgctggccgtcccgctctgactacca

SEQ ID NO: 151282 - DNA, 865 bp, Homo Sapiens
acatagaataacatagtattcttttacacctttgcagattttctttcctctcttttgaattcattgtccttctcttgtgctttttgacttctttctcatcccttaagttaaggagtacatggtctcccgctactcctgccatcaaggtgtatgtggactaacaggagtagaaaaaataattaaacagataacaagtatgcaaatataggtaaaataataggttctaaattgttttgtgacaaaagatatatgagtaaacaggtgacgcttgatttaggccttgattgattggggcatcttctctgtagaagggatatttggagcaccagatctgaaggattagtgtatgttagatacaagaataatccatgcaagagaacatagttcttagacacacagtagtgaaaaagagcaaattgagaaactgaagaaaagttagcttggctagtgcatagggaaggggagaaagcaaatttaagatgagacatgaaagataactggagcaaaaccatgcagcctcttaatgataaaactttgtcttaaaggaaaccactgaagtgtataaagtgtgtgtgtgaaggggggaggtttcaggggtaggatggatgtgtgaaacaaatatttgcatttgttataggtgatatattcatatagttaaaaaaccaaaactatatataaagtcattcattaaatttgaaacaagtttcacaaggtttacctctatattgaaggaagaaggaaatagaagtagatgatttacaagagaaagttgactggtaatttctataaacctgtgcggacgcgtggcgacgcgtggcgacgcgtggtcgacgatatcccgggaactccggaccggtaccagcgc

SEQ ID NO: 151283 - DNA, 1330 bp, Homo Sapiens
  misc_feature (144)..(152): n is a, c, g, or t
  misc_feature (182)..(220): n is a, c, g, or t
  misc_feature (312)..(321): n is a, c, g, or t
  misc_feature (341)..(352): n is a, c, g, or t
  misc_feature (371)..(410): n is a, c, g, or t
  misc_feature (485)..(494): n is a, c, g, or t
  misc_feature (550)..(560): n is a, c, g, or t
  misc_feature (1239)..(1285): n is a, c, g, or t
ggcccccctaggttttttggggaaggttcaccccctgcggtagggagaattcagcgggcccccaaaaagggtttgtccgcgaaaggattttctgttaaaagggtgtttaagagcgcccggggcacaaaggggggaaattttctnnnnnnnnnctccccctttttgttgaaccgcaaagtgcnnnnnnnnnnnnnnnnnnnnnnnnnnnnnnnnnnnnnnnggagaaaaaaatgttgaactctttttttgtaggcgcagagcgcccccccttatttttctcccccttttcgccccatttaccggggggttttnnnnnnnnnnttttcgggccgagaaggggnnnnnnnnnnnntatcttggggagacccccnnnnnnnnnnnnnnnnnnnnnnnnnnnnnnnnnnnnnnnngtggcgccccctgtgggggcccacattccgtgagtatcaaaggggggttttttcccccgcgggtggtctggggtnnnnnnnnnnaagaatgtccagagggggccccaaggtggggaaaaaattttgcgcttgtccaccannnnnnnnnnntattaacatttagcctggcccccccggcttttgaccaattagctggggggggtttccttcaccccccctgaaaattgatagggggtcttgggaagtgagggcggtcttcgggaagcttccttcagcagcaggtgctcccggccacttgcctcaccgttggatgaggagacttgcatctcttggggggcttcctccttgacatccccgggcctggtgccagcgctgcccttggaataggcaatgacaggggttggggtgcccccgggccgctcagcagcatgcctctgcccgtggcggctcagggcagctgcggtcttgcacaccttggcgcagtgggggcaggtaaagcgggtggagggcctccgtccggcccgggagctgtgggagcccccaccgtgggcctcttggtgcttccgcagctttctcagggtggtgaaggtctgggcacagtccccgcatcggtgcctccgctctgtgcgggcacgtcccgctgggctctcggccgctggggtttcctcccagctcctccgttccagcttctgcctccaacgtggtggccggcggcctcggggcagcccactgccccccacactggcacctccagcagctccagccttgcgcttaggcttgtaggagtagtagggcctccagagctggtcctccccaccagcctttgatnnnnnnnnnnnnnnnnnnnnnnnnnnnnnnnnnnnnnnnnnnnnnnngtgccggattcgccacccaggcctcgctacttgggtctttgacaa

SEQ ID NO: 151284 - DNA, 1002 bp, Homo Sapiens
  misc_feature (619)..(619): n is a, c, g, or t
  misc_feature (669)..(669): n is a, c, g, or t
ggcctgggtggcgaattcggcacgaggtgcttaaacaacaaacatttatttcttacagttctggaagctgggaagtctcaaggtgccaacagtttcatttcctggtgagggctctcttccgggcctgcagacggctgtcttctcactgtgtcctcacatggtggagagagagatcatctctctggtgtctctccttataaagcactaatcccattcatcagggcttcaacgtgaattgggagcatatgaacattcaccccttagctgactccacccatgtcaactagataggacacacggtgagtagtgacatcttacacgtttttagcacactgctgatgtccgacaggcctgggtctgggaccagtgtgtaccagcaagcatggtctgtggggtcagctgtcacgctcctgaggaagacaatggtccctgcttctctccaccctgtcgtggctctactgagtttattttccccatcaatactggaggtggtgccctgcacaaatggccccagggtggttttgatgtcccactgggggctggaggggagggccctgtgctgcaatctgctgtcatagcaccagcctgcagcctcatggccacagtctgtgggaccagnggagggaggggaagggacatcactgcccacacctgcacccctacccctgngtgttccatccacctcgatctggcactggatctcctcgttgacatcgtggaggaaagcactcaaagcttcctgttcgactttgccatcctcacacgactatggcctccttccagggggctgaagactgctgtgtacacgatagtgtgccaactcaggaagcagctccaggtggcatccagggtttgtcctgccctgcagtggaaggccacaggaggatgcgaaaaccccccccggggaattttgcggggctttccccccgggcaagccttcggggttagcccttttcttttttcccttccccttaaaaacctggccttcctggggcccccagg

SEQ ID NO: 151285 - DNA, 1020 bp, Homo Sapiens
  misc_feature (17)..(17): n is a, c, g, or t
  misc_feature (96)..(96): n is a, c, g, or t
  misc_feature (103)..(103): n is a, c, g, or t
ggggtggcgggctgctnccgacccctcttgaggagctggggaagactctgtgctagggtccacaacactggctttcctgctcccgatactgcctgnctgctgngatggtgtttctggaggaagtcagagatcctctgcaccaagaaatcacggtctttcaggttggcaaacaggaatgtcattttgcttttggtgctgatggacagggggctgggcagcacgctggagctgtcagctttttcgacaatggtcacctccctcaggggtatgatgaggtggcaagcgtcctcctccttgctggcgaagcagatgtagttgttggagatgaacatctggccagggatgtgcagcttgttgaacggcgtccacagggtgcagcttgtgtggccgtctagccgctcatccctgggcagccggaacgtggctcggtagcactcattcttggctcgggcgtccaggtctcgcttcagggctgagatgttcctgtgtggccggatgggcctaggcagggccttgtcctccaggaagccctcgctgtccagcagctgccgcatggccaggttggccaactgctccatgagcttgaaggtctcgccgatgttgaggaacatggagaagaagagctcctggtcgcgggtgtccacacggatgctctcggggaagagcagggtggcgttcttctccagacgcgttatgtccacccactgcaccacgaggctcacttccttccccagcaggaaggagtagaagcacaggtggttgaccgtcaggtacagccagccctgccggggcacgcggcccttccagtagctgcaggagtagtaattcaccagcttctcgccctcaggcatcccaaactgcttccgcatcttcagctcagcctccttgaacttcccggggtcctcgtctccctggggctgcaggttcttgttctcttctgcgatgattcacgcgccacccaggcctcgctacattggtgaggatcggctcccgttcctcttggtggtggtgggtccgggt

SEQ ID NO: 151286 - DNA, 991 bp, Homo Sapiens
  misc_feature (13)..(13): n is a, c, g, or t
  misc_feature (28)..(28): n is a, c, g, or t
agcacgcctgggngttattccatttcgncctgcagggccgtcatgatgagcgaggccccattcccgccgttcgcgcatggagaagcttgcgctgtgcctccagcgtgcggatgaaggttcagcaggaaagtgtttcttggtcagcagctgccggaacagtgtcagcgacttctccacattggcttgcacctccatctccttgagcacagggtggtcctcgatcccaggaaagagcacccgcatggcatatgtccggtagtcaaggaaggggatgccggcaccgtccaggtcattggtcagctcgtggatgtctgtctgcagctctgcaaaggcttccttgcattcgagggccacgcgggactccaggttgtccatctggagctgcagccgcttgagtgtgcggtcagcatctcgtgacttgcgcttgtaggcgattagcacagccacgatgaccagcagcaggagacccccgcctccgccaatgcccacaatggcaggcagcgtcagcaggctgtccgagtacacctgcagtgtccctggcgagaactcgaagccacctgcccgcaccgtgaccttgtgctgcccagtgaggttgggcgcctcgcacagcagttgcgtctccgacacggtgagggtacagggtgtggagccgatgagcaccgtgtagttgagtcgggagttgccgggtgcaggtggcaagaggttccggcccttgaggatgagtggggagctgggcttcagctccagcaggccagtggggctgagtggctccagtacggggtcagggtagtagaggaaggaggtggagttgagcacaagcagggagcgcacgttgtccatgacgaagcccagctcatccggccgctcccccagctctggtgggctgcgcacagggttggccacagacggggcgcggcataccatggtggtgtcattgtacaccaggcagccgttccctcgtgccgaattcgccacccaggcctcgctcctt

SEQ ID NO: 151287 - DNA, 548 bp, Homo Sapiens
caggttcatgcgtcagggtattagaggaaggaggtggaattgagcacaagcagggagcgcaacagttgtccatgacggagcccagctcattccggccgctcccccagctctggttgggttgcgcacagggttggccacaagacggggcgcggcataccatggtggtgtcaattgtacaccaggcagccgttctccctctcaatgcctccatacttggcccggattcggggttcacggacagtggccaggttggtgcctggtgaccgtcaggagtgtcccaccgctgttgatgctccactcggggtcgatcctcaggatggtggggtcctcggtgtagttgtactttcacctcagggttggtgagctgggcgcggttgatgttgatgatgatgggagcgctgccagggctctgcccggggggtgtcaggcaccggatctcacgggagttcctccaggagaaggagcagggccggccaccagaccgtacacagccacatcactgcctgcgttcatgtgcttccctcattaaatccagtgccccctaacgc

SEQ ID NO: 151288 - DNA, 978 bp, Homo Sapiens
aggaagcgaggcctgggtggcgattcggcacgaggacaggtgtgggcacgtactggccagtatagataagcattgagcagcattgatgggtatcgatgatcctccaggagcagcggctggtgccatgctgctgtgggcagtattgagtattggccggtcttgacgagcagcagccggtactgggccaccgtgggtagcattgatgagtattgactggtatcaatgagtatcagccggtatcaatgagtattggcccgtatcaatgagtttggccagtattgatgagtattggctggcattgatgagtatcggttggcgttgatgagtatcggctggcattgatgagtatcggctggcgttgatgagtatcggctggcattgatgagtttggctgggcgtgggtggcgcggtgccttgccccctggccaggctggctcgtgggtgaaatgtgacatttaggcggttttctcctgtccttttagtttgtttttatgtggtatccgggtaccatggggagatctggcattcagggcaggaggctgcagcgcaggtcatgggggctcaggcgcaggtcatggggatcccgctccacagtgttgctcttgggccctccgtcagggagtcccacacagcacctgccatgaggagtggtgttggggaccctggatgggaggtgcgtgcgtggggctgcaccccagcccctgtgatggtgtctctggaagctggagatggtcggcatgtatgcttgaatcctgcagagggagttgagggttggagatttgtcctgcgaggcctctgcgcaggggcgggctcacagcacactaccaggggtcttaggctttggctgaaggggccccttcctggccctgggcagggaaatctttcttcaacccaaggcctggcccaccctgccttgggccttgggggggcggccccggcttccccgggtcctgggactcacctctttagttccacccc

SEQ ID NO: 151289 - DNA, 1341 bp, Homo Sapiens
  misc_feature (1325)..(1325): n is a, c, g, or t
cctctccaaaactgacaagagactgcttgccctcacagtgacctgatcttcctggagagaagcagcagcaagcttctgttcacaattacagggcaaggaatgtcgacgagggtgagaatcattcctccccaggatcgacaaaaggcacagtggaattctgcagagtccaggaagtttggagttgctaagaaatttgctgctgcagacacaagccacatagggccttaccagggtcaaggcatgaatctgtgggactgaaggtgagtgacagaagagagacacctgtgtccaggacacgctgcacaggaatccctgggactctctctctgtcatgttcctggttatcaggacggctcaccagctttctgctgaggccagctggacccaggggagcagcggggaaccagaaggagcaagggcatggccatcgggacagactactcacaagacctggctgaggctgatggaactgctccagaggcctggggacaccagcactgttgcttgtcactgctgcaccctgcacacagcgggctctgcaggagccggtagtaccggcgacgggcataccggctgtccagctccccttccagttccgggtctgtgcccccttcccccttcctcttactctgcatatagactctcaagaagcacccatacagacgctggatcatctcttggaaggttctgggggtgctaaagaacaagactccgcgcaacatagtgtggacttcttctcgcagcccctgagcaccagtgcccatcagcaagcccaggcgagtccatttctccagcagctctaggctacgcaggtagggatccaggcggctctccagcaggccaaaagcgtcaaggagtagcaaaaggcactggggctcatccgcagagttctcgcattgggagatggcattccagaactcaggggagatgttggcctgcagatcgttctgcagcacctccacgaaccactcctccaggaccgagtgtagcccgtggcccctcagaacctccaccgccgcccggagctcctcttcctttggcgggactgcaccgctggtccgggaagacaccagccccagcgcagccggcggcaccaggccggtgctcacggtgttccaggccactaacaactcctgtccgggccgggagtcgctgtccccctccgccaccacaactgccgccgccatctgcacccaccgactccgagattcgctcggcgcggcgcgcggcgatgacgcacgtctgcacgcgcagccatgaccctcgtgccgaattcgccacccaggcctcgctacggagggagggtagtgtagtggtgaagaatngagttgagctgaaggg

SEQ ID NO: 151290 - DNA, 957 bp, Homo Sapiens
gaatttcgcgcagaccagattaggggtgaagagggtgtgtacccgccagggagatgggtacagggggcacatgaggctttgctgtgtctccatttatagcattaaataacttgtttgagagtgagagtaaatgacctttttcttctttttcttccatggcacttttcctctgcacctgttagcttcctggcggtggctcttctcccagtgacagtgcgtggctccggcctggcaggaatggcagtgacatgcgatccagaggctttcctgtccatctgctttgtcaccttggtcttcctgcagctcccactggccagcatctgtcaaaactgagggacagactcctgtgcaagtcgaggcaggtgccctggcataggtgggggtgtgtccagcatggcgggaagctgaagcatctcccagcagctcagggctcaataggtccccaaagcttccaagaagagggaggggcaggggggaagtgccctggcctcccaacacatggcctaacccagccctttctgatctgcctcccccagggaaagctgactttgatgtcactgggcctcatgcccctattctggctatggctgggggacacgtggagttacagtgccagctgttccccaatatcagtgccgaggacatggagctgaggtggtacaggtgccagccctccctagctgtgcacatgcatgagagagggatggacatggatggagagcaaaagtggcagtacagaggaaggaccaccttcatgagtgaccacgtggccaggggcaaggccatggtgaggagtcacagggtcaccacctttgacaacaggacatactgctgccgcttcaaggatggtgtaaagttcggcgaggccactgtgcaggtgcaggtggcaggtaaggctggtggctagctggctgtcagtctaccctcgtgccgaattcgccacccaggcctcgctac

SEQ ID NO: 151291 - DNA, 1024 bp, Homo Sapiens
aaccggcccgcggcggtttgggggggcaaagcagaaaagcctttaaaaaccagggcctggagctggtggcgggttcggtccccagccccgttaaccggcccccgggggtttggccccagaggccctggtcagtctctggggctgacccagctggttcccccgttctccaggcgctgtctcctgtggcggcatcttgagccgtagggttacgtctaggccagcaatgcctgtgcataggtgctgcccgcagctgccatcctccatatctgtgtccggcagcacattcctccaccaccttcaaggaagatctcctcgaggctggtgtcggagatcccgtagccagtgagcctcagctccgccagccgcgtgtctagctctcggaagagtgtggcgaagctgccgtcatgggcacccgtgtagggcagcaccagcaccagctcgtgtggcagctcctccaccagccgtgccccgggcacccagtgctgtaccagggccagcagctgaggagtgccgactctgctgccctggctgccattcttcttttcctgcctggtgtccacactgccctccatgtcagtgtcagccttctcattggtggtcaggggcaggcgggccttcaccagcgtcaggtagtagccggagcccaggtgacggcgcaggaagagtggggagccacagcagcacaagcggccacctgccaccacggccacacggtctcccagcagctctgcctcatccaggtggtgggtggagaggatcagcgtgcgaccttctcggtatttgagcagcagctcccaaataccgcggcgggaagcaggatccacgccagccgtaggctcgtccaggataacaacttgggagccgcccacaaaggcaatggccacggacagcttccgttgcatcccaccagagaggtggcgagtctgcacactctgcttggagaccagccccacatcctgccctcgtgttggaacgccacccaggcctcgctacggaggggacgttaggggcgtgacgcggcgtg

SEQ ID NO: 151292 - DNA, 1047 bp, Homo Sapiens
  misc_feature (118)..(118): n is a, c, g, or t
  misc_feature (121)..(121): n is a, c, g, or t
  misc_feature (355)..(355): n is a, c, g, or t
  misc_feature (741)..(775): n is a, c, g, or t
gtcccctttacggtaaaaatccaaaagccccatccaattcatggtttaccattgctaaaagggcctgcccttcttggctgaaaaatgttgacccaccttgaagcattcaattaagganccnaaaatagccaaccgaaagaaaaaccacattccttctgttttaagtccattccttccatacccgatacttcaaaacccaagagccaatatctactgcaacaaattgagacggggattgttcccctgacccttgacatgctttgtaggcgggaactggagtggcgcatttcactcagcccgctgctggccactcctcgcgagagggagcgtgtgagcaggtgagtgctggaactgngagggaacaaatgctggaaccagctggtcgctcctctctgatgagagcagactctgcgcaggccccacagcagcatccaagcccttgccctctcggcacccaggttcttgtttggtgtccaggaagaattaggtcacaggaacagattgaagggtagtgtatgcagaggattttattggtcgatggatgtggctctcagcagaatggggaattggaaaggggatggtgcgggaagaaggtgatctttccctgaagctgcaccgtctgaggttagctgcgtctatctgtagtctctgatgctcagccgcttgcatcccctacgttcagcagcttgcatccccgaccccttgcatcagccgcttgtgttgctctgccagctgaagtcnnnnnnnnnnnnnnnnnnnnnnnnnnnnnnnnnnnaaaaggcaacatttgggtggaaaacggggtcagctgttttcacttagggctgcggctccaggcccaagggtggggtttagccaggagcccaaccattctgtatcaaaatcactggttgcaggagactaggaaaccaactcgttttaaaaactggtcagtaagggaaaagaatccagcatgtatctggctttatataaactgcaccttacatcatcaaatagttgatgagggaaagtttccctcgtgccaattcgccacccaggcctcgctac

SEQ ID NO: 151293 - DNA, 1430 bp, Homo Sapiens
  misc_feature (202)..(219): n is a, c, g, or t
cccagcggggtcctgggtagtcccattgagaaagaggggggcggaattcaagggccccgaagggatctccgggccttcccccacgggtggggcgtgagggggtaagttcagccccctttgaaggcgcggagcacacgtttggatttttggacgggagtgatgtgccagccaggctttggcctttcaatgcccccaccttcannnnnnnnnnnnnnnnnnccctcccaaccaagaatccctgggagggatggatccccggtggcccctggtgtcattccttattacgggagagggattcacaagccctggccaatttggcccatctcccaggctgctcattttggggttcccaaaagcttttccttcaagggcccagcatgaccgctggggaggatcccgccaagatgacggggtgaggccatcaccagcccctgaggaaaggaaagcccagcacccgggtgttgacaggtggcgttgtcagcttgggcacaaggtagggcagcaccacacgactcttaataggccatgacttgcttcagaccatccaaggcaaactctgacacctcctcgtcatccagctgctttagtaaaaatgggagaatgtcctccagagcctggtggccgatggtggaatgcagctgctcgaaagtcttggctgccgcctctctgacctcctccagtgggtcacactaagccttccttgccgtgggcacgagggattcagagaaatacagcacggcatcccgtctggtggtcttcatgatctcacttaggccaatgcacacaccctgcctctcatcgctcttctgagacctcaggccttcctcaaggatggggatgatctcggggaggattttctcccctaacttccgcacaagatctccccaatgttctcgctgcaatcgttctcttatctgcacacgtgctggccaggaaacccagcaggagcccaaagagagtgggtaggatctcacgcaaggtgcgtgggggtattggagacaacaatcttccagacatgcagggacgcctgccgcaccaccagctgggtgtctgagcggcccatgtacagccctgccaacacccggttccgccgctctacccccagggcagtgatgatcgccttgttggactgggcagttccaaagttatcatcctcagagtcagtttctcgtggttatcttcaccagtgactcctgagatgtgaaacaggagatccccaaggagctgaacagtagctgaacctgattctccaaaggtcatcaaagaggccttgctctagctgggtcagcagcagggcgatgtctgtctctagcgtacatggtagattacccgctggtcccgcgcacaggtcggtgtctacgcacaaactcattctcatcagcaagagctttgaggatacaggggatgatgggccccacagagagaacgtc

SEQ ID NO: 151294 - DNA, 540 bp, Homo Sapiens
tggcagctgttgacatgacgagtgatgtcatggcgaaggtagccactatagtcactaagtggacagaagtgggtaggtgttttgtcatgtacccttaaccggtgcaagcgcagtttcgagttggtacccaacgtcttgtgggcaagagcttcaggggatgcggcccatgcctgtgtttcgggactgttgagcctctaaccggtaccgtctggtggtcgaaaagtcacaagaaggggcactgatggggcttcaccccctcgtgcttgagccgccggtgctgctgcatgcaacggctctgtttacaggtgaagccacagcccccacactgtagatggggcagccccggatctggtgagtcctcagagcccgttcctgctggcagctaaagggacaatgtagggtaggagaagcgagcccccttctgcttttgaaccagaactgtatccccatcaccagagctggactctgtactcccattccttcgggggagcagagtccccccccaacgctgtaactggagtcctctagatcacctcacat

SEQ ID NO: 151295 - DNA, 1904 bp, Homo Sapiens
ggtgcaacaaatgggaccgtagtgcacaaccgctataggcaacggttaatccaagcggttcgtcccaaccagacttgagcctggtgtgcccaggcagccccagccagccaagggcgctctccgaacacagggcagaatggggccccatccagcaggaccacaccagggtccctcaggcctgcatcaggaggcggagggcctgccggcctcgtgccggaggacacggaacttcacgccagtggatggtggccgccctgctggctcctagtgcctctgactttgccgcgcttggccctggcctgcagttcagactcccaagcccagaaaatcccaaggcagaagaacaaaggcctgtggcctcaggtctccagggttctgaacccgccagcctgtagggccggcagagccgaagacccagtgagtacagcggcagggagttgatgaggtccacgagcagatggatcaggccctgcacggcgaccaccaggagcccggagcagggtgaacaccaggtagtacagggctgtggtaggcaggaggaagagcaggatggtgaagagcagagtcccgatgaacagctggtccaggtcataggaacaggagtccacgcgctggcgcagaacgttccacttcttcccccggaacagacgccacagtgaggacaggccatggatcttcaggcagtacagcctggctccatagacgtaaaagcagtagatgtggaaggtgaggagggcgataatgtccgagaggagggacagggccaccgtcaggcccaggcaggccgagaggcccacgtgccaaaggatgtgctccacgaagggggacatgaggtggatgtagctgatccacaggtggatgtggtagaggaagaagcggcccagcacctggtccagtgcacggttcatcttgagcccggcgggagcacccatcagccactgcagcagatgctggagctcctcggccacgtggtcagccacaggaacgagggcgtcggccagatgcccgatgcggcttctcccgtggagccaggacagcagcatgaggcccagggccacgtccagcagcacagaggcccaccggtgttggccttccttcatcaagctgggcagggttctccgcctttccgtgtactgaagattagcgtgaggtgctccagccggtgccgggagctgttcgcacgtggagagtttgctcccgaggaaggacaggggccagagcttgaacactcggcaggcactgacagctgagaccagcgacagcaggctggccaacagcaggcaaatgggtcccgaggctcgcctggccagctccgcgaggatgctggcctccacgccctccgactgccagtggctcagccgcacggggccctcatcaaagcggtcactgcggaagagcacctcactgcgtgctaccgtgtcgaagacggcagccaggccccccgtgctggcagtggtggctccagcctggcggtcgggcaggacggtgggcaggtgtagctgtgacagcaacacctggcgctggtcatagaagatgagcatgacctggtcctcaccaggggcaccgggggcagtgggcgcttgccggtgggtggcctcgcagctccagaacgtgccgcctctctcccggcacagccgcagccagggctcatgggggaagacagcacccaggctctccaggaagcggcccaggctctcctcgggctcctgccggcagtggcaccaggtgcccagcacggccacgcccacctggctggcctgccgcacctgggccaggagctgcttgacctggatggggatgaagggaaagtgcaggaccgccaggaccacggcgctgctctgctccggcacccaccgtcccaccctcgtgccgaattcgccacccaggcctcgctaccttggacc

SEQ ID NO: 151296 - DNA, 1392 bp, Homo Sapiens
acccccccaaggggtggaaccaggaaggggtggggtgccacccagaatttcccttcctttcggttggacccctttccagttttgaagggtggagaaaggcacaggagccggaagctctccgggctggcgtcagggctgggaccccccctctccagagtttcctgaaacacagcagctgcctctttgaagcgcctgtagtcccatcaaggccttgcccaggcggaagaggccccgggggccagccaggccgtagggtaagggccacctgggcatcagccagggcccacgctggctgacccaaccgctcatggcagaaggaacgatttccaaataaccggtggtcctgggggttgagcttcaaggcctgggtgaagaggaccacggcctcatggtagaaaccattttgagcaaagctggtacccaactttgccagttcctggctctgttgtaaggcagctgccagcagtcccggagatgcctttggactctgctggggcctctcctctcttggagggctctcttcctcttgacccatcttctggagggccagacccctgccttggggcctcctggtttcagtcccttcttctctgcgggcactgaggggccaatcccccaaccttgggcaaagccagagacacaaaagtgctagatagatccagtgagtcctcttcttcaccacactgtccctgaactgggtttccagggctggatggggggctctcatctccatctgaggtagtgctggccttgggctccccacagtactgctccaaacgctcctgtcgcttccgttccttttgacgcttcttcttgagtcgctttttctctgctttctgtttcatgcgctcctcctcagccaccagctcctcagccaggcgattggcttcctcttctgtcaccaggagcttctggggcatggccacctgaagcaggctgtctgagacactggggaaggtggcagaggcagaggggctttgagggcagggctcagactcttggggaggatacaggaaggacttgcggagaccacagtaggtgcccagtccctcagcccccttgcccctgtcactctgtccagttgatttcccttcatcatccaagtggcccaggaggtaatctaagatcctcaagggcatggccggagactacaactccccaaagcctccagagccccgtctggcgcccatccgtcgcgggtttctgcacagctgacttcaaagaggcgtgaccaaaatgagcaggactgggggaaactgagggtcgcttttacctcttcgccgtaatcctctggaccgaattccttgcaaagtttgggtgcagcagcgacctccagtgggcagctgggccgtagagagcagtctagcttgatccgccccacagtcttggaat

SEQ ID NO: 151297 - DNA, 1640 bp, Homo Sapiens
  misc_feature (834)..(834): n is a, c, g, or t
  misc_feature (1032)..(1032): n is a, c, g, or t
  misc_feature (1079)..(1134): n is a, c, g, or t
  misc_feature (1165)..(1165): n is a, c, g, or t
  misc_feature (1375)..(1375): n is a, c, g, or t
  misc_feature (1385)..(1385): n is a, c, g, or t
ttctttatttgtctcaaaaagcccctacgtagcgaggcctgtgtggcgaattcggcacgaggcttagagcttctggcagctgtgtgtttggtgcgaggaggtcacgaaatcatccttgctgcctttgacaatttcaaagaggtatgcaaggagctgcaccgctttgagaagctgatggagtatttccggaatgaggacagcaatattgacttcatggtggcctgcatgcagttcatcaacatcgtggtgcactcggtggaggacatgaacttccgggtccacctgcagtatgagtttaccaagctggggctagaggagttcctgcagaagtcaaggcacacagagagcgagaagctgcaggtgcatattcaggcatatctggacaacgtgtttgatgtcgggggtttgttggaggatgctgagaccaagaatgtagccctggagaaggtggaggagttggaggagcatgtgtcccatctccacagagaagcttctggacctagagaatgaaaaccatgatgcgggtggcagaactagagaagcagctgctacagcggtgagaaggaactagaggagcgtccagggagcactttgagaaccccaccccaccactgcggcccccccctgcggaggctccattcacagaataagggaggaacgcccttttccatccgtcaaaatgccctcttttgcaactccaaattggtccaggggggcccatggaagtattctccatgggaacacggtcgtacgctccccctggaccccataaagcgtaagggtccccctgggcacctcaagctactcggacgttcgggatggagtgttaaagancccttagtcacagatatctgggggactcgtcgggcgaacgcccctatcctcgaggtcccctgcccacaaaaacccacttccagatatctacctcctctcttggcaaggggaacaggaggggatcaccctgcggcgaacaccctcctaaaccacatttcacacccacactgcttccttatcatcacacatttcacatcnaaggggcccccccaacgcctccatacttctcgccaccccatttgggnnnnnnnnnnnnnnnnnnnnnnnnnnnnnnnnnnnnnnnnnnnnnnnnnnnnnnnngcctgggggttgttgtacaccgcattagatnaaacaacaccggtgactagtggggtgatatccctcccccacccccaggaattgagtcccgcgccacaccgactatcccgcgctccgccacccatttggggacggtggagtaagacgtgcgcaaaatatgacccccacagctgtcccgaccccgacgtctgcaacttctgtgcgacccaagatctacgcgccaggccccctcaccattttnttcacattanccaacacattctccatgccaaactttcctactttaccccaaactaccctcccctctatttcccccaaccacaatctcattacttctgttgccctctcctgcgcccacttgaatcactctgtaacccgaattcgcaactcatcgggtgttttttctgggcgccttccctccctcaaatagacgcccccacgatccccgctggttcattcgataacggcctcgccgcctggagtcttacggcgctcacgcgcgcccc

SEQ ID NO: 151298 - DNA, 964 bp, Homo Sapiens
atcctcatgccgaagtttcttccagctccatgctactggcagtgctgctatctaggcctttcaaacccagagctttctttcaagctgttaatcaattttcccttagattgcagtattctagtagctttttgcttgtagtcaattaattcctgcttagaggactccaagttcaacttatacagcttgacttgctgctgcagttcatcaaccctcttcttctcatctgagtattttctttcggcccagtgtaattgcttctggtaaattctgacgttccatttccactttattaaggcgtgcagcaaactcgctctgcatctgttttatagctctcgtgctctctcttcagagtggcatccgcttcatgcagtctctcctgaagagtctgcagagctttgattctgcaggctgttaccttcactttgatcctgcattattcgtgatttttcactctgtaaggcttctaatgcttctgtgcgagtactcagtagctggtcagcttcctggagtctcactttcagtacagccagctgggaatcctttgcagccacagcttcagtcaggtcatctacttgggctcggagtcctcgagtcattcgatcactctttgaatggtcagcattccacttttcaactcttgctcttgctttgtttaattcttcttgagtctctttggatctttggagtaacgaggccatttcttgatttaaagactgaacttcattcctcagcagctgattctccagtcgaaggttagacagttcatgtgatttgccatcatcattaggtgttggggtgtggtcagggcaggcagcatttgatgacacattttcctttgaagattcctcttgaccttcatggctagaatctgagttaccctcgtgccgaatcggcacgaggcctcgtgccgattcgccacccaggcctcgttacgtagggtgttttgtgcgcttgcgcaacaaac

SEQ ID NO: 151299 - DNA, 1622 bp, Homo Sapiens
attttggggccttgacttttgggaattttggcctgggggcggggaaaaaacctgggggtgtctttggaggaagaaaccgaagggacacaggctttggtggggaccgtttggaaccatcctttcctaaaccaggggctttccccgggccccggactggactttggacattgttccgggggaagccagtggggtggtttttggcaggggacttgggaggatcatttcccggaggacatcccagtggtgggtttttctcttggatgcaaaccaccatttttccctgggcttcaaaacagctttaaggcgagcgaacagagactaggagggaacggaaactgtccgagcaggcgggcgggggcggcttaggatctgtagtcctttttgctgtagggtttattgcccaaaatactatcaatctcgtggataatggaagacgacagtttcggaaggacctgtattgccccaatgttctccatgagctggtccgcattggaggcccccaggagcacggagctgactccctcattcctcaggcaccaggctatggccagctggggcagggtgcagcccaggcgctcggcgatggcctgcagctccttcagcttggcttgctggcgccggccctcctcactgaggatcttgtccttcagccactggtagcccttcaaggaggctcttgagtagggtgggatgccactgtcgtacttgccagaaacaatgccacaggccagaggggaccaggtcatggcgcccactcctatcttgtggaacagctccggcagctgcacctccactttctcacgctggaacatgtggtactcagcctgctcgcagatgggcggggtcaggttgaactgccgggcccacggagtaggcctccatgatctccatggagctccagcgtgacgtgccccagtacatggccatcccctggttgatgacgtgggtcatggcgcggacggtctcttccatcggggtgttggggtccgggcggttggcaaacaccacatccacgtactccagctgcagtcgctccagggaagctttcagaccttcgattatgtgcttcctggacaggccccgctccgtctccgcctttccgccccagaagatcttggtggtgatgacgaggctggaccgcctccatcctttcttcttaatgatgtttcccagtaccacttcagccttgccggctgcgtagacttctgctgtatcgaagaggttgatgccattatcataggccaaggtcatgagctgctctgccatctcatcggtgatctggcctccgaaggtcacccatgttccaagtcccaggcaggagacccgcaggccagacttgcccaggttcctgtagatcatcccgggggagcccgtctgccgcagcgagagccgagccggggagcccgtcgttgattctggatacatggagccagcctcacttatccagacttgctcggttttttacagtgggaaaattctgctcctgaacgggaacgaccggagacaaggccattttccgagcactcaggggaacgccaggtcacacatctgctgcaaagcacgcgccttgggaccacagcacccaacaggaagttcctcgtgccgaattcgccacccaggcc

SEQ ID NO: 151300 - DNA, 873 bp, Homo Sapiens
cggaacctgcaggagctagcgggattcggtgggcgctaaatgtcgcagagggcatgtgcgggaaggaagatccggcgcggggcacaggatccggagctggagcccccagaattttcccactgtaaaaaaccgagcaagtctggataagtgaggctggctccatgtatccagaatcaacgacgtggctcccctggctcggctctcgctgcggcagacgggctcccccgggatgatctacagtactcggtatgggagtcccaaaagacagctccagttttacaggaacctgggcaagtctggcctgcgggtctcctgcctgggacttggaacatgggtgaccttcggaggccagatcaccgatgagatggcagagcagctcatgaccttggcctatgataatggcatcaacctcttcgatacagcagaagtctacgcagccggcaaggctgaagtggtactgggaaacatcattaagaagaaaggatggaggcggtccagcctcgtcatcaccaccaagatcttctggggcggaaaggcggagacggagcggggcctgtccaggaatgcacataatcgaaggtctgaaagcttccctggagcgactgcagctggagtacgtggatgtggtgtatgccaaccgtccggagccacaacaccgccgatgcgacagagaccgtccgcagccatgacccaaagttcatcaaccgacgggacggccatgtacatgcagggcaacatcaacgcatctgaagcaaccaaggaagaaccatgggaggccctaacaccagaaggaccaggcaaccacaaccctgaacccgccccaatatgccaccaaagcaagaagacaacccacatgacccagcgctgagacca

SEQ ID NO: 151301 - DNA, 838 bp, Homo Sapiens
agggggtcccaggggggacccccccgggaaaaaataaaccttttaaaaaaccacggaaggtgcccttgcccccaggctggtgttttaggccaggaaaagttttttggaataaaagggaaaaaaggagtttttttgggtcacattttttccactaggaagactgaaaagtccgtagcactcaagcccaggcagatgtcacagtgatgggaaaagaagggctttggggacctgcccacttcaaaaacagtttttctcatcctttgccttcggctcctaacccagcttggtgttttcctaagggagctacaaattctggagcatcccatgaggatgatttgctggcctcggtcattagggggaaaggatgttctcagaaaaacagccctgcacgctggtcagcagagatcttgaggtcgtggccacgactggacttggtgcagagctgaacccgagactccagctgctcgctgagttcgtccagagccccggtgcaggactccaggctctcggccagtttctgaatcttggccttcagcacggcctggctaaccttggtgtccccctccgcccgcctggggatgaggaagccacgtgagccaaagaagacgatgaagtagacagaattgtacagggcgatggaggcgttcctcccgcactgcagcagctggcggtccccgcagccctgccagcggcagaaaaactcgaggcagctcaggatctctcgcatctggtcctggcaggtggccgcgatctcctgcaccctccgcagccctcgtgccgaattcgccacccaggcctcgctacttaagacccgagggtgactgtgagggaagaaaaa

SEQ ID NO: 151302 - DNA, 1236 bp, Homo Sapiens
  misc_feature (47)..(206): n is a, c, g, or t
  misc_feature (1207)..(1207): n is a, c, g, or t
  misc_feature (1221)..(1221): n is a, c, g, or t
cgcgttttaatttggagcctttggaggcaaggtgggtctcgcccccnnnnnnnnnnnnnnnnnnnnnnnnnnnnnnnnnnnnnnnnnnnnnnnnnnnnnnnnnnnnnnnnnnnnnnnnnnnnnnnnnnnnnnnnnnnnnnnnnnnnnnnnnnnnnnnnnnnnnnnnnnnnnnnnnnnnnnnnnnnnnnnnnnnnnnnnnnnnnnnnaaagcccctttttgggggggtgttcgccgggcccctttcccctttccccggaaagggggggcccaacccaatccccccttgtttcccggcccccaagaggggctcttttttcccaacttggggggccggggtcttttcccttgggttaagggggttcccctttccccccaaccccaaaggggggcgaaaccaaggcccttcccctttccaaaccgggttttcccccgggggtggattggtttcaacgccggccccaggcccctggatttttccccctgggcagccactggtcagggaacttggtcccagcacccagcaagctcccaggatctgctccttggtacgcagctcgggccgcagccagcggcagcagagctcccagagctggctgaaggcctcatgaggcccatgcacatccccgtagcagaattgccggaagcgctggcggcaggcttcggaatccctgccatcctcatgctgggcagattcctgttcccaggaggaatcttccactttcacaatcagaagcccttctccctccccaggggcctggtcctgggcctccaagggggctgccattcccctggcctgaggctcagggttggtcggcttcaacctgggccccagaacctgtactttcagtctcccagagggatcccctgtggtagctgggctggcatctggatgtgtactccagggtcgctcagcaggacacggcaggcgggaaggcgagccagccggagccccgcgctgtccaccgcagcctcgcccgcggggcgagcggcgatcgtacaggggcgtctgccgggggaccaagctggcagagcggcgcgggggaccagcacttcctagcagtgcgcgcgccctccggcctctgcctcggggcgctgatcccggccactcggagcccggtgcttgatgttggagccaggcggccagaggccccgtccccctcgtgccggaatcgccacccaggcctcgctacctaggaccgttgatgnacctgtgttgggtngggtgggggggtggg

SEQ ID NO: 151303 - DNA, 904 bp, Homo Sapiens
  misc_feature (814)..(831): n is a, c, g, or t
ctgcaaagtcctgcggttgcccgagatcctgtgcattcacctaaagcgctttcggcacgaggtgatgtactcattcaagatcaacagccacgtctccttccccctcgaggggctcgacctgcgccccttccttgccaaggagtgcacatcccagatcaccacctacgacctcctctcggtcatctgccaccacggcacggcaggcagtgggcactacatcgcctactgccagaacgtgatcaatgggcagtggtacgagtttgatgaccagtacgtcacagaagtccacgagacggtggtgcagaacgccgagggctacgtactcttctacaggaagagcagcgaggaggccatgcgggagcgacagcaggtggtgtccctggccgccatgcgggagcccagcctgctgcggttctacgtgtcccgcgagtggctcaacaagttcaacaccttcgcagagccaggccccatcaccaaccagaccttcctctgctcccacggaggcatcccgccccacaaataccactacatcgacgacctggtggtcatcctgccccagaacgtctgggagcacctgtacaacagattcgggggtggccccgccgtgaaccacctgtacgtgtgctccatctgccaggtggagatcgaggcactggccaagcgcaggaggatcgagatcgacaccttcatcaagttgaacaaggccttccaggccgaggagtcgccgggccgtcatctactgcatcaagcatgcactgggttcccggcgagtggggagggcgtttcgttccagggggaaagggacaaacgaagnnnnnnnnnnnnnnnnnnattggaacaaacaagccagggaatttggcaacacggggtcaaatagggggaaagccgggggcccaatggtctt

SEQ ID NO: 151304 - DNA, 1679 bp, Homo Sapiens
  misc_feature (1084)..(1084): n is a, c, g, or t
  misc_feature (1207)..(1207): n is a, c, g, or t
  misc_feature (1367)..(1367): n is a, c, g, or t
tttttgtcgtggttaattgtttcttatcgagtccagggtaacgaagcctgggtggcgaattcggcacgaggcttcagctcgctgtccagcccctgaagggagtgaggactaacctcccaccttgatctagagcctcggacaggtgtgcgtcccagatgggtgacagctgagtgccgcaggagctcggtaggtgcaggggtggggactggcatgtccaagcagcaggacagcgtataaaaaggcctggaagccaagagaacgagctctgcagcgtagggttctcacgggaggtcctgtgcggtcagccttttgcaccctgtggactccgggccagggagggcacaccgggctggcaggcccgctgtggctggtgttgaggcatgaacaaattgtaccgggtatcccccaccccactctgaccaccagttcctccttggatatcactccccctgacaggcagcccacccacggcctggatttgtccctgtctcccccattttgcttttcccccatgactaatggggacccaggttttgttgctcctgcttctcccctctggagtgggaaactaggcccctggctcccagcgtcctgccggccatggcgggttggaagtaggccccctccttacaggacctggcgcgtctggtcccacgcccggcagatggccattggctggggccccccttggggcggagcgctccgcgtggtggtggcccaatcatccccagcatccctctccgctctatttgaaccgccggctctctttttgctacttgacactggacatccgcgcaaatcgtgtcctttttctttcggaccccttcagagacacgttagcgagagaatgacgctcctctcttcgcctctctcccattcggggcatctcctggccttacatcctgctgtccgatggtatcttgcgcgggagtatgggcccctcttgtgcatatatcgttgggatcacaggacaaaaatgacctataatcattaatcccacaaaaccatcaatatcacaaccctttttcccattggggtggggcgcgtagtgtgcggggagagcatactagttgcgccaaccccntcatctaggggaagtgtgtttgagtgttttacttgtaagtgacaattatcccaactccgccaacccacataccttggccatcccgaaataattagaattcgcgaccactaggaaagaggcggnccgggaagtgggcggcagtatgttgccaatcgccccctccaggtggaccctttgccatggactggcccgttgtaacattaacctgtaattggaccgtccaggaaaatcattgttcaccctaacattttaagggcgggaacgggccggcggtttggctcanccaatacttgttcgatctccaaacctgtagcgttcggttccgattcttttcctatccacgcattaagttgcaccactcagagcagaagaggggggagatgcatcgccaatggattgcgatgttgttatataggtgaatcgaaagcggatggtcgtgtaggcaaatgggagttgcttctacaaacattagattttgttcttcccccttcgctgggttgtctcgcgaccataagctccgccctctccttccactacgagtcgcccgagggctcgccaaacacgccgggcatctgccagctctatcacatttaaa

SEQ ID NO: 151305 - DNA, 1044 bp, Homo Sapiens
  misc_feature (165)..(165): n is a, c, g, or t
aagccagacgaaatgttgcggagggccagcggcccggggggccttccagtctggttgcctaaagtctgtgaaccaagactgctgccgggggctcgggtgggaagatgcgcacagtgggcatctgggccccccttcctgaaggcactgcccaagcccccgccccangcatccttcgctcattggatggtgcacttgtccttctccacgggcttggccttcccgaaggaccttggccttgatgtacttgaggtcactgttgacgctggggcggcgggcgaagggcgagaccatgccataggcgtccatctccttgacgcggcgcatgcagaagggcctggggtggaaggcgtcaccgtactgcacggagatcttgcgatgcagggcggggctcatctcgtgtggcagcttggccatgctgaagagcacgtagaacatctcgtccacgttggtgttcttcttggccgacacctcgaagtaggcgcagttctcgtcgcccgacaccagcagctcggcctcggtggtgggcacctggcggcacagctcgccgtggtcgttcttgttgccacagatgaccatgggcagctccgccgcctccttggtcttgttcttcaggcaggacttgacctccaggatctgcttctgaaggcgcttgacctcatcgaaggactcccggttatccaggctgaacaccaggatgaagacatcccctgtgaggatggacagcctgcgcatggcggggaaggggtggttgccagaggtatccaggatgtcgagctggtacatgtcgccgcggatgttgtataccttacggtggaagtcctcgatggtgggtgtgtactggtcctcaaagcggccattgaggaagcgagacacgatggagctcttgcccacccgagaggcacccagcaccaccatgcggtatgagtttttggcgggcacactgagcgtgcagttcccgctggacaaagtcttcatcatggctcggggctgggaatggcgggccgggccctcgtgccgaattcgccacccaggcctcgctacctt

SEQ ID NO: 151306 - DNA, 1005 bp, Homo Sapiens
  misc_feature (878)..(878): n is a, c, g, or t
aaggacgcgaggcctgggtggcgatttcggcacgaggctgatcttcgcccccatcctgttggtttctatgtggggcccctggttctggctccccacagtaggggggccatgcttctgtttccccatctgtgagctgggggcgatggtccctgcctcctcggctgccctgcatccctggggccactgcaggtcccccctccctgtctgctcaccctcccacatcccaagtccaccctgataagagcaggcccagggcccctggcgtgccgagcgtttcctccagctgacctggagcagggcctgcgtccagcccagcggtagtggggctgcacctcacacctggacacctccaggcccagggacgcccttcccaggctccctcctccatgagtgccattgcagtaggactttccaggccttggaagccttctattctgcagtgtttgacttggcagccactggccacgtgtgactgttggtgcttgaagctgggtctgtgattgggaagcgggattgtcactttaaacaaccacacttggccagggactgccacgtcagacagaaaagggccagagccccggagttgcatcttccttcttcacgctggttcactgaggggcgcagttctctttcctgcccttcctataattttctaaatatccattttaaaaaaatttccctccatttttctctggattggggtgagggtgttttctgtttacctcactcctctcccagtttccctgctctgggtagttcctatttgttgaatccttgaggagagttccgttcacatcctggggatgtgggctcaatttcacttaattcatttcaacaaaccactggaatgcttggctgaagagccagggctcccaagnccgggggtggctgggggaaacaccagccaggccggggaacgccccaagacaagaagacccccaaccgccccggtgggaaagcccagccaaaaaacggggtcccagggggaaattggggcccttggta

SEQ ID NO: 151307 - DNA, 920 bp, Homo Sapiens
  misc_feature (37)..(37): n is a, c, g, or t
taatgtccactgcgtcgatgtcggcaccatacactancaagagctgcacggtttctagggactctttgttcactgccacgtgcagggcggtgagcccgtcataattgcgggcctccaggtccaacgtgcccggagctgcgctgtccagcagggctcgcaggcaggtcgggctgcggtgctcgcacgccaggtgagcggccgtctggccatggcggtccagcgccatggggctggcaccagctgtcaccaggagccggaccacagacggtaatgtggtgatcacagccaggtggagcggtgtctgccgtaggttgttgtagatgtcgagctcccggcccccctgctggaagaggttgaccagccggtgcacagctggcaggttaccctgcaccacagcaatatggagaggcgtgtctccgtcctcatctgcacgggtggccatggcgatgtcagcagaaagggggtgttccatggggcacatcatggggtataggggtgtaggcaggttcaccagaggaaacggggagcccatggcccgagtggggtacaaaggcagtaaggctccggggtagtaaagcgcctccggccgggccaggccgtgggggggcccggggaccgccggcaggtcgcagccgccgcgcagagggtccagggggacgacaaggcccgcagcgccgcggggagcggcgggctccggggagggcgcgcgcagcgggcgcttgcggagcggcagcgcggcgcccgggagtccggcggccttgggccgggtgcgcaggtccacgggcccctcgtccatggcccccgcggggcatcggggcatggggccgccggggacggcggccggagagcggctgggctcggctgcacgggagggtgtttcgccgggccctcgtgccgaattcgccacccaggcctcgctc

SEQ ID NO: 151308 - DNA, 1526 bp, Homo Sapiens
ttggaagggcgcgccccctttttccctcctcccaagggactcgtgtggaccagaaaccggtattcccccccaagcaccaagggacatcctcaggacttgggactttctgtgtaattctgcacctcccaggccataaaactgacccctcagccaggaatcaaacgaacctcgaaagtggaacagggaggccgcctcccatggctgcctggatggcaggcacagtgggagagtaatgctctgaacctcccaatgtgatgaagccgaaagccgaggcggggccagcaggcctcccgggcacagagccacagagcccagcgtcacacgcaccgtgcacgcaagacagacgtgcacgagactgacgcacacacggccggaggtgcatgtcacagtcgactagacgggccgtggctccctgaggctggctgtggtgtggctagggcacagcccacacttcctgatccttcagctgatccccagatccccacaaacaaggagcaaaaagcacagaatcaaatgacgacacgttccacagggccaggtgggctttctgcggagggcgtggcggtggtggcagcggttctgggagagggaaaccccagcgccacttgtctatgggccgggacggcgtgcatctcactttgccggctctgcgctcttccttctcttctccctcccaaaggctgcagctttgcatgggcagcttgctggcgccactgggcgcgtcccgcagactttaaatggaatgagtggaggtctcggactgctgccggatgtagttctggaagctcttgtctccgatggggtgctcctggcttccatatttcgtcttcttgaacttgtccctcttatactgggcgtgctcctgctccaaagccccaaccccagcgatgacttgctttagcgtcttgtaggtctcctgggggtcgtcaatgacgaacgtcgaatactcctcctgctccgggccgtcatacacagatttgctcccacaggcctcctgcatcttctccagcttgctcatgtacaagttgaagagggagtagatacgctccgtctcacggtccccatcaatgtccagctggatgttggctgggaggccgccagtgcagggcgagcagcccggagccgagtcggatggcgccctacagcacagccagtggccgctcaggtaggcggacgggtggtagacggtgaggcgcttctggttgcactggctcactttggtgagaatgtcgatccagtccttggcctccacgcagttgttggcctggatgtacagcgcacgctctggctggatgacctggaacatgtttttcattttgaaagactcctcctccagcttctccactgccaggatgttctcgatgggaatgctgtagagaggctggtcccctttgcttttgtggtaggtaaattcatggttggtcaagcgaaaccatctcttcttaaaattcttcatcccaaagcgcttccgtccttgggccctcttgatcctcgtgccgaattcgccacccaggcctcgctacctt

SEQ ID NO: 151309 - DNA, 1069 bp, Homo Sapiens
gatggagcttggctctccttcctctccatggctgtcatcttcctcctcgctgccgctgtactcatattctgtctcctctttctcaccccgcttcttccgggatcggtcaatgtggtccttaagctggatgcggacctgccgctccgtgggctggtcccggatgaagggaaacttcagtagctgctccgtgggtgggcggctcaggtaagtcttgatgagacatgtgtcaatgaagttcaatgaatttcttaggcccactttttggatttgagccttggcggagggtttccgaggaatgaggaagagggctcgcatggggtgcatgtcacacagagggggggctccctctgccatctcgatggctgtgattcctagagaccaaatatcactcctgtaatcataggtggcatcagggttctcatcacaggcgatgacctctggagccatccagtagggagtcccaatgaaagtgttccgtctgcccacggtgcggtccagctgagcactcaccccaaaatccactagcttgacctcagcattctctgtcagcagcacattctgccccttgatgtctcgatggatcaccttgtgggcatggagatgggccagacccctgaggatctccctgcagatataggcgatacagtcctccttcagggcgttgccttttgtgttctttaccaggtcagtcactgaaccagcaccacagaactccatcaccagccagagctggtcatcgtttcccggggggctcttcttgatgaaggctccgtagtaggtggcgatgttgcggtggtgagagtactttttcagcatgttgatctcctgtttgatctcttcctcctcgtcctccgtgacatccatgaccttgatggcagccagctgccccgtcttgacatgccgacccttgtacacctgtccgtaggttccattgccgaccacctccacaagctcaaagatcccagcagggtcccgcagggcggacaggtcgatgtcgtccaggctgcgggcgggggctgggtcgcccatggcctccgtggggaacggggcaccggggccgctcacgctc

SEQ ID NO: 151310 - DNA, 935 bp, Homo Sapiens
  misc_feature (79)..(79): n is a, c, g, or t
gaaggaccttgggggtgggtttgaagttttggtctgaaaggggagttggggacctgggcaggaaggggggcatctggangggcccgtggagccatgtccgtgggggagctgggggctgcgggctccttttccccaggctgcaggaagggggtcccccagcagtgtctgggcgctggctcggatgcgggggtctggctcaaaagttcggaggagaaaggcttgggcctcggccgacagagagctgggcattggcggatggaccttgtacatacccacctgaaacatggcagcctgtgggctcccgagctcgtggaagggggggcgacctgtggccatctcaatgacagtgcagcccagtgaccagatgtcagctgctttcccatacccgcgtgggccctggtcaatgatttctggggccatatactgcagagttcctgtgaaggtctcagtgcaaggtgtgatgcctgccagccgcttggaggtgccgaagtcagaaatcttgagcagcccactgaaggtgttgatcagcacattgtccccttttatgtccctgtgcacgatgtggttgtcgtgcaagtagccaagtccctgcaggatctggcgggtgtagaaactgatggtgctctcgttgtccttcaggggtccccacaccgaccgcagcaaggaggacaggctgcctccaggcacttcctccatgaagatcttaaggtagccgccctggctagctgagcccagatagcgcactatgttcttgtggcgcaggcgtctgtgaagagcgatctcttcatgcaggggctgagagaacctgctgtcccgctccgggatctccttgatggcgatgcgcaccctcgtgtggcgatcgcggcccgcgtacaccaccccatacgtgcccttgccccctcgtgccgaattcgccacccaggcctcgctacctt

SEQ ID NO: 151311 - DNA, 1073 bp, Homo Sapiens
tcgttgagggcgttcggcagccccatctcaagctctgctctggccgccttctcccagggcaaggtcagcctgggcacggccccgctcctgggtcagccgcgccacctcccttttcctggtgcccagcgctccttcctgctgcttgcccctggctctccatcaagcgcggcccgcagccgttccagctcattgcccatctgctctgcctcccgctccatagcctgcagcgctgcctgtgtgctgcagaactggcgtccctgttgctcttccagccactcgggctgtctgtctcctgccctcgcaggctccttgactaactcccgggaggctgtttcctgctgctcacctgccttgcgcaccaaggtctccaagcgggccacctctttgctggtggcagccatcttttcctgcagagtggagaggtcatctgcaagcttctgggccctgacttccttctcttggacctgctggagtgctctggccaggttggcatggagctcagctagttcgttctgctgccggcttatctggagctcgctgtgggattctatgcctgccaccttctcctttgcctcctgcagctcctggcgggccttctcacattcctccttcaaagtcatcagctgttcctggaacatggcgccatactgtgcctcctcttgctggctatcctcataccgctcacgccaggcagctacttctttgacgagctgctcacactcactctcagctgtgtgctgggcagccatggcctctgccagctcccgccgcaggacttcagtctcagcctgatgggcctccccaagctgctgtaatcgagcctccagccccttgcgcccagccctctcttcttccagctcctttcgttcccgcttatgctgctccaccaggcttcgggtctctgccttcagctcagagatacaacgctgctgctcttccagggcatctgcagccctgcgcttctcctcttcaaggctgcccttggtgaccttcaaggactctttgagggcctggagctgctcctggagctggtccttctccctcgtgccgaattcgccacccaggcctcgctc

SEQ ID NO: 151312 - DNA, 1038 bp, Homo Sapiens
  misc_feature (263)..(273): n is a, c, g, or t
  misc_feature (341)..(373): n is a, c, g, or t
cgggggtgcgaggatggcctgggcgggcgccacactaaactattaggcggccgggccggggcgcgaggtgccccggtcttgcgcgggccagcgcggggacccttcctatccacgcgggccccggggggccaccggctccactcccgaggaggtttcatccggggaacccaaggtcccccctccggaggcaggacggtcttaatccgggccaaagggtcggggactgtggggggttccccgtgggcccagtgcccaacccggannnnnnnnnnnccctccctccccagggaacttgtacccggaaacccctgggggtagacagacacataaccgcctgcatnnnnnnnnnnnnnnnnnnnnnnnnnnnnnnnnnggtatagatcacgtatctgtattactaacccagtcatacacatgaagagccgagtgtgcatgtgtgcaccacacatgtatgcatgcaggctcacacaggcacacgcctccacacacacactccccaggggccaagtcttcctcgctcctggctcatcccatccgccctcccgcttcaagtgcactaaagagggagactattttggtctttagcacaagcaataaataaataaataaatacgagggaaggaagaaagagggcaggagaatcaagcatctgccgcctttggggagatgaggcgctggggctgctctcccgcagggtgggggctgggaggtaagagcacagacctccaagagggccaggaggtgggcctggggtcctcggactcagctctgggtcgggggagtagaaggctgtctcactggccctggaagggcacaggcccctacaccagcaccaagtgaccagggtcaccactgtccctcagcatggccatcagggaggcgaagtgtcaagctctcccctgccaacttcaccccagtacccagggctaaggctgagaaggcccctaaggcttcggggctaggcctgggagcaggaaccagctgaggcacccctggcagaccctcgtgccgaattcgccacccaggcctcgcttcctt

SEQ ID NO: 151313 - DNA, 984 bp, Homo Sapiens
  misc_feature (50)..(50): n is a, c, g, or t
tttgagaaccagtgaaggcggctgaaagcaggggctgcagctccccgcancccgtaagtcgttgagattgttgttgtctaggtttagggcccagccgcttgggggaagtgatgcaggacgaaggagaggggcgctgcattcggccgagccaggcgttgcagtaggtcagcttgaggtagttggcgcagatgccccctggccgccagctgccccaccttctggctctgtgtctcgtagatgcagcgcagcatccagatgaacgtgggcatggcctgcacctggttgaagctttcgacctgaacgcggggcaggctcttcaggtagccccgcaggctggaaaacaggtgtgcccacagggccttgcgctttctcctcagggctgccgcgggcaccagatgccgcaggagtttctgtttggctttggacaacagcccgcacaggaagaggttggtgaactggaagtgatccttgttcttgaagaggtcttcccgtgccggaccactgccctgcaggcactggaacgggaggaagggaggatagcaggacgtggtcgctgcccccgcagggggcatccactcctggaagaacctgagcagctcctgagtgcccaccctgtcgtccagcacgaggaagaaggctgtaaagaaggcctggagggtgaggtggaaaaactcataggactgctggtcacccccggggcccagctccggcaaagcccgcaggaagcccagctgcatgtctctctcctgcagcccggaggcctgcacctcctcctgggtgaagacaaagaggctcttctccatgccccggtgggccacctgccccagcgagcacagagtgtcccggccggcgtggagggtctccactgggctgcgtgtgttccgctgcaccaggctgctgggctgcatcctgttcagatggacctcagtgaccaggaggaagacatccctcgtgccgaattcgccacccaggcctcgctacctt

SEQ ID NO: 151314 - DNA, 1190 bp, Homo Sapiens
  misc_feature (120)..(120): n is a, c, g, or t
  misc_feature (1160)..(1161): n is a, c, g, or t
tggcgggcgcagatttgttcgcatcagtttttttgggtttgagagataggccgaaatattatacccccaggatccccagaaggggaaagggtgcgcccggaagacaaagggcggggggcnttcatgaggttgttccccaatttgtttgcgtgtggtgggttgtgagcacgcgccacacatctataagaggaaaatttttttcccggaagacctgctccctgcagcaccagggaagagagaaggccttgtttgcggaataacccctgcgtagagatcgggaagggggtctctcaatagcgcccgtgaacgggatttgtaggagaaataaagtttctgtgttccagagaagccaaggttccaaaagtttggctgggttttcccctagccacaccatttccggaaaggtaggtcctttcggaggattccggggcccaatccattcaggacatttccatggaacccgttccccgaaagcagtgaagattgcagaagttctactttcctttcgtcgcaaggggcctggaggctgggcagtccccattggtggtccacgatgaggcggaggtacgtgtaaacagccatggcaatgaggatgctgctcttcaggacccactccctttgctctgtcaggatatccagaacactttctgccaaccagatatttttggctgtaacatctccacctgcaatctgcttcataaacgtcatacaaacaccatcggctcccagaaccccactcttcaccagttcccgtaccaaccacaccaactgagtacggcaggtatcctgcagcttcaggtacttctccataagtatctggttgattttattcaggacaatattcatgccatcacgactcaccagagctaagtcccggtaacacttctgggcttgggcaggttcagtgaggatgagagtaaacaggcccaggcagatttcttcatgctgggggaggcctttgcacacatacgcattgagggcatcattggcttctctctccgagacaccagcagtcatcgatgtcacaatgctcatacacctttccaatctctcctctaactcatccttggcatccaaactggttgaaagtagcagcctcccccctcctgcctcgtgcggaaatcgccacccaggcctcgctacctaggaccttagggganncaaggggggttcccttctggcgtgggggg

SEQ ID NO: 151315 - DNA, 1076 bp, Homo Sapiens
  misc_feature (63)..(351): n is a, c, g, or t
  misc_feature (368)..(376): n is a, c, g, or t
  misc_feature (678)..(691): n is a, c, g, or t
  misc_feature (927)..(927): n is a, c, g, or t
cctccacggtcctaagtagcgaggcctgggtggcgataccggcacgagggttttattttccannnnnnnnnnnnnnnnnnnnnnnnnnnnnnnnnnnnnnnnnnnnnnnnnnnnnnnnnnnnnnnnnnnnnnnnnnnnnnnnnnnnnnnnnnnnnnnnnnnnnnnnnnnnnnnnnnnnnnnnnnnnnnnnnnnnnnnnnnnnnnnnnnnnnnnnnnnnnnnnnnnnnnnnnnnnnnnnnnnnnnnnnnnnnnnnnnnnnnnnnnnnnnnnnnnnnnnnnnnnnnnnnnnnnnnnnnnnnnnnnnnnnnnnnnnnnnnnnnnnnnnnnnnnnnnnnnnnnnnnnnnnnnnnngttttattatccttacnnnnnnnnnaacattattattctagaggtcaaaactgagaagagattaagataggagagagctccataatggctggatagtggtcaggcattctctattcttttccccctgtagacccattctaaatgtgggcctgaggtcaatgggagatgtgccctccctatggaggatgtaagaagcagaggccatttctgccccatgttgaggaaaccatctgttgataagacctgcaatttagaggatatctgaaaagcagctggacttccagaaatttaaaattctctccttgagatggggtgcaataacaccannnnnnnnnnnnnntggcaccaaatggcggcgctcaaccctccaacccttgctcaggacattccacggaagcaaactcgtgcgatctgacccacggccccacaatcccaagatagtcgacacgctgccggcggttggcgttgcgaccactatggcgggatgcacaaagttcgcagtagcggacgagatctaattgtaccgacaccacctaatactcatacctgccgatcgatcatcataagcggcccctnactgggagccgacatgctccactacgctcgagcaacgaagtcgggcaacccaagaggtgacgcacatccctccccccaccacccctcctatagagcccccctcctccgctgagccctacgctcccagacgtgcctgcgcgcgtaggcct

SEQ ID NO: 151316 - DNA, 954 bp, Homo Sapiens
  misc_feature (73)..(73): n is a, c, g, or t
ttcgaaagtgggtggccttttgaaattcctttaaccttgccattattccgaggccaaaaaaaacgcttggtgnccagccttttaagggccatttttcttttcttcagcataaagcccctcatgtttgtctggtttctggacatgggtttggcctattttcagccccttctaataattttcccagctgtcagcttccttggaggagggggactggcttccgtttttagcaaattgccgacttacagagggctcggtgctagaggaagcagtcctttccagtatgtgaatactctgcctactgtccctttgggaggatgttgaagaggaggcacttctatgggttggagtggatgttttatgagcaggggaaatgcccttctcatctgaactcatcgctgcagttagagtctcgttttatgcacttaagaccatcccaatcttctctcaaatccacaaacaaagaagtagatgatttttcagcttcattccatttcatgaatcaggtttgactagaaaagagcaggcaatattgagggtgtccaaaccaccttgcaccttggagtcaaagtcttccaagtcagctttatggtcaaagctgtttcacagtgatttatcctcagatgcctgcagcttttctccttgggacatgatatgtctttgaccttgctggggctatctgggtaaattataggggtggctccttaatatccttctgttgctgttttcccagcaagtggcagaacctggagggcgagcggtggcgccgcggactctgcggcggctgcgcggctgcgacgggaggcaggaggcggagagccggccccggcaggcggactggcgcgcgggctagtggaggagaggaggcatgggcgccgcctgcaccgagccgcgatctctagcgccgacagcggcggcggccctcgtctttgatccccacccaggcctcgctacctt

SEQ ID NO: 151317 - DNA, 1097 bp, Homo Sapiens
ctggaaccaaggaccctaggtgccctgctgctggacgcactgaggtccccagggctgagggcactggaggctgggacggctgtcgaacttctggatgttttcttgggcctggagactgatggtgaagagctagctggggcgatagctgccgggaaccctggagcgcctctccgtgaacgggcagctgagctccgggaggccctagagcaggggccacggggactggcccttcggctctggccaaagctgcaggtggtggtgactctggatgcaggaggccaggccgaggctgtggctgccctcggggccttgtggtgccaaggactagccttcttctctcctgcttatgctgcctcgggaggggtgctgggcctaaacctacagccagagcagccccatgggctctaccttctgccccctggggccccctttatcgagctgctcccagtcaaggaaggcacccaggaggaagctgcctccaccctccttttggccgaggcccagcagggcaaggagtatgagctggtgctgacggaccgcgccagcctcaccaggtgccgcctgggtgatgtggtgcgagtggttggtgcctacaatcagtgtccagtcgtcaggttcatctgcaggctggaccacaccctgagtgtgcgaggggaagatattgggtgaagacctgttctctgaggccctgggcccgggccagtggggccagtggggcgtggggcccaagcttcctgagaccatgggctgtggtggcaaaagccagcatttctgggagtggggggcaacgaaccagcataagggggccaccaggcaccacttacgaacttttgggcaagctttggcccccatttccacaccctgtgaaaggtatatggtggtggctaccccattggcggggggccccttaatttctcgaccaaagaatatttcccctcccatggccgcggaggagctctccttgggcctttccccgccccaagcttataaccaaaaaggggtggggtcttttcgggtggcgggccggctcctctggcggcgggcgggggggccttggagaggcgggacatatctcttcggttctaatacagaagggg

SEQ ID NO: 151318 - DNA, 999 bp, Homo Sapiens
  misc_feature (876)..(931): n is a, c, g, or t
  misc_feature (977)..(977): n is a, c, g, or t
gagttttctcacaaatttttggaggtttccaacccccctttggggccccccaggcccgaggaggggaagttttaagataagagccctggcctgtcccccacatggggccaggaagatgggctgaacaaatagattggtgcattctgtacaaactggagttttctggaccccattctcctttctgtagctgactctgtctcagtttctttaacaggaccagtcgggcttcttccaatcgtagctcatccctcagctgcttgataagctgctgccgctcctcaatgcctttccccttaaacatctctaagttggctgctttgagtctttcttccattctggaactggaacggggactggaagcctcattgtcagacaaaacaatgatgtctggtgagggagttagccttcctcgctctggctcactccgtctagcactcatatccacaggctcatcattgatgttttctttgcctggccttccagcagtcctgttgtctccatgaggcctgagattcccgttaagtttttcttcatagcccttgacaccactgccatcctgtttggtgggtaactcatgtggcacctcaagatttgccaaatccttccttttgaagcaatgccaaccattttcagacgttccaatggcctcatgcccctccattttgagtcgctttgccaggacatcattctcgctcatctgctgggtccaagctccgcttcaacagattcaagcgaagagcatcttctgtcattctatccatcctggcgggtgggcggtgtaactcccggctagctcgcctcctcaggcggcggcggaggcgtcgaaaaaggaagaggcgacggcacaggggatccagaccctgctgacgggactannnnnnnnnnnnnnnnnnnnnnnnnnnnnnnnnnnnnnnnnnnnnnnnnnnnnnnnggaagcagaccactgcggggtacccctcgtgccgaatttcgccacnccaggcctcgctacctagaccg

SEQ ID NO: 151319 - DNA, 1805 bp, Homo Sapiens
  misc_feature (1319)..(1363): n is a, c, g, or t
  misc_feature (1479)..(1539): n is a, c, g, or t
ccagcggggaggcgggcagctctgcccggcagaaacctgtcttgaggagctgcagcatcgacaggtctccgggcgctggctcactgggctccccggcctcccagcgcaaggacctgggtcgctctgagtccctccgcgtagtctgccggccacaccgcatcttccggccgtcggacctcatccacggggaggtgctgggcaagggctgcttcggccaggctatcaaggtgacacaccgtgagacaggtgaggtgatggtgatgaaggagctgatccggttcgacgaggagacccagaggacgttcctcaaggaggtgaaggtcatgcgatgcctggaacaccccaacgtgctcaagttcatcggggtgctctacaaggacaagaggctcaacttcatcactgagtacatcaagggcggcacgctccggggcatcatcaagagcatggacagccagtacccatggagccagagagtgagctttgccaaggacatcgcatcagggatggcctacctccactccatgaacatcatccaccgagacctcaactcccacaactgcctggtccgcgagaacaagaatgtggtggtggctgacttcgggctggcgcgtctcatggtggacgagaagactcagcctgagggcctgcggagcctcaagaagccagaccgcaagaagcgctacaccgtggtgggcaacccctactggatggcacctgagatgatcaacggccgcagctatgatgagaaggtggatgtgttctcctttgggatcgtcctgtgcgagatcatcgggcgggtgaacgcagaccctgactacctgccccgcaccatgggactttggcctcaacgtgcgaggattcctggaccgctactgccccccaaactgccccccgagcttcttccccatcaccgtgcgctgttgcgatctggaccccgagaagaggccatcctttgtgaagctggaacactggctggagaccctccgcatgcacctggccggccacctgccactgggcccacagctggagcagctggacagaggtttctgggagacctaccggcgcggcgagagcggactgcctgcccaccctgaggtccccgactgagccagggccactcagctgcccctgtccccacctctggagaatccacccccaccagattcctccgcgggagggggccctccactgggacagtggcgaccacccctttctcctcagaggaagggcctggacttgccttcccgcggcccgcgggacaccctccctatggccccctcccggcggatgggcccagaggcccggcccagctcggccannnnnnnnnnnnnnnnnnnnnnnnnnnnnnnnnnnnnnnnnnnnnggcgcggggacgggccccagtacgggcgcgccccgcccttgcccaactaagtataggtagtccaaactcgcacaaacccgtggcgcacgccctccccaaacgagcccgcacatgcnnnnnnnnnnnnnnnnnnnnnnnnnnnnnnnnnnnnnnnnnnnnnnnnnnnnnnnnnnnnncctgcccggccggctcccaccactcaccgccggaccccgcccgccgcccctgcccaacctaaaacttaatcatggccggcgccgggcggcggcccctattcctcgccaccgatgtacccaccataccgagcgctgccgtacctgcggccacccggactaagcagcatgtaccacgccttatcatgaacgctagagcgccgctatgctcctacgcgtccgcgcgtgccagagctacggcgcctgttgtactgacctctatatagcag

SEQ ID NO: 151320 - DNA, 958 bp, Homo Sapiens
gggtcagaggtctccgttccgtgtttcacccccacggtcggcggtgttcttcttcttccggagccaagccggggggctcgtggggtgattccccccgggttcgacgagtttttccaccacctacccggcggggccatgctccttttcaaatttagtggatgtcttccccatgtggttccatttcttccggaaacttcttgttttaaattcccatactcatttccagtctcaccatctaaaacttgctcctgttgggattcaagttctggagattcatactttgggctgggctttcatggcctggagggacatactgggttctccttcttttcgtagacgtaccgtctcctgcaagaacatttcctgttccccagtgtggactgagacctgaggaaaatgagatgtagctgacagactcactctgctctcctggttcatccagttctctctctaaatcctccagcacagtcaccacctcctccccactctctggatgctgctcctgcacccaggcctggagctcctcaggtaggatggtcaggaactgctccagcaccagcagctccagaatctgttctttggtgtgggtctctggcctcagccactgatggcaaagttctcggagtcggctcaaagcctcacggggaccagatgtctcctggtagcagaactgtctgaagtactgacggaagacctctctgctatgggtgttgtttttacgcaggtcccaatcctgtctggtggtatatttctcttcctctatctttacttccaaaggttcatcctggtccatgtgggcctggatagcccaagtagatgccattttagctgtgctagaactaccggtgtttcaagtaagatctcacctggaaactgtattcctggacagtcctgcggcccccagggccagaagagaactcccctcgtgccgaattcgccacccaggcctcgctacctt

SEQ ID NO: 151321 - DNA, 1052 bp, Homo Sapiens
  misc_feature (804)..(804): n is a, c, g, or t
ggcctgggtggcttttcggcacgagggccgggggacccctccctcctgtcctccttgcggtcgaccggtgcgcttgccagatccgccgcgaagccgggatcgaaggcgacagcgcggccaagggggcgcggccgggacaagctgggggccggttgcccggggcagggacggcggcgacccggccgctggggaggcaggaagatagacccacggatcttaggaagggatccgagagcgcagccgcgcgccccgcgccccacgcctgatgctctgtgcgctcgccttgatggtggcggccggcggctgcgtcgtctccgccttcaacctggatacccgattcctggtagtgaaggaggccgggaacccgggcagcctcttcggctactcggtcgccctccatcggcagacagagcggcagcagcgctacctgctcctggctggtgccccccgggagctcgctgtgcccgatggctacaccaaccggactggtgctgtgtacctgtgcccactcactgcccacaaggatgactgtgagcggatgaacatcacagtgaaaaatgaccctggccatcacattattgaggacatgtggcttggagtgactgtggccagccagggccctgcaggcagagttctggtctgtgcccaccgctacacccaggtggctgtggtcagggtcagaagaccagcggccgcatggtggggcaagtgctacgtgcgaggcaatgacctagagctggactccagtgatgactggcagacctaccacaacgagatgtgcaatagcaacacagactacctggnagacgggcatgtgccagctggggcacccagcggtgggcttcaccccagaacactgtgtacttcgggcgcccccgggtggcttacaacttgggaaagggaaacaagctacatggattcagcggcaaagggagtggggaccttatcctgaggtataggttaccaaggacccagaaggaaccaagggaaacccttcttataattggggtacaccgaatggccgggtagggcagcctttcatccctggcacc

SEQ ID NO: 151322 - DNA, 902 bp, Homo Sapiens
gccctcttggatttttcggaaggggtcaaggggaggttcaggccccagggccgggggcccccccagggcccagccctcttggattttcggatggggtcaaggtgaagctcagggccccagggccggggggccccccagggccagccctcttggattttcggatggggtcaaggtgagctcagggcccagggccgggggccccccagggccagccctcttggatcttcggatggggtcaaggtgagctcagggcccagggccgggggccccccagggccagccctcttggatcttcggatggggtcaaggtgagctcagggcccagggccgggggccccccagggccagccctcttggatcttcggatggggtcaaggtgagctcagggcccagggctggggccccccagggccagccctcttggatcttcggatggggtcaaggtgagctcagggcccagggccgggggcccccagggccagccctcttggatcttcggatggggtcaaggtgagctcagggcccagggctggggccccccagggccagccctcttggatcttcggatggggtcaaggtgagctcagggcccagggccgggggccccccagggccagccctcttggatcttcggatggggtcaaggtgagctcagggcccagggctgggggccccccagggccagccctcttggatcttcggatggggtcaaggtgagctcagggcccagggctgggggccccccagggccagccctcttggatcttcggatggggtcaaggtgagctcagggcccagggccgggggccccccagggccagccctcttggatcttcggatggggtcaaggtgagctcaggcctcgtgccgaattcgccacccaggcctcgctaccttggacc

SEQ ID NO: 151323 - DNA, 1122 bp, Homo Sapiens
  misc_feature (403)..(403): n is a, c, g, or t
  misc_feature (554)..(554): n is a, c, g, or t
  misc_feature (676)..(734): n is a, c, g, or t
  misc_feature (760)..(760): n is a, c, g, or t
cattggagcgcgtgtgagtcagctcgtcgcggcccgcgatacgcgactgccgcgcgatagaaaatccactacgcgcttcagaccgggcgcatgcgtgctgcaggtacccgtcacgtctctctctctgcagctgattaccgcggggcgggtgggatgatgcacctcacgcctggagcaggattctgtcgcacgaggacactgggtgggccagtcggagcacgaccacagagctggcccgcagcgcgcggctccaccctggcgccctagcagagtatcgcgccggtagtcgtctaacggtcgcagcgcactgcggtagcgttcggcgccgccttctactggtgggaagacaccaggcgtggggcggcccttagaagtcagacttcatctcaagtcagctgctatngtccccggagtggcgaagtgctgcgcagctgcgcggattcggccgcgggcgtgcgcggctggcgtggtgggtcggggccgcgggggccgcctcgtgcactgcgtgcccccgtctgtgggggcgctggtgctcggggcgtctcgtcttcggngcgcggcgcggctcggtggggggctgcgtgttggcgcgccgcgcccggcgcggcccgttcgtttgtggtgggcttcggggcgggcgtgtcggttggcccggcggctcggtggccggccgtgnnnnnnnnnnnnnnnnnnnnnnnnnnnnnnnnnnnnnnnnnnnnnnnnnnnnnnnnnnncctgggcgcggccgcactgggcggcncagcagggcccgcccacagcgactacagcagaagcagcggtctgaggcatgccagtgctggccctcgtaagccatctggccttggtccaggccgatgtgctccccacagccatcacagtactccgcgtggcgggcctcgtagcaggcgcagcagtgggggcggctctgacgcatgacatagcgctgccctcctagtgaagcttcacactcaaagcagcagaagtgatccatgtgccagtggcggccctcagcctccgtgcactcaggggagaagatgatctcgtcacaggcttggcagcgtggacgcaggcattcggcatgggaccctcgtgctgaaatcgccacccaggcctcgctacctt

SEQ ID NO: 151324 - DNA, 1503 bp, Homo Sapiens
cccatgaagtcctgggagggactgggctggtagaaagggggccgtccagggcaccggccagggtgttgaagcgctggtacagcaggttcgtggatgttgggcccgccgggggcccgtcgggctctgtgatggagcggcgctttttcagggggccggggcgcgttggccagcttcctgcggagggcgtccaggtctgcatcactctggtagcgcagtggcgaatgcacgatgggcgtgagcttggtggggctgagtggccgtggcaggctctccacggtgctgccatctgcgggggcggcggggccatcctgctcaggctctttctcagtactttctgaaggtggctgaggctgtggtgtgcccgtggacagtgacccgtgaggaaacggcagcggcgatggagaggttgaacccgaaggtaaaacgggcttaccatacactgctttaactgacttatttaaggcgctgtgtgctgccggctggtaattcttaggtggtgtggcttgctggaggtacatggagtatatggaacttgaattcactgtctggggtcctttcctgggagactttggccttgaccctttattcagccaggaaagggcttaatggccactgtcagtgggagttcaggcttgctgtcccccagctggaaatgcaggtggtcccgctggcgggtacgtgggacttggcggtacgggaatccctctgctgaatctgttgtgaggagcctggctggggggtgctgcctgtggcgggcagcagggtgggcctctgtcgacttggcaggcctgcactgggcctgggcaagctgccttccttcctcctttccagggagcttgtcgacccaggacccagaggtgtaggacttgggtatgtcccatagcttggaggcagctgcttgcctacacccgggatgggaggtggcactttaccaatctcgatgcccggcttctccgtgggtcccagtgctgagaagggcacaggctggctggagacagtgccctgcttgacagacccctccacgctcggatccttccagtctgcaccggccacctgcactggtttcacggaagagctagaattctgttttaatgttggccagtttccatcattagcggatttggatcttccatgagcagcatttgaggcaatactgagagactggggctttatagggtcccccagcacaggaaagcttccggcactgggaacctggatataaggccccacagcagcgaccctgcccgatgtgctcagaggggactgtggtgatgacgtgccattcacacggttcagctgaatttttttcccatagagacgttcacgcagttcactgattcgcttgtccatcatggccacctccatgttgcgcttatttaagagttccttctgctgctgaagttttgaattttgttcctggttaagttggttacgaatctgtagttcttggtacagtctttttaactccctcgtgccgaattcgccacccaggcctcgcttctt

SEQ ID NO: 151325 - DNA, 1283 bp, Homo Sapiens
  misc_feature (280)..(337): n is a, c, g, or t
  misc_feature (900)..(962): n is a, c, g, or t
agagactcccgccaatacaccccattgtcttgctccccccgaccaggcgccgcccgagaataacttccaacaccgcggccttctggccttcagcaaaacccgcttcccccctcatatagggttaaatcccaaaatagcatcttgcccccggccgggcgccggggaggccgtattgttcaggtgggccaggccacctggaagttagggtgcactcccaatcatttcccctccggaggattactctctcaggggggaaagcaaggccttctgggccaaactnnnnnnnnnnnnnnnnnnnnnnnnnnnnnnnnnnnnnnnnnnnnnnnnnnnnnnnnnnatgtggagcctgcctgggccagaaaaccatccccgacaaggtctttttacatctgccctgggtcctggacttccagttccggctggctctttacatcttgccttttaggagtgcacattcattgcggtaggttttcccatccaccccgcagactggacccttcccaggtgatgttggaacaatccggggcgcagacgcagcggggtttgttcttcttgttcattcggcattttttcccaggtccacagtccacgttctcacacgtttctttacaggggatgcagttgggggcgcccccgttgaaaatcatccacttgaagagtgtgttgtcattcacgtcctcctcggtccacgaggtgctcagccggccggtgctgcagcactcctccttgctcagttcggtcttgtacaggacctggcagcggccgttcttcgcttgacggagccagcagttcccagcctgggcactgcggtcctccatgaactggcagagcagcagcagcaggaggcaaagcccacccggctggtgcctcgcgcggaccatcctgggggcaggcgcgggnnnnnnnnnnnnnnnnnnnnnnnnnnnnnnnnnnnnnnnnnnnnnnnnnnnnnnnnnnnnnnntcgcagaggccagcggcggagggcgcagcgatcccggcgcagccccgcgctcgccgccggccgcccgcgcgattcaatggacgtcagaagccgggcgcagccgcgctttaaatctagacgggggtctccgcggtttgcggtgggcggtctcccagtgtgtggggctgtgggagggcggccgcgagcgagggtgtgcgcggctccttgggggtggggagctttcaaaagttcagtgtgaatcaggtgacatttcccaccttctggaaacccttcccaatatctttcggcctcgtgccgaattcgccacccaggcctcgctac

SEQ ID NO: 151326 - DNA, 869 bp, Homo Sapiens
cttgcggcttttcctgaaacggattcttctttcggggaacagaaagcgccagccatgcagccttggcacggaaaggccatgcagagagcttccgaggccggagccactgcccccaaggcttccgcacggaatgccaggtgcgccccgatggatcccaacgagtctcctggctgcccccgaggccgccctgcctaaggcgggaaagttcggccccgccaggaagtcgggatcccggcagaaaaagagcgccccggacacccaggagaggccgcccgtcctgcgcaactgtgggcccgcgccaaaaaggcccctcagcgcgcccaggacacgcagccgtctgacgccaccatgcgcccctggggcagaggggctggagcctcctgcggctcgggagccggctctttccagggctggttcttgccgccagaggggcgcgcgctgctccacgaagccaagacccccgcccgggccctgggacgtgcccagccccggcctgccggtctcggcccccattctcgtacggagggatgcggcgcctggggcctcgaagctccgggcggttttggagacagttgaagctcagccgcgatgatatctccacggcggcggggatggtcgacacacggggttgtggaccacctgctgctcagactgacgtgcgactccgcgttcagaggcgtcgggctgctgaacaccgggagctactatgagcacgtgacagattctgcccctaatgaatttgatgtcatgtttaaactgggagtcccagaattcaactagaagattattccaacactcgtgcatatcaccttggtgcaattgaacaagacatccgaacgaacatcatctgagtaagattatagaaggtg

SEQ ID NO: 151327 - DNA, 1013 bp, Homo Sapiens
  misc_feature (217)..(217): n is a, c, g, or t
  misc_feature (221)..(221): n is a, c, g, or t
  misc_feature (266)..(266): n is a, c, g, or t
  misc_feature (279)..(279): n is a, c, g, or t
  misc_feature (287)..(287): n is a, c, g, or t
cggcccaaatcccggttttataagaatccgggaaagaccggacttaatggggcagcccatacgggggatccttaactagccatgcttatcagatcgaagtccttataataaaaccctgccctgtggttgtccaactgccatggtccaaggcaccattaaatttcaaagcagagattgttggtaaactgtttatctctgaatctgctgtgacactgtntaanggcgcagtctaacaggccaactctgtttcgagttcttgggtcccnagcactccacttntaaccctntatggttcctgtggcaaacaagccatgcactgaatttatgtcacaaacattattctccgcagcatcagtttgtagaggattcaggtatcgtccttgttctaagtttaacctataaacttcagaacttgcaccaacaaagtacaagtcacaggatggatagtggtaagagaaatctctcccaaactttggtattctggttttgtagtaaaaacctgattgcgaatgaaattcaatgtatctatcattatgtaagaagacaatctttgagtagtcatcagacaaaatttcaaaggtgacaacttctgaatctaaacacctttcaaacttcaaggataattgataggtgtcataacatcgaacccgaggtttatatgttccagttgctaaaatgtactgtccatcttttgacaccttaatagtggtacacacagtaggcatttcaaagtcctgaataagttcaattctcctacggacatctacatctttcttctgtagcgctctcttcttcctatcagaaagccactcaggaagggaccttgccgcagctgaggctgtaaatcttcacctcattgaggctggagacctgcatggcgccgcacaacactgttcaagtcccgggtcttttcgccaccagcgtgctcgagcacacgtaatcccgggacctcgcgagcgccctgctccgcggcgtgcggcctcgtgccgaattcgccacccaggcctcgcccc

SEQ ID NO: 151328 - DNA, 1147 bp, Homo Sapiens
  misc_feature (174)..(182): n is a, c, g, or t
  misc_feature (1110)..(1110): n is a, c, g, or t
gaaaggccctccttctaatgaacgacacggggggccgaaacacgggggccccccgccttttccccggagggggcaggaggccccaaggcgtataaggggcaaagtgttcgggagggtgtgggacgcgccgggaacaaatggtggcctagtcttccccgccccacgcgcggtcannnnnnnnncgcctttccccaattttgggaccttcgagcggccaccgtagttcggggctaggtttttctggggtgccccaggatctttccgccttcctccttcgttcagccttggtccttcgtccctaggggggggcttttgccccattttgcttcctggtagccgaccgagaagcggggctgctgtgggaaggcagaaaagtcctcgaagccttgcaaacggccggttgaggtggaacagcttatcgtggggggagggggcagggttatcgtcccagatggtggacaccgggttgaggctgtcagccggcaggaagtcggggcgtgtcccccgatgtccgacagggagtccccggacgaggggaagatggagatgttggagaagtcctcaaaataggaggagtcctgagcaaagtcgcaggtctttggtggcaagctggaggcggtggccacgggggcatagctggtgtctgggcagggctggctgccgaggaaggaggcggagctcatgaacgggcggctgtcgctggagaaggcagggtatggcggcagcgagaaggtgttccagtaggggcagtgcagcatggcgctctgcaggggcggcgggctgtacaggaggctgcccgccggcgggggttcatgctgcgggtaatccctgtccatggcgggccccactgcaagcatcgggcggcaggcggggtggggtcctcggccgggcagcaggcggcgggactccaggacccggggccgccggggcgtctatctgggcttctcgctccgtggtggcggcggtggcggcagcagcatgatctcgggcccgggtccggccgggcgcggagcccgcggcgcctgtttctccgagcctcgcagctgccgccgctcacttccgggtttccctcgtgctgggaacgccactcaggcctcgctacttaggggntttttgaatattttttaaggatagatggtgtctgtgg

SEQ ID NO: 151329 - DNA, 837 bp, Homo Sapiens
aaacgggggggccaaattggtttcggcagcagggcccccggggtgcggccggggcatatttttgacttttggttgggggtttttgttgcgcctgttcacccctggccttccggggccctgcagggctgtggggctgtgggggaccggggtttttttgcactgtaccccaaaaccaacaaaggatggttcccgcagccgcttgcccgtccctgggccccggcggcgtaatcccccgcaccacccaacacccattagcttttttggcaagggtctgggtcctgtgcaagggctggaactggcgtttggcacgggccagccagggtttagcatcccacttgcccccgtgggccatccacaccactggccagctggggcctgcttcggggtgaacggcccacccgaatcccccggctactaccacgcagccagcgccagctagggccccctgcctcccgccagccactgccagggactctagccgggcggaggtcacgcacccgccagtcccgggccctgcccccctggaggtagctgactccagcccttccagcccaaatctagagcattgagcactttatctcccacgactcagtgaagtttctccagtccctagtcctctcttttcacccaccttcctcagtttgctcacttaccccaggcccagcccttcggacctctagacaggcagcctcctcagctgtggagtccagcagtcactctgtgttctcctggcgctcctcccctaagttattgctgttcgcccgctgtgtgtgctcatcctcaccctcattgactcaggcctggggccaggggtggtggagggtgggaagagtcatg

SEQ ID NO: 151330 - DNA, 1054 bp, Homo Sapiens
  misc_feature (489)..(499): n is a, c, g, or t
  misc_feature (511)..(515): n is a, c, g, or t
  misc_feature (518)..(519): n is a, c, g, or t
  misc_feature (521)..(525): n is a, c, g, or t
  misc_feature (527)..(531): n is a, c, g, or t
  misc_feature (533)..(533): n is a, c, g, or t
tgcccataagcaccgcccggcccaattcggcggacactactcatcgcgcataaaacgcccagcggctcaaacccgctcgagaatccatatcagtaccgagtgatggcgtccctcacctcccacgctcaagtcgcgcctaaacacgacgccaacacgggcggggtaacgacagggcagcggggggtaaagcgccccaccgactccgggcggtctccccgcgtccaacaaacaggggccaaaaaaatgagcggggcgggcacgtcagcggccccctaatgataccggatccgattaacgccctccaccgcgcgccccccgccgaatcgacggcgtctctctctcaaattcccctcccgccccggctcccctctatgccggttttcctcatatcacctgtcggggcgttcgtgatgttcgcaccattcttcactctgtccgtccccttgcggcgtgcccgtggcttttcgccgcgtcgcggtccttgtgctnnnnnnnnnnncgcgggccgggnnnnnggnnannnnngnnnnngncccgccgcgccggggctccgggctggccatggctgcgcgaccccgggctggcggccgcgttattaatagccgggcccgcgggcccctcgctccggcgcccgcgcccgccgcactgccagctgcaaccgacaccggatcccggccggccccgggccgggcgcgcccacttggccggggctcctgccgggggaggagggagcggccgcgcggacctgggggcggggagaggctgcccctcccggaccagcctggggcgggggtgggaacgggggcctggagctgtctttccaaacctcccagccccctcgtcttcccgaaccttctctccacccttcctttcgtgaggtcccgttgcagggggagtcagaaggggggtctgaagccccagggagcaccttccctgtccagcctgggagggtggaggcagggttgggcgggctgctcaaagggagccagcacccctctcccgcgagtgttgggggtgtccgccctcgtccgaattcgccacccaggcctcgccc

SEQ ID NO: 151331 - DNA, 1102 bp, Homo Sapiens
  misc_feature (931)..(931): n is a, c, g, or t
  misc_feature (937)..(937): n is a, c, g, or t
  misc_feature (1044)..(1044): n is a, c, g, or t
tccaaggtagcgaggcctgggtggcgattcgggacgaggcacaggtgctgggccccacctgtcctcttccctaggcagtgggcccccagggcagccaaatgcctgcaggagggctcagttctggcccaggtcccaggcccacaccctggggctggtgctgctccagggcccagggtcaggcgggacaggacagcaggtcccagtggagcctacaggttagcaggcgtggttctatgttaaggggccaggcaggtgccagggatccagcactccagctccgagcagggcaggtggaggtcgggatagttctggccttcctcatttgatcaggatggcacaggcgtgggcctcgtcttctgccaggttcctcaggttcttctctgactcctcagaggagcccaggaaatccttcacatcttccactgtgacgtcccctgtcgtgtccagcgtggtgtcagcactggtggctgagtcgatggacatgggtgagagtgcagcctcgggtggctcccggggtgtcaggtcccatgctgtgggctggatcagggcttccatcaaggctctgtggggccagcaggaatgcttggggtcccgttagcctggctcagcttgggtgactctcggatcctgtaattggccttggtggcatcgcgggggccagttaatgccccaaaaacaaagcggcctctgttgatggtccggggcacttaaggaggaagccctccaaatttctgatggggggaaatccaggggaaaaacgcccctgggccactggccggcgtgcaaagaatgtcactcgcagcgctattgccccgctggaggtgcccatcacttatacaaaaatgagacccgaatgacggccgccacccatgcgggatcgcccacgaccccccgcagaactttaatagcagcatcggaggcactacaaatntttttnccacctcacccgcccgcgcacacacacaaacagccagcacgcggagagcggccccggcgacaatatcacagcgtcacacagcgcaccgcgccccctcatacattttntcgagtcacaagctccgacccgcaccccttgaagatagtacagacgatggaaggagaa

SEQ ID NO: 151332 - DNA, 1054 bp, Homo Sapiens
  misc_feature (609)..(609): n is a, c, g, or t
  misc_feature (814)..(814): n is a, c, g, or t
  misc_feature (827)..(828): n is a, c, g, or t
  misc_feature (935)..(935): n is a, c, g, or t
ctaaggtagcgaggcctgggtggcgaattcggcacgagggcccgtaggtggttgtggccactgtgcccggagggaggcggcggtggccagtaatgcctgggaaactcctctggggggacattatggagctggaagcacccttggaggagtccgagagccagaagaaggagaggcaaaagagtgacagaaggaagtcaaggcaccattatgactcggatgagaaatcagaaacaagagaaaatggtgttacagatgacctggatgctcccaaggccaaaaaatctaaaatgaaagagaagctaaatggagacactgaagaaggatttaatagactttcagatgaattctccaaatctcataagtcaagaagaaaagatctaccaaatggagatatagatgaatatgaaaaaaaatcaaagcgagtatcatctttagatacttctactcataaatcaagtgataataaactagaggagaccttaacacgtgaacagaaagaaggagccttctccaattttcctatttctgaagagactataaagcttctgaaaggtcgaggggtaacatatctctttcctattcaagttaagacctttggtcctgtatatngaaggaaaagatttaatagctcaagcacggacaggaacaggaaagacattctcttttgccatccccttaattgaaagactccaaagaaatcaagaaacaattaaaaaaagccgctcaccaaggggtatttgtttttggctcccacaaggggaactggcaaaccaagtagccaaagacttcaaagatataactaggagaactcacnccgtgggcgtggnntttttatgggtggaacatcatatcaaagccaaattaatccatatttcgaaatggtattggacatctttggttgggaacaccctggtcgtatcaaagaccatctgcanagtgggcccgattggatctttctaaactggcaactgttggggccttgagtaaaagggatcccaagggttaaattttaagtttcccctggaacaagttgaaagatattattcctgaattc

SEQ ID NO: 151333 - DNA, 980 bp, Homo Sapiens
  misc_feature (143)..(143): n is a, c, g, or t
  misc_feature (163)..(163): n is a, c, g, or t
  misc_feature (814)..(822): n is a, c, g, or t
ttctgtggtaggtaaaggattttttgcagtttacacaaaaaagcccttgaagaaaacggcctggacaacccttggggggataagacagccacacatgggctcaggctgttaggtgtcccactgtcacagtcccaaagagaaanggtacggcctccaagggggncagcttaagcccaccatgtaagacttgggcacgatgaaaggacggggggtccagctacgaatgtttttgtttcttgatgtcaagttgccagctactggaagtcaggagcagtttcttctttttccccactctgtgctgggtacttgggagaggcgaaataaataccagactgtccactcctcagcctaaggtccttctcaagtcctggcacactcagcacttgctctttaacgtggcatatgttccccccatcttccacctggtaatgaaatcctcagtgggcgcaaacattttagggccaagaacattgacttggaaattgattctatggcgtggccttgtggcagaggtttaaaatgactaccgtaacctggcatgggctccagcgatcccccagtagggaagggccattaaaagcggtttaagctggagctcagctctcccgcagtctcagctgggacgacatacacccaccaatggcaaagaaagattccgagcagaaaatgtgagcaaaggcctcttttatcaagaggtggtcttagactcagggttttccaaatttttggaggtaccgcaagctgtccgtttgccctgggatgtaaggtaaagtagttgtcacaattgtgttaataagcaggggtgaggggaagnnnnnnnnntctctgcccaccttttgggctgccatttggcctgtgacctactgaaatgttgagcaaggggcggggggaagaggcaccgaaattcagcgggagggtcacttgattccctggaagccctccgcacacttccccctcgtgccgaattcgccacccaggcc

SEQ ID NO: 151334 - DNA, 1316 bp, Homo Sapiens
  misc_feature (948)..(948): n is a, c, g, or t
  misc_feature (1177)..(1177): n is a, c, g, or t
gggcctagaaggctttgctggaggtggcttggggactagtttttctgcagcaatatcccctgcttgggaagacctccgggtattcacaccaacactctgtggggtgcttgggatggtaacatttgaaacagagttgctaacttcagattcaggggcttcagtttttgtctcttcaccaacaggagtctctgaggtggttgtagtaatctctacatcagagttgctctgttccaagggctgatcccgccgcttctttcttttctctaagttttcaaaagcatgcatgatggcttctacctttctatcttccctggtcctcctgctatgagctaggttctcctggtcatctataacctcttctttctcttcttctggtttttcttctggattgtctacttcctcatgatcactggatacagttactttttctggaacttcttgtgattgctggtcattattctcctctgaagcctcattctgctgctccatctctagctctttccgtcgtgcttttctacgtctagtctctgctccaatggtgggtaggcttggaggaggtggtaggagtggcagttctgtagcattaggattccttttttgtataggacaattccggtttcccttgtgacaggcacagtccactttataattacagttactatactcataatcaaatgctatggtgacctcagcatccttggtgatggcagacacagcatagatgcacaggtgaatcatcccatctgcaatcatgtgtcgcacctctgcatttggtgtacatgatcttctgatgaaccgagcatcattaccgaaagtacgggcatccacacacatctctacaccattgaattttgagtagaagagcacaaagggggtatggtttttttgagaaatgcccattgacctcaaattgctgtcgtaacatgactttcccacgatactctattnataagagtgtccaaagccaaatctcttgcagccctcaggatcttccggtgcttttgaacacgagtgactcttcccagctgtaactgcatttgggaacaataactgtgttattacaggccaattcagtcttattaatagtgtctaaaatagtagggttgcccacaaattccttgctaaaatgggaagtggtggtcaagcgcgttctgtacatctgcactggactggatantgaaagcttcttcatactggccagtccatagtcttattccgatttcccaggcctccagtggattctcatccaaattctgggcttccaagggagaatttctcctccgcaaggaacttccgggatcccctctcgaaatgcc

SEQ ID NO: 151335 - DNA, 1076 bp, Homo Sapiens
  misc_feature (587)..(619): n is a, c, g, or t
tggtaccgtacgcccacaaggactcctggtcactgcctgctgtgcagtcagaggcccagggtccagcagcccggcgggaacgggtgctgcctcttcctccagttagctccagctcaggtctgagacccgtgctgagaaaggtctgagcaccgaccgtgccctctgcccagggctgggtcctgagcagctggttttcctgcaggaaggttggagcaagcaaagtccttctctgccctcagggtcagctgcccagactggggcggatgccagagaggcaggtgggctgtggctggactggtccggagctggcttccttaccagaaaagcctcagccttcctctggaagcatcccccgttctgggcaagggggaagggctcctttaaggggtgtgctttcccagtggggagcagtctggccctgccccctactaaagcctctgctctcagcactttcccccaagtccttgtaacttgcttgaaggtgggttctggctgccagccagtccctggacaaactctcctgccccttttaaatttcactcattttgtataaacccagcaggctggtgtttacttagccctgtagnnnnnnnnnnnnnnnnnnnnnnnnnnnnnnnnngagttcaccgggtcaatattgccctcctcccccctggggagggggaggtgctcctttttctgcccccgactgccgggttcggtccaagaaccggctgggggcccaactgggggagcccgggaattggggccgtcccgcctttcggggatgcggcaaggcgggcgttcccccggcggggcgaaacctcgcattccacgaagcccgaagcggttttgccgccgcgcgccgagacgatgagggcgatctgagcgcgcgcaatagcctcccgggcggtcgttcatagcgcggccccgtcagtggccacccgcgtacgccggagtgccgcgcgggccagagccgttgagcgcgcgccggggatggaggaaggcgggaggcgccggcggggcacccgcttcccgcccctgcttgccctgtccggtgcgcccccgaagatggcgcggtggggccgccgccgccc

SEQ ID NO: 151336 - DNA, 813 bp, Homo Sapiens
ggctagcggcctgcgtgtactttcccaagcaccaccaggccaaaggtctctcagttcagagcagaaagccgtatacccagaggagcaggcagataacagaaacttccagaaacctctgtggagacagtggaagaggcaaaagggagttcctgacagctggattctagaagtagaactatgagctcacctttggcctcccttagcaagacccgaaaagtgcccctgccctcggagcctatgaatcctgggaggcgaggaatcgcgcatctatggagatgtccctgcatcccatgactcggagctgatggccttcatgacgaggaagttgtgggacctggagcagcaggtgaaggcccagactgatgagatactgtccaaggatcagaagatagcggccctagaggacctggtgcagaccctccggccacacccagccgaggcaaccctgcagcggcaggaggaactggagacgatgtgtgtgcagctgcagcggcaggtcagggagatggagcggttcctcagtgactatggcctgcagtgggtgggcgagcccatggaccaggaggactcagagagcaagacagtctcagagcatggcgagagggactggatgacagccaagaagttctggaagccaggggactcattggcgccccctgagggtggactttgacaggctgctggccagcctgcaggatcttagtgagttggtggtagagggtgacacccaagtgacaccagtgcccggcggggcacggttgcgtaccctcgagcccatcccgctgaagctctaccggaatggcatcatgatgt

SEQ ID NO: 151337 - DNA, 995 bp, Homo Sapiens
ggtgggaaatccagcccacggggccttgccagaacccggcccaggtcctgggggtttgccatttcttttaaccaaggcaacccccttctttccctcaaagggtttgggtggtcattgagctttctcctaggtgtgccctggcgcttttgccccacttcattttggaggctccggacccgtgtgcccgctgggaagcagagccgtagagaggcagacagctgcccagactccagactcccagggccacctctgtgaaaagggccaagctgctggcctgttggtgcccgctcactgtttgtctcaatgaatagaaactcctcctattgcctcacgtatgagatgaagatccgggaagccagggagcccagacaggcagctgagggaaaggccactccaggccactacttcaacattgaatattccaagtgaggaaaagagaatccacttgctctgagaagggatagtgaccaaatgggggacttgggctcaggaaggaagcctgtgatggggtctacgcgtccacccttagcctcagcccagcaccctgggtgcatgtagaaatgctcagcctctacaggtggactctgaccttggtgcgggtcctaggactctgagaccccatttgtcagaccttcacgaaaggcacattctaggttctcttcctgttttataagaaaacaaatcataccaagcgcagtgcaaagacaacctctttttaacatgagagctctctcaaaagcacaagagcgcctctctttctctgaagcaataggaaattaacccaagcctggtgggatcaggacagtacaggcttcctgatgtcatgctcaacagttgactcttgggctgaaaccagtcactgtctcctcgcacgatgttgttgagacccggcgtgtgacaggccaagcatggccaagaactgacccgaacagcgaggggggcacctgcaccacggctccctcgtgccgaattcgccacccaggcctcgcttccta

SEQ ID NO: 151338 - DNA, 1101 bp, Homo Sapiens
  misc_feature (237)..(237): n is a, c, g, or t
ggaaaggccccccccagttcccatttttcccggcaagttttccaacaagcgtttttttgagttccccagatggtgacccacccggctgtccaggggcttttccatccctttttccccttccagcgttttttcccgagggtacccggaacccccttccagggtggaccagcaaggcatccgaacgcagtctgtgtccccccggtaatgtctctgccgcccaacctcccaggccccccntgggcctcctccaggccggtacagcaccaccacaccagggcgataaagtagaccacctcccccagagcgcaacacaaacagattagagcgggagtcacgacccctgtacccataaacccagtcaaggctgagggtctctggcggtgggccactcggcagctcctcaaggctgcggatgccagacgggatgtacatggtaatggggcgccctcgaaggaacatcttcactgagatgccttccaaattgtaattgctcctccgagatccagggcccccagggctggagagggggtcttttcccccacggctctctgtgctcgcggaccgcactaacaggttggcggaggagattgccttcctggagagcttctgccgaggccgctctgagggggatgaggaggaggaagaatttcttcgcggcgtgtcagcacgctgtgggggctgcaagggcctgaggatccccggggggccaggggagccagcaccactgctgctgctgccccctccttcagattgggtcccgctaggctcttcgctggccccctgaggggctgggggtccattgctcaggccagggggtccaggggatgacttgagctccacctctgtctccgtctgggtgcctcggctcaccaaggaaggggtgcacgtgggtggcagtcctgggggggctgcaagactgctgtcccccggaggagctggtgtgccagagccctgcagggaggaagggggcacctgcagccgcagcaggcgaagggcttctgccagggctgcctttaccagttccatctcctgctcctgcaccagaagccgctggctcagcctcgtctgagaaaagccacccaggcctcgctaccttggacc

SEQ ID NO: 151339 - DNA, 1160 bp, Homo Sapiens
  misc_feature (59)..(59): n is a, c, g, or t
  misc_feature (177)..(177): n is a, c, g, or t
tcttggccctgtggacggcattcgttcacatcatgcacagggaccctggaagggactgnctggcacttgatggcccccataggtgacgttgaggctgtaggtgccagcctccataagggatgtactcgaccgagcagctgccgtcccggtattccatgcaggacatcctgcctcggnaggggccctttacagccaggcccaggccgcccgtgccagctcccctgttctccacagtgaccttgttggcctgttggtggtgccactttggatgcctggcccgtggacacgcacccgggaggggttcgcagccctcggtcacgggcacctggaaggggctgctgggcacgggactgccgtcataggtcacgtccacggagtgcagtccctcctcgtaaggcgtgtactccactttgtacatgccatcgccacggtcctgaacgtaggtctccgtcaggttgcctgaggggttggccacacgggccttgacgtgcggccctccggtctgtgtcagagcccgggcgtccacactgaactcagtggtggcctcacggaagacaccctggccctcaataccaggcccatagcactggacaccggaagtgtccaccgcaggttccacctgcagcttgctggggaagttgggcacgggctggccgccgtacttgatggtgacggtgtaggccccggggcagaggggaatgtaggtaatggtgtgcgtgccatcaccgtggtcctggatgtacacctcggccggaagccccgcctccgagcagatctcaatggtcagctccgcgctgcccgcgctcgagcagtccacttggaattggcccacctccccagcggtggcccgctccagcccggggcctgagcacttgactttggatgcgtcaaagcagggaaccacgtgggccttgaatggggagccagggatgtgggtgtcagcgaagaggatgttgatgttgtagtccccgggctcggtgggcacgtaggacacggaacatgtgccatccccattgtccaagcactcgagctgcgcctcacaggggccctccaccgtcaggcccaggccacctgtgccggcgcccttggtgtcgatggtgaagcgggcgggggagcccgccctcgtgctgagatacgccacccaggcctcgctaccttgg

SEQ ID NO: 151340 - DNA, 774 bp, Homo Sapiens
tgtagcgaagaggatgtgatgttgtagtccccgggctcggtgggcacgtaggacacggaacatgtgccatccccattgtccaagcactcgagtctgcgcctcacaggggccctccaccgtcaggcccaggccacctgtgctggcgcccttggtgtcgatggtgaagcgggcgggggagcccgcactgcctccctgcagccctggcccaaacgccttcaccttgctaggcttggtgggggccacagcttccagaggaaaggggctgccaggcacgggcacgccgtcataggtcacctccacctcatagggcccttcctcacggggcaggaagcgcaccacactgttgtcagcccccaggcctggctccaccttgcagggcaccgctgcacccgaggggcccacaatcttggatgccactttgccttgaccaccagcaccctttgatttgactgtgaactcctggtctttgccaacgtctacaaatttttagatagtggtcttattcattatttaattgggtatactcttctaaccagtacacaaaggttaagaaatacagtaaatctcattgaaaatattgctaagaggccagaagaataattttcaaataaactgaaacttacaaatgtagcaccaaaaccttcgtttttccctaattataaacttttttgtgcaaaaatactactaaagtgatgcttgtgcttccctgatttttaaacaggaacaatttaactcttccttgatgattcagtcatttatgcaaagttcttctgg

SEQ ID NO: 151341 - DNA, 985 bp, Homo Sapiens
ttcccccaatcaataaggctgtcccctgtaaacttataagaagcctttcaccccctgttactggcagctttttcggggttctccaatggttcccgtcattgtcaaagaggaaaagggggtttggggtgtgagaatctcatagtagcagatctggctgtactggggggagcagtccccgtcaatggcttccccccgcaggatgcgatcgtacagcttcccctctgtcacagccgcacgatacagccggttccacatacactggggcaaactcgttcacatcgttgacccgcacatgcacagtggccttgtgggacttcttggtgttggccccgtcggggccctcgccacagtcataggcctggatggtgaaggtgtgttccttctgggcctcgcagtccacaggctccttggcccggatcagcccctctcctgtcgccttgtcaaggatcacagcctcaaagggcaccccagacccatggagccggaagccgcagatctcacctgcatagcgcagcggggcatccttgtccaaggcaaagagtggtggattcagtaggaccgtgttgtcattctccatgacgatgccctggtactctgcctcaatccatggcttgtgcttgttggctttgttacaggagcaggacgcgagcagagaggccagcagaaggggcagcagcaggagggtcatggtgcggcgtggggcagggcagggccaggcgtttgcctcccctgggagcctccagcctgcggattccaccttgcgggagggatacagggggtctccaaggagcggggtacagcagggcagggacggaaaggagcctgccgcccacactagtccataaagcgggcctgggcagatcccaatctgggtagctgaggcggtggacttgcagcggcttcccgtttcccccagcccagcgtcctcactctctcactcccacctcgtgccgagaatcgccacccaggcctcgctaccttggac

SEQ ID NO: 151342 - DNA, 961 bp, Homo Sapiens
tccggccaacagcttcttcatccagcttgggccgctgctcccctgagtgttcagtgacaggccccagatacccccctctcccagatgggggtgtcaggaccccatataccctccctgtggttgcctccctgagggtgctgctggcctcctcaggggccctccgggaaccgaggcgcatccaggaggcctgagcagcggcgtcgcactgtcattggagggcttgagtcactctctgtgtgggacgactcagacaccgacagccgcttccgtaatatctcaggggagccaatcacccagctccggtctcggcctttgagccctgccaggccatctgaatggtcctccttctcctcactcaggctgcgcttggtcgggggtggtgtccggcgctcctcgagcagtgagagccgctccatgctgctgtacaccttgttgaaccttggagagcaggaagagaactggcggatctcaaggcagccatcctcactcacttcttcctcatcctccgagtccatgtggtggtatcgctctgagcgggtgtcaaaatagctagtatcatcctctgactccaactgaggaataaattcagccttctggcggagaagtcctgtccagtccagaccagtaaagaatgggtgctgcttcacctcataggcactgcctgtgccaagtctctccagagggttctggtggagcagtttggaggtgaggtcctgggcgtctgggggcagtgcctcatcaccctcaggccacacaatctcatcactgatcacctgcccaaagagctcctccggagtatctccaaaaaaagggacgcagcccaccaggaactcatacaggataatgcccatggcccaccagtccactggcttcccatagccctggcgcaggatcacctcaggcgcaatgtattctgggtcccctcgtgccgagttcgccacccaggcctcgctacctagga

SEQ ID NO: 151343 - DNA, 995 bp, Homo Sapiens
gggggcgacgccacacaaggccgggggttaaattgttatgaatttttaaggaagaaaaccgggggttttacacccatacccgattcagggctggttctggaaattcctggccctccgggggatccggcttcccttggcctcccaaaggtggggggattacagggtgggagccactgcgcccaggcaaggtcacgttaatttttgaatcatccactttcggaaaggaacagaagttaaaaagcattaaccaagaaaagctattcattaccacatacaggtgctcatgtgtgtgtgtgcacgcgcacatgaacacacgtttcaagccagtctcctgaaggaagaggcactaatggcaggtaaatgctcaggctcctctcagtaccctggggctcaccgcctatccaagtggacagcagggaaggtgcctagagtccccaccagagcggctgccttcctcccttcgctcagctgccagagcagccacgaaagccaaattctcagggctgtggaagctttggaccagcaacaacaagctagtacctatatgttctttatcatcctcaaagtcttgcgaacccaaagatagaactttcagaaattgaggaagggggtgctttcccctgtccttgtccatatggtaaccagggtctgcctagtctcatccccagcctctgggttccctcccctgctctagacttcagggcagttagaatggatgactctgctggatctagagctaaatagaaacttctttgccatagaaacttctctgttgaaggactgcgtccccattcaaagaggtcagatttgtgggcaggcaagagctcaggaatgaagaaccaaaaaggaggctctcaacccctctccaaggccagacgctctctgtactcccattaacttcacaaccaagtgcagacgctcggtgagttcagagaccacttggttagccctgccccaccctcgtgccagattcgccacccaggcctcgctacctt

SEQ ID NO: 151344 - DNA, 1002 bp, Homo Sapiens
  misc_feature (610)..(619): n is a, c, g, or t
aaatcccttaggtatttatttttggaaaaactggggctttcaaaagggcccccaaatttcttggacccaggtatccattcctggaggatccctcggcaatatgggtttaggattagccaaatatggttaaccattggcacacagggcaaggagactcagatttgagagcagaacttttaacaattttccattactttccatcacccaaattcatcagtattatagggaaatgtcaatcaagaaagctagtataaaacactttttagtatttgttccccaatatatcatgaggaaacaggtcaaaaggaagatgagtacaaaggaatcaatcactgcctttcacagaatcacgcaacttcggagcttggaagggaatactaagccataaaattcaggcccttgatttactggtgaggagcatggggtccaggttatgtgttttgattaaggtcacacagcaaagttggtaacagagttagggtaagagctcaggtttcctgacttttggtatagttcctcttacactctcagccctcaaactaattgttttataagctatacttcactgtttatcctaagtgcacacagagaaatggaaaaatactacccnnnnnnnnnnaaatgtatgttaatttggaaactgtattaactcaaaatataaacttcacaagagtagtccaacgattagaatgaacaataaaattttagttctggaaggacattaagaagttaagttagacttcagttacacaagaattaaggctcagggaaagtaaactgtatctccccaaatcacaaagttgagacaagaaccaggtcacctaaagctgactcactgcttcttccaatactccttattcttcattggctattgattacaaacaaagcaaaatatagaatcaatctgatttagatataaggaaacgttagtaagaatgtttggtgaatcggcacgaggcctcgtgccgaattcgccacccaggcctcgctaccttaggaccg

SEQ ID NO: 151345 - DNA, 944 bp, Homo Sapiens
  misc_feature (623)..(872): n is a, c, g, or t
  misc_feature (881)..(900): n is a, c, g, or t
agttgatgagccatttctttcctccatgggctcccccaagtgggagcatcccaggcctgtagtgactggtgtcatctctggctggggggacagtttcctaagctgtgatctgaccaggatggcaggaagccaccagtgtggctctagtgccctcgtgtggttttctttagtattgcagccagtcccagggagcagaaatgccacctccaagtcaccctgtcagttacagaaggagaacttctgcaggcccagagaaggaagaggaaggcatgtaaacagataaacggcaggcagtgcggagtgatgaatgatgggtgctccagcagaagagacagtagaagtggcatcttagccagggctcaacacgcagggagtacgggcatccttaggcaaaggaaacaacttcagcaagagctgggaggctccctctgactcccgatccaagcttttcccactgcagtgtactctaaagtcaagcccattcatgcccactgggaagggaggtcaggccgaatcagaagggctcagtacggaacaattttatgcaatattatttcaaagttactgacttccaattataaaattaatgtgtactttgtggcctggcgcagtggttcacacannnnnnnnnnnnnnnnnnnnnnnnnnnnnnnnnnnnnnnnnnnnnnnnnnnnnnnnnnnnnnnnnnnnnnnnnnnnnnnnnnnnnnnnnnnnnnnnnnnnnnnnnnnnnnnnnnnnnnnnnnnnnnnnnnnnnnnnnnnnnnnnnnnnnnnnnnnnnnnnnnnnnnnnnnnnnnnnnnnnnnnnnnnnnnnnnnnnnnnnnnnnnnnnnnnnnnnnnnnnnnnnnnnnnnnnnnnnnnnnnnnnnnnnnntccatctcnnnnnnnnnnnnnnnnnnnnccctcgtgccgaaatcgccacccaggcctcgctacctaggaccg

SEQ ID NO: 151346 - DNA, 1423 bp, Homo Sapiens
  misc_feature (543)..(551): n is a, c, g, or t
ggagtaaggttaaatggtggaggggggtggatgtgtgtaatgggagtattctcggtggtatcgggtaaatatacaacccgccgagtgtggggttattgtgtgggcgacgagcccgatcgcactgtgtcaggtttgtgttgcttagcggcgcctcaaaagtatgagggggcggtttttgtgtgcccgacaagtcgataccggcccaagataaaaaaggcgccacagcgcttggggagtgtttttttctccgtattattatacagggacccgccgtcggggggatatagcgttgaaaaaagggtgggcgcagaagaggaagggtgtttgtttttaggcggaccaccgactagataggggatgatgcaccatggagggaaaatcaaaatgtttgtttcccccccctcccagaaaattttttttacatttagcaccacaggggggcccaacaggggggagaccctctttccctacttgcgcgggtcaaaaaatatgataggtggctgtgggggcccaggccgccgcaaaagtgtaggggaattttannnnnnnnnagaaaagggggcggtagccgacaaagagggagatttatctcattgtgaaagtgggagaccatccccccaaccccgcaggtcccgtttataatggtttttttctaggaaatggaattttattgttgcttcggatgaggtccaatgtgtagttagttcaggcgccatctgggaaattaaagaaccggacccaagtggcattaaggggggcggagtttgccaataagggatcgtggtaacttgccataaataaccatctgctgtgcatttataagccatggggagtatgctgtgggtgcttccttcatcaagtttttaatcctggctacccagtctggggggtgtcatcttgtttcctgaggaggggtatacgccagtaactgggtaatcatttcactatcagaacttgtagacagaccaataccatgacgcagaagctttttccttaatcgagcagcatttaccaattcgccattatgtgccacagctatcttcccatgaagtgtttcaacaacgaagggctgacaattttttagttcacattttcctgtggtggcatacctggtgtgtccaattccaagatttgaaacatataattttttcaaattgtcttcagtaaagacgtgatttacaagacccattcccttgtgtgatttgaatgttggcacggaactcccatcactagtcacaataccagcactctcctgaccccggtgctgcagccccacgagtcccagagtgatcacatgcggtacatccagctgcgtgggccactctcctgaggcgatgcacccgaacacgccacattcctctcggatccccaactcctccctcgtgccggattcgccacccaggcctcgctacggggagtgagt

SEQ ID NO: 151347 - DNA, 1417 bp, Homo Sapiens
tccagggagctttctttctaggaacgagggtctttaagttgcagacaattttttcccttaaactttcggggccttgggccgtccttggtgggcaaaacttgagaagtggtagggcatggctcgacagaagcctcaaatggcccacctgtgtggaactttgcccagagatttcccgcaacttgcattttcaagcaactggtgccattttcccgcttttttgggcagaaggaaaagcagaggcagggtgatcagggtgaccatggtgagggacactgatccccagagcatgatccccaagagacataagcctcgcaccaggtaccacagaaataagctcagattctcactcagagaatcactcagggtggacgtgtcctctgttacccgagacatgatgttacctgtctggttctgtcggaaaaactccgtctcctggcgcaggacagccccaaacacctctccttgcaagtggctgtgcacgtggcccatggtgttgttatagatcccgtcaccccacgaactccagcactgcactggctatggtgagaatggacatgagagttaagtttcgagtgaaggtatcggctgagccatcttgtagaatccagtcagtgaggcggcccgtaaagaatggaatggccatctccccaagagaggagaggaccaccaggaccaggaacagcgagaggcggcgcgtctccgagcccaggcagcctagaagccgacgcacagggtttccagagccgccctgaccgccgggcacccagaggctcccgagtttgtgccacagggctgctgcgggcagtgccgctgcataactgacaacgaaggcggtagggtgacttccccagtgcagtagcctggtgctatccgcggacccgggggctccccatgagatcagctctcggaacaaggcaagtcccggcagggccaagcccagtgccgcagctaatggcttcaaagcagccagccagccctgggcacctgcgttttcgctcttggagccaaccgttgccctgaggaccccgcaggcccccagccagagcacggcccagcggctcaggcccaccgcccagacccggagcagtggcagcgcggtgggcaccagcagggagaatatgcggggcagcgcggtccggagcagcacccagtcggcgagaagtagcagtactgtccccagccatgcgagagaagctccggggaggcagcggcacccgcggggagcgggacacctagagctagccattggcactcggacgccgtcccggtcccggccgggcctgggactctccgcgccccggtggggcctgaagctccgggtaccgccgagtcctcccctactggcggctgggggagggaacgagggcggggctctcggaaagtcccaggaacaggctgatcctgcgctggcgagaag

SEQ ID NO: 151348 - DNA, 503 bp, Homo Sapiens
  misc_feature (379)..(379): n is a, c, g, or t
aagtcggctgtcggccgggattttggatcgagtagggaacgaggagcgggcgggtgtagtgtgtgggagtgagagtgtgtgggagtggggtgagggagaagctgacgggacgcgaggctgtgagaaactgggcgagtgtgcgaggacgcccggccagcctgcgggagccgcagtcggcggaggagaaaggaggcggctcccggtatcccgaccccctcccctatctcttccggcgacacattccaatcacgagcgggtaggtcgccagcggcattccatcggaatgccccagtcccggactcagttgtgcccgagagtcgagggacgggagcgtgcccgcgacccaatgaactgttatacaactcacacaagaggcaanataaatccaagggacaaaaggaaaaagcaacacagctgtatcacaggaatgtgctaagtacctgttgggctggccaaaggtgatgggctttgaacaggattcgtttcgcatcaaggggcgaaaa

SEQ ID NO: 151349 - DNA, 1031 bp, Homo Sapiens
  misc_feature (93)..(93): n is a, c, g, or t
cgaggggctgatgcaaactctggccaagttatattttcatgatttccaagattttggggataagtaaacgaaatgattaaaaagccattctcnggaatttgcaggaagacgactgaaggatccagaaccaaggatcccaacggccttttcacgtggttacatgttcacccattacaccacaacttcaaaacccaccaggcgagctttctctcaaaatacacattcaaaatggtgttccaaataatccaattgtatacattgcaaagacacacaaaatgcctccttacacacgattagtaatctggttttagactctgaagtgataccaaacatatttagctaaccctctcaaaattgcaggcctagtgaggtttaaatgttttaggatatagaatctgcttagaatttagtgaaaactatgaaccgtagactgtcttcggtaatgaacaaaactggaaaatattaaacttcctttgctttgtcactgagcaactataagctttctatgatgtatgtatcatactagcttgtatgtgactttagtgtcataaacacccattgcctttttggcacttttaaagtacagccagaaaaggtttggaaaattgttctggaaatacaagttggttccctctgtctcatggatgcttaggaactgggtagtctgctgaaaccaccagttcagcagacccttgtacagctgttcccggccaactgggatcctaaggaaacaggctggaagagccaggggcctccctcacaaatgcctaaataaccaacatatctatgccgacagccatccctctctcaatgccatggtccaagggagtcttgacctgtctcttcccattttactaccactggctagaggggcacccaacaacaagaaacctttgtaatgagtatgaactagcaaaaacactgtagggcagcatttccttaggtgtatctctcagaacataaatcccacaagatacctacttttaaaaaaatctggcccctcgtgccgattcgccacccaggcctcgctc

SEQ ID NO: 151350 - DNA, 1006 bp, Homo Sapiens
ttttttggagctcccgggacaaaattggggccattccccccttcggttcggggtttgggcccccccttcggatttttttcggtccccaggtcatgggtgtccagacccaatttccccaggcaccaggccaaagcggttccagtccacctcgggtttcaggtccattgtgcatacgtttcatcttccaggggcacattttttctcaggagggttgaaagatggggttgaggcacttgagaaactcttggaagctgagtttccaatcagcattttcatcagacagttcaatgagagcatcaccacaagagtccccttaagcaacttgttgttctcctggtctggatacgttgtaatattgatggcagtttcattctgtttccacaaacttcaggaattcactggagtccaggcgagaatcaccattatcaaagttcttaaaatacttgtctaggatttcactgtagttgctgcctttagagaaccagccatctggaatgatctcagcttccagccactggatgatgcgacgtcggagctcatcacggttggactgatagcaaacaactgggctggcagatggacttacggatttcttctctttgcagtgtccatcgtaatcaacctggattttggatccagtgaggcaggcatctcgatgcagttcacagtggttgaggtaggtcttgccattactgccacacacaggcctcttgtgaggtttgcattgctcaatgcagagacaggtgggttcccctttctctgtgactgcacattcccggccggctccacaaaacacattggcacagatcttggatttgctccttagctcttcctcggcgcggacccaggcgaccgccaccagcgcgagcgcgagcgcgagccagcgtttccacatcgtggtctggtccaggtctcctgggggcgcggggcaggacggcggcagcgagctgtaagcggaggtgggagctccctcgtgcggaattcgccacccaggcctcgctacctt

SEQ ID NO: 151351 - DNA, 978 bp, Homo Sapiens
  misc_feature (86)..(86): n is a, c, g, or t
ctctccaaagctagatctcttaggtgggtttcagttttgcatctagctccaccccccatctgagtagcatctctacagaagccttncaggggtctgaggcagggcagcagcagcctgcaggttgaaaggagaggaagcccacaggagtggccacagaaatgagggaaaagtaaagggaacgtggctaacaccagagacgaacagatagagactctgagaagtggtctctgggggtcgagatggggacctgtctttttgccctttgtgaagtttcttcattctccatctaatccagagaattgttttggagacaccaaactcagacacattcagaccaaatagttgtgtattcattttccatgagaactctagtaagaatgttcatgaatgcagatcacaggaagccaagtcagattcagaaagctgatttgtgcccttggaagccagccagagtggtggtggggtacttaggctagagtctccaaggctgacagccccctacatcatctcctcgatagggctacatgcagtgtggacattgacattctctagccaggaccttgtccaatgcaggagttgcactgcccagccgctgctctctgactatccattcctaggctccataatgacagctccccttttgtgggcactgcctgtgtttaggcagaaggcggcattgtagagggcctcactgctgtccctgaccatcatcagcagagcaaaacccatgcaaactatcaggggtactggagctcatctgttgcacaccaattctggtgttcatctccgtgacatcccaagccacagtcattatcccaaaacaacccaagttccctctgatccttggaactgagtcccctttcatgtccttgggtctcccttggatggagggagtcataactcatggctaagagctataggtgcccctcacctcctctccctatctctgctcctcgtgccgaattcgccacccaggcc

SEQ ID NO: 151352 - DNA, 817 bp, Homo Sapiens
ggtgctcggccgccttcaggcggatctgctcgcggatgatgtctgcattctcccgctcggccttggcgcgcgcccgggcctcggcctccactcgcagcatctcattcttgtgccgcagctccatctcccgctccacggtggctcgccgcatggcttcctgcttctgcacggactcctcctgcttccgtaaattctcctcattgagaagttgctgctgcttcagttggtcctcgtagcgctggcgggccagcttgtcttgattctgggccctggcctggtgctgccggggtctcctcgctcagggtgttcctcctctcctcagcgtgcgcccggatctgctcggttttgagctgctccagggcggcctcatactctttgagcttggactgttgctccaactgcagcgtctgctcctgcatctgtggcagattcagggcgtccttggcataacgcgagtgctccagctcgcgcgccgcgttggcggcgcgctccaggccggtggggtcgaagttgctccatttgtccttgggcgccggccggtctcccaacccgcggtccccgccgccctcggccccgggctgcgcgggcggcaaaggcggcggcggccccgcgcgttcacccttggggcccttgttaatgccgaagagccacgacatgctcgcaccgccgccgccgctaccgccgccgggacccccacccgagtctgactcgcgcgcggctgggagcagcctccacgcgccgcgagccggtggtcaccctcgtgcttgaatcgccacccaggcctcgctacttaggacctttagggccgggtaggccc

SEQ ID NO: 151353 - DNA, 1007 bp, Homo Sapiens
  misc_feature (961)..(961): n is a, c, g, or t
  misc_feature (991)..(991): n is a, c, g, or t
gtagcgaggcctgggtggcgaattcggcacgagggcaccttttgaagggcagaaagtgaagggcaccgtccgccgtgtggtcctgcgaggggaggttgcctatatcgatgggcaggttctggtacccccgggctatggacaggatgtacggaagtggccacagggggctgttcctcagctcccaccctcagcccctgccactagtgagatgaccacgacacctgaaagaccccgccgtggcatcccagggcttcctgatggccgctttcatctgcccgccccgaaatccatcgagcctccgacccaggtttgccagctgaggagccaaaggagaagtcctctcggaaggtagccgagccagagctgatgggaacccctgatggcacctgctaccctccaccaccagtaccgagacaggcatctccccagaacctggggacccctggcttgctgcacccccagacctcacccctgctgcactcattagtgggccaacatatcctgtccgtccagcagttcaccaaggatcagatgtctcacctgttcaatgtggcacacacactgcgtatgatggtgcagaaggagcggagcctcgacatcctgaaggggaaggtcatggcctccatgttctatgaagtgagcacacggaccagcagctcctttgcagcagccatggcccggctgggaggtgctgtgctcagcttctcggaagccacatcgtccgtccagaagggcgaatccctggctgactccgtgcagaccatgagctgctatgccgacgtcgtcgtgctccggcacccccagcctggagcagtggagctggccgccaagcactgccggaggccagtgatcaatgcttgggggaatatggggtccgaaaaaccaccccaacccagggccctggctggacatccttcaccatcccgtgagggagctggggaactggtcaatggcatgacgnaatccccccaatgggtggggtggaccctgnaagcaccgggacgccc

SEQ ID NO: 151354 - DNA, 1035 bp, Homo Sapiens
  misc_feature (981)..(990): n is a, c, g, or t
ccatccaaatgtagtacgctaccttgcaatgaatctcaaagagcaagacgactccatcgtggtggacattttagtggagcacattagtggggtctctcttgctgcacacctgagccactcaggccccatccctgtgcatcagcttcgcaggtacacagctcagctcctgtcaggccttgattatctgcacagcaattctgtggtgcataaggtcctgagtgcatctaatgtcttggtggatgcagaaggcaccgtcaagattacggactatagcatttctaagcgcctcgcagacatttgcaaggaggatgtgtttgagcaaacccgagttcgttttagtgacaatgctctgccttataaaacggggaagaaaggagatgtttggcgtcttggccttctgctgctgtccctcagccaaggacaggaatgtggagagtaccctgtgaccatccctagtgacttaccagctgactttcaagattttctaaagaaatgtgtgtgcttggatgacaaggaaagatggagtccccagcagttgttgaaacacagctttataaatccccagccaaaaatgcctctagtggaacaaagtcctgaagattctggaggacaagattatgttgagactgttattcctagcaaccggctacccagtgctgccttctttagtgagacacagagacagttttcccgatacttccttgagtttgaagaattacaacttcttggtaaaggagcttttggagctgtcatcaaggtgcagaacaagtttggacggctgctgctacccagtgaaagggcttcccccatcaacccgggccaacccggcaatttccgcagggattcaagggcggaaaatggaaccctgcctgttcccggggttgccccaattggaaaacctttgtggcgcctaactaaaaaaccccttgggattccaacccggcaaccaaacgggcccggcgggggacccccgggagacannnnnnnnnngcccggaatttcccgggggccccccttgggccccaaggagaatta

SEQ ID NO: 151355 - DNA, 932 bp, Homo Sapiens
gtacctcacgggaaaaacagctgacacagtgagcgggtcatcctcatagcaaaaggcggccaatggtcccgcacatcaaagaaagttgctttcagggagttcccctggaagacatgatggttctgttgttgcacagacaagatggccaggatgtttttgtacaggtacagcccttggttgtgtgacaagacccaccttgtcacacttgaacgtggcgtgtatcacataagcggccggtgtgaaggtcaatgatatggagggaatagtcttctagagggggaccgtgggttgggggtcactgattcactgttccgatatacctcaaaaaatggagggtgaggctcatctgggaggtaggcagctgagcccacgatgacacagcggcagtcatcagtgaagagactacactcccggttcaggtgctcaccattggccgcaacattggtaatgtgcagcaggacaaaaaagcgttcaaagagccggccccggatattcactgaccgctggtcattgccattggacaggatttctccttcgtatccctgcagtaggtcctctgctgcctggcagccctggtactcatagatttcaagagatgtctggtctgaagaaaaagcaataaagtagcgtccatcaggtgagaatttacgcaagaaacaaggaggcttttcaacgttgacaactgtgaagttggggaagacattctgatggaacactcggacttggtgccagtgggtacctgccttgcctgaactgatccgccggcgttccaagcggtgaatgacattttggttttggattcttcgaggcttgatggtagaaacatgatgatccattatcacatctctgtctggtccgggctcaaagagccagggcgagggatgccccagcctgttctgtcctcgtgccgaattcgccacccaggcctcgct

SEQ ID NO: 151356 - DNA, 905 bp, Homo Sapiens
  misc_feature (463)..(473): n is a, c, g, or t
  misc_feature (864)..(864): n is a, c, g, or t
gctgggtggcgaattcggcacgagggagccagtcaacttcctggaatccaagaccagataaagaagtaggacaggtgcccctgggttctgttctgtgtgggcctgtggggagtctctagacaagatcttttccaggccctgacttctgcctccctctgagtggcacagggagttgaatactgcatggcgagtgtaatgatgatggggagggtccttgtgtcctcaccccttcctttttggtgatttacaccactgtaccatactgacccaggctgggggcaggtgtgttggagacaggctggtcaaagaggtgacaatgattaagagataacccagtggtccctgagaagagattggttagtatggcctgaactggtggctgggggaactgtgtctggtcaagttatggcagatgtcacagctttaggtaggtaaaaagggtcctagatgaaaaccttggagnnnnnnnnnnncctgatagggttgtttatacttcttgattggtttcttgccattttcactttcagtgatggtgggtgtgcagtagaccaaaagtgtcttctgcccttttgtgctaagggccctggttgactgagtggccccagtcagatgagaggcaagtcctaagcttcttatagacagggatgttgactttgttctgctgcagcctgataaactgggaccactgtgtggttagtaatgcacttgccatttggtgacacagactgaaggctatcctacacctgggccttacctcttcctctactggcatcctaatggcactctgacagcatccagggtgacttctgggcccattggaaattgatcatcattctctcttctagtgtctatctttatcataancctgatgtcccaaacttgtgacaagttcttttggcaactga

SEQ ID NO: 151357 - DNA, 1007 bp, Homo Sapiens
cgctttaggccagagttactgggcccccccctccgtaaatgggctgaggcagagtagaaggtgtgagggcttcggtggcaaaattaccagcttcttgttcagggaaaggggtagaggtctgggggggccaagatatccgagtgccagcccttaaggccccaggccagcagacttcgtgaggtgctgctggctggtggaaaggccgaaaaaggaagctggtgtggtaattgtcctccacgctcccacttcgatgcagtggagataaaagggacctctgggcggtgccactgctgctggttctgaccgaatgcaatcgcttgctctggctgtctgaaggcctggcggtctgcagcttcttggggatgctggcttcctccttatcaggactggtttcgggagtctgctccgatagttcctgaacaggggagaactggcatagcttgttggtcccatccagagtagtggaaggtttgtagtattccaaaacatcttctgatgaggagaagccatgtaaggatgctgccatgctggctgaatatgaaactgatttgatatccagagagaaggaacgcttgagcttattgctgtcttccagcctgtctgcggacaggtgcagcccactgagcgcctgtaccagcgggctgtcctctaacagcgacggctgcacgctgggcacgctgggcacgctggcgggatgcacgggcctttgtcctgctgcctctgaggtagcagagtcggcacagggtggactgaggggcgtctcgcttttctgtccaccctctgagacagcagggacaggttcatttggcttctccaggtgcagcagcttgagtttgctctttggccctgatgctccagtctggttcttaatcttcttctcatagtccaggagttggcccagaaaattgaagtttggagatatagtaggtcttttttctttcacaaatctgtaagcttcatctaaagacatcctcgtgccgaattcgccacccaggcctcgcttcctt

SEQ ID NO: 151358 - DNA, 979 bp, Homo Sapiens
  misc_feature (809)..(828): n is a, c, g, or t
  misc_feature (863)..(928): n is a, c, g, or t
  misc_feature (958)..(958): n is a, c, g, or t
tttcgaggaattcctccccggaagcgggccccccaaccttcttgggggaaatcctttcccccttccaggtttagggtaggaaggggttggggggcagactttccaggtgggacctgggcttccttatgctgtcatcatggcgatggtggcaggcaaacaatggcagattttgtgccaagacttgtgtccctgcctttttctctttaagaattccaggtcctctaggaaacaggtggccagcatctccccatctttggggagaccctccctgcccctgccctgttcatttgcctctgcggaatgaggcctctggagtcccaggagtctggccacctcccacccaggggcaggctgcaccacattaggctctgatggactcaccctgatgattctaccacctgttatctctgcatagaccatccagcccgccaggatctctgctgaactcctaccatcccccaaggcccaactttccctgaccgctgcaagcagattcaattccctctcatctgggatcccacagctccttgggttgtttttacacactggaaacttcttgagggcaggggctgagtcccattcaccactgtatccaccagacctgaggaccagtaggtactcactgaatgtctgctgaacgaattcatttatttccattgagctcattaggcctctctcttcctcataattaggaagcagaaaggttgctttttcctttaacaatccacctttggaagctgatggcaagagctcagcttttgcaagcagaaggcagtccagctagattcctggggcacatgactgcattnnnnnnnnnnnnnnnnnnnntcatgcatgctcaaggaggtgcatttaaaggagannnnnnnnnnnnnnnnnnnnnnnnnnnnnnnnnnnnnnnnnnnnnnnnnnnnnnnnnnnnnnnnnntaagcccaggagtgagcctcgtccgaattnccacccaggcctcgcttcctt

SEQ ID NO: 151359 - DNA, 985 bp, Homo Sapiens
atgacaccaggcttgggggattttcttccggccagttcatccaggaagagctggcagtcacagacggctgcatatgcgcgctgccatcctttcttcaccccccgtgggcttttggaccttgaacatggcctttgtaggctgttccgatgcctcgctgcacgtccacgccccagaggcctcttggactgctcgggaggtattgggcacacctggggggcaccgtctttgcaggacacgtggcaagcaaaggaacacacctcgccaggcgtagccctgccggatcagcccaaccatcagggaggtgcagtggctgcactgagtagggctggagaaggacttgatgctgaactggtgagcttttggcttcggtccagccagagccagggcctgcgtggtgggcaacggcacagcggatggcctctgcgggggccgagccatgtcctcctgctgctctgatgcagccacagacatcgacggggacgcttctggcttcggagcttgtgtttcttgctcactagctgagctggttctaaatgtcaggtcatgtgcaagaggagcagtgttgaaatactcaaaaatggaatcctgaaaatctggaagtttgagcccagtatctgctctgaatttttcttccatctttttcttcaaaatttccatttcttctaataattctctgtttttggcttcggaatcctttagtttgctttccaaggtgaggttggcgtccttgaccttcctgagctcctcctggacaagctgcttggcccggatctccgcctccagggccgactgcagctccagccgcgcggacatgtccagcttctggctgcggcgcaccttccacagcgggtccagtgttcttgaccccagactagaactcctcaaagcctcgagctcttcggtcatcttggaagcaagagcttgaaggtaaccccgggcattttccctcgtgccgaattcgccacccaggcctcgctaccttaga

SEQ ID NO: 151360 - DNA, 1031 bp, Homo Sapiens
acagtccaggaaatgccttccactgataggccaaggaggcccgaaccaggtaaaccccccaggaagtggagattccccaaacggaaaatttccagaaaatgggcgctcccagctctgtgctaagctggggacgaagtgtgagtgtgtctgcttgtccaacatttgcacaggcagcaaggcaaagcaggtgtgctcccaaaggcggagtctgaggaggggccggcagcggcaaaacggcagcctcaaacagacccactggtgccgcggcaacccagggccttttcagagctttcaaggcgatggagcgaagaccaagggtgcacatgcatgcaggcaggctgggaaggaagagcgggtggaggaagactgaggggaggctgccaggagaccgccatctgggagcagggccaagagaagctggcagcagttacacagcgcaaaataaaaggccttgggctggactcaggcggaaagaaagtgctggaggaaatgaaagaacaaagcgggctgtctgtgtgcccacgccgggccggtcactaccttttctgcctgacaagtgtacataaaacaattcccgaacagcacggagcatcagacacaactagaggtatggagggcaggaggtgggatgcggtggtgaggctggggctgggcagccggctttgtacaaggtggcacaaaagacgtacgcattccagttcttggaagctggcttccctcgagtctggagtgctgggtttgggagttttctattgcagtctttcaagtctgagttggaccccaggctggaggggctggttccacttgagttctgcgaaggaaatgggggggtgctgcaggtagtagaggaggacctggacctgcgccatgacgtcatgggaccagatgtccgcagccgaggtgaggtgtgctttgctctccacttctgagggtctcagtaacgtgggtccaaacacggtagccaggttgtgaagtgacattttgttgatgggctcctccctcgtgccgaattcgccacccaggcctcgctt

SEQ ID NO: 151361 - DNA, 1010 bp, Homo Sapiens
cgcaagcgcgccacgcccttagggcgggccgttttgatttcccgacttctccccccaaagtttggggggttcccaggggtttcccaaaaaggctgtttcccgaaagcgggggcgccccccccatgggctggccccccgtggggcctgtgcctttgctttcccaggtcctggaggaccgtggcagttcttggcttgtggagtgtgtgtaaaatctaaggcaagagtaccacgaggtcctgcggtgccagggagctcctggctgcagcctacctgcctggacacctgcttcggccacatcagtcaccctccaggaagcctggcccctcttgaaaagcccccacaacttgctcctaagagctgagctgcctccccgcgacccgggacacccagcgtggcatgtgcattcctcccccgttcagcctgtggtgtttcctcagcagcctgaccgcctcctcccccattctctcctgaccctctggctatctcgatagcaggtcacctgtgagtctttacactcaaaggaaatagaacagcagggaagggaactgaaaagcagtagaagaaacagtcagagatgcctcactgataggcaggaggccgaacaggtaaaccccagaagtggagattcccaaacggaaaattccagaaatgggcgctccagctctgtgctaagctggggacgagtgtgagtgtgtctgcttgtccaacatttgcacaggcagcaaggcaaagcaggtgtgctcccaaaggcggagtctgaggaggggccggcagcggcaaacggcagcatcaaacagaccactgctgccgcggcaacccagggcctcttcagagctttcaaggcgatggagcgaagaccaagggtgcacatgcatgcaggcaggctgggaaggaagagcgggtggaggaagactgaggggaggctgccaggagaccgccatctgggagcagggccaagagaagctggccctcgtgccgaattcgccacccaggcctcgctacctaggacc

SEQ ID NO: 151362 - DNA, 785 bp, Homo Sapiens
gggggaccctctggtttgcatttccatccccggccggagggttagggaaagttttcctgcccttaccttggacaggcttttaaggaccccagtttggcccaggcctttccccgggtgggagcccaccacagtgggtgccttgagaggctgcccagtgttttgaccttttacagagctgggggtgacgagaaatggttcctccgagggccctcggaagatttgatggactcaaataaccacgggcttgcagccctggacacaggacaggagaagccagcccctgaccacagatgagctggcagtggattcgaacagtgtgctcagtctcgtctgggcttttgtgctttctatgttgaagaccaaatcctttttctttgagaatgaaactaggctccttatctagactgtgaaggggcccgtgaggacacagagtgtgactggaaaggaaggtcccaactggccctcaatgtggccccagtggctgtttccctgcaagaagctccttcctccagctcaggcaccaacacacggatcacaccggcccagaaacaaagagcaaaacatgcttttcatcccacgtggaatacagtatgaacaaattactctcctttttctattagtgtgggtgaaggaaaaagactgttttcaaatgaagcttttctttttcccaatgattaatacagagtagattaacttaatttgtgctagactccaatttaattccagcaacagttcacaggccatattcacagaaaagttaatctgggcttcatgagaagtagcca

SEQ ID NO: 151363 - DNA, 1008 bp, Homo Sapiens
  misc_feature (58)..(58): n is a, c, g, or t
ggttcttgaaaagagggaaattccaagtttctctttttcagggaccagaggcattttncttgggccatggaccttctgactccctcccgagctttgcgggtggtctttctcatagggccttcccccacccggtgccagggaagtcctttcaccgtttccacagaagcactttggccgaaggagatgaccaccgagtgctggtccgaggtgaggattttagaaaggtgggctgcaaccgagtcttcatagaagagaatctgctgtacctcggaatcctcgctgaagtcttcggtgacggtagaggaggaggcctgccgggggagcttggcctcgtatgccatgacgctccacctgtccagcatcttggtgctggctctctccaacttctccaagatctgggggagctgggtgtcgtcatcgcaggctgagccccagcccagtactcgggccaagtcgttccctgtgccgagcggcagcactcccagctgacactgtttatgaaggttgaggctgtcgatttcggagaggacccagccaacacttccatccccgccacaaaccagaatccggaatgtgtcaaacttctggaataaccgtaagccgaggtgtgggcctccgttcatgaggtcgaagacctgggcggggtttagtagctgtttgaatcttctgaggaacttcacaccctggttgtccccactttttgaattgacgaagaccaacagtgggcttgtgcaagaaggaggacagctggccttccagaacccatcggagtcgatgctgttgagagccgtgggtgggatgactgacactttgcacaggccaagtgggcacttggtcagcaaggattctttacacgatgtgtgaaccatggccttgcaccagaggcagcgccagtcctgcaggcgcagcacactgccacaggtcttgtcgcacacagtgcacttggcgctcacaggtaggtttccttcccctcgtgccgaattcgccacccaggcctcgctaccttgg

SEQ ID NO: 151364 - DNA, 1405 bp, Homo Sapiens
  misc_feature (792)..(802): n is a, c, g, or t
  misc_feature (875)..(884): n is a, c, g, or t
ggggagatggggggtgcgctaacggtaggagtagaaaagcgcgtgggggacatcgagagagcggcgtggttggtgatcaataactgtggggtgaggggcatgaaatataatggcgctcgatagagactgggcggggcggtgctcggatagaatattaccgggagcgcgggctggtacgtagcggtgatttacggcgagggtcttgtgcagtgatatgatcaggggcgaggaatgtagtatacaatgaatagcgcgcgtgcggcgcggatcagcgggctcgggcatcatacacgtatgagtctagatgtatagcagcaagacgagtggcgcgtgcggtgttcacatacgagtgtgttcagagtttctgtacgcggtatttttgtgttgtgctgggtggcgttatagtagagtgggtgctccgctcaggcgttaatcataggagggccatgaacactgtctctgctggggggggcgcatagtcacggcgcgcgaggggagtaacggggttctgtgtgctcggcgcacaaattggtgtgtcgttaaatgttggggggcggattgatagggttgcatttcgggatacgtgtgtaatgcggtcaagcggataaagcgcgcggtgtctctaggaggtgatcgatcggtggcggactcttaggctcgggcagttgcggccgcgttatggttcctatcgggaggggggcggtaacggtcgttgttgggggtgaaagggtgaaaaatggggcgggggttagtgtaggagactgttcgccgcgtcctcccagcggcgtttcnnnnnnnnnnnttgctgcgcgctgtgagcataagggtgcggcctcatcgcacgcgataacgccgctcgtcgattcctctgggcnnnnnnnnnnaggagggtggttgggtttgggaggggtcgggcaccgttcaagcgaggcggggtctgggtttgcgcctggggtgggctaaggcgggtggtacgggtccccaaagatcaggactcgctcctcggtgagcggcggggccgccacccggtaaagcgggtgctcgagcagcctggccatgaggtaggcgtctccgccggggccggggggcgactctgaccgacgcgggccggggtgtcgcagcagcggccggtgcgcggggtcgtggggtcttagggcgccgggatcccgcccccgcaaggcgcgctcggccggctcggccgcgggcggcagtttctccagcgagtgggacgagaggttggaggaggggtcggagctgaagtcctgcaggatgcggagcgtgtgcttgttgggccagcccgcgtcgccggcggcggaggaggcggccgggggctccccggggcggccccgagcgcagctcccgcctggccctcgtgcgggattcgccacccaggcctcgctaccta

SEQ ID NO: 151365 - DNA, 486 bp, Homo Sapiens
ctggcaatccacgcatggcaagttccacattggtatcaaccggtacgagctgtactccagacacaacccggccatcgaggccctgctgcacgacctcagctcccagaggatcaccagcgtggccatgaagtcggggggcacgcagctgaagctcatcatgaccttccagaattacgggcaagcgctgttcaaacccatgaaacaaacgagggagcaggagacaccccctgactttttttatttctctgactacgagaggcacaatgcggagattgctgccttccacctggacaggatcctggacttccgccgggtccctcccgtggccggcaggatggtcaacatgaccaaggagatccgggacgtcacacgggacaagaagctctggaggaccttcttcatctctccagccaacaacatctgcttctacggcgagtgttcctactattgctccacggagcacgccccatgcgtggtatcagggcc

SEQ ID NO: 151366 - DNA, 857 bp, Homo Sapiens
aaggggagggaaaaattgtaaggttttggttccattcctccatccttttttgcttcgccggaatttcctttcaaaagttaattttccctggaagcatggcagtttcagccactttccctgttttctgtcccggtgtttttatagaattgatgcagatgtgtgatcagtttttcccccactggcttacagaccttgggagggcagacagaccctcatgtccccccagatatgtcccacactgatgggggaagcaatacacatttcctgaacggaatggagttgctagaatcgctacagactgcgcgttccactaaaaatcatctgctaaagcctggggaagccatcgcagaaaccaaggacagactttctgggtgtggcccttgtcacatggaccagtgtttctcaggactacacaagggaggattctgtgacttcccaacaagcgagggtttcagcctgttcactgccccactcagaaagctccaagcatccccgcaacaatccagccaggcacgtgttaccctccgctttcgtctctctcctcccttcatcttctcgtaaaggagtttcttgttccacttgcccaagcctggatagtcatgttccggatcaaagagatgctggtgcaactggaactctcgactgaactctgcagtgtcaggggtgttttctagacatccatcatctgctgcaaacagccaaaggtttttgaggaacggccaagacattcatcattattctaagagttaatttatcaaaaacaactaggcagccaaaggtcagaatctgttcacatcagtagtaacttagaacactagcagccaccttcccctcgtgccgaattcgccacccaggcc

SEQ ID NO: 151367 - DNA, 858 bp, Homo Sapiens
catctacatcagctgctttgtagcccataataatcctatggaaagaacagctgtcattcacaggaactccagtttacacgtgcacataagccatgcctgaggcctaacaggtaatgtgggtttttcgtctagcatcttctctttactctggatccttatcctcatctgaaaaatgggggacagacttctttgcaacaacatttatccagtctctgtccttgtagatatggattgacactcctccgctttcgtctctctcctcccttcatcttctcgtaaaggagtttcttgttccacttgcccaagcctggatagtcatgttccggatcaaagagatgctggtgcaactggaactctcgactgaactctgcagtgtcaggggtgttttctagacatccatcatctgctgtttttccaacaggacagggatttggagggtctgggtacccctgatcctcactaaagtccttaggaatgttgtctccagtcaactctgccacgatgttggggatgttgccaaaaggacccaaatgctgaagtccttcatgagctccaccttcaatgctctgggggcccacaagattcatggcctggtgagctggatattccactcggggcctggcaatgcccaattgctccataacaccatgaagcagcctctggatatctgcttctgagacccggtcaggggtccgggggctgtaagcaaatgctggagtccatccagatgccagccaaaacagtaggccagaatagcatggtatagaccatcctggagaccattgtcaaccgaggggcagcccgaggagcctactgcggtatgggccttggtgggggtcaggccaggaacgggcgaac

SEQ ID NO: 151368 - DNA, 953 bp, Homo Sapiens
ggtagcgaggcctgggtggcgaattcggcacgaggcaccgccttcacacgagtgcgctggaagtgcctggtcattgatgagatgcagcgcgtgaagggcatgaccgagaggcactgggaagcggttttcaccctgcagagccaacaacgtctgcttctgatcgactcgccgctgcacaataccttcctggagctctggaccatggtgcacttcctggtcccagggatctccaggccctacctgagctcccctctgagggcccccagtgaagagagccaggattactaccataaagtggtcataaggttacacagggtgacacagccatttattttgaggagaactaagagagatgtggaaaagcaactaacaaagaaatatgagcatgttttgaagtgtcgcctttctaaccgacaaaaagccttatacgaggacgttatcctgcaacctggcactcaggaggccttgaagagcgggcactttgtcaacgtcctgagcatccttgtgcggctgcagcgcatctgcaaccaccctgggctcgtcgagccccggcacccaggctcttcctacgtggcggggccactggagtatccgtccgcatctctaatcctgaaggcactgggagagagatttctggaaggaagcagatctttctatgtttgatctcatcggcttagaaaataaaatcactcgtcacgaggccagagttgctgtctaagaaaaagataccgcggaaactcatggaggaaatctccacttcagcagcccccagcagcccgaccagcagcagcaaagctgaaggccagcaggttgtttcagcctgtgcagtatggccagaaagcccgagggtcgcacccgtggctttccccagcactcacccgccccccggacgccagccccccaccacggccctctggctggctccacaggggcccccgctttcaaggaaacgc

SEQ ID NO: 151369 - DNA, 1581 bp, Homo Sapiens
taagggccataccagtaactgtcaggcccatgaccttattaatcacccaagatatgtctaaaattactggtctgtttctccttttgactacataggagaatgtccatgagtttaaagtccatgcaccaaggaagctctaacagatattgggtagcagccacctttccataccccgccctggattttcaaggaagctttttcactcccttatgcctttcaaacaaaagttcatcagtttgaagaaaaagaaatggctctaaagttaaagagtccccagagataactaacagtacatgaaataggccctatgtgggcaaaaggacaagctgcagaaccagttaagacagaagaggcagcccaaggtcttactaaattacagttttagcatagtgtagcacaacatgggcagccctttttgccatccaagcgacaattcagcaccatccacgtctggttcaaaagattactgaagtctgggctttcatctttggtaccacctcatgagttattcttggtttgcagtaggttcaaagaaacagaaaagctggtacctttgccttgtctgtgagtacaaacgctgggactctgattgctgcaaccattgaggccaattaaaattatactgtaaccacccaggaatgatgcatccaattcctaatttccagataatagcagccatgcccctacagaggcgggatcatccatcccccatcgtttaaggctttcgttttgttgtcctcagagtagaatagaacactgtgttcccacggacaaggaactcccagatgaccccatggtctacatttggacagaattttaagtaccagatatgccaggcacagaaaagaggactgacctgtggccatcatgcttggagaagcttctgttttggcacacaaactagaaacttcttagtgtattctggttttagttccctttcctgagtgaagcagccagggagtgaccaggttccataagccctcaatctgatacttggcattaattctctccatggtcttcttccacccaagctacaattttcccttcccatccagggatggcatcatcatcatggaaaatctcctctttgacagtgccaaactcaggatccagtgctttgaagtgataccggtgatttccttcccgatcaatagctgctttaaaatcctttaacgtcacctcctccaacctctttggtatattgaccatgaagggcgtaagtgaccggtcagtgaaatagagcactttagtacaggtgctgctgacagttggagagctctgtgagtgaggcaactttgagttagggggccaggactcccggtattcactacctacttgagttctgggtgacttgacccgaacctttctttcttgtttcttctgcgtctccataacatgcaggcgctccatgaggctagaaatgccctgctccaagctgtcaatagtgtggtgctgaggatcgtggccactgaagctgttgcgcaggctgcggagagcatctcgaacaagctgcaggtcgctggtccctctgttgctgactgaagtagccctcgtgccgaattcgccacccaggcctcgctc

SEQ ID NO: 151370 - DNA, 987 bp, Homo Sapiens
  misc_feature (925)..(925): n is a, c, g, or t
aataaagaagggggccccacccagttggtcgggttggttttgaacccccgaccttaaagattcgccccgctttggccttccaaaggtcccgggaataccagggctgaagtccccaatgccgggcggtttaaccctaattttaaattagctggccagctccagatgcacccagaggtgcattggttttgtatgggatcaagtgctgtgagcccttttccaggtcaatcacgtagtccctctgctcatctgtgtctggttctaccagtatgttttcttgtcgttctctcactctcagaaacacgtaagaaatctagatctggtttgggaactgcccgaaagagggtccaccttctgtaagttagggggcatgtgcttcaagggcgacatttttcagataggactctgtgttcgccatgaactctctggcaaaggccaactcttccggcgagaggctggaaggctccccctcaggacgtgttttttccttctcaaggacatgaggggaaaaacttctctatcttcatgaggcgacaccgcaagtagctgctgaggacgtagcggatcctctccatctccatttggtggatgctgaccttcaggtcctcccttttggctctcctgagattttcttccatgtgctccagctgttccatgacacattctacaatctcaggcttgctctccagcagctcaggggcaaacttttcattcatccaggcctgctccaatctttcaatgagctctgcaggagttaggaccacttcctcactacccccatcagagtcctgtcccaggaaatccacttcttcggtcatcttctctgaaaccaggaactcggggacctgggagacagcgaggcactccacagcagccggcggtaaggacggggcgttcgtggggacgcagtcggggcaccaggaagcgngaagacagaggaacaaactgctcaaggacttgcccctcgtgccgaattcgccaccccaggcc

SEQ ID NO: 151371 - DNA, 559 bp, Homo Sapiens
  misc_feature (371)..(488): n is a, c, g, or t
gcggccgcccaagcccggctcccacgtcccgctctcggctccccggaggtcggagactttgaggtatctccacgtcaaaccttcatgaggcgacaccgcaagtagctgctgaggacgtagcggatcctctccatctccatttggtggatgctgaccttcaggtcctcccttttggctctcctgagattttcttcctattaaatgagaaattaaggtttataaaaaacatgatgttcaaccatcatcaccggcaacgttgaggacccagactatgtttcagtccaaggaaaacaaaaatatcatgttttatgcttgaaatggctacatctggtttctggtcacacagtggcatgataatggctcactgcatnnnnnnnnnnnnnnnnnnnnnnnnnnnnnnnnnnnnnnnnnnnnnnnnnnnnnnnnnnnnnnnnnnnnnnnnnnnnnnnnnnnnnnnnnnnnnnnnnnnnnnnnnnnnnnnnnnnnnntaccatgttgcctacagtggtcttcgaaatcctggcctcacgacatccccctgcattagcctccagaagtg

SEQ ID NO: 151372 - DNA, 1378 bp, Homo Sapiens
  misc_feature (890)..(898): n is a, c, g, or t
  misc_feature (951)..(1006): n is a, c, g, or t
  misc_feature (1047)..(1129): n is a, c, g, or t
  misc_feature (1230)..(1275): n is a, c, g, or t
gagcgggcctgggtggcgaattcggcacgaggcgtgtgtcattttaaggtggctcgggagcggcccggaggagccggcggcggtccgaggagcgaggtgaccgactcgggagccatgcctgcgctgaggtgggtggccgcacagccgccgtcaccgccaccgccgccggtgtggggtgggaggggcgggagacgccgccgtccgccgtgctccagggtgggcgccgtttcgccgtggactccgatcgttcgggacgagggtttcatcaccttaaatggttttgaaccaatgaaggtgtattcccttaaaaagacggacagcccatcgtgtgaactatagagtttgtggacagatttatattgggttcatagtggcgtcatgcacgcagactcctgcaagttcccctaagttcttagaggactgctttgccttttgatctgagagttgcaaagttccataaagaatggcccttgtggataagcacaaagtcaagagacagcgattggacagaatttgtgaaggtatccgcccccagatcatgaacggccccctgcacccccgccccctggtggcgctgctggacggccgcgactgcactgtggagatgcccatcctgaaggacctggccactgtggccttctgtgacgcgcagtcgacgcaggaaatccacgaagaatgtttctaaacgaagccgtgggcgccatgatgtaccacaccatcaccctcaccagggagggacctggaagaagttccaggcccctgaagagtgatccttgcgggataaggcaaggggcttatgaccaacgggggacatccaaaggcttgcccgggcaaaacttcggaaattggccggggggcaaacaattccccggtcttgccagcccgtgggnnnnnnnnncaagcggggacttcttacccctttttggccccaaaatttccttccaaaccctnnnnnnnnnnnnnnnnnnnnnnnnnnnnnnnnnnnnnnnnnnnnnnnnnnnnnnnnctttgcggggaaaaaaggggccacccgcgggggtttttcannnnnnnnnnnnnnnnnnnnnnnnnnnnnnnnnnnnnnnnnnnnnnnnnnnnnnnnnnnnnnnnnnnnnnnnnnnnnnnnnnngccatttctccccggtggggggggaagaaaacaacccctcttgggggcgcccctccccatatgtgggggatcttttttgggggcgcccccccaacacggcnnnnnnnnnnnnnnnnnnnnnnnnnnnnnnnnnnnnnnnnnnnnnnccaagagagccaccaagagggggggcgcccttttttgggggaggataattaccccaccgccggcgccgcccccaatatattttttttatgatcgcgggcgacg

SEQ ID NO: 151373 - DNA, 973 bp, Homo Sapiens
  misc_feature (82)..(82): n is a, c, g, or t
  misc_feature (154)..(154): n is a, c, g, or t
gtgccgagctgggaagggatcaccagggtggtttcatgccctgaccatagtgtggggtgaaggatgtaaagaattaaaatanactattttccatcaatgctaaagatttggttcagaagagggtcaaacaccagtgatttaagtcatctcaaanctccagtaaccagggtaaagcagacatttaaaaattgaggatgtttctgtatcaatgacagctattttgctattagactgggttggctccagcaagataagcaaatgaggctttgaatgtaaatttcaacatttttcataatctttttctgacttagcagggctagatgtattggctttctagctacccatggagaatttcaacttttgccttgtccctggaaaaggcctcctggggagctggctccaaggcaaacactcttgagatctcaatttccaagcacatacccaaataccaccctgcgttaaggaccagaagttttctaagatgaaagatttccttttcactccaattcacatccctttggaaaaggggtcttattacaaacttcaggggacgtcccacagggctggcaaggccactccctccccaccttcctccaagagtcacatttcccaacagttgttgtgactctgcttctaattggatagtgactgctttcatgattttaaccatctagtatcacatgctgctactggtgggcccaatagctcaaatttctagtttccagtggttttctagttcccattcaatggcccttgaaggaagcccagatgtccatccattcagatgaagaactgctccccaaaatggctcagaagctgttttcccaggcaggtctggaacgaagcctccaatgaatggcggagaatggaaagaaccaaaataaaaccacaaagcagccaatcatggcccctttccctcactccctcctgtcctgtcctcgtgccgaattcgccacccaggcctcgctacctt

SEQ ID NO: 151374 - DNA, 1089 bp, Homo Sapiens
  misc_feature (38)..(38): n is a, c, g, or t
  misc_feature (71)..(71): n is a, c, g, or t
  misc_feature (163)..(163): n is a, c, g, or t
  misc_feature (168)..(168): n is a, c, g, or t
  misc_feature (304)..(312): n is a, c, g, or t
gtggctgccctccgtcatgtagaggtgatgggcccgcngagttgtgttctgtccatggagaggctaagagngggtactttatctgcgcgcatgcgatgctcccctagggttgttagggtcaacagagtttactcggtggtccgtcgccgacgaggcacaatgnatggncccccggcgcggaaatagagttgggcggggtccctctggaccggggttttttcaagggctgttgtgcagacgggaaggcagggacgacgtttcgcgagttccccgcgggggagttgggcccggtcagcgttcccannnnnnnnncgacggggtggagaacgttccgggcgcggggcgtgcctgagggaggggagcggtacgtcggtgcgtttttgggagaccgggtgttgggcgcggccgggtgtggtaatttgagggggggtgccgtgcgtgatgggagcccttgcgtagagcggcggcggggccagggggcagttcgggcgtgtgccgcagttcctcgggcgggatgtcatggatggagcggcccgcgtccttcgcggtggccaccaggccgtcatgggccgggttcagcttcagggggcccagggcgtgggtcttgtaggcctcggtcaggtcccgtgagggcggtgggggcggagggcgtgccctcccgctttaggagcttggcctcccgacgcaggtagtcgtcctgtgcctccacgtaggaccgagggatcctttgtgtgatggacccgcggatgtggtgctgctctttgaggtggtgggggctgtgtcgctccggcgggatggcacggcccatgagaccttcgatgctggctgaggagatggctctgcccacgcggccctccatcatgtcataggtgcgcttgggggcggccgtctcatgggggggtcctgagctgcttctgccgtcctccttggagcactgggtcacagacatgccaccctcataggacaagacgtggcccttcttgccttcgtagatgacgtggcccttgggcaggctgtcctcccggccgcggtgcaagcgactcgggctgtcccctcgtgttggattcgccacccaggcctcgctacttt

SEQ ID NO: 151375 - DNA, 919 bp, Homo Sapiens
  misc_feature (37)..(37): n is a, c, g, or t
  misc_feature (54)..(54): n is a, c, g, or t
  misc_feature (64)..(64): n is a, c, g, or t
  misc_feature (88)..(88): n is a, c, g, or t
  misc_feature (105)..(105): n is a, c, g, or t
  misc_feature (264)..(264): n is a, c, g, or t
ttagtacaaactttcttttaaacccttctcaaggtancctggtatgtcatgagnaaatgcgctncaggggttctgccgtatcattctnccagatgggctcttcgncgacattaggaaatgtttcttttttctgtacgtcctgagattgctgcccattttgggagatttagaaagaataaacactactagtaaggtatatactgctgtcgctgcttcctgatgctgctgaaccagttctggatggggattcgctgggaggtgacnccgtggacagaacagtggcagtaggatgggatggagtcctgctgggaggcgatcccgtggacagtgtgctggcagtaggatgggatggattcttcatgggaggcgatcctgtggacagagcgctggcagtaggatgggatggattctccctgggaggtgaccccgtggacagtgcaccggtagtagcaggactgctctcactgccattgttgcctgtaacacactgatactcagtttgtgggcacgtgttccttctcatctgatctggagattcagagggtctgggcatctcttcctgaagtaagtttaactgcaagggtgagctgcttctcgaagtaatgaacgggtgcccctcgctttgtgcctcccacttttcctcctctctcctttggctggtgactgaagggggtgggtccagagttggactcattgctgacgacattgagggtgatatcgcagaagaggctgtcgcccccaggaatggacatggcaaaaacgatggcgacaacagaggacagacagcggggtcaggcaggaaaacggtcataaaagtatccaagtaaggaaaagggaaagctgggtaaggctgcaagccctcggacaagggcggcccatgcaggcccctcgtgccgaattcgccacccaggcctcgctc

SEQ ID NO: 151376 - DNA, 1043 bp, Homo Sapiens
  misc_feature (134)..(134): n is a, c, g, or t
  misc_feature (241)..(241): n is a, c, g, or t
  misc_feature (370)..(370): n is a, c, g, or t
attttcttttgccgggaacttctcaaaagggggtggttttaaaccattaatttttcccaaaattattgggaacctttttttcccaggtaaattgtgggctgtccaattcccattcccaggaggccccccaggancccccctggggcctttccacttttctcccgggaaagcagtcccactggtcctggagaaatgggacattttctccctcccactgtgtgggaaggtagggggctctganccctgcatcttttctttcacgttctcaaagggaggggagagggtctgggtcactgcagcagccagacagacattagcaaagttctgtggggagagagaactgatctcggggtccgttccagattttctnccaggttcatgtaaacaagaagggagccagcagagaacgggagagcacctacaacagtgagggaaacccctcgataaagggcaaggaacccttcctgttggtaaatagtagaaaaagcatggaggagccccctgtacgatggttccagtatgttctgcatgatcaaccgggttttgatgaggtctgtaggatatgttacaatggtggaaaccatgcctgcgagactcccagccatgatggagctccactgggaaatgtggcccaggtcatctgtgaacagcacaacaaatttgcggtaggcggcgagctgcacggcgctgcaggggaagaggcgcaggcacgccaccgcgttccccttccacagggcccggagcccctctgcccgccacacccggtgccctgtggcccacaggtccccgggcgtggcctcgcacgacgccaacctgggccagcacggtggcgagctccaggggcgcggtgaggctgaggctgagcgtccccgccagcccagcgcacagcagcctttggccgcctgtcagtcggccgtcccgcctccacgtagccattgagccccgacccgggcccggaagaccgcgtggctcgggcctggggctctccggccacgggcggaggcggccctcgtgccgaattcgccacctcaggcctcgctacc

SEQ ID NO: 151377 - DNA, 983 bp, Homo Sapiens
  misc_feature (145)..(145): n is a, c, g, or t
  misc_feature (934)..(936): n is a, c, g, or t
  misc_feature (946)..(946): n is a, c, g, or t
  misc_feature (969)..(969): n is a, c, g, or t
gccttcagggtgaggagatcccagtgggagaggccaccagtcagacagcgtttccgcgtggcttgcatgagaagcagagagaagaggatggctaaggccaagccatggcccacggctttccagtaagcttggtacacgtgcaagnccacggcgccctctttcttgctttcttcctgcagcaggcgaccagatgtgctttgctcctccttccagcccctccttttttttctctgggttctgtactgactgggctgtggttgagtcagactcttgtccattctcagccccaggctttggggacagcttgtaccagtggcagaatctcagagggaggtccagcccggatgaggcgcccggcctccatcagcagcaccgcgtcagccctctccaggtactcagtgcggtgggtgcagagcagccgtgtggtgtagctcagcatgcccaggatgcacctgtgcagcaggtggttggccacatctgcatccacagcggccagagggtcatcgaggagatagagctccttttcctggtagacagcacgagcaagggcaatccgggcacgctgtcctccgttaagggtgacacccttctcccccacctctgtctggtctccagcaggcaggatactgaggtcatcattgagggcgcaggcttctagcacctccttgtacagctgtgcatcaaatgtcttcccaaagaggatgttgtctcggatggtggcaaactggatccagggttcctgggtggccaggccaaagcccttggacagcccccgcattgccacatgcccacgcagcctgtggagctctccagcgatggcagccagcagggagctcttcccacagccgaccttccccacgatgcccaccagcataccctttcacttcgagatgaccctcgtgccgaattcgccacccaggcctcgctacctagnnnctgaacggcngccgtgaggcgctttcttcttcncttcggggtgcgcg

SEQ ID NO: 151378 - DNA, 1084 bp, Homo Sapiens
  misc_feature (751)..(759): n is a, c, g, or t
  misc_feature (873)..(881): n is a, c, g, or t
  misc_feature (942)..(950): n is a, c, g, or t
ggaagcgaggcctgggtggcgttctcggacgaggctgacttccccccaccagaggaggcttttttctctgtggccagccctgagcctgcaggcccttcaggctccccagagcttgtcagctccccggctgcttcgtcctcctcagctactgctttgcagattcagcccccgggtagcccagaccctcctccagctccgccagccccagctcctgctagttccgccccagggcatgtggccaagctccctcagaaggaaccggtgggctgtagcaagggtggtgggcctcccagggaggacgtaggtgcgcccctggtcacgccctcgctcctgcagatggtgcggctgcgctccgtgggtgctccaggaggggctcccaccccagcactggggccatcggccccccagaaaccactgcgaagggccctgtcagggcgggccagcccagtgcctgccccctcctcagggctccatgctgcggtccgactcaagggctgcagcctggccgccagtgaaggcctctcaagtgctcagcccaacggaccgcctgaggcagagccacgggctccccagtcccctgcctcaacggccagtttcatcttctccaagggctctaggaagctgcagctggagcggcccgtgtcccctgagacccaggctgaccttcagcggaatctgggtggcagaactcccggagcatctcagaagcagggggcacccccggggccccaaagaagccacctaaagggtnnnnnnnnntgggggccccgcaaaggcggccgtggggaagatccccgccccccgggcttcccccagggtagccctggaaggttgaagcccccttactgggctctctcccacgcaagggggtgnnnnnnnnnaccgcccgagacagggactatagaaggggagcctgcggcgcgagaagtgcgaaggcggctnnnnnnnnntgtggaggggcgcatggaaagggagcagaaggggccgccccggggggacgtggagaccgcccgccaaggggagcgcgcgccgggcacacagcggggggtgcgccggtggggggccagattatatatccctcagg

SEQ ID NO: 151379 - DNA, 923 bp, Homo Sapiens
atgttttccacaattggtttgatgtgggaagtggccctccggaccctggggtaaaaggccgaaaaagtccagggattttaaatgctggggatagatttctctatcttcatgcttccccaggttgcaccaggtactgacaagggaataatctgtacagaaacagtactcttgatatgaggaggaagagtctggaccatttctagaaagcatcgaagtagccccaatgtccacacactagaagagttagtgctctcgtctgtattttcgtatgtaaaaggatcaattatataaacaacaattgcaggtggatacgtgactgcatgtgaatcaccatctgtggggattcccactttatcccgatccatcgtgctttcagacacatcaggatgcggctgagtgggaagtgaagatgattctccagaaatcccagctgtctgtagagctgatgtctgttgccctcctagctgaccactctgaactgtatttgcttgtgtagacatggatcctgcagcattactgttcatactgccaaagggtggaaacgaaggtagtttatttgatgatactccactattcaagttggaggatgatgaagatgaagttgaagctgtggtcaaagttgaattagctgtggcaactgaagtagatatggcaacacctgaagtcactgtcatagtgctgctcgctgcagatgctaaggtggcagatggagtattagcatttccagtatttgtcatctgaggtggagtaatcaaagactgacttgtaggggcaactaaatttggctgggaaagtagagagctgtccaatggcagggaagcaagataaggacctaggtcatatctgcagacttgtgcataaagcttgagtttagaaaatgcttcatcctcgtgccgaattcgccacccaggcctcgctacctt

SEQ ID NO: 151380 - DNA, 624 bp, Homo Sapiens
ttgtattttctaagtttatttttagttatttgtttttacagtcctctgcagcagggtttgctaaagtggatcaacagcaaagcccccaagtcagttcagcttctgacagtgaagacaagagactcaacaagtaacagaggaaactctggccccaggagccaggcaactgaccgcatctgcaggtgggaaccaaggccccaaactgcacagagcctcgggggcatgtttttcagagcaggcgaaattttggacacatgcggaacatcttatggtgtaaacagaggcactgctaaacaagccaagatgagcgctgccaggttcacacagtgtgctgctccaccagcctccattcacaatggcttacccatggaagaaaaacaccatcgccactggcagagggtctaaagttggcttgttatcctctccaaattcataatacaaaaagttagaagtggctaaaatgcaggcaacaataccaaaatatttttataaaaacaatggaaatgagaaagaagcttattaaatacattcattttgactttgttcctttatcaaatactcagaagtaaccaacattactgtggattgctgcagttcttcctcgtgccgaattcgccacccagg

SEQ ID NO: 151381 - DNA, 948 bp, Homo Sapiens
  misc_feature (862)..(906): n is a, c, g, or t
gtgctgggctttcccaggggtaccacctgttcccaagggttcgtcgcaaaccaccccagggggtgagggggacccgattctggggtggaatgaaggtccatgccaggggtcaccaattatggggggggttccagggttcttcagccagagaccaacttttcggatgggcagtgcagggcgctccctcctcgtgcctccagccggatctctttcagggccacaaggttctcccgtcagtttgctgcgccctttgaagactgtggcataggtgccctctcccagtttgtccagtttcacgtatgtttccagtttcccaaagccaatgtctgacagggaggcccggcgggacatgcggctgagcggcttgggcagatctgggctctccatctgtagcttctgtaggaattcctggggcaggcggatatccatgggcagagagagcctcttgctgacgtcctccatggagaagcggcgctggttctgccgccgctggaactgcacgccaggggagagctgccccggctcctccccgctgtctgttggggagaaggtgctgcactcctgcggggggtctctgccaagaggaccgagctgcaagttctcattccgccggttgtggagctggttgaattgctccgtgaattcagccaaggattcttcaatggtctcagtgcggggcactgacagggagaaacggcgcttaaagttcttcatcttgttcatgatcatgagggactgggcagccgggtcagcgcgtgtcctgggggccgcggtgcgcccgctccctcccgggcacggggcagcttcccctgctccggaaaggtgagcagttccccagagaagctgcaacctgagctggccnnnnnnnnnnnnnnnnnnnnnnnnnnnnnnnnnnnnnnnnnnnnntggcctcgtcttgagacgccacccaggcctcgctaccttgga

SEQ ID NO: 151382 - DNA, 1174 bp, Homo Sapiens
  misc_feature (17)..(17): n is a, c, g, or t
ttccccccttccccttntcccctataaaaaacaccactacacctcctaggtagcgaggcctgggtggcgatttcggcacgaggggccctgctggaggaggtggagttggatgagcggttggtgcaggtgctgcgcaagcaggcggggctgctgctggaagggggtcccttcagtggctttggggaggtgctgttccgggagagcgtgcccatgcacacctgtgcccgctacctgttcaccgcactgctgcctcatgacccggacctggcctatcgcctcgcgctgcgagctatgaggctgcccatactggagacagcatttcctgctggagaacctcatcccagcccgctggactccatcatgagcaaccgcttcccccgctggttcatccttggccacctggagacccgccagtgtgaactggcttccaccatgttgacggccgccaagggagaccccaagtggctgcacacggtactgggctccatccagcagaacatccactctcccggccctgctctttaagctggcgcaggacgcctgtaagacagccactccggtcacgcgccccaacatacaccacgctgttgggcctcccactggaagctggggctgcaggtgacgccggatgactctggaaaacgtaattgacctggccggcgcgagggcaaatgggggcgccctggcttgggtcaatttgttgcccacaggagaatctgggcccccgcccaaggcctcctggatgcaaataatcccaatggcccgaaaacccggggttaatttccccccttaattttccaacccccccaacttgggaaaagggcagcgccctaaccacatttccgtgtgtggacaaaggggaaccgggggccaaaccccaccccccaacggcctaatattttatgcgctgggcgcacactgtggccaagcttgtgcaacataaatatttcttccgccacagggcgaagcggaaaccttcctcggcgggccctgtgcccgccccacacaaaccttatttgcgccccctggcccagatgggcgcttttaattgaaaagggaaacccccttctcaaaacatctggccgccccttgggccccggtgccccctcggccccccttttggccgtagataaaaacacaccccactttcccggcgcttttccctcacggcgcg

SEQ ID NO: 151383 - DNA, 1094 bp, Homo Sapiens
  misc_feature (992)..(1018): n is a, c, g, or t
tcctgggttgcgttctttcgtccaggcccctcataggtctaggtagcgaggcctgggtggcgaattcaggcacgaggctgaatgaacacagctgacccctttcccgcgcactgaaagggcagagtaggccgaagggtccaagggccagactgcctcaccctctgccctaatcagcagggtgggcctgccttttgctaagcgatctctatgcctgggatgccctttattccaggaggcatcaagcctctaaagaatgtctcacctcctctgcccaaaaatgatgcctttctgtaggctggtgttgttgcctccctcccaggatccctttggtgagtatggtgttcaggatgcaccaccaccacctctagataccttcaggcaacacagcccagttttaacctctagtatccatgaccaaactatccctgacacatgaggacaggggcctcttctggctgtcaggagcaaagcctgaagacttggagctgcaggactggaagaacagtggagccccgtgggtctcaccctttaagggatgctgaggcctagagatgggaagtgacttgctccaaggtcacacaattggatagtgacatagcctagagccgcaaagtccctgaattcccaagcccctgtggctttctgggaacccaagaaatgggcacctgctgggagtccggggcacagcttttctcagctgtaattgctactccaaaacctcaaccttagggttggggcccccaactaagataagttcccggggtctgttggccagcccctgtccagtgcctggctcaagacactttcatagcccccctcttggccaatacctttgctgtccccctttttttggtccaccaggtccaaaccccctttagctcttgggggccccatcgcctcttctgtgggggaacctcccaactcgcggtaaaataaaggacaggtgacaaacgcgcacacttcgtgacagggggcccttactttcaaatttnnnnnnnnnnnnnnnnnnnnnnnnnnnttatatatttcccccgagctccaagaaacaaaaaagttcctgtgcacaccagggtgggaagacctttctggcctcc

SEQ ID NO: 151384 - DNA, 1130 bp, Homo Sapiens
  misc_feature (481)..(521): n is a, c, g, or t
acccggcgttatgacccagggggcccgtgtacaattacgcgggggtattcgccgccaccgtaggcgttgtgattaacctcggggacctttaggaaagtgtgagcgaaagtggccgggagccctttaggaacctggagggggttgtgaaactagaagggagggggtcctgggggtaaccacaagggggcgcgttttgtggggacaagggtgggcggtcgaggggcgcaccgggcttggggtggccagaaaaacgcgggggtagaaggtttgaggttctgaggggcagaagcacccgtgctgtggttttttcggagggcccgttggtttcccgagggggtggtgaaagccaatagattgtggcggaccccttcaaggataagccgggttaggtgagaggaatgaaaggccacgtcgggggcgcaaggttggtaatgcccataggaagattcaatgaaacaaggtgggaacatgcctgaaagannnnnnnnnnnnnnnnnnnnnnnnnnnnnnnnnnnnnnnnntttgaggatccgcggccccgtctcccgggctgcagctccctccgggtgccctgcagttgtcgtgcttccgtgaggagagggagcgtgttgggtgaatggggaccggcggtggatcacgcagctgcacttcgccttccaggatgagaactacctggtgagctccgggccggggtgactaggaagagggacaagagcccgtgctgtcactggacgaggaggtggggagaggaagctctaggattgggggtgctgcccggaaacgtctgtgggaaagtctgtgtgcggtaagagggtgtgtcaggtggatgaggggccttccctatctgagacggggatggtgtccttcactgcccgtttctggggtgatctgggggactcttataaagatgtctctgttgcggggggtctcttacctggaatgggataggtcttcaggaattctaacggggccactgcctagggaaggagtgtctgggacctattctctgggtgttgggtggcctctgggttctctttcccagaacatctgcagagggagtgaatctgccccctcgtttttgtaaagccacacaggcctcgctacttaggacctatagggcccgttgccgc

SEQ ID NO: 151385 - DNA, 1091 bp, Homo Sapiens
tcgtctgcccatggattttgtttgaaggagccacttttcgggcgggttttttcgcacttttggggagagtttttattcttgagggacacaccctcccccctccacagggggaggaggggttattggtttatagaaaagaaaaaagataagggcccccacccaatgtgcaaagaggcccctgccgaacgtccttttccttgaggggggaaaattggaacgaaggtctcacccctttggggaagtcttggaattccgcaaaccttttagtttccccccttgtccattggcttagaaagagggaggggccaattcgggggactttcttaagagggcccagggaggcgccccccaattccccctgttaagcttggcccggttttcattcatggggttccccagtcccccttcataaaggaccttttgttctttgggcgccaatcccccaaaaggttaccgaaatttcagcttcccggggtttccctttacttttccccccttcccaggagccatttccccaccttcaaactcccagcgttccccgttgggggtggaaggtccagagaactctctttcatcgctgaatgaatttgagcgggtgccgtggcttcttacttttaaataaggagaatttgcctttcggtgaagaggcttcggcctctgcctctccttccagagagcccaggctggcctttgaacttttcaggtcacctttggacccagaaattgatgcttctggtgagccagtgacaccacctttccctttaggtttggaaaaattaaacttgggcattttgatcttggactttttcagtttgacttcagactcttcccactcgccgtctccagcaccagcttggatgctggcctctgctttagggaagtgaacatccacccccatttctctgccaaccagctcacggccagagaaggtaaatttggggatcttcattttagggaatgttacttttccagatccgactttccaagtgaccttgaggcccagacacactcagcccaggagcctggagtacaatctgacctcctttccctcgtgcggaattcgccacccaggctcgtacttagaggttggg

SEQ ID NO: 151386 - DNA, 970 bp, Homo Sapiens
acgggggggacagtgggagcaacgggggcgggagaaggagggtgggtatggggagggaaatatacgacgtgcgcggggatggagggggaggggatattagaagacgggccacgtgctgtaagatggtagggaatcgttaaggccatcgaagacggcgaaagggggtgacaattgtccgccttgggcccttaagggaaaaagaattaggtggggtgcaggggtgccttccttctccccagccaggcctagaaaaaccaactaggaagggtgaagcatacaaaggaaacgcaagcaaaggccttttttaggcacaagggggtgggcaacccacttccaattaaagcatccatggaagataagaattttgttgtggaatcctgggaggagatgcactctttcacccaacctcttattagctgcttagaaaaaagaaggggtactgacaaaggaggtcccaaaagagaccccagaagcacacacccaccccaagcttcaggggttcttagggtcccagggtttccggtcaagagaaggatctgtgaacgtggccagggcagaggtgtctattggggtttcttaaatgttgggaagttatgccttgggacatgaacagacaagtttctcagcaaccatttcggtctggtggcccagacacacatgggattagaactgactcaaaagggaggacagcagatcccccgccggctcagcctgctcccctctcacccagaaccatcccctaccttcaaaaggaacacatgcaatttattaatagtgcagctatcagcgcccggatggtaaaaataactcccatcatcactgcacctccaaggaggggagcgggtagcacagatccttggtccaccagtgccacctccctctcctcctgctgtgtctgttggcttccccacaaaatgtaagttagttagccagcctcgtgcggaattcgccacccaggcctcgcgtccgt

SEQ ID NO: 151387 - DNA, 1144 bp, Homo Sapiens
gtgctgagcacagctgaaggtgccagaagcaaaggagaagaagatcaaggcccagggcaggccaaggaccaggctgaggcccagcagtgtcagcacatgtgaccacttttgggtgtgggggcgcagccgcaggatctgcaccaccatggtggctagcatggccatgttgaacagaaacaccaggctgaagaggcccaggttggtgatgtagctgaccagggagtcccggatccagcacatggaagggtagatgacgccctctggagtcctatgcacagccaagatgatggggccatagttgtccacatccaccagggccaccagcgtcaccagaaagatggggaagccccagcccatggcgctcagcttgagtaggtagccagggacataggtgccaaagacctccaccacgagtcggtagaggttgtacccctcgaggcccatccaggaaaggcaggtgagcagggagaagtgcaggaagatggcactggctcggcagccagcctcagagcctgtcagggccaccggctcgctgagcaggaagctcgtgtccagcaggaagacggccagcagcaggttcatgtgcaccttgatggtgtagtcccgaggtttcctcctggagcagaggtaggcggcaatggtgacaaggcaggccagggcagagacgacacagcccacgtaggagaggaggctcaggtagtgcttgtgcacggcgtccacctccaccgaggagaccatcagcactgcaaagtaggtcaagtggttgcagaagcaggatgtttgggtttctctcctgacggtctcacacccagcactgctccaatgccccgggctgctcaatgtggggtcttcaacccagaacacacattgcagagtcacattcttcggctgtagctggtgctggaaagtgagcaccacgggctccgtgaggttggctactttggtgttctgtaccacaatccccaagaccttctcacccaggacttggctggaattcttgtcctggaacagggcttggctgctgaagtccaccaggaggagtctcttctcagcctccccgctccggcctttcgtcctctggaagagtgttcgaggcagcagcaccgagcctcgtgcggaattcgccacccaggcctcgctcctt

SEQ ID NO: 151388 - DNA, 1076 bp, Homo Sapiens
  misc_feature (101)..(101): n is a, c, g, or t
aaccaagaggttttggtcccattccttgttgaaggggcagggaggggtttttgggggccattttttccctttttccccaacagggtcgaaaggttcaaacnaccaccccggggggggcccttggaagagggccctttcccaccacagggttggggagcttcacaggtgtggttcctctcactggtgcggggtgtggccccccaagcccgggcccggttaggcgggcccttttgggccccccagtgtggtaggagggtccccccgggcttggctgttgacaccaaggccggcttgtggggctcccggcccaggcaagcaaccattgggacccacctttcaatttccttttcagaggacttcgaatgacacgggagggcgggtccacacgggactttctgtttgcccaggccccaacttccccatcttctgcctcacccccaaggagtaaactctctccttctgaagacagggcaaggcagtgctttcctccagagttcacagctactttcttaataaacacatgctgaatggattcaagcaatgttggggtggacaccgactctgtccctccaatgcctagtctgccacctgcaccatacccagtggcatacagcttcccatcagccgtcacagcaaagagggtctgttcccctccgattaactgcacgggtctgagagttgcaagggcttcacagggagtgggaactttgacttttgcgccttcaatgcccccgagctggcccctgtgattatgtccccatccataaattgttccactgccaccagcagagagagtccagtcatctggtcgcctgttcatccactgcacaagttgttcgtcttgctctcttttaaaaatgtcatggctctcatgcagaacatccatgttttcgctgtctgccattaattcacgaattttcttagccacctcatcaagaaacagacggggcaacggtgttcttttgtcaagggccacagcaacacgggaggccatgcagtacctccggaaccaggcccacttgtgcgtccctcgtgccgaaatcgccacccaggcctcgctacctaggaccgtatat

SEQ ID NO: 151389 - DNA, 1282 bp, Homo Sapiens
  misc_feature (87)..(95): n is a, c, g, or t
aatccaggggaaaatcaggaggggggtgaaaaaagagtgtgtttctttctgtaaaaaacgcaggggtgggaattaaagtggccttannnnnnnnncggtaagcctaggcttttaggcccgaagaagtatccgtgtcggctgggttaaggtccctttataccttggtagaaagccataaaaatgaaaaattgagctcagaatcttcgtttggagaaaggtaagaaggggcattttagccacaaaggggtgtacaggaaaaagagagggtgctctccaggaaacgtgcaagggcaaaggaaacagaagcaggagggggcaggccctctggcaccaggtgggcctgttactctgatgaaatgtgctcccagctcttgacaaagggcagggtctcctatgcaggtagtttttttgccgcctcccattgtatcacccacaaggtaactgctatcaacagttcagattccttaataacatggcagcctgaatggttctgttactttcagagaaagtatgccttgcaattctctccccaactcaggtacaaacgcttgaatttcaaactcatactggtttacaccccagagtggaatgcttctcaagatttcctgagcagctagacacaggaacccacagccccagatacagaacaccagactttcagaagcagcaaagccctgtcctgctgggcatggaccaagcactatccgcaaatggtctccagtgagactaaggcaagctaacaaggaagaggatacagcacaactcaagccagattgcccacctcctccttcctccacatcctctttctagcaaaagcgaacactgcagataagagatagcccactaatgtagcagatacagtgtgcccaggggcatgtttccaagacacactctactaagcacagctctgggcagctccagaaccacatcccagataatactcaaatatcaaatagtagaaactgtcccacctgggcctctgtcaaagagagaagggattgttgttacgcttgacaggaacatgcaaatcccatttgaggagccacaatgagaaacagaaggtgaggagacagtgctaacagccctggcatctttctgccagtgaggaggtgggaacaatggcaatgcagctttcccctgcagcataagggacagagccacacgtaaggcacctggatttacagtggacgccagttctgagagtggccggtctggtgataaggaacccactccacaggaggaatggtctctcccctctctcggggctgaatccaaggccccc

SEQ ID NO: 151390 - DNA, 976 bp, Homo Sapiens
  misc_feature (78)..(78): n is a, c, g, or t
agctgccccagtctctgggtgggggaaggggggtttggcaccaagaagggcggccagccctgggtgccgggtgagcgncccgggctccacgtgggcccctgctgtccacggagggctggggcctccagcagggcaggtgctgagggagagagtgaagctggggcaacggagagaggccctgctggaggggggcctctggcagccggcaggaggggtgagcctgtgggtgggcgggctgcacaggcgaggagggcactgcagagagatgggcacgtggagggaccacggggtgacctcagggcagagatgagcaggtggcacgtgtctctgtccctcagtggccagcaggcgccagcacagagcggccccagccgtgcctgtgaactaagaaggggtccacagaagtgccgggcgggaggaaggagagctgtggagggaagggccgggcggcaacaacacaggttgggtgcggccagggcttgtaggtgcggcgaccatctgcagagggagcgtgccgggatagtgggtggcgtgcagggctggggcatcggctggcagcagcgttcaggtgtgacccgagttggcggtacgggcccagagcccctgcgtctccactgtgcccctgcggggaggggacaggagggcaagcggcctgcagacgcgtctggggcaggcctggcacggcgtgcgagggtccggtgggtggcccaggtggaagcggcagtgctggcacggggaggggaagttggcacgtggggtgggtggctgccgggcgcggtctagtggctgccgctggagtcagggcgaggctggctcgtggcgaggtatttggctctcatgctggaggtgtatgagggcggcggggactcgcgcccaatgagtggggtgttctcacagcgggggttctggaaattagcgttctggctcatgtactcagtgacccctcgtgccgaattcgccacccaggcctcgctac

SEQ ID NO: 151391 - DNA, 904 bp, Homo Sapiens
  misc_feature (84)..(84): n is a, c, g, or t
  misc_feature (86)..(86): n is a, c, g, or t
tgctctttgcttagagtttttgattggggttccttcccatgataaaggggaaacatcttgctagctgggtagacaaggcacatncnggttcaggatggcacgaacatctttacgaatgacatcctttggttctccaaccttgacgacagatagggggatgaaggaagatgcttcattctcagtaagatgatattcttcttcacttagcaaggtgaagagcaattttaaatattctagtgctttcatcaggacgcttgtattggtgtcaaaaaaacctcagggtaagccactttaagataagatccaggcacccaataactccttctttttcactctccaagtgatcaaccataacagcaagggctttgttatgatgctgaaagtctgagtgaaacatctcatcttgtaaccatttagccacacagctagacatttgagtctttagttgctcaatgtattcatcccgtggggtagtaaaattccactttagcaccttcaatcctttttcatctttcatcctttgctcttttccatttggaacaacaataaaaataggcccggatttgtcttcatcctcctttaagctggttttgcttggcatcttcttcccttgtgcactctttgctttagaggataatcctggagctttggccttttttggatcaggtttgggttctgtactgctggaaatacaatcttcagcaggtgctgatgcaggctggaatttggctggagcggaccctcccattggtttagaagttgctttagtgggtggagcaggcttggctggcatgttaactttggctttctctagcatggccaatacctgatctttagaagttggctttagtttcccagtagccttggccattttttccctcgtgccgaattcgccacccaggcc

SEQ ID NO: 151392 - DNA, 966 bp, Homo Sapiens
  misc_feature (135)..(135): n is a, c, g, or t
ccttgggccaggcttacaggttctggtccttccaggaggatctggtcctcctcccagcttttttcagtttcgcctcggttgtcacctttttccaggttgcagtttctggcggggcggtttcctcctctttccagntgctcctcaagctcctggatgttctgctgcatcttcttcttctccgcctgcaggtggtggcagcgctcctctccttcctctaccctggcttctaggtcatggcagatctcttctaattcctgcttcttggcggtcaggcgggcccggagctcttcagcctcggcacacaggtcggttttctgcctggagctgctcctgcagctgcaatttctctgccatgagctgagactgcagcgtctccatctccgtgagcctgttctccgcagccagctgcttctctctgaccttcaccagctcctcctccttggccatcatctcctcctcctgccggctcacctgcagcagcggcttgaccttggtgaagagccgccaccactgccagttccgcagcttcaggtaggcagcgcagttccgctggaggaccttcatggcggtaagctgctgctgccgcttggcaaatgctttcctggccaggtagcccctgcagcaggcctggaaccctatgatgacgtcggtgatcttcaggtctcgctcctcctccaggtgggccagcacaccggcacggaagaagactttgctctggccaatgcggtacagattgctgtcgagctccagggcttttatcatgagcacgcacgcctgcttcccgtccatgaaacccttgggaatggagtttggagtcaggatctcatatctctgccgaaactcctggaagaccaccctgttggggaagccctggcggcagatacggatgccctcgagaacaccgttgcagcgcagctggtccagcacgagatcctcgtgccgaattcgccacccaggcctcgctcc

SEQ ID NO: 151393 - DNA, 1081 bp, Homo Sapiens
gggaatggagttggagtcaggatctcatatctctgccgaaactcctggaagaccacccgtgttggggaagccctggcggcagatacggatgccctcgagaacaccgttgcagcgcagctggtccagcacgagatgcgggtccagcttgccggaccttcttctcgtggttggggatgatgcagcggacaaagttggggttcgtgttcctcagcgtagccatcagcttggccagctgctccttgtaaagctgccccacagtgcggaacatgcccttccgcgtcttgaaggccccgggcagtgcggtctccgacatgccggccacctggtccaggccgatgatgcggtccacatccttccacagctccgagacaaacttgtcagaggactggtggagcagtgtggcgatgttgtcattcaggggatccatgttcttcatcagccactcgtcagctttgtaatccaccttgccggcatagtggataatgcagaaatcagctttgtccttcagctgcttgggcttctggaacttggggtgggtgccctgctcctgcatcaccttctccacgaagctcttgtcggtggctttggggaaccagcactcctcgtccagcagggccagaatgcccggggggcctgctggcttctcaatgaggtcgatgcagggctgcaggtcgaggccaaagtcgatgaagttccactcgatgccctcgcgctggtactcctcctgctccaggatgaacatggtgtggttgaagagctgctgcagcttctcattggtgtaattgatgcacagctgctcaaacgagttcagatcaaagatctcgaagccggcaatgtccaggatcccgatgaaggaggcgccctgcctcttggtcttgtccagagccttgttgatgcgcagcaccagccagcggaacatccgctcataggtcgccttggccaaggcctcgatggcaaagtcagcctgctctttagtctgcgccttctggacgtaatcccgtcccaccttgatgcgcggggtgaggattcctctggtgaaatcggtcacattgataccccagagatgggacaccttttgggc

SEQ ID NO: 151394 - DNA, 968 bp, Homo Sapiens
cctgggtggcgaattccgcacgaggtttaaatataacaatattttattgacatatcctgaatgttctgtataaatataaagtgctaagtttccaacccctgcccacagggctaggaggaagcgggggagggagtgttaaatgtcagctgagcacaaataattttccagcgccagcacaggtgtgaaaggctcacagacagacacacgcaacatgacacacccatcacttcccaagtccccagcttccccaggaacacagggcttgggctccaggccctgggcagacgaacccacagacagggctcctggttgtcacagcttgttccttggagctctcaggctgccaagggcttcaacatggtggtggaccagggagagtccacggtatagcgtctagctgatttctgccagaggatggggagggaaagagcagacacacccttggttcccgaccccgaatgagggccagcctcagtcccccagcagaagagcaccaggtcggaaagaccagcatgccggcattcctagagccgccatgtgggggcttctgaaactctgaggaggtagcagccctgccagaggtgaggggactgtgctggcccagaggggagcccagcagtccacagtcagctcctgtcagcacagtggggcaggtaggcagaggggcaccacctcagtgacacagcacctggggtctcgaactgcagcagctgccccatgaaactgaagtttgggggagatgacccccccggcgctgccttaacgaaagtcgaaaggcctcgttccagcccgcaccacgggcgactcctgcatgaagggtatgccaaaacagaaagggtgggccagaaccgcctaaaataaccccggccctgggcaagcaggcaccaagccaacccagggcccctccggcctgggttctctttcacacccacatcgcattggggagatcactattgggcccccttccc

SEQ ID NO: 151395 - DNA, 939 bp, Homo Sapiens
  misc_feature (781)..(781): n is a, c, g, or t
aaggtagcgaggcctgggtggcgttttcggcacgaggcttggcaacttcagggatgcagttatagctcatgagcagcgtctccttattgcaaaagaatttggagataaagcagctgaaagaagagcatatagcaaccttggaaatgcatatatatttcttggtgaatttgaaactgcctcggaatactacaagaagacactactgttggcccgacagcttaaagaccgagctgtagaagcacagtcttgttacagtcttggaaatacatatactttacttcaagactatgaaaaggccattgattatcatctgaagcacttagcaattgctcaagagctgaatgatagaattggtgaaggaagagcatgttggagcttagggaaatgcatacacagcactaggaaatcatgatcaagcaatgcattttgctgaaaagcacttggaaatttcaagagaggttggggataaaagtggtgaactaacagcacgacttaatctctcagaccttcaaatggttcttggtctgagctacagcacaaataactccataatgtctgaaaatactgaaattgatagcagtttgaatggtgtacgccccaagttgggacgccggcatagtatggaaaatatggaacttatgaagttaacaccagaaaaggtacagaactggaacagtgaaattcttgctaagcaaaaacctcttattgccaaaccttctgcaaagctactctttgtcaacagactgaaggggaaaaaatacaaaacgaattcctccactanagttctccaagatgccagtaattctattgacccacgaaattcaaattctcagaggaaaatcagtgcagatactattggagatgaagggttctttgactttattagccggatttcaaagcatagggatggatgatcaagagatgttgccttaccagaaa

SEQ ID NO: 151396 - DNA, 1561 bp, Homo Sapiens
  misc_feature (293)..(368): n is a, c, g, or t
  misc_feature (1414)..(1414): n is a, c, g, or t
cgccacctcccccctgcctccctctccgctgtggtcatttaggaaatcgtaaatcatgtgaagatgggactcttggtatttgtgcgcaatctgctgctagccctctgcctctttctggtactgggatttttgtattattctgcgtggaagctacacttactccagtgggaggaggactccaattcagtggttctttcctttgactccgctggacaaacactaggctcagagtatgatcggttgggcttcctcctgaatctggactctaaactctcaccgaggactctctgcannnnnnnnnnnnnnnnnnnnnnnnnnnnnnnnnnnnnnnnnnnnnnnnnnnnnnnnnnnnnnnnnnnnnnnnnnnntctagagattttgaagtcactgagcgaggacgcagcctttgcattaggatttttaaagctgcccaggcctgctgaattagccaccaagtacgcaaacttttcagagggagcttgcaagcctggctatgcttcagccttgatgacggccatcttcccccggttctccaagccagcacccatgttcctggatgactcctttcgcaagtgggctagaatccgggagttcgtgccgccttttgggatcaaaggtcaagacaatctgatcaaagccatcttgtcagtcaccaaagagtaccgcctgacccctgccttggacagcctccgctgccgccgctgcatcatcgtgggcaaatggaggcgttcttgccaacaagtctctggggtcacgaattgacgactatgacattgtggtgagactgaaattcagcaccagtggaaaggttttgagaaggacgtgggcagccaaacgacactgcggcatcacctacccccgaggggcgccatgcagcggcctgagcagtacgagcgcgattctctctttgtcctcgccggcttcaagtggcaggactttaagtggttgaaatacatcgtctacaaggagagagtgagtgcatcggatggcttctggaaatctgtggccactcgagtgcccaaggagccccctgagattcgaatcctcaacccatatttcatccaggaggccgccttcaccctcattggcctgcccttcaacaatggcctcatgggccgggggaacatccctacccttggcagtcgcaggatttggctatgacatgagcacacccaacgcacccctgcactactatgagaccgttcgcatggcagccatcaaagagtcctggacgcacaatatccagcgagagaaagagtttctgcggaagctggtgaaagctcgcgtcatcactgatctaagcagtggcatctgagtgggcccagcacatggccatagaggcccaggcaccaccaggagcagcagccagcaccacctacacaggagtcttcagacccagagaaggacggtgccnagggccccaggggcagcaaggccttggtggagcagccagagctgtgcctgctcagcagccagtctcagagaccagcactcagcctcattcagcatgggtccttgatgccagaggccagcaaggctcctggctgtgccagcaggccca

SEQ ID NO: 151397 - DNA, 858 bp, Homo Sapiens
actctttgatggctgccatgcgaacggtctcatagtagtgcaggggtccgttggttgtgctcatgtcatagccaaatcctgcgactgccacctcgttacagccgtgtagtgccatggtcactgccacactgccaagggtagggatgttcccccggcccatgaggccattgttgaagggcaggccaatgagggtgaaggcggcctcctggatgaaatatgggttgaggattcgaatctcagggggctccttgggcactcgagtggccacagatttccagaagccatccgatgcactcactctctccttgtagacgatgtatttcaaccacttaaagtcctgccacttgaagccggcgaggacaaagagagaatcgcgctcgtactgctcaggccgctgcatggcgccctcggggtaggtgatgcgcagtgtcgttttgctgcccacgtccttctcaaagcctttcactggtgctgaattcagtctacagagagcaggcccactcagagcctgggcctcaccacaatgtcatagtcgtcaattcgtgaccccagagacttgttggcaagaacgcctccattgcccacgatgatgcagcggcggcagcggaggctgtccaaggcaggggtcaggcggtactctttggtgactgacaagatggctttgatcagattgtcttgacctttgatcccaaaaggcggcacgaactcccggattctagcccacttgcgaaaggagtcatccaggaacatgggtgctggcttggagaaccgggggaagatggccgtcatcaaggctgaagcatagccaggcttgcaagctccctctgaaaagtttgcgtacttggtggctaattcagc

SEQ ID NO: 151398 - DNA, 772 bp, Homo Sapiens
gcaggcattgttgttccactgcgggatgggatcaggcacagcagagaatttatctagaacagtctggttggcgtctaaaagttgtacgaggagtctgtacatacagccgttgtcgtgtcgggctcccctccagtcagagacacaaatctcaatcttgcctctatccatcagttctggccacagaccctcctcctctaggtccaagacgtgcttcttgcaacaccagctgaatgaagtcacgaagcacgtctgagaaggggccccaggcacggttgtcctgttttcctccaccacccagccgtccccaccgtgttgcaccatccactttcggaggccttcttggccgcaggggttgcgaataaagttgcgtccgatgggtctgcgcgcgcagaagcggcccagggggcaaggcctggcgttacgggcgggagactggcagctgcgggcgaggtgcagcagcgcgcggccggtggcgccgtggtcgcgggccaggatcagcagccacagggcctggccgtccaccagggctcgccagccccggcacacttggcggcagcgcccgagcagcgtgcgcggggggacgtggctcagcaccaccagaagcagctctgggggtagttggctcaggtccagcgcctcttcgggttccggctccggcgcggggacccgggcggcccggcccctggagaccgaggcgcccatggtccccccgccaggcccggctgtggcccggggcctggcggcgcctcgtgccgaattcgccacccaggcc

SEQ ID NO: 151399 - DNA, 1140 bp, Homo Sapiens
  misc_feature (673)..(673): n is a, c, g, or t
  misc_feature (774)..(774): n is a, c, g, or t
  misc_feature (779)..(779): n is a, c, g, or t
  misc_feature (972)..(972): n is a, c, g, or t
  misc_feature (1055)..(1055): n is a, c, g, or t
agagagagcaaagcttacactcctttcatacgcttttctgtaggcgatgttttaaatatgactgcttcctacatccttttcatgcaacacccaacacttataagcggaagaacacagaaacagctctagacaacaaaccttgtggaccacagtgttaccagcatttggagggagcaaaggagtttgctgctgctctcaccgctgagcggataaagaccccaccaaaacgtccaggaggccgcagaagaggacggcttcccaataacagtagcaggcccagcacccccaccattaatgtgctggaatcaaaggatacagacagtgatagggaagcagggactgaaacggggggagagaacaatgataaagaagaagaagagaagaaagatgaaacttcgagctcctctgaagcaaattctcggtgtcaaacaccaataaagatgaagccaaatattgaacctcctgagaatgtggagtggagtggtgctgaagcctcaatgtttagagtcctcattggcacttactatgacaatttctgtgccattgctaggttaattgggaccaaaacatgtagacaggtgtatgagtttagagtcaaagaatctagcatcatagctccagctcccgctgaggatgtggatactcctccaaggaaaaagaagaggaaacaccnggttgtgggctgcacactgcagaaagatacagctggaaaaggacggctcctctaaccatgtttacaactatcaaccctgtgatcatccacggcagccttgntgacnagttcgtgccctttgtgtgatagcacaaaaatttttggtgaaaagttttgtcaatgtagttcagagtgtcaaaaccgctttccgggatgccgctgcaaagcacagtgcaacaccaagcagtgcccgtgctacctggctgtccgagagtgtgaccctgacctcctgtctacttgtggaggcgctgaccattggnacagtaaaaatgtgtcctgcaagaactgcagtattcagcggggctccaaaagcatctattgctgcaccatctgactgggaagncttgggggattttttattcaagatcctgggcagaaaatggattctctcaaaatactgggggaagattattttctccagatgaaac

SEQ ID NO: 151400 - DNA, 1341 bp, Homo Sapiens
  misc_feature (127)..(127): n is a, c, g, or t
  misc_feature (162)..(162): n is a, c, g, or t
  misc_feature (378)..(378): n is a, c, g, or t
gggacaaatctggttggcggcattcccccggaagcagggtggaacgtggccttcgttggccagggatgagcgggcttcaccacagttcgggggcaggtggcggatcacggcccccccaggggcgccngtcagccctttctgctcatggccccgcgatgccangtcacagatggtctgagctgtatccaagatgccctctcgcactgtgtcgtaggccttggccacaccctcccccgcaggtcggcaggctgctggcccctgcgcagccctccgcgcagagccgcttatcctgcagggagcgggagacgggggctgccggggacaggatgtcatacacggtctcagctgtggcctggatagcctgtaccaaccggttgntgattccagggcggcagaggctgtggatgagccaaaggaggcagcccctcgctgcagcccccgcatgaggcggccatccttcctgtactgctcaatgggcagccacagcaggtcccggaacccttggaagagctggacaaccgagtgcatggggcccacgccttcccagcaggccgggccagctggttcttgcggatgtcctggcagccactggttgggggcatagcccagccccttgtccacacccaggaggccgtgcctgcaacagagccgctttaggttcagctcggagcagttgagttgggccaggccgatgaggaggccagcaaaagtgcccccctggtccatcgtgacgtgcttgccatggtaatccagccagatggggacctcagacgtgaagcggaactctctgaagtagatgggctgctggtcaggaggggaggggctgtgtccacctcctggggcctcctgcgaaccagtggtctctacgccttcggcctgcccttccagggggctgctgggctgggctcgagtctcggggcgagcctcagcggaggtctcccctgggaccacggggttgatgccggccaccagactagtgaagaagtccttgaggaagaagagggcatcctggtccacattgagccgcaggggcatcagcgagacgcggagacagcactcaggcccacccaggttggtagtgggggccacatgcagcgctttgatggtgagcatgttagagtgggcacgtcgcggcatccgctcactcgtgtgtaggtacaggaacttgttgatctgggaggaggcgagccggtctcggacctccagctcctgcacgatgaacacctgacgggacagcggtcgctcctccagctcctggctgggggccgcagggcctgtggctggctccgctgggtacacctcgtcctcgtgccgaattcgccacccaggcctcgcttcttt

SEQ ID NO: 151401 - DNA, 1811 bp, Homo Sapiens
taggtgcgttgactgtcactccgcgagtagcatgtagatcggtgtgttagctccagacggtggtcgtcggagaatgagaggagatgttataccacatcgtcggatggcgtatcaaggtgtggccctagatgacatgagcatgtaatgtgtttgtagtggggcgattggcggtgtaagatgagagtcactgtcgtgtctagccctgccactctccggcggaaggtgggtgggactcccttgtatgctgtgttcacatcgtctccatttgcttggtatggtggaggaccggataacagaacgggttgaggggtgcgtcaaagtgtagacgcggtgggcgttttgggaggccccccgggggactgtccccagagggcggcccctatcgtacgccgcatggtgttcctgtgtgagagggtgcaatcggcattatttccgcaaaggctttatgggaaggtgaatggtcccgcgtcgctgtcatgtaattgtacacatgctttgaagggcggggggaaccaccacacggagtgcggatggcgttatgatgtcgcgccccgcctgtgggggcaaggctgtcttccaggtttaatgcccaggcccaaattcttggctgtgaatgattccctgggctacccaagcctgtaacttggttggcttacccatacagttccgtggcaagtctcattccgtggactccggcgggcgtcgggagttattgagcctgaggcttggatggccagtcgtcccacggacctcgcatctagcctcatccttggccctcaggaagagggtgtcttggccatctgccgagcagatctccaggatacctggtctccgggtcattgggggtgcgcctcttcgagacataggccatcttcaagggacatgtgtgtggcctcgctgaagttccggggtgtggggccaggggaggaaggctaccgctgaaggggtgaggcaggaggtgagtcccaggccgaccgaggtcccaaccagtagagttcttgaaatacggtgagacgtccttcatatacttgacctccagcaccacctccttgcctgtcttcttgaggaccttgcaccgcctcatcatgggtagcagaggacaagtcttccccattcacagacaggatggcatcccccacaaaaagggcctctgtctggtcagctgccaatcccttgaagatcttggaaatgagaataggcatcttgttctcccgggccgcctttgatggtgatgcccagcccaccggcgtcggcccttgcgcaccgtcacgcggcgccgctggagcagtagcgcctctggcagctgcgggggcccggcagcccggctccgcggcgccgttgagctgcgcgggctcctgctcccgcggagcgccgggctcgggaccagggtcgccgtcggcggggctcacggtcagcacgtcctccgccagactcagcagcacccgctgccatcgctcgccgccggcccccgagcccgccccggcgcgcagctccagcagcccggtgcgcggggcgcgcctgccggacgccatcttcgcttttgttcccccgggccgccgcgcatcgccctgtcccgctttgcccagcccgctccgaccaagcgcccagggcagagggcagcgggggcccggctgggccagccgccaccctaccccggccgctgggggaggagctctgggggcggggctaccctggggtgtggccagtgctggggagggggcctcgggcaaatgcaggaggccggggcggggcccgggagccgagggccgccgtgtgggactacccctcgtgccgaattcgccacccaggcc

SEQ ID NO: 151402 - DNA, 982 bp, Homo Sapiens
ttagggtgtccccaaaaggcctttctggcctcattgggaaatggggtttcaaaatccgggtggaagttctgccacccttctttaaaaggggatttatagcctgtttattaataaaaaaggagttcttcggttttttctagggggaaagccgttttcagtgatagggttctttggaatccaggatctcccaatgggattttaattctgcagcatcagggatcatcaaatgggatttgaatttcacggtggccaagtccttttctgcttcatccaaaaaagttaagtttgttgataagctctgtaattttagctgccttttcttcttgggttcactctgttctcatcatcatcttcattatcttcttggaagtcatctaaattgccaatgtcagcctgcttcatactcatcaaactagccaaactttgcatgtcttcatctgtgggcttttccttccctcagaaaaatgcaagataatgaaaactgaagagcggcagatacaacttttttagataatggcttgaattttaacttgacatcagtctgagttggcatagggcttgcatactgtttcatattgatgctgctagtagcaagagctttccttcgaccagaaggggattcattttctatgacaaatgtccactctttgtcttcaaattcttccgcatgaggatccttaaaaagtgttacagtgatttcaatgttttcaggaacaggccacacaacaacaccacgatagggattttttattccaggttgccagctatgtgccttagaagacttccttcggcttcttctggtccaaactaccaccagtttatctggttgccatttcttcgtacactcaaccatgagctcctggtaggaggccacaaactggaacttggatgcatgttttcccacacgctgcagtctcttccaaactgaagccatgatgatcagtcaagacagtggagcgccacccaggctcgctcctagacc
